United States Patent Application Publication US 2018/0126003 A1 - sequence listing, part 19

SEQ ID NO: 31361 - DNA, 270 bp, Artificial Sequence
  derived and/or modified sequence
atgtgcgacaggaaggccgttattaagaatgcggacatgtcagaagagatgcagcaggattctgtggaatgcgcaacacaggccctcgagaaatataatatcgagaaggacattgcagcccacattaaaaaggagttcgataagaaatataaccctacatggcattgtattgtaggacgaaacttcggctcatatgtcacacatgagaccaagcacttcatctacttctatctaggacaggtcgcaattctgctatttaagagtggttag

SEQ ID NO: 31362 - DNA, 270 bp, Artificial Sequence
  derived and/or modified sequence
atgtgtgaccgcaaagcagtgataaagaacgctgatatgtcagaagagatgcagcaggattcagtagaatgcgcaacccaggccctggagaagtacaacattgaaaaggatattgcggctcacataaagaaagagttcgataagaagtataatccaacatggcactgcatcgtagggcggaacttcggttcctatgttacacacgaaacaaaacactttatctacttctatctgggccaggtggcaatactcctgttcaagtcgggatag

SEQ ID NO: 31363 - DNA, 270 bp, Artificial Sequence
  derived and/or modified sequence
atgtgcgaccggaaggctgtcatcaaaaacgccgatatgagcgaagagatgcagcaggactcagtggaatgcgcaacccaagctcttgagaagtacaacattgaaaaggatattgccgctcacatcaagaaagagtttgacaaaaagtataatcctacatggcattgcattgtaggaagaaacttcggctcctacgtgacgcatgagactaagcactttatctatttctacctgggccaagtggcgatactcctgtttaaatcaggttag

SEQ ID NO: 31364 - DNA, 129 bp, Artificial Sequence
  derived and/or modified sequence
atgtgcgatagaaaagctgtcattaaaaacgccgatatgtctgaggagatgcagcaggactccgtcgaatgtgctacacaggccctggaaaagtacaacatcgaaaaggatatcgctgctcatatatag

SEQ ID NO: 31365 - DNA, 270 bp, Artificial Sequence
  derived and/or modified sequence
atgtgcgacagaaaagcagtgatcaagaatgctgatatgagcgaagagatgcagcaggatagtgtcgagtgtgccacacaagcacttgagaaatacaatattgagaaggacatcgccgctcacattaaaaaagagttcgacaagaaatacaatcctacgtggcattgcatagtcggacgcaattttgggagttacgtcactcacgaaactaagcactttatctatttctacttaggacaagtggcaattctgctgtttaagtcaggctag

SEQ ID NO: 31366 - DNA, 270 bp, Artificial Sequence
  derived and/or modified sequence
atgtgtgacaggaaggccgtcatcaagaatgctgacatgtctgaggagatgcagcaggacagcgtggagtgtgccacccaggccctggagaagtacaacatcgagaaggacattgctgcccacatcaagaaggagtttgacaagaagtacaaccccacctggcactgcatcgtgggcaggaactttggcagctatgtgacccatgagaccaagcacttcatctacttctacctgggccaggtggccatcctgctcttcaagagcggctag

SEQ ID NO: 31367 - DNA, 129 bp, Artificial Sequence
  derived and/or modified sequence
atgtgtgacaggaaggccgtcatcaagaatgctgacatgtctgaggagatgcagcaggacagcgtggagtgtgccacccaggccctggagaagtacaacatcgagaaggacattgctgcccacatctag

SEQ ID NO: 31368 - DNA, 270 bp, Artificial Sequence
  derived and/or modified sequence
atgtgcgaccggaaggccgtgatcaagaacgccgacatgagcgaggagatgcagcaagacagcgtggaatgcgcaactcaggcccttgagaagtataatatcgaaaaggacattgccgctcacattaaaaaagaattcgacaaaaaatacaacccgacatggcattgcattgtcggtcgcaacttcggctcatacgtgactcatgaaaccaagcattttatctatttttacttgggccaggtcgctatcctattgtttaaaagcggatag

SEQ ID NO: 31369 - DNA, 270 bp, Artificial Sequence
  derived and/or modified sequence
atgtgcgaccggaaggccgtgatcaagaacgccgacatgagcgaggaaatgcagcaagattcagtggaatgtgccacccaggctctggagaagtataacatcgaaaaagacatcgcagcgcacatcaagaaagagttcgacaaaaagtacaaccctacgtggcattgcatcgtgggcagaaatttcggttcctatgtgacacatgaaaccaagcactttatctacttctatttgggacaggtagctatcctgctgttcaaatctggctag

SEQ ID NO: 31370 - DNA, 270 bp, Artificial Sequence
  derived and/or modified sequence
atgtgcgaccggaaggccgtgatcaagaacgccgacatgagcgaggagatgcagcaggatagtgtggagtgcgctacacaggcactagagaaatataacatcgagaaagacattgcagctcatattaagaaagaattcgacaagaagtataatccaacctggcactgcatcgtcggacggaattttggttcctatgttactcacgagaccaaacacttcatctacttctacctgggccaggtggctattctgttgtttaagtccggttag

SEQ ID NO: 31371 - DNA, 270 bp, Artificial Sequence
  derived and/or modified sequence
atgtgcgaccggaaggccgtgatcaagaacgccgacatgagcgaggaaatgcagcaggactccgtcgaatgtgccacccaggctctggaaaagtacaacattgaaaaagacattgcagcgcacatcaaaaaagagtttgataagaagtacaaccctacctggcactgtatcgtgggtcgcaactttgggtcctacgtaacccacgagaccaagcacttcatttacttctacttaggccaggtcgccatcctgctgttcaaatctggctag

SEQ ID NO: 31372 - DNA, 129 bp, Artificial Sequence
  derived and/or modified sequence
atgtgcgaccggaaggccgtgatcaagaacgccgacatgagcgaggaaatgcagcaagatagcgtcgaatgcgcaactcaggccctagaaaaatacaacattgaaaaggatatcgcggctcacatctag

SEQ ID NO: 31373 - DNA, 270 bp, Artificial Sequence
  derived and/or modified sequence
atgtgcgaccggaaggccgtgatcaagaacgccgacatgagcgaggaaatgcagcaagatagcgtcgagtgcgccactcaggctctcgagaagtacaacatagaaaaagacatagccgcacacattaaaaaagaattcgataagaaatacaatccaacctggcattgcatcgttggccgaaactttggctcatatgtgactcacgagaccaagcactttatatacttttatctggggcaggtggccatcctcctgtttaagagcggctag

SEQ ID NO: 31374 - DNA, 270 bp, Artificial Sequence
  derived and/or modified sequence
atgtgtgaccgcaaggccgtgattaagaatgcagacatgagcgaggagatgcagcaggactcagtcgagtgcgcaacgcaagctctcgagaagtataatatcgaaaaggacatcgcagcccatattaagaaggagtttgataagaagtacaatcctacttggcattgcatagttggtcgaaatttcggatcctacgtgacccatgagaccaaacatttcatctacttctatctggggcaggtggccatcctactcttcaaatctggctag

SEQ ID NO: 31375 - DNA, 270 bp, Artificial Sequence
  derived and/or modified sequence
atgtgtgatcgcaaagcagttatcaagaacgctgatatgtcagaagaaatgcaacaggattccgtggagtgtgctacacaggcactagagaaatacaacatcgaaaaagacatcgctgcgcacatcaaaaaagagtttgataaaaagtacaacccaacatggcactgtatagtcggacgcaatttcggctcctacgtgactcacgagacaaaacattttatttatttttatttgggccaagtcgccatcctgctcttcaaaagcggatag

SEQ ID NO: 31376 - DNA, 270 bp, Artificial Sequence
  derived and/or modified sequence
atgtgcgatcggaaagccgtcataaagaatgcggacatgagcgaggaaatgcagcaggatagcgtggaatgcgccacgcaggccttagagaagtataatatcgagaaggacatcgctgcgcacatcaagaaggaatttgataaaaagtataacccgacctggcattgcatcgttgggaggaactttggaagctacgtgactcacgaaactaagcactttatctacttctacctcggacaggtggcaatcctgctgttcaagtcaggatag

SEQ ID NO: 31377 - DNA, 270 bp, Artificial Sequence
  derived and/or modified sequence
atgtgtgacaggaaggccgtgatcaagaatgcagacatgagcgaagagatgcagcaggacagcgtcgaatgcgccacacaagcactagaaaagtacaacatcgaaaaggacatcgccgcacacatcaaaaaggaattcgacaaaaagtataatcccacatggcattgtattgtggggagaaatttcggatcatacgtcacccacgaaactaagcatttcatatacttctatctgggacaagtggctatcctgctcttcaagagcggttag

SEQ ID NO: 31378 - DNA, 129 bp, Artificial Sequence
  derived and/or modified sequence
atgtgcgaccgtaaggctgtgatcaaaaatgctgacatgtccgaggaaatgcaacaggactcggtggagtgcgctacgcaggccctggaaaaatacaacatcgagaaggatatcgccgcacacatctag

SEQ ID NO: 31379 - DNA, 270 bp, Artificial Sequence
  derived and/or modified sequence
atgtgcgacagaaaggcagtgattaaaaatgctgatatgtcagaggaaatgcagcaggactctgtggaatgtgcaacccaagccctggagaaatacaacatcgagaaggatatcgccgcacatatcaagaaagaatttgacaaaaagtacaatcccacgtggcactgtattgtcgggcgaaatttcggaagctacgtgacccacgagaccaaacatttcatttacttctacctgggccaggtcgctattctgctctttaaaagcgggtag

SEQ ID NO: 31380 - DNA, 270 bp, Artificial Sequence
  derived and/or modified sequence
atgtgcgacagaaaggccgtgatcaagaacgccgacatgagcgaggagatgcagcaggacagcgtggagtgcgccacccaggccctggagaagtacaacatcgagaaggacatcgccgcccacatcaagaaggagttcgacaagaagtacaaccccacctggcactgcatcgtgggcagaaacttcggcagctacgtgacccacgagaccaagcacttcatctacttctacctgggccaggtggccatcctgctgttcaagagcggctag

SEQ ID NO: 31381 - DNA, 129 bp, Artificial Sequence
  derived and/or modified sequence
atgtgcgacagaaaggccgtgatcaagaacgccgacatgagcgaggagatgcagcaggacagcgtggagtgcgccacccaggccctggagaagtacaacatcgagaaggacatcgccgcccacatctag

SEQ ID NO: 31382 - DNA, 720 bp, Artificial Sequence
  derived and/or modified sequence
ggcgggagcagggcggggcctgagcactaggcggcggcggctggcgtggggctgcttagatgcgccacggtttcggtagcgacggtatctctagccgggcctgagctgtgctagcacctcccccaggagaccgttgcagtcggccagcccccttctccacggtaaccatgtgcgaccgaaaggccgtgatcaaaaatgcggacatgtcggaagagatgcaacaggactcggtggagtgcgctactcaggcgctggagaaatacaacatagagaaggacattgcggctcatatcaagaaggaatttgacaagaagtacaatcccacctggcattgcatcgtggggaggaacttcggtagttatgtgacacatgaaaccaaacacttcatctacttctacctgggccaagtggccattcttctgttcaaatctggttaaaagcatggactgtgccacacacccagtgatccatccaaaaacaaggactgcagcctaaattccaaataccagagactgaaattttcagccttgctaagggaacatctcgatgtttgaacctttgttgtgttttgtacagggcattctctgtactagtttgtcgtggttataaaacaattagcagaatagcctacatttgtatttattttctattccatacttctgcccacgttgttttctctcaaaatccattcctttaaaaaataaatctgatgcagatgtg

SEQ ID NO: 31383 - DNA, 697 bp, Artificial Sequence
  derived and/or modified sequence
ggcggctggcgtggggctgcttagatgcgccacggtttcggtagcgacggtatctctagccgggcctgagctgtgctagcacctcccccaggagaccgttgcagtcggccagcccccttctccacggccttgcccactaggtaaccatgtgcgaccgaaaggccgtgatcaaaaatgcggacatgtcggaagagatgcaacaggactcggtggagtgcgctactcaggcgctggagaaatacaacatagagaaggacattgcggctcatatcaagaaggaatttgacaagaagtacaatcccacctggcattgcatcgtggggaggaacttcggtagttatgtgacacatgaaaccaaacacttcatctacttctacctgggccaagtggccattcttctgttcaaatctggttaaaagcatggactgtgccacacacccagtgatccatccaaaaacaaggactgcagcctaaattccaaataccagagactgaaattttcagccttgctaagggaacatctcgatgtttgaacctttgttgtgttttgtacagggcattctctgtactagtttgtcgtggttataaaacaattagcagaatagcctacatttgtatttattttctattccatacttctgcccacgttgttttctctcaaaatccattcctttaaaaaataaatctgatgcagatg

SEQ ID NO: 31384 - DNA, 814 bp, Artificial Sequence
  derived and/or modified sequence
gctgacagggagagcctggggccgggccgtgtggatgccatccccgagcgcggttcgcgctcggctgaggcgctggacaagtggcttgggctcccgcgcctcagtttctctctgtggcgccgcctacctcacagacttgtgagcactcactgacgtgggtagcgcccagggcctgcggggcgcaggagagctggagtcaggcggagaccgcaggctgaccccgcagcggccgggctgtcgcggcccccacctcaggtaaccatgtgcgaccgaaaggccgtgatcaaaaatgcggacatgtcggaagagatgcaacaggactcggtggagtgcgctactcaggcgctggagaaatacaacatagagaaggacattgcggctcatatcaagaaggaatttgacaagaagtacaatcccacctggcattgcatcgtggggaggaacttcggtagttatgtgacacatgaaaccaaacacttcatctacttctacctgggccaagtggccattcttctgttcaaatctggttaaaagcatggactgtgccacacacccagtgatccatccaaaaacaaggactgcagcctaaattccaaataccagagactgaaattttcagccttgctaagggaacatctcgatgtttgaacctttgttgtgttttgtacagggcattctctgtactagtttgtcgtggttataaaacaattagcagaatagcctacatttgtatttattttctattccatacttctgcccacgttgttttctctcaaaatccattcctttaaaaaataaatctgatgcagatgtg

SEQ ID NO: 31385 - DNA, 662 bp, Artificial Sequence
  derived and/or modified sequence
gatgccatccccgagcgcggttcgcgctcggctgaggcgctggacaagtggcttgggctcccgcgcctcagtttctctctgtggcgccgcctacctcacagacttgtgagcactcactgacgtgggtagcgcccagggcctgcggggcgcaggagagctggagtcaggcggagaccgcaggctgaccccgcagcggccgggctgtcgcggcccccacctcagagccactggtggccgcagaagacagtccacgtgtcttaaccagacttacaagactccaaagatgggtgccttgtatcaagcaggtgctcaacaaatgtctgctgaaaaaatgatgcagggtgcggtggttcacgcaggtaaccatgtgcgaccgaaaggccgtgatcaaaaatgcggacatgtcggaagagatgcaacaggactcggtggagtgcgctactcaggcgctggagaaatacaacatagagaaggacattgcggctcatatcaagaaggaatttgacaagaagtacaatcccacctggcattgcatcgtggggaggaacttcggtagttatgtgacacatgaaaccaaacacttcatctacttctacctgggccaagtggccattcttctgttcaaatctggttaaaagcatggactgtgccacacacccagt

SEQ ID NO: 31386 - DNA, 794 bp, Artificial Sequence
  derived and/or modified sequence
gggagagcctggggccgggccgtgtggatgccatccccgagcgcggttcgcgctcggctgaggcgctggacaagtggcttgggctcccgcgcctcagtttctctctgtggcgccgcctacctcacagacttgtgagcactcactgacgtgggtagcgcccagggcctgcggggcgcaggagagctggagtcaggcggagaccgcaggctgaccccgcagcggccgggctgtcgcggcccccacctcagagccactggtggccgcagaagacagtccacgtgtcttaaccagacttacaagactccaaagatgggtgccttgtatcaagcaggtgctcaacaaatgtctgctgaaaaaatgatgcagggtgcggtggttcacgcagtaaagatggggtttcaccatgttagccaggatggtcttgatctcctgacctcgtgatccgcctgcctcggcctcccaaagtgctgggattacaggcgtgagccaccacacccggccatataaggaaagactgcctcacctgagcaagaagcttcaccctggacaaaaaccccggggctcaacactcccaaatccacccggatccccatccccaaccccttaaaggatgtccgcattgcttggcagagaccccactcttggggataatcccttaattcgtaaccatgtgcgaccgaaaggccgtgatcaaaaatgcggacatgtcggaagagatgcaacaggactcggtggagtgcgctactcaggcgctggagaaatacaacatagagaaggacattgcggctcatatc

SEQ ID NO: 31387 - DNA, 719 bp, Artificial Sequence
  derived and/or modified sequence
agatgcgccacggtttcggtagcgacggtatctctagccgggcctgagctgtgctagcacctcccccaggagaccgttgcagtcggccagcccccttctccacggtgagaaactcggggggccagggggtgtcctcgctgccttatttcgccccactccggacttagccctccgcgtagcccgcgcttcctgagaagtggggtggggggcgtcgtcccgtggtggcgccggccggggtgggggcagttagtgcctggggggcgcggcccaactcaaccccttaccccaggccttgcccactaggtaaccatgtgcgaccgaaaggccgtgatcaaaaatgcggacatgtcggaagagatgcaacaggactcggtggagtgcgctactcaggcgctggagaaatacaacatagagaaggacattgcggctcatatcaagaaggaatttgacaagaagtacaatcccacctggcattgcatcgtggggaggaacttcggtagttatgtgacacatgaaaccaaacacttcatctacttctacctgggccaagtggccattcttctgttcaaatctggttaaaagcatggactgtgccacacacccagtgatccatccaaaaacaaggactgcagcctaaattccaaataccagagactgaaattttcagccttgctaagggaacatctcgatgtttgaacctttgttgtgttttgtacagg

SEQ ID NO: 31388 - protein, 113 aa, Artificial Sequence
  derived and/or modified sequence
MKLLTTICRLKLEKMYSKTNTSSTIFEKARHGTEKISTARSEGHHITFSRWKSCTAIGGRCKNQCDDSEFRISYCARPTTHCCVTECDPTDPNNWIPKDSVGTQEWYPKDSRH

SEQ ID NO: 31389 - DNA, 342 bp, Artificial Sequence
  derived and/or modified sequence
atgaagctcttgaccaccatttgcaggctgaagctggaaaagatgtatagcaaaacgaacacatcatctacgatcttcgaaaaggctaggcatgggaccgagaagatttccaccgcccgatccgaggggcaccatattaccttcagccgttggaaatcctgcaccgcgatcgggggtcgctgcaaaaatcaatgtgatgactcagagttccgtattagctactgcgcgcgtcccacgacacactgctgtgtaaccgagtgtgatcctaccgacccaaacaattggatcccaaaagacagtgttggcacccaggaatggtaccctaaggacagcaggcactag

SEQ ID NO: 31390 - DNA, 342 bp, Artificial Sequence
  derived and/or modified sequence
atgaagttgctaacaacaatatgtagactgaaacttgagaagatgtactctaagacaaacactagctcaacgatctttgaaaaggcacggcatggaaccgaaaaaattagcacagctagaagcgagggacaccatattaccttttcgcggtggaaatcctgtactgcaattggaggccgctgtaaaaaccaatgcgatgattctgaattccgcattagctattgcgcccggcctacaactcattgctgtgtaacggagtgtgatccaaccgaccctaacaactggatccccaaagacagtgttggaacgcaggagtggtatcccaaggactccagacattag

SEQ ID NO: 31391 - DNA, 342 bp, Artificial Sequence
  derived and/or modified sequence
atgaagttgctaacaacaatatgtagactgaaacttgagaagatgtactctaagacaaacactagctcaacgatctttgaaaaggcacggcatggaaccgaaaaaattagcacagctagaagcgagggacaccatattaccttttcgcggtggaaatcctgtactgcaattggaggccgctgtaaaaaccaatgcgatgattctgaattccgcattagctattgcgcccggcctacaactcattgctgtgtaacggagtgtgatccaaccgaccctaacaactggatccccaaagacagtgtaggaacacaggaatggtatcccaaagattcaaggcactag

SEQ ID NO: 31392 - DNA, 342 bp, Artificial Sequence
  derived and/or modified sequence
atgaagctgctgaccaccatctgcagactgaagctggagaagatgtacagcaagaccaacaccagcagcaccatcttcgagaaggccagacacggcaccgagaagatcagcaccgccagaagcgagggccaccacatcaccttcagcagatggaagagctgcaccgccatcggcggcagatgcaagaaccagtgcgacgacagcgagttcagaatcagctactgcgccagacccaccacccactgctgcgtgaccgagtgcgaccccaccgaccccaacaactggatccccaaggacagcgtgggcacccaggagtggtaccccaaggacagcagacactag

SEQ ID NO: 31393 - DNA, 342 bp, Artificial Sequence
  derived and/or modified sequence
atgaaattattgacaaccatatgtagactgaaacttgaaaaaatgtactcaaagacaaatacatcttccacaatatttgaaaaggcccgacatgggacagagaaaatcagcacagccagaagtgaagggcaccatatcacctttagtaggtggaagtcatgtacagcgattggaggtcgatgtaaaaatcaatgtgatgatagtgaatttaggatttcatactgtgcaagacctacaactcattgctgcgtgacagaatgtgaccctacggacccaaataattggatcccaaaggactcagtagggactcaagaatggtaccctaaagactcacgtcattga

SEQ ID NO: 31394 - DNA, 342 bp, Artificial Sequence
  derived and/or modified sequence
atgaaactcctgaccacgatctgccgactcaaattggagaagatgtactctaagaccaacaccagcagtacaattttcgagaaggcccgtcatgggactgagaagatctctacagcaaggagtgagggccatcacatcaccttttcgagatggaagtcctgcaccgccatagggggccgttgcaagaaccagtgcgatgactcggagttccggatctcatactgtgcgagacctaccactcactgttgtgtaacagagtgcgacccgaccgatccaaacaattggattccgaaggactccgtgggaacacaggaatggtaccctaaagacagccgccattag

SEQ ID NO: 31395 - DNA, 342 bp, Artificial Sequence
  derived and/or modified sequence
atgaagctgctgaccaccatctgccgcctgaagctggagaagatgtacagcaagaccaacaccagcagcaccatctttgagaaggcccggcatggaacagagaagatcagcacagcccggtctgagggccaccacatcaccttcagccgctggaagagctgcacagccatcggcggccgctgcaagaaccagtgtgatgacagcgagttccgcatctcctactgtgcccggcccaccacccactgctgcgtgacagaatgtgaccccacagaccccaacaactggatccccaaggacagcgtgggcacccaggagtggtaccccaaggacagccgccactag

SEQ ID NO: 31396 - DNA, 342 bp, Artificial Sequence
  derived and/or modified sequence
atgaagctgctgaccaccatctgccggctgaagctggagaagatgtattctaagaccaatacatcctccactatatttgagaaagcgagacacggaacagaaaagatcagcactgcccggagtgaagggcatcacattacctttagtcgatggaaatcctgcaccgcaatcggtggcaggtgtaagaatcagtgcgacgactcagaatttcgcattagctactgtgcacgcccaacaactcattgctgcgttaccgaatgtgatccaaccgatcctaacaattggattcccaaggattccgtaggaacccaggagtggtatccaaaggactcgaggcactag

SEQ ID NO: 31397 - RNA, 342 nt, Artificial Sequence
  derived and/or modified sequence
augaaguugcuaacaacaauauguagacugaaacuugagaagauguacucuaagacaaacacuagcucaacgaucuuugaaaaggcacggcauggaaccgaaaaaauuagcacagcuagaagcgagggacaccauauuaccuuuucgcgguggaaauccuguacugcaauuggaggccgcuguaaaaaccaaugcgaugauucugaauuccgcauuagcuauugcgcccggccuacaacucauugcuguguaacggagugugauccaaccgacccuaacaacuggauccccaaagacaguguuggaacgcaggagugguaucccaaggacuccagacauuag

SEQ ID NO: 31398 - RNA, 342 nt, Artificial Sequence
  derived and/or modified sequence
augaaguugcuaacaacaauauguagacugaaacuugagaagauguacucuaagacaaacacuagcucaacgaucuuugaaaaggcacggcauggaaccgaaaaaauuagcacagcuagaagcgagggacaccauauuaccuuuucgcgguggaaauccuguacugcaauuggaggccgcuguaaaaaccaaugcgaugauucugaauuccgcauuagcuauugcgcccggccuacaacucauugcuguguaacggagugugauccaaccgacccuaacaacuggauccccaaagacaguguaggaacacaggaaugguaucccaaagauucaaggcacuag

SEQ ID NO: 31399 - DNA, 717 bp, Artificial Sequence
  derived and/or modified sequence
atgcgggatgtcaccatatcaaagtccgaatatgctccctccgagaagatgattactaaagtgcaggacttccaagaagacaaagagctgtttcgatattgtaccctgcccgaaatcctgaagtatgtggagtgcttcacgggacctaacatcatggccatgcacaccatgctgataaataagcctccagacagcggtaaaaaaacttcccgccatcctttacaccaggatctgcactactttccctttaggcccagcgacctcattgtgtgtgcctggaccgctatggaacacatttctaggaataatggctgcctggtagttcttcctggcacgcacaaaggcagtctgaagccacacgactaccctaagtgggagggcggggtgaataagatgttccacggcattcaggactatgaggagaacaaagctcgggtgcatcttgtgatggaaaagggcgacaccgtgttttttcatccactgctcattcatggaagcgggcagaacaagacccagggcttccgcaaggctatttcctgtcactttgcctcggctgattgtcattacattgatgttaagggtacaagccaggaaaacatagagaaggaggtggtggggatcgcccacaagttctttggagcggagaactccgttaatttgaaagacatttggatgttccgggcacgcttggtcaaaggagaacgcaccaatctgtag

SEQ ID NO: 31400 - DNA, 717 bp, Artificial Sequence
  derived and/or modified sequence
atgagagatgtgaccatcagcaagtcagaatatgcccccagcgagaagatgatcaccaaggtgcaggacttccaggaggacaaggagctgttccgctactgcaccctgcctgagatcctgaagtatgtggagtgcttcaccggccccaacatcatggccatgcacaccatgctgatcaacaagcccccagattctgggaagaagaccagccgccaccccctgcaccaggacctgcactacttccccttccggcccagcgacctgattgtgtgtgcctggacagccatggagcacatcagcagaaataatggctgcctggtggtgctgcccggcacccacaagggcagcctgaagccccatgactaccccaagtgggagggcggcgtgaacaagatgttccacggcatccaggactatgaggagaacaaggcccgggtgcacctggtgatggagaagggggacacagtgttcttccaccccctgctgatccacggcagcggccagaacaagacccagggcttcaggaaggccatcagctgccactttgccagcgctgactgccactacattgatgtgaagggcaccagccaggagaacatcgagaaggaggtggtgggcatcgcccacaagttcttcggggctgaaaattctgtgaacctgaaggacatctggatgttccgggcccggctggtgaagggggagaggaccaacctgtag

SEQ ID NO: 31401 - DNA, 717 bp, Artificial Sequence
  derived and/or modified sequence
atgcgggacgtgaccatcagcaagagcgagtacgcccccagcgagaagatgattacaaaggttcaggatttccaggaagataaggagctttttcgctattgtaccctaccagaaattctcaaatatgtggaatgcttcacagggcctaacataatggctatgcataccatgctgattaacaaacctccagattccgggaagaagacctcacgccacccactccatcaggaccttcactactttccgttcagaccttctgacctcatcgtgtgtgcctggacagcaatggaacatattagcaggaataacggctgcctggtggttttgcccgggactcacaaaggtagtctgaagccccacgattatccaaaatgggaaggtggcgtgaataagatgtttcatgggatacaggactatgaggagaataaggcgcgagtacacctagtgatggagaaaggggatactgtgttcttccatccactgctaatccatggctccggtcagaacaaaacccagggattccgtaaggcaatctcatgccactttgcgtcagccgattgccactacatcgacgtgaagggaacctcacaggaaaatatagagaaggaggtcgtcggaattgctcacaagttcttcggcgccgaaaattcggtcaatcttaaagacatctggatgtttcgcgcaagactggtcaaaggcgagagaacaaatctctag

SEQ ID NO: 31402 - DNA, 717 bp, Artificial Sequence
  derived and/or modified sequence
atgagagacgttacaatctctaaaagtgagtatgccccttccgagaagatgatcactaaagttcaggatttccaagaagataaggaactgttccggtactgcaccctacctgagattctgaagtatgtcgagtgtttcaccgggccaaacatcatggccatgcacaccatgctcatcaacaagccaccggattccggaaaaaaaactagcagacacccattgcaccaggatctccactatttccccttccgccctagcgacctcatcgtctgtgcctggaccgctatggagcatattagcaggaacaatggatgcttagtggtgctgcctggcactcacaaaggcagtctcaagccacatgactaccctaagtgggaggggggtgtaaacaaaatgtttcatgggatacaggattacgaagagaataaggccagagtgcatcttgtgatggaaaaaggagataccgtgtttttccatcctctattaatccacgggtctggacagaacaaaacacagggttttcggaaggcaatcagctgtcactttgcctccgcagactgccattatatcgacgtgaaggggacgagccaggaaaacattgaaaaagaagttgttggcatcgctcacaagttctttggggcagaaaattccgtgaacctgaaagatatatggatgttccgggcacggctggtgaagggcgagaggacaaatctgtag

SEQ ID NO: 31403 - DNA, 717 bp, Artificial Sequence
  derived and/or modified sequence
atgagagacgtgaccatcagcaagagcgagtacgcccccagcgagaagatgatcaccaaggtgcaggacttccaggaggacaaggagctgttcagatactgcaccctgcccgagatcctgaagtacgtggagtgcttcaccggccccaacatcatggccatgcacaccatgctgatcaacaagccccccgacagcggcaagaagaccagcagacaccccctgcaccaggacctgcactacttccccttcagacccagcgacctgatcgtgtgcgcctggaccgccatggagcacatcagcagaaacaacggctgcctggtggtgctgcccggcacccacaagggcagcctgaagccccacgactaccccaagtgggagggcggcgtgaacaagatgttccacggcatccaggactacgaggagaacaaggccagagtgcacctggtgatggagaagggcgacaccgtgttcttccaccccctgctgatccacggcagcggccagaacaagacccagggcttcagaaaggccatcagctgccacttcgccagcgccgactgccactacatcgacgtgaagggcaccagccaggagaacatcgagaaggaggtggtgggcatcgcccacaagttcttcggcgccgagaacagcgtgaacctgaaggacatctggatgttcagagccagactggtgaagggcgagagaaccaacctgtag

SEQ ID NO: 31404 - protein, 88 aa, Artificial Sequence
  derived and/or modified sequence
MGNWGLGIAPWVDGESELEFRRLGMQGPLEALRRREWNTQRASFSFSFLIALSPHTVDYCHSYELFNRRWHGHVLATQRPSLFILMLV

SEQ ID NO: 31405 - DNA, 267 bp, Artificial Sequence
  derived and/or modified sequence
atgggcaattggggcttaggaatcgctccatgggtagacggggagagtgaactagagttccgcaggctgggcatgcaggggccactggaagccctacggcgcagagagtggaatacccagcgtgcttcgttttcattttccttcctcattgctctatctccccacacagttgactattgtcatagttacgaactcttcaatcgcagatggcatggccatgtgctcgcaactcagcggccctctttgttcattctgatgctggtgtag

SEQ ID NO: 31406 - DNA, 1434 bp, Artificial Sequence
  derived and/or modified sequence
tttcatttcatcaaaagtttattgagcatccagtatgtgctaggcactctgctggatgctagtaatacaaagatgaagatgaaaacaacacaaaaacaaaccccacttccttacttacccctccccacccccaatttaaggcagatttggcttaagcctggcaagctggcccctcagggattcagcaccagggtatggcatgttctcatctcaccctaaccttcacctgtgcatctcaaggctgaccagcaggtactccttatccaagtcctgctgcctcttccaccttcttgagaaacttttcccctacatgcattatctcattatggatgaggcacctgggaagtttaggggagctgcgaaggcacacctgctcaaatgagcctggggaagtgccgagggacagggagctgagacaggcatgctgtggggttcagggcagagggggcaaactagaaatgtcagtgcctttggggctgagacaaaacttgacctggtgtggaggtgatgggtaactggggccttggaattgctccatgggttgatggcgaatcagagctggagtttaggagactagggatgcaaggacccttggaggcattaaggaggagggaatggaatacacagagggcctccttctctttcagctttttaattgccctctctcctcacacagtagattactgccactcctatgaactgttcaataggcggtggcatgggcatgtcctggctacacagcggcccagcctctttattttgatgttagtgtgattagggagtctgccctttttctgtgccctgggacctgagcatgtgggagcagggcagatgggtggcaggaggccaggggttggatcatgttccccccaaatgctgggaagcaataagcctcctcctccccccaccatttctctggagattaggacttattctcacagctggaggaagctcaacaactttcctgaggacaatgattgtttgaaaggcttgttttgtaaggaagccaggaggaatatatgagtttgatgagctaaaacagttcctcatttggtctagttttcgggccaggggagtaagtgaaattcacttctctataagaataagcccatccatctcttttattcatgaacagagacagaaagagtgcttggcatggcatgcctccgagggaggctgtgggaggaggccaagctggcaggctcgggttctttgcccttgctagcgcccaggtcagagggaaaaggaatgtactcgtacccttccctcaccaccttgtaggtccccaggtaccaggtgcccagggaagaaggccttcacaatgatccccccagctcagaacagcccctgcacacccagtaaccggcatctggcttctccttagcttagtgcagctgtggattctgggaaagtggcctctctaatctgaacttg

SEQ ID NO: 31407 - DNA, 267 bp, Artificial Sequence
  derived and/or modified sequence
atgggcaactggggcctgggcatcgccccctgggtggatggagagagcgagctggagttccggcggctgggcatgcagggccccctggaggccctgcggcggcgggagtggaacacccagagggccagcttctccttctccttcctgattgccctgagcccccacacagtggactactgccacagctatgagctgttcaacagacgctggcacggccacgtgctggccacccagaggcccagcctcttcatcctgatgctggtgtag

SEQ ID NO: 31408 - DNA, 267 bp, Artificial Sequence
  derived and/or modified sequence
atgggcaactggggcctgggcatcgccccctgggtggacggcgagtcagaactcgagttccgccgcctaggcatgcaggggcccctggaagccctccggaggagggagtggaatactcaaagggcttcttttagcttttcattcttgatcgctctgagccctcataccgttgattattgccactcatatgagttatttaataggcgttggcacggccacgtcctggctacccagcggcctagcctcttcattctcatgttggtctag

SEQ ID NO: 31409 - DNA, 267 bp, Artificial Sequence
  derived and/or modified sequence
atgggaaactggggtctgggcatcgctccatgggtcgatggtgagagcgagctggaattcagacgtctgggaatgcagggcccattggaagcacttaggagaagagagtggaatacgcagagggcctcattttcattctcgtttttaatcgcactctctccccatactgtggattattgccactcctatgagttgttcaatcggaggtggcacggacatgtgctggcaacccagagaccttctctttttatactgatgctggtgtag

SEQ ID NO: 31410 - DNA, 267 bp, Artificial Sequence
  derived and/or modified sequence
atgggcaactggggcctgggcatcgccccctgggtggacggcgagagcgagctggagttcagaagactgggcatgcagggccccctggaggccctgagaagaagagagtggaacacccagagagccagcttcagcttcagcttcctgatcgccctgagcccccacaccgtggactactgccacagctacgagctgttcaacagaagatggcacggccacgtgctggccacccagagacccagcctgttcatcctgatgctggtgtag

SEQ ID NO: 31411 - protein, 330 aa, Artificial Sequence
  derived and/or modified sequence
MPGPATDAGKIPFCDAKEEIRAGLESSEGGGGPERPGARGQRQNIVWRNVVLMSLLHLGAVYSLVLIPKAKPLTLLWAYFCFLLAALGVTAGAHRLWSHRSYRAKLPLRIFLAVANSMAFQNDIFEWSRDHRAHHKYSETDADPHNARRGFFFSHIGWLFVRKHRDVIEKGRKLDVTDLLADPVVRIQRKYYKISVVLMCFVVPTLVPWYIWGESLWNSYFLASILRYTISLNISWLVNSAAHMYGNRPYDKHISPRQNPLVALGAIGEGFHNYHHTFPFDYSASEFGLNFNPTTWFIDFMCWLGLATDRKRATKPMIEARKARTGDSSA

SEQ ID NO: 31412 - DNA, 993 bp, Artificial Sequence
  derived and/or modified sequence
atgcccggccccgccaccgacgccggcaagatccccttctgcgacgccaaggaggagatcagagccggcctggagagcagcgagggcggcggcggccccgagagacccggcgccagaggccagagacagaacatcgtgtggagaaacgtggtgctgatgagcctgctgcacctgggcgccgtgtacagcctggtgctgatccccaaggccaagcccctgaccctgctgtgggcctacttctgcttcctgctggccgccctgggcgtgaccgccggcgcccacagactgtggagccacagaagctacagagccaagctgcccctgagaatcttcctggccgtggccaacagcatggccttccagaacgacatcttcgagtggagcagagaccacagagcccaccacaagtacagcgagaccgacgccgacccccacaacgccagaagaggcttcttcttcagccacatcggctggctgttcgtgagaaagcacagagacgtgatcgagaagggcagaaagctggacgtgaccgacctgctggccgaccccgtggtgagaatccagagaaagtactacaagatcagcgtggtgctgatgtgcttcgtggtgcccaccctggtgccctggtacatctggggcgagagcctgtggaacagctacttcctggccagcatcctgagatacaccatcagcctgaacatcagctggctggtgaacagcgccgcccacatgtacggcaacagaccctacgacaagcacatcagccccagacagaaccccctggtggccctgggcgccatcggcgagggcttccacaactaccaccacaccttccccttcgactacagcgccagcgagttcggcctgaacttcaaccccaccacctggttcatcgacttcatgtgctggctgggcctggccaccgacagaaagagagccaccaagcccatgatcgaggccagaaaggccagaaccggcgacagcagcgcctag

SEQ ID NO: 31413 - DNA, 993 bp, Artificial Sequence
  derived and/or modified sequence
atgcccggccctgccacggacgccgggaagattcccttttgtgatgccaaagaggagataagagcggggttggagagctcagagggaggcggtggccctgaaaggcccggcgcgcgtggccaaagacagaatatagtatggagaaatgtcgtgttgatgtctctcttgcacttgggtgcagtgtatagcctcgtgttaatcccaaaagctaaaccattgaccctgctgtgggcttatttctgttttctgcttgccgctctgggagtcacagcgggagcgcatagactctggtcccaccggtcctaccgcgcaaagctccccctgcgtatctttttggccgtggctaatagtatggccttccagaacgacatattcgagtggagccgcgaccacagggcacatcacaagtattcagaaaccgatgctgatccccacaacgctcggagaggattcttcttttcccacatcggatggctcttcgtcagaaagcatcgggacgtcattgaaaagggcagaaagctggatgtgacagacctgcttgctgaccctgtcgtaaggattcagaggaagtattacaaaattagcgtggtgctcatgtgcttcgtcgtcccgacactggtgccatggtatatttggggagagtccctgtggaacagttacttcctcgcatcaatcttgcgctacacaataagcctgaacatttcatggctggtcaactcagctgctcatatgtatgggaacaggccgtatgataaacatatcagccccagacagaatcccctggttgcgcttggcgcgataggggaaggcttccacaattatcaccacacatttccgttcgattacagcgcctctgagtttggcctcaacttcaacccgaccacctggtttatcgacttcatgtgttggctgggactggccactgatagaaagcgagccacaaagccaatgatcgaggccaggaaggcccgcacaggggatagcagtgcctag

SEQ ID NO: 31414 - DNA, 993 bp, Artificial Sequence
  derived and/or modified sequence
atgcctggccctgccacagatgctgggaagatccccttctgtgatgccaaggaggagatccgggccggcctggagagcagcgagggcggcggcggccctgagaggcctggggcccggggccagaggcagaacatcgtgtggagaaatgtggtgctgatgagcctgctgcacctgggcgctgtgtacagcctggtgctgatccccaaggccaagcccctgaccctgctgtgggcctacttctgcttcctgctggccgccctgggcgtgacagctggggcccaccggctgtggagccacaggagctaccgggccaagctgcccctgcgcatcttcctggccgtggccaacagcatggccttccagaatgacatctttgagtggagccgggaccaccgggcccaccacaagtacagcgagacagatgctgacccccacaatgcccggcggggcttcttcttcagccacatcggctggctgtttgtgaggaagcacagagatgtgattgagaagggcaggaagctggatgtgacagacctgctggccgaccctgtggtgcgcatccagaggaagtactacaagatctctgtggtgctgatgtgctttgtggtgcccaccctggtgccctggtacatctggggcgagagcctgtggaacagctacttcctggccagcatcctgcgctacaccatcagcctgaacatctcctggctggtgaacagcgctgcccacatgtatggcaaccggccctatgacaagcacatcagcccccggcagaaccccctggtggccctgggcgccatcggggagggcttccacaactaccaccacaccttcccctttgactacagcgccagcgagtttggcctgaacttcaaccccaccacctggttcatcgacttcatgtgctggctgggcctggccacagacaggaagagggccaccaagcccatgattgaggccaggaaggccaggactggagacagcagcgcctag

SEQ ID NO: 31415 - DNA, 993 bp, Artificial Sequence
  derived and/or modified sequence
atgcccggccccgccaccgacgccggcaagatccccttctgcgacgcaaaggaagagatcagggcaggcctggaaagcagcgaaggtgggggtggcccggaaaggccgggcgccagaggccagcgccagaatattgtgtggagaaacgttgtcctcatgtctctgctacatctgggggctgtttactccttagtgctgatcccgaaggcaaagcctctcacattactgtgggcctacttttgcttcctgctggctgcattaggcgtaactgcgggggcccaccgtctgtggtcccacagatcttatcgagcgaaacttccgctccgcatttttttggccgtcgcaaactcgatggcctttcaaaacgacattttcgaatggtccagggaccaccgtgcccaccacaagtattcagaaacggacgccgaccctcataatgcaagacgggggtttttctttagtcacatcggttggctctttgtcagaaaacacagagacgtcatcgagaaaggccgtaagctcgatgtcaccgacctgctcgccgatcccgttgttcgcattcagcggaaatactacaaaatcagcgttgtccttatgtgtttcgttgtccccactctggtaccctggtacatctggggggagagcctgtggaacagttacttcctcgcctcaatcctgcgctacacaatctccctcaacataagttggctggtgaattccgccgctcacatgtatggaaacaggccctatgacaaacacattagcccacgacagaatcccctagtcgcactgggcgcaattggtgaagggttccacaattatcatcacaccttcccttttgattatagcgcctccgaatttggcttgaactttaatccaactacctggttcatcgactttatgtgttggttgggactagccacagaccgaaagcgggccacaaagccaatgattgaggcacgcaaggctcggactggggattcaagcgcctag

SEQ ID NO: 31416 - DNA, 993 bp, Artificial Sequence
  derived and/or modified sequence
atgcccggacctgccaccgatgcgggaaagattccattctgtgacgctaaggaggagattcgcgcagggttggaaagctctgaaggcggtggcggaccggaacgccctggagctaggggacagaggcagaatatcgtatggaggaatgtggtgctgatgagcctcctgcatttgggggctgtgtactcgctggtgctcatccctaaggctaaacctttaacacttctgtgggcctatttctgcttcctgcttgccgctcttggcgtcaccgcgggtgcacaccgcctctggtctcacagaagctatcgagctaaactacccttgaggatatttctggcagtcgctaactcaatggcctttcagaacgatatcttcgaatggtccagggaccacagagctcaccataagtactcggagaccgatgctgacccacacaacgcacgacgtgggttctttttcagccacattggctggctgttcgtgaggaaacaccgagatgttatcgaaaaggggagaaagctcgacgtcaccgacctgcttgccgatccagttgtgcgcatccaacggaaatactataaaattagcgtggtcctgatgtgcttcgtcgttcctactctcgtcccttggtacatatggggggagtccctttggaatagctacttcctcgcgtctatccttaggtacacaatatcactcaatatcagctggcttgtgaacagcgcagcccacatgtatggcaatcgaccatacgacaagcatattagtcctaggcagaaccccctggtcgctcttggggctattggagaagggttccataactatcaccatacatttcctttcgactacagcgcctctgaatttggcctgaatttcaatcccacaacttggttcatcgatttcatgtgttggctgggtttggccaccgacaggaagcgcgcaacaaagccgatgatcgaggctagaaaggccagaaccggcgacagtagcgcgtag

SEQ ID NO: 31417 - DNA, 3101 bp, Artificial Sequence
  derived and/or modified sequence
attttcacagctcctcctccccggccgcgcgcccctcccgccccgcgcgcgcctcctctttctcgcggccgagttcagcccgggcagccatatgggggatacgccagcaacagacgccggccgccaagatctgcatccctaggccacgctaagaccctggggaagagcgcaggagcccgggagaagggctggaaggaggggactggacgtgcggagaattcccccctaaaaggcagaagcccccgcccccaccctcgagctccgctcgggcagagcgcctgcctgcctgccgctgctgcgggcgcccacctcgcccagccatgccaggcccggccaccgacgcggggaagatccctttctgcgacgccaaggaagaaatccgtgccgggctcgaaagctctgagggcggcggcggcccggagaggccaggcgcgcgcgggcagcggcagaacatcgtctggaggaatgtcgtcctgatgagcttgctccacttgggggccgtgtactccctggtgctcatccccaaagccaagccactcactctgctctgggcctacttctgcttcctcctggccgctctgggtgtgacagctggtgcccatcgcttgtggagccacaggtcctaccgggccaagctgcctctgaggatatttctggctgtcgccaactccatggctttccagaatgacatcttcgagtggtccagggaccaccgagcccaccacaagtactcagagacggatgctgacccccacaatgcccgccggggcttcttcttctcccatattgggtggctgtttgttcgcaagcatcgagatgttattgagaaggggagaaagcttgacgtcactgacctgcttgctgatcctgtggtccggatccagagaaagtactataagatctccgtggtgctcatgtgctttgtggtccccacgctggtgccctggtacatctggggagagagtctgtggaattcctacttcttggcctctattctccgctataccatctcactcaacatcagctggctggtcaacagcgccgcccacatgtatggaaaccggccctatgacaagcacatcagccctcggcagaacccactcgtcgctctgggtgccattggtgaaggcttccataattaccatcacacctttccctttgactactctgcgagtgaatttggcttaaattttaacccaaccacctggttcattgatttcatgtgctggctggggctggccactgaccgcaaacgggcaaccaagccgatgatcgaggcccggaaggccaggactggagacagcagtgcttgaacttggaacagccatcccacatgtctgccgttgcaacctcggttcatggctttggttacaatagctctcttgtacattggatcgtgggagggggcagagggtggggaaggaacgagtcaatgtggtttgggaatgtttttgtttatctcaaaataatgttgaaatacaattatcaatgaaaaaactttcgtttttttttttgtttgttttgtttttgagacagagtctcactctgtcacccaggctggagtgcagtggcgcagtctcggctcactgcagcctccacctacctggttcaagcaattctcctgcctcagcctcctgagtagctgagattacaggagcctgccaccacacccagctaatttttttgtatttttagtagagacagggtttcatcatgttggccagactggcctcgaattcctgacctcaggcaatccacccgcctcggcctcccaaagagctgggattacaggcgtgagccaccgcaccctgccgaaaaaaacttttttttttttgagacggaggctcgctctgtcccccaggctggagtgcagtggcgagatctcagctcactgcaagctccgcctcccgggttcacgccattctcctgcctcagcctcccgagtagctgggagccagcgcgcccagcctaaaaaacttttcaagtcaatattactacgatttaacattagagtgtggacatgtgatttaatcgctatagctaaaatacgtcaaatatacgttgtcatgtgcttgaacatgatgctaaccctgacaggatgaaggaaagtaatattctttcagtgtagttcaggagagcatttgttttcttttctaccaattaacccatcattgcttttaaacaaccatctgaaggagcagagaggcagggtagaagacagaagggggatctatgtggtaactaaagaatgtttctgttttgttaattattgtgtgtgtgtggttttattgtttgcttaagagaatcaaaaactgaaaaaaatgagaatacaggaaatggctcttgtttatttttttgctgtgtttacagcttgttaatgctctactgtctttgtttcaagagagatttgttcactgcccagctcgttttgtgtcctgagccctatggccagcccaccttataaatcatgcctgtttagatgtttgattttgttctgtttgctattgttatcttaaaggtgtataactctgacatgccagacatcaaattaagctcaaattaagctctcgtttaaatgtttaagcacctaatttatattctaattgatcccagccactgatgcatgtactttagctacttctgctaaataagcatattaattttccacatcagaccatcagatcttgagaaccaacagttatctagaattccgtgtctactaatgtttcacctgcatgcagccttcattaattttgtagcaaaatataaagtgatcattatgtagcttctggattaaaaaaatttgtgtgtgaagttgctttgtaaagtgcatgtggaattaatgggacagtgtgccctttgtgttagatgttagagcaaaagaaagggcttatagtgttagtattggagcactttgaagatagatattttcagaaaagatgtaggatttaaaagttaaattttaaattttagaaaaagatatgatggcaattggaaatagtcacaatgaagttcttcatccagtaggtgtttaacagtgttattttgccactggtaatgtgtaaactgtgagtgatttacaataaatgattatgaattca

SEQ ID NO: 31418 - protein, 14 aa, Artificial Sequence
  derived and/or modified sequence
GIASFVCEYASPGK

SEQ ID NO: 31419 - protein, 174 aa, Artificial Sequence
  derived and/or modified sequence
MACLGFQRHKAQLNLATRTWPCTLLFFLLFIPVFCKAMHVAQPAVVLASSRGIASFVCEYASPGKATEVRVTVLRQADSQVTEVCAATYMMGNELTFLDDSICTGTSSGNQVNLTIQGLRAMDTGLYICKVELMYPPPYYLGIGNGTQIYVIAKEKKPSYNRGLCENAPNRARM

SEQ ID NO: 31420 - protein, 137 aa, Artificial Sequence
  derived and/or modified sequence
MHVAQPAVVLASSRGIASFVCEYASPGKATEVRVTVLRQADSQVTEVCAATYMMGNELTFLDDSICTGTSSGNQVNLTIQGLRAMDTGLYICKVELMYPPPYYLGIGNGTQIYVIAKEKKPSYNRGLCENAPNRARM

SEQ ID NO: 31421 - protein, 56 aa, Artificial Sequence
  derived and/or modified sequence
MACLGFQRHKAQLNLATRTWPCTLLFFLLFIPVFCKVPPTEPECEKQFQPYFIPIN

SEQ ID NO: 31422 - DNA, 525 bp, Artificial Sequence
  derived and/or modified sequence
atggcctgtctgggctttcagagacataaagcacagttaaacttggccacacgcacctggccctgtacacttttgtttttcctattatttattccagtgttttgcaaagccatgcacgtggctcagcccgctgtcgtattagcctcctctcgaggcatcgcatccttcgtctgtgaatatgcctctccaggcaaagccaccgaggtgagagtcaccgtccttagacaggcagacagtcaggtaactgaagtctgtgctgcaacttacatgatgggtaacgagctcactttcctggatgattccatctgcactgggacctcttcaggaaaccaagtgaatcttacaatccaaggtttgcgtgctatggacacgggactctatatctgcaaggttgaactgatgtaccctcctccctactacctgggtataggaaatggaactcagatttatgtgatagctaaggagaagaaaccaagctacaacagaggcttgtgtgagaatgcacctaatcgggcccgcatgtag

SEQ ID NO: 31423 - DNA, 414 bp, Artificial Sequence
  derived and/or modified sequence
atgcacgtagcccagcctgccgtggtgctcgcctcttcccgtggaatcgctagttttgtctgcgaatatgccagtcccggcaaagcaaccgaggtaagagtcaccgtattgaggcaagctgatagtcaagtaaccgaggtctgcgctgcaacctatatgatgggaaacgagctgacattcctggacgattccatatgcaccggtacctcctccggcaaccaagttaacctcactattcagggcctgagggctatggatactggtctctatatttgtaaagtggagttgatgtatcctccgccgtactacttaggcatcgggaacggcacgcagatttacgtcatcgccaaagaaaaaaaaccctcatataatagagggttatgtgaaaacgccccaaatcgcgcacggatgtag

SEQ ID NO: 31424 - DNA, 171 bp, Artificial Sequence
  derived and/or modified sequence
atggcatgcctggggttccagaggcataaagctcagctgaatctggcaaccaggacttggccgtgtactctgctgttttttcttctctttatcccagtgttctgcaaggtaccgccgacagaaccagaatgcgagaaacagttccaaccttacttcattcccattaattag

SEQ ID NO: 31425 - DNA, 525 bp, Artificial Sequence
  derived and/or modified sequence
atggcctgcctgggcttccagaggcacaaggcccagctgaacctggccaccaggacctggccctgcaccctgctcttcttcctgctcttcatccctgtgttctgcaaggccatgcacgtggcccagcctgctgtggtgctggccagcagccggggcatcgccagctttgtgtgtgaatatgccagccctgggaaggccacagaggtgcgggtgacagtgctgcggcaggccgacagccaggtgacagaggtgtgtgccgccacctacatgatgggaaatgagctgaccttcctggatgacagcatctgcaccggcaccagcagcggcaaccaggtgaacctgaccatccagggcctgcgggccatggacaccggcctgtacatctgcaaggtggagctgatgtaccccccaccctactacctgggcattggaaatggcacccagatctacgtgattgccaaggagaagaagcccagctacaacagaggcctgtgtgaaaatgcccccaacagagccaggatgtag

SEQ ID NO: 31426 - DNA, 414 bp, Artificial Sequence
  derived and/or modified sequence
atgcacgtggcccagcctgctgtggtgctggccagcagccggggcatcgccagctttgtgtgtgaatatgccagccctgggaaggccacagaggtgcgggtgacagtgctgcggcaggccgacagccaggtgacagaggtgtgtgccgccacctacatgatgggaaatgagctgaccttcctggatgacagcatctgcaccggcaccagcagcggcaaccaggtgaacctgaccatccagggcctgcgggccatggacaccggcctgtacatctgcaaggtggagctgatgtaccccccaccctactacctgggcattggaaatggcacccagatctacgtgattgccaaggagaagaagcccagctacaacagaggcctgtgtgaaaatgcccccaacagagccaggatgtag

SEQ ID NO: 31427 - DNA, 171 bp, Artificial Sequence
  derived and/or modified sequence
atggcctgcctgggcttccagaggcacaaggcccagctgaacctggccaccaggacctggccctgcaccctgctcttcttcctgctcttcatccctgtgttctgcaaggtgcccccaacagagccagaatgtgagaagcagttccagccctacttcatccccatcaactag

SEQ ID NO: 31428 - DNA, 525 bp, Artificial Sequence
  derived and/or modified sequence
atggcctgcctgggcttccagcggcacaaggcccagctgaacctggccactagaacttggccttgcacgctgctgttcttccttctgtttatacccgtattttgcaaagccatgcacgtggcccagccagctgtggttctcgcgtcttcaagaggcattgcctcattcgtgtgtgaatacgcctccccgggcaaggccacagaggtcagagtgactgtgctgcggcaggcagatagtcaagtcaccgaggtgtgcgccgctacatatatgatgggaaacgaattgacgttcctggatgatagcatttgcacagggacatcttctgggaatcaggtcaatctcacaatccaagggttgagggcaatggataccggactgtatatctgtaaggttgagcttatgtacccacctccgtattatttaggtatcgggaatgggacgcaaatatacgtgatagcgaaggagaagaaaccctcatacaatcgaggactctgcgaaaacgcaccaaatcgggctaggatgtag

SEQ ID NO: 31429 - DNA, 414 bp, Artificial Sequence
  derived and/or modified sequence
atgcacgtggcccagcccgccgtggtgctggccagcagccggggcatcgccagcttcgtttgcgaatacgcttctcccgggaaggctacagaggtgagggtaaccgttctgcgccaggccgattctcaggttaccgaagtgtgcgctgctacgtacatgatgggaaatgaactaacctttctcgacgactcgatttgtactggcacaagcagtggcaatcaggttaatctaaccatccagggcttgcgcgccatggatactgggctatacatatgcaaagtggaattgatgtaccctcccccttactacctaggtatcggcaatggtacacaaatctatgtcatcgcaaaggagaagaagccttcatacaaccgaggactgtgcgaaaacgcaccaaatagagctagaatgtag

SEQ ID NO: 31430 - DNA, 171 bp, Artificial Sequence
  derived and/or modified sequence
atggcctgcctgggcttccagcggcacaaggcccagctgaacctggctactcggacatggccctgcacattgctcttcttcctgctatttattcctgttttctgtaaggtgccccccaccgagcccgagtgcgaaaaacagtttcagccctacttcattccaattaactag

SEQ ID NO: 31431 - DNA, 525 bp, Artificial Sequence
  derived and/or modified sequence
atggcctgcctcggttttcagagacacaaagcccagctgaacttagctactagaacttggccctgcaccctcctgtttttcttgttatttattcccgtgttctgtaaggcaatgcacgtcgcacaaccagcagtggtcctggccagctcccgcggaatagcctcatttgtttgtgagtacgcctccccaggcaaggctaccgaggtcagagtcacagttctgaggcaagctgatagtcaggtgactgaagtgtgtgcggcaacatacatgatgggcaatgaattgacctttttggatgacagcatctgtacaggcaccagctccggtaatcaggtgaacctgaccattcaggggttgcgcgcaatggatacgggcctctacatctgcaaggtggagctcatgtatcccccaccgtattacctgggaattggcaatggcactcagatttatgtcattgctaaagagaagaagcccagctataaccggggtctgtgcgagaacgcacctaatagagccaggatgtag

SEQ ID NO: 31432 - DNA, 414 bp, Artificial Sequence
  derived and/or modified sequence
atgcacgtggcacaacccgcagtggtcctggcttcctcccgcggtattgcatcctttgtgtgtgagtacgccagccctggaaaggccaccgaggtaagagtaacagttcttagacaggccgatagtcaggtgacagaagtgtgcgcggctacatacatgatgggaaacgagttaactttcctggatgatagcatctgtaccggaacatctagcggcaaccaggtgaatctgacaatccaaggcttaagagccatggacacaggtttgtatatctgcaaagtcgagctcatgtatcctccaccctactacctgggcattgggaatggcactcaaatttatgtaatagccaaggagaaaaagccttcctacaaccgcggactatgcgagaatgccccaaacagagcccgtatgtag

SEQ ID NO: 31433 - DNA, 171 bp, Artificial Sequence
  derived and/or modified sequence
atggcatgccttggattccagcggcataaggcccaactgaatcttgccacgagaacgtggccttgcacactcctttttttcctcttgtttatacctgttttttgcaaagtgccaccaactgaaccggagtgcgagaagcagttccagccctatttcatccccatcaattag

SEQ ID NO: 31434 - DNA, 525 bp, Artificial Sequence
  derived and/or modified sequence
atggcttgccttggatttcagcggcacaaggctcagctgaacctggctaccaggacctggccctgcactctcctgttttttcttctcttcatccctgtcttctgcaaagcaatgcacgtggcccagcctgctgtggtactggccagcagccgaggcatcgccagctttgtgtgtgagtatgcatctccaggcaaagccactgaggtccgggtgacagtgcttcggcaggctgacagccaggtgactgaagtctgtgcggcaacctacatgatggggaatgagttgaccttcctagatgattccatctgcacgggcacctccagtggaaatcaagtgaacctcactatccaaggactgagggccatggacacgggactctacatctgcaaggtggagctcatgtacccaccgccatactacctgggcataggcaacggaacccagatttatgtaattgctaaagaaaagaagccctcttacaacaggggtctatgtgaaaatgcccccaacagagccagaatgtga

SEQ ID NO: 31435 - DNA, 969 bp, Artificial Sequence
  derived and/or modified sequence
tctcttactatatgtgaaaaaaatgaaggacatgggggaagtgtgacttgccccaaatcacatatttcatggtagagccaggtcttctgtttgtcatatcagtgttcttcctgccacaaccatcttgaagaatctatttctcacaatgcacgtggcccagcctgctgtggtactggccagcagccgaggcatcgccagctttgtgtgtgagtatgcatctccaggcaaagccactgaggtccgggtgacagtgcttcggcaggctgacagccaggtgactgaagtctgtgcggcaacctacatgatggggaatgagttgaccttcctagatgattccatctgcacgggcacctccagtggaaatcaagtgaacctcactatccaaggactgagggccatggacacgggactctacatctgcaaggtggagctcatgtacccaccgccatactacctgggcataggcaacggaacccagatttatgtaattgctaaagaaaagaagccctcttacaacaggggtctatgtgaaaatgcccccaacagagccagaatgtgaaaagcaatttcagccttattttattcccatcaattgagaaaccattatgaagaagagagtccatatttcaatttccaagagctgaggcaattctaacttttttgctatccagctatttttatttgtttgtgcatttggggggaattcatctctctttaatataaagttggatgcggaacccaaattacgtgtactacaatttaaagcaaaggagtagaaagacagagctgggatgtttctgtcacatcagctccactttcagtgaaagcatcacttgggattaatatggggatgcagcattatgatgtgggtcaaggaattaagttagggaatggcacagcccaaagaaggaaaaggcagggagcgagggagaagactatattgtacacaccttatatttacgtatgaga

SEQ ID NO: 31436 - DNA, 266 bp, Artificial Sequence
  derived and/or modified sequence
tgattctgtgtgggttcaaacacatttcaaagcttcaggatcctgaaaggttttgctctacttcctgaagacctgaacaccgctcccataaagccatggcttgccttggatttcagcggcacaaggctcagctgaacctggctaccaggacctggccctgcactctcctgttttttcttctcttcatccctgtcttctgcaaagtgcccccaacagagccagaatgtgaaaagcaatttcagccttattttattcccatcaattga

SEQ ID NO: 31437 - DNA, 525 bp, Artificial Sequence
  derived and/or modified sequence
atggcctgcctgggcttccagagacacaaggcccagctgaacctggccaccagaacctggccctgcaccctgctgttcttcctgctgttcatccccgtgttctgcaaggccatgcacgtggcccagcccgccgtggtgctggccagcagcagaggcatcgccagcttcgtgtgcgagtacgccagccccggcaaggccaccgaggtgagagtgaccgtgctgagacaggccgacagccaggtgaccgaggtgtgcgccgccacctacatgatgggcaacgagctgaccttcctggacgacagcatctgcaccggcaccagcagcggcaaccaggtgaacctgaccatccagggcctgagagccatggacaccggcctgtacatctgcaaggtggagctgatgtacccccccccctactacctgggcatcggcaacggcacccagatctacgtgatcgccaaggagaagaagcccagctacaacagaggcctgtgcgagaacgcccccaacagagccagaatgtag

SEQ ID NO: 31438 - DNA, 414 bp, Artificial Sequence
  derived and/or modified sequence
atgcacgtggcccagcccgccgtggtgctggccagcagcagaggcatcgccagcttcgtgtgcgagtacgccagccccggcaaggccaccgaggtgagagtgaccgtgctgagacaggccgacagccaggtgaccgaggtgtgcgccgccacctacatgatgggcaacgagctgaccttcctggacgacagcatctgcaccggcaccagcagcggcaaccaggtgaacctgaccatccagggcctgagagccatggacaccggcctgtacatctgcaaggtggagctgatgtacccccccccctactacctgggcatcggcaacggcacccagatctacgtgatcgccaaggagaagaagcccagctacaacagaggcctgtgcgagaacgcccccaacagagccagaatgtag

SEQ ID NO: 31439 - DNA, 171 bp, Artificial Sequence
  derived and/or modified sequence
atggcctgcctgggcttccagagacacaaggcccagctgaacctggccaccagaacctggccctgcaccctgctgttcttcctgctgttcatccccgtgttctgcaaggtgccccccaccgagcccgagtgcgagaagcagttccagccctacttcatccccatcaactag

SEQ ID NO: 31440 - protein, 206 aa, Artificial Sequence
  derived and/or modified sequence
MRRTGAPAQADSRGRGRARGGCPGGEATLSQPPPRGGTRGQEPQMKETIMNQEKLAKLQAQVRIGGKGTARRKKKVVHRTATADDKKLQFSLKKLGVNNISGIEEVNMFTNQGTVIHFNNPKVQASLAANTFTITGHAETKQLTEMLPSILNQLGADSLTSLRRLAEALPKQSVDGKAPLATGEDDDDEVPDLVENFDEASKNEAN

SEQ ID NO: 31441 - DNA, 621 bp, Artificial Sequence
  derived and/or modified sequence
atgcgccggaccggagccccagcacaagccgacagtaggggcagaggtcgtgccagaggcggatgtcccggaggggaagccaccctctcccagccacccccacgtggcggaactaggggacaggagccacagatgaaagaaactatcatgaatcaggaaaaactggccaagctccaggcccaagtccggatcgggggcaaaggcactgcgcgccgcaagaaaaaggtggtgcaccgcacggcaaccgctgatgataagaagcttcaattcagtctcaaaaagctgggtgtcaacaacatcagcggcattgaggaagtcaacatgtttactaatcagggtacagtgattcattttaataatcccaaggtgcaagcaagcctcgctgccaatacattcaccattacagggcatgccgaaaccaagcagttaactgaaatgctcccctccatcctgaatcaattgggcgctgacagtttaacatcactccggcgattagcggaggctttacccaaacagtctgtcgacggaaaagctccccttgcaaccggagaggatgacgacgacgaggtacctgatttggtggaaaatttcgacgaagcatccaagaatgaagccaactag

SEQ ID NO: 31442 - DNA, 621 bp, Artificial Sequence
  derived and/or modified sequence
atgagaagaactggagccccagcccaggccgacagccggggccggggccgggcccggggcggctgccctggaggagaggccaccctgagccagcccccaccccggggcggcacccggggccaggagccccagatgaaggagaccatcatgaaccaggagaagctggccaagctgcaggcccaggtgcgcatcggcggcaaaggaacagcccggaggaagaagaaggtggtgcacaggacagccacagcagatgacaagaagctgcagttcagcctgaagaagctgggcgtgaacaacatctctggaattgaggaggtgaacatgttcaccaaccagggcaccgtcatccacttcaacaaccccaaggtgcaggccagcctggccgccaacaccttcaccatcactggacatgctgagaccaagcagctgacagagatgctgcccagcatcctgaaccagctgggcgctgacagcctgaccagcctgcggcggctggccgaggccctgcccaagcagagcgtggatggcaaggcccccctggccaccggggaggatgatgatgatgaggtgcctgacctggtggagaactttgatgaggccagcaagaatgaggccaactag

SEQ ID NO: 31443 - DNA, 621 bp, Artificial Sequence
  derived and/or modified sequence
atgcggcggaccggcgcccccgcccaggccgacagccggggccggggacgcgcccggggcggatgtcccggtggcgaggccaccctgagccaacctccgccaagaggcggtactcgaggccaggagccgcagatgaaggaaacaattatgaatcaggagaaattggcaaagctgcaggcccaggttaggattggcggtaaggggaccgcacggcgcaaaaaaaaagtcgtccatagaacagcgactgctgacgacaaaaagctgcaattttcccttaagaagctcggcgtaaacaacatatccgggattgaggaggtgaacatgtttaccaaccagggcaccgtgatccacttcaacaatcccaaggtgcaggcctctctggcagctaacacgtttaccatcaccggtcatgctgagacaaaacaattgacggagatgctgccaagcatcttgaatcaactcggggcggacagcctgaccagtttgaggcgcttggctgaggcattgccaaaacagagcgtggatgggaaggctccactggccaccggcgaagatgatgacgacgaggtccccgacctggtggagaacttcgatgaagcaagcaagaacgaggcaaattag

SEQ ID NO: 31444 - DNA, 621 bp, Artificial Sequence
  derived and/or modified sequence
atgaggaggaccggagcccctgcacaggcagattctcggggtagaggcagagcaagggggggatgtccgggaggcgaagccaccctgtcgcagcccccaccgagaggtgggacaagagggcaggagcctcagatgaaagaaacgatcatgaaccaggagaaactggcaaaattgcaagcccaggttaggatcggcggaaagggcaccgcaagaagaaagaagaaggtggtccataggacagcaaccgcagatgacaagaaactacagttttctctgaaaaaactgggcgtcaacaatatctccggaatagaggaagtgaacatgttcaccaaccagggaaccgtgatccacttcaacaatccgaaagtccaggcaagcttagccgcaaataccttcacaatcaccggccatgcggagaccaagcagcttaccgaaatgctccccagcatcttgaaccagttgggagcagactccctgacatcgttgagacgcctagcagaggccctgcccaaacagtcggtagatgggaaggccccactggctaccggcgaggatgacgacgatgaggtgcccgacctggtggagaacttcgatgaggcaagtaagaacgaggccaattag

SEQ ID NO: 31445 - DNA, 1237 bp, Artificial Sequence
  derived and/or modified sequence
gctgccatcttgcgtccccgcgtgtgtgcgcctaatctcaggtggtccacccgagaccccttgagcaccaaccctagtcccccgcgcggccccttattcgctccgacaaggtacaaaaaggctctggacggcggcgtggtaggaggacgggagcgggggcgggaagttccctgaaggagcgagacagggagggacagggcagaggaggagaggaaggcgatgcgacggacaggcgcacccgctcaggctgactctcgggggcgaggtcgagccaggggcggctgccctgggggcgaggcgacgctgtctcaacctccacctcgcggcggaacccgaggacaggagcctcagatgaaagaaacaatcatgaaccaggaaaaactcgccaaactgcaggcacaagtgcgcattggtgggaaaggaactgctcgcagaaagaagaaggtggttcatagaacagccacagcagatgacaaaaaacttcagttctccttaaagaagttaggggtaaacaatatctctggtattgaagaggtgaatatgtttacaaaccaaggaacagtgatccactttaacaaccctaaagttcaggcatctctggcagcgaacactttcaccattacaggccatgctgagacaaagcagctgacagaaatgctacccagcatcttaaaccagcttggtgcggatagtctgactagtttaaggagactggccgaagctctgcccaaacaatctgtggatggaaaagcaccacttgctactggagaggatgatgatgatgaagttccagatcttgtggagaattttgatgaggcttccaagaatgaggcaaactgaattgagtcaacttctgaagataaaacctgaagaagttactgggagctgctattttatattatgactgctttttaagaaatttttgtttatggatctgataaaatctagatctctaatatttttaagcccaagccccttggacactgcagctcttttcagtttttgcttatacacaattcattctttgcagctaattaagccgaagaagcctgggaatcaagtttgaaacaaagattaataaagttctttgcctagtatacagttttatttttttatttcattgacaccgatctgtacacagtaaaaaaaattgcttatagaaagctaatcatggcatgtaatatggctgataacctttggaatttgattaaagatttaaaatcacggtgtagtgtaa

SEQ ID NO: 31446 - DNA, 621 bp, Artificial Sequence
  derived and/or modified sequence
atgagaagaaccggcgcccccgcccaggccgacagcagaggcagaggcagagccagaggcggctgccccggcggcgaggccaccctgagccagcccccccccagaggcggcaccagaggccaggagccccagatgaaggagaccatcatgaaccaggagaagctggccaagctgcaggcccaggtgagaatcggcggcaagggcaccgccagaagaaagaagaaggtggtgcacagaaccgccaccgccgacgacaagaagctgcagttcagcctgaagaagctgggcgtgaacaacatcagcggcatcgaggaggtgaacatgttcaccaaccagggcaccgtgatccacttcaacaaccccaaggtgcaggccagcctggccgccaacaccttcaccatcaccggccacgccgagaccaagcagctgaccgagatgctgcccagcatcctgaaccagctgggcgccgacagcctgaccagcctgagaagactggccgaggccctgcccaagcagagcgtggacggcaaggcccccctggccaccggcgaggacgacgacgacgaggtgcccgacctggtggagaacttcgacgaggccagcaagaacgaggccaactag

SEQ ID NO: 31447 - protein, 329 aa, Artificial Sequence
  derived and/or modified sequence
MAWRGWAQRGWGCGQAWGASVGGRSCEELTAVLTPPQLLGRRFNFFIQQKCGFRKAPRKVEPRRSDPGTSGEAYKRSALIPPVEETVFYPSPYPIRSLIKPLFFTVGFTGCAFGSAAIWQYESLKSRVQSYFDGIKADWLDSIRPQKEGDFRKEINKWWNNLSDGQRTVTGIIAANVLVFCLWRVPSLQRTMIRYFTSNPASSVISNFVSYVGKVATGRYGPSLGASGAIMTVLAAVCTKIPEGRLAIIFLPMFTFTAGNALKAIIAMDTAGMILGWKFFDHAAHLGGALFGIWYVTYGHELIWKNREPLVKIWHEIRTNGPKKGGGSK

SEQ ID NO: 31448 - DNA, 990 bp, Artificial Sequence
  derived and/or modified sequence
atggcctggcgcggctgggcacagcgcggctgggggtgtggccaggcgtggggtgccagcgttggtggaagaagctgtgaagaacttactgctgttctcacaccgcctcagcttctgggccgccggttcaactttttcatccagcagaagtgcgggtttcggaaagctccacggaaggttgaaccacgaagatcagacccaggcactagtggtgaggcctacaagcgatccgccctcatacctcctgtagaagaaaccgtgttctatccgtcaccatatcccattaggagccttattaagcctctgttttttactgttggattcacaggatgtgcttttggatccgccgctatttggcagtatgaatcactcaagtctcgggtgcagagttatttcgatggaatcaaagccgactggttagatagcatcaggccccagaaagaaggcgatttccggaaagagatcaacaagtggtggaacaaccttagtgatggacagcgcacagtaacgggaatcattgccgccaatgtactcgtcttttgtttgtggcgagtgccttctctccagcggacgatgatccgctacttcacgtcgaacccagcatcatctgtgatttcaaactttgtatcctatgtggggaaggtggccactgggcgctacgggccctctctgggcgcctctggagccataatgactgtgctagctgcagtgtgcacaaagattcccgaaggccgtctggccattatcttcctgccaatgtttactttcaccgccgggaatgcgctaaaggcaattattgcgatggacacagccggcatgatactcgggtggaaattttttgatcatgctgcacacctgggcggcgccttatttggcatatggtacgtcacgtatggacacgagcttatatggaagaaccgtgaaccgctggtgaaaatctggcacgaaatcaggacaaacggccctaaaaaaggcggcggtagcaagtag

SEQ ID NO: 31449 - DNA, 990 bp, Artificial Sequence
  derived and/or modified sequence
atggcctggaggggctgggcccagaggggctggggctgcggccaggcctggggcgcctctgtgggcggccgcagctgtgaggagctgacagctgtgctgaccccaccccagctgctgggccgccgcttcaacttcttcatccagcagaagtgtggcttcaggaaggcccccaggaaggtggagcccaggagaagtgaccccggcaccagcggggaggcctacaagaggtctgccctgatcccccctgtggaggagaccgtcttctaccccagcccctaccccatccgcagcctcatcaagcccctcttcttcaccgtgggcttcaccggctgtgcctttggatctgctgccatctggcagtatgagagcctgaagagccgggtgcagagctactttgatggcatcaaggctgactggctggacagcatccggccccagaaggagggggacttcaggaaggagatcaacaagtggtggaacaacctgagtgatggccagaggacagtgacaggcatcatcgccgccaacgtgctggtgttctgcctgtggagggtgcccagcctgcagaggaccatgatccgctacttcaccagcaacccagccagcagcgtcatcagcaactttgtgtcctatgtgggcaaggtggccaccggccgctatggccccagcctgggcgccagcggggccatcatgacagtgctggccgctgtgtgcaccaagatccctgagggccgcctggccatcatcttcctgcccatgttcaccttcaccgctggaaatgccctgaaggccatcatcgccatggacacagctggcatgatcctgggctggaagttctttgaccatgctgcccacctgggcggggccctgtttggcatctggtacgtgacctacggccacgagctgatctggaagaaccgggagcccctggtgaagatctggcatgagatccgcaccaacggccccaagaagggcggcggcagcaagtag

SEQ ID NO: 31450 - DNA, 990 bp, Artificial Sequence
  derived and/or modified sequence
atggcctggcggggctgggcccagcggggctggggctgcggccaggcttggggcgccagcgtgggtggacgtagctgcgaagaactcactgcagtactgaccccccctcaactcctcggacgccgttttaacttttttatccagcagaagtgcggattcagaaaggccccgcggaaagtcgagccccgtcggtcagaccccgggacaagcggcgaggcatacaaaaggagcgcgttaattccccctgtagaagagacagtcttctatccgagcccttatcctataaggtccctcatcaagccccttttctttactgtggggttcaccggctgcgcgttcggctccgctgccatctggcaatacgagtctctcaagagtcgcgttcaaagctatttcgatggcatcaaggccgattggctggactctattcgtccacagaaagagggcgactttcgcaaggaaataaacaagtggtggaacaacttgtcggacgggcagaggacagtgactggaattattgccgcaaacgtgctggtcttttgcctgtggcgcgtgccttcactccagcggaccatgattcgttactttacctcaaatccggcgtcttctgtgatctccaacttcgtaagttacgtaggaaaggtggccaccggccgatatggccccagcctaggggctagcggggcaattatgactgtattagccgcggtttgtacaaaaatcccagaagggcggttggctatcatatttttaccgatgtttaccttcacagccggaaatgccttgaaagccattatcgctatggatacggctggtatgatactggggtggaaatttttcgaccatgctgcccacttgggaggagcactgttcggtatttggtatgtaacttatgggcacgaactcatatggaagaatcgggaaccccttgttaagatctggcacgaaattagaacgaacgggcccaaaaaaggcggaggatcaaaatag

SEQ ID NO: 31451 - DNA, 1240 bp, Artificial Sequence
  derived and/or modified sequence
gggttggtaaggtcgggccatggtggggcagaggttgggaagatggcgtggcgaggctgggcgcagagaggctggggctgcggccaggcgtggggtgcgtcggtgggcggccgcagctgcgaggagctcactgcggtcctaaccccgccgcagctcctcggacgcaggtttaacttctttattcaacaaaaatgcggattcagaaaagcacccaggaaggttgaacctcgaagatcagacccagggacaagtggtgaagcatacaagagaagtgctttgattcctcctgtggaagaaacagtcttttatccttctccctatcctataaggagtctcataaaacctttattttttactgttgggtttacaggctgtgcatttggatcagctgctatttggcaatatgaatcactgaaatccagggtccagagttattttgatggtataaaagctgattggttggatagcataagaccacaaaaagaaggagacttcagaaaggagattaacaagtggtggaataacctaagtgatggccagcggactgtgacaggtattatagctgcaaatgtccttgtattctgtttatggagagtaccttctctgcagcggacaatgatcagatatttcacatcgaatccagcctcaagtgttatttccaattttgtcagttacgtgggtaaagttgccacaggaagatatggaccatcacttggtgcatctggtgccatcatgacagtcctcgcagctgtctgcactaagatcccagaagggaggcttgccattattttccttccgatgttcacgttcacagcagggaatgccctgaaagccattatcgccatggatacagcaggaatgatcctgggatggaaattttttgatcatgcggcacatcttgggggagctctttttggaatatggtatgttacttacggtcatgaactgatttggaagaacagggagccgctagtgaaaatctggcatgaaataaggactaatggccccaaaaaaggaggtggctctaagtaaaactgggattggacagtagtggtgcatctggtccttgccgcctgagagccccaggagacatcggctagagtgaccatggctatgctcccgtctggaagatgccagcatctggcctcccactgttttcagctgtgtcccccagtccgtgtctttttagaatgtgaatgatgataaagttgtgaaataaaggtttctatctagtttgtaa

SEQ ID NO: 31452 - DNA, 990 bp, Artificial Sequence
  derived and/or modified sequence
atggcatggcgaggctgggcacagcggggatgggggtgtggccaggcatggggggcatctgtgggcggacgtagctgtgaggagttaactgcagtacttactccgcctcagctgctggggaggcgctttaacttcttcattcagcaaaaatgcggcttcagaaaggctcccaggaaggtggaaccccgacgtagtgacccgggtacttccggagaggcttataagagaagtgcgctgatacctccagttgaagagactgtattctacccatccccttatccgattagaagtctgattaagccactcttttttacggttggattcaccgggtgcgcctttgggtcagccgctatctggcagtacgaaagtctcaagtctagggtccaatcttatttcgacgggataaaggcggattggcttgactcgatccgcccacagaaagagggggatttcagaaaagaaataaacaagtggtggaacaacttaagtgacggccaacgcacggtcaccggaattatagccgctaacgttctggtgttctgcctgtggagagtccccagcctacaacgtaccatgattcgttattttacttccaaccccgcatcaagtgtgatcagcaacttcgtctcctatgtgggtaaggtggccaccggcaggtatgggccttcgctgggcgcttccggcgctatcatgacagtgttggctgcagtctgcaccaaaatccctgagggacgcctcgccattattttcctacccatgttcacgtttacagcgggaaatgctttgaaggcaattattgcgatggatacagccggaatgattctcggttggaaattcttcgatcatgccgctcaccttggtggagcccttttcgggatctggtatgtaacctacggccatgagttgatatggaagaacagggaacctctagttaaaatttggcatgagatccggactaacggcccaaagaagggaggcggttccaaatag

SEQ ID NO: 31453 - DNA, 990 bp, Artificial Sequence
  derived and/or modified sequence
atggcctggagaggctgggcccagagaggctggggctgcggccaggcctggggcgccagcgtgggcggcagaagctgcgaggagctgaccgccgtgctgacccccccccagctgctgggcagaagattcaacttcttcatccagcagaagtgcggcttcagaaaggcccccagaaaggtggagcccagaagaagcgaccccggcaccagcggcgaggcctacaagagaagcgccctgatcccccccgtggaggagaccgtgttctaccccagcccctaccccatcagaagcctgatcaagcccctgttcttcaccgtgggcttcaccggctgcgccttcggcagcgccgccatctggcagtacgagagcctgaagagcagagtgcagagctacttcgacggcatcaaggccgactggctggacagcatcagaccccagaaggagggcgacttcagaaaggagatcaacaagtggtggaacaacctgagcgacggccagagaaccgtgaccggcatcatcgccgccaacgtgctggtgttctgcctgtggagagtgcccagcctgcagagaaccatgatcagatacttcaccagcaaccccgccagcagcgtgatcagcaacttcgtgagctacgtgggcaaggtggccaccggcagatacggccccagcctgggcgccagcggcgccatcatgaccgtgctggccgccgtgtgcaccaagatccccgagggcagactggccatcatcttcctgcccatgttcaccttcaccgccggcaacgccctgaaggccatcatcgccatggacaccgccggcatgatcctgggctggaagttcttcgaccacgccgcccacctgggcggcgccctgttcggcatctggtacgtgacctacggccacgagctgatctggaagaacagagagcccctggtgaagatctggcacgagatcagaaccaacggccccaagaagggcggcggcagcaagtag

SEQ ID NO: 31454 - protein, 225 aa, Artificial Sequence
  derived and/or modified sequence
MGFGDLKSPAGLQVLNDYLADKSYIEGYVPSQADVAVFEAVSSPPPADLCHALRWYNHIKSYEKEKASLPGVKKALGKYGPADVEDTTGSGATDSKDDDDIDLFGSDDEEESEEAKRLREERLAQYESKKAKKPALVAKSSILLDVKPWDDETDMAKLEECVRSIQADGLVWGSSKLVPVGYGIKKLQIQCVVEDDKVGTDMLEEQITAFEDYVQSMDVAAFNKI

SEQ ID NO: 31455 - protein, 123 aa, Artificial Sequence
  derived and/or modified sequence
MGFGDLKSPAGLQVLNDYLADKSYIEGYVPSQADVAVFEAVSSPPPADLCHALRWYNHIKSYEKEKASLPGVKKALGKYGPADVEDTTGSGATDSKDDDDIDLFGSDDEEESEEAKRLREERL

SEQ ID NO: 31456 - DNA, 678 bp, Artificial Sequence
  derived and/or modified sequence
atgggttttggtgatctgaagagcccagcgggacttcaagtgctgaacgactatctggctgataagagctacattgaggggtacgttccaagccaggccgacgtggccgtttttgaagcagtttcttcccccccccctgccgatctgtgtcatgcattgcggtggtacaaccacatcaaatcatacgagaaggaaaaagcttcccttcccggagtgaaaaaggccctgggcaaatacggccccgcagacgtggaagatactacagggagcggagctacagacagtaaagacgatgatgatatcgacttgtttgggtccgacgatgaggaagagtctgaggaggccaagcgactccgggaggagcggttggcccagtacgagagtaagaaggcaaagaagcccgcccttgtggctaagtctagtatactcctagatgttaaaccttgggacgacgagacagatatggcaaaattggaggagtgtgtgcgaagtatccaagcagacggacttgtctggggatcaagcaagcttgtgcccgttgggtatggtatcaagaagttgcaaatacagtgtgtggttgaagatgataaagttggcactgacatgctggaagagcagattacagcgtttgaagactatgtccagagtatggacgtagcagcattcaataagatctag

SEQ ID NO: 31457 - DNA, 678 bp, Artificial Sequence
  derived and/or modified sequence
atgggcttcggtgatcttaagtccccagccggcctgcaggtgcttaacgactatctcgctgataagagttacattgaagggtatgttcctagccaagcagatgtggctgtgttcgaggccgtgtcatcccccccccctgctgacctctgccacgccctgcggtggtacaaccacatcaagtcttatgaaaaggagaaagcaagtttgcccggcgtaaaaaaggcactgggtaaatatggtccggccgatgtagaagataccactggcagcggagccactgatagtaaagatgacgatgatatcgatctctttggcagtgatgatgaagaagaaagcgaggaggccaaaagattaagggaggaacggttagctcagtacgaaagcaagaaggctaaaaagccagctcttgtggccaaatctagtatcctcctcgatgtaaagccctgggacgatgaaaccgacatggctaaactggaggagtgtgtgagaagcatccaggctgatggccttgtgtggggctcatcgaaactggtgccagtggggtacggtattaagaagcttcaaatacagtgcgtcgtcgaggacgacaaggtgggcacagatatgctcgaagagcaaattacggcctttgaggactacgtccagagtatggatgtcgcagcattcaataagatttag

SEQ ID NO: 31458 - DNA, 678 bp, Artificial Sequence
  derived and/or modified sequence
atgggcttcggtgacctaaaaagtccagccggcctccaggtgctgaacgactacttagcggacaaatcgtacatcgaggggtatgtgccctctcaggctgacgtggccgttttcgaggctgtgagttcgccgcctccagcggatctgtgtcatgccctcaggtggtataaccacattaagtcatacgagaaggagaaggcatccctcccgggggtgaaaaaggccctgggcaagtacgggcccgcggatgtggaagacacaacaggcagcggtgctacagatagtaaggacgacgacgacatcgatttgttcggcagcgacgatgaggaggaaagtgaggaagccaagaggctgcgggaggaacgattggcccagtatgagtcgaaaaaggcgaaaaaacccgcactcgttgcaaaatcctcaatccttctcgacgtgaaaccttgggacgacgagaccgacatggccaaactagaggaatgtgtgcggtccatccaagctgatggccttgtttggggaagtagcaaattggtgcctgtaggctacggcattaagaaattgcagattcagtgcgtggtggaggatgacaaggtgggaaccgacatgctggaagaacagatcaccgcatttgaagattatgttcaaagcatggacgtagcagctttcaataagatttag

SEQ ID NO: 31459 - DNA, 372 bp, Artificial Sequence
  derived and/or modified sequence
atgggcttcggggatctgaaatcccccgcaggccttcaggttctcaacgattacctagccgataagtcctatatagaagggtacgtaccttcccaggctgacgttgcagtgtttgaggccgtcagctcccctcctccagctgatttatgccatgccctgagatggtacaatcatatcaaatcctacgaaaaggagaaggccagcttacccggagtaaaaaaggctcttgggaaatacggccctgctgacgttgaagacacaaccggcagcggtgccacagactccaaggacgatgatgacatcgatctgtttgggtctgacgacgaagaggaatcagaggaagccaagcgactgagggaagagaggctgtag

SEQ ID NO: 31460 - DNA, 678 bp, Artificial Sequence
  derived and/or modified sequence
atgggctttggagacctgaagagccctgctggcctgcaggtgctgaatgactacctggccgacaagagctacatcgagggctacgtgcccagccaggctgatgtggccgtgtttgaggccgtgagcagccccccacctgctgacctgtgccacgccctgcgctggtacaaccacatcaagagctatgagaaggagaaggccagcctgcccggggtgaagaaggccctgggcaagtatggccctgcagatgtggaggacaccaccggcagcggggccacagacagcaaggatgatgatgacatcgacctgtttggaagtgatgatgaggaggagagcgaggaggccaagaggctgcgggaggagcggctggcccagtatgagagcaagaaggccaagaagccagccctggtggccaagagcagcatcctgctggatgtgaagccctgggatgatgaaacagacatggccaagctggaggagtgtgtgcgcagcatccaggctgatggcctggtgtggggcagcagcaagctggtgcctgtgggctacggcatcaagaagctgcagatccagtgtgtggtggaggatgacaaggtgggcacagacatgctggaggagcagatcacagcctttgaagattatgtgcagagcatggatgtggccgccttcaacaagatctag

SEQ ID NO: 31461 - DNA, 372 bp, Artificial Sequence
  derived and/or modified sequence
atgggctttggagacctgaagagccctgctggcctgcaggtgctgaatgactacctggccgacaagagctacatcgagggctacgtgcccagccaggctgatgtggccgtgtttgaggccgtgagcagccccccacctgctgacctgtgccacgccctgcgctggtacaaccacatcaagagctatgagaaggagaaggccagcctgcccggggtgaagaaggccctgggcaagtatggccctgcagatgtggaggacaccaccggcagcggggccacagacagcaaggatgatgatgacatcgacctgtttggaagtgatgatgaggaggagagcgaggaggccaagaggctgcgggaggagcggctgtag

SEQ ID NO: 31462 - DNA, 678 bp, Artificial Sequence
  derived and/or modified sequence
atgggcttcggcgacctgaagagccccgccggcctgcaggtgctgaatgattaccttgctgacaagagctacattgagggatacgtccccagtcaggcagatgtcgccgtgttcgaggccgtgtcttcccccccaccagcagatctctgtcatgcgctccggtggtacaaccatataaagtcctacgagaaggagaaggcttctctgcctggcgtgaaaaaggctctgggcaaatatggcccagccgatgtggaagacacaaccggatcaggcgccaccgactctaaagatgatgatgatatagatctcttcggctctgacgacgaggaggagtcagaagaggccaagcggcttagggaagagaggctagctcaatacgaaagtaagaaggccaagaagcccgcccttgttgccaagtcttctattcttctggatgtgaaaccttgggatgacgaaactgacatggctaaacttgaagagtgtgtaaggagtattcaggccgatggactggtttgggggtcctccaagctcgtcccagtcgggtatggcattaaaaagctgcaaatacagtgcgtcgttgaggatgataaggtagggactgatatgcttgaggaacagatcactgcttttgaggattacgtgcagtccatggacgtggccgcattcaataaaatatag

SEQ ID NO: 31463 - DNA, 678 bp, Artificial Sequence
  derived and/or modified sequence
atgggcttcggcgacctgaagagccccgccggcctgcaggtgctgaatgattaccttgccgacaagagctacattgagggatacgtgccctctcaggccgacgtcgcagtcttcgaagcagtatcaagccctccccctgctgacctttgtcacgctctccgctggtacaaccatattaagagctacgagaaggagaaagcatcactcccgggtgtgaagaaagccttggggaaatacggccctgccgacgtcgaggacactaccggatcaggggcgacagatagcaaggatgacgacgatattgacctcttcggatccgacgatgaagaggaatccgaagaggccaagaggttacgggaggagagactggctcaatacgagagcaagaaagcaaagaagccggctttggtggcaaagagcagcatccttctcgacgtcaagccgtgggacgacgagacagatatggcgaagctcgaagagtgcgtgagatccatccaggccgacgggctcgtttgggggagttccaagctcgtcccagtgggatacggcatcaaaaagttacaaattcagtgtgtggtagaggatgacaaggtcggaacagatatgctggaggagcagatcactgcttttgaagattatgtccagagcatggacgtggccgcctttaacaaaatctag

SEQ ID NO: 31464 - DNA, 678 bp, Artificial Sequence
  derived and/or modified sequence
atgggcttcggcgacctgaagagccccgccggcctgcaggtgctgaatgactatttggcagacaaaagttacatagaagggtacgtgccctctcaggcagatgtagctgtgtttgaggccgtatccagtccaccacctgcggatttatgtcacgccctgcggtggtacaaccatatcaaaagctacgagaaagagaaggcgtccctgccaggcgttaaaaaagcactcggtaagtacggacctgccgacgtggaagacactactgggtctggtgcaacagacagcaaagatgatgacgacatagatcttttcggctccgacgatgaggaagaatccgaagaagccaaacggttacgtgaggaaagactggctcaatatgagtctaaaaaagctaaaaaaccagcactcgtcgccaaaagctccatacttcttgatgttaagccttgggacgatgagacggatatggccaagctggaagaatgtgtgagatcaattcaggcggatggactggtttggggtagcagcaaactggtgcccgtcggttatggcatcaaaaaacttcagatccaatgtgtggtcgaggacgacaaggttggcaccgacatgctggaggaacagataacagctttcgaggattatgtgcagagtatggacgtagccgccttcaacaaaatctag

SEQ ID NO: 31465 - DNA, 372 bp, Artificial Sequence
  derived and/or modified sequence
atgggcttcggcgacctgaagagccccgccggcctgcaggtgctgaatgactacctagccgacaagtcgtatattgagggctatgttccatcacaagccgacgtagctgttttcgaggccgtcagcagccctccaccagcagatctctgtcatgccctgaggtggtacaatcacattaagagctacgaaaaagagaaggcatctcttcctggagtcaaaaaggctctgggaaagtatggtcctgctgatgtggaggatacaaccgggtcaggtgctacggacagcaaggacgacgacgatatcgacttattcggctccgacgatgaagaggagtccgaagaggccaagaggctgcgggaagagcgcctgtag

SEQ ID NO: 31466 - DNA, 678 bp, Artificial Sequence
  derived and/or modified sequence
atgggtttcggcgacctgaagtcccctgcaggacttcaggtccttaatgactatctcgctgataagagttatatcgaagggtacgtgcccagtcaagccgatgtggcagtgtttgaggccgtgtcgagcccacctccagctgatctatgtcacgctcttagatggtataaccatataaaaagttacgaaaaggagaaggcctctctccccggagtcaaaaaagccttggggaaatatggacccgctgatgtggaggatacaaccggcagtggcgctacagattcgaaggatgacgacgacattgatttatttggatctgatgatgaagaagaatcagaagaggccaagcgtctgagggaagagaggcttgctcagtatgagtctaagaaagcgaaaaagcctgcactggtggctaagtcctctatactattggacgtcaagccctgggacgacgagaccgacatggcaaagctggaagaatgtgtccggtcaattcaggcagatggactagtctggggttcgtctaagctcgtgccagtcggttacggtattaaaaagctccaaattcagtgcgttgtggaggacgataaagtgggaacggacatgctggaagaacagatcactgcatttgaggactacgtacagtcaatggatgtggccgcttttaataagatatag

SEQ ID NO: 31467 - DNA, 678 bp, Artificial Sequence
  derived and/or modified sequence
atgggattcggggatctaaagagtccagccggtttgcaggtgctgaatgattacctggcggataagagttacattgaaggctacgtaccctctcaggcagacgtcgccgtcttcgaagctgtgagctcgccccctcccgctgatctgtgtcatgcactccgctggtacaatcacataaaatcttacgagaaggaaaaagccagcttgccaggcgtgaaaaaagccctgggcaagtatggccctgccgatgtggaagataccaccggttctggggcaacagattccaaggacgacgatgatatcgacttgtttggctctgacgacgaagaagagtctgaggaagccaagcgcctcagggaggagaggcttgcccagtacgaatccaagaaagcaaagaagccggcactagttgcaaagagttccattctcttggacgtgaagccatgggacgatgaaaccgatatggccaagctggaagagtgtgttagatccatacaagccgacggccttgtgtgggggtcttcaaagctcgtaccagtggggtacggcatcaaaaagcttcagatccagtgcgtggtggaagatgataaggtggggacagacatgctggaagaacagattacagcctttgaggattatgtgcaatctatggacgttgcagcatttaacaaaatctag

SEQ ID NO: 31468 - DNA, 678 bp, Artificial Sequence
  derived and/or modified sequence
atgggtttcggggaccttaagtctcctgcaggcctccaagtacttaatgattacctggcagataagtcttacatcgaaggctatgtgccttcgcaggctgatgtcgctgtgtttgaggcagtgagcagccctcctccggcagacctgtgtcatgcccttagatggtacaatcacattaagtcctacgagaaggagaaggcatctctacccggtgtcaaaaaggccttgggaaaatatgggcctgcagacgtggaagataccacaggctccggggcaaccgatagtaaggacgatgacgatatcgatctgtttggatcagacgatgaagaagagtctgaagaggcaaaacggctgcgggaggagagactggcacagtatgagagcaagaaggctaaaaagcccgctctggttgctaagagcagtatcctgctggacgttaagccatgggacgacgaaaccgacatggcaaagttagaagagtgtgtcagatctatccaagccgacgggctcgtctggggcagctccaaattagtgcccgttggatacggtatcaaaaaattgcagatccagtgcgtggtggaggacgacaaggtaggaacagacatgctggaggaacaaattactgccttcgaggactacgtccaatcaatggacgtggccgctttcaataagatctag

SEQ ID NO: 31469 - DNA, 372 bp, Artificial Sequence
  derived and/or modified sequence
atgggcttcggcgacctgaagtcccccgcaggtcttcaagtactgaatgattacctggccgacaaaagctatattgagggctatgtcccatcccaagcggacgtcgccgtcttcgaagccgtctcgagccccccacctgccgacctctgccatgccctgcgttggtacaatcacatcaagtcttacgaaaaagaaaaggcctcactccccggagtaaagaaggcactgggtaagtacggccctgcagatgttgaagatactacagggtctggggctactgacagcaaggacgacgatgacatagacctatttggcagtgacgacgaggaagaatccgaggaggcaaagcgcctcagggaggagcgcttgtag

SEQ ID NO: 31470 - DNA, 678 bp, Artificial Sequence
  derived and/or modified sequence
atgggcttcggcgacctgaagagccccgccggcctgcaggtgctgaacgactacctggccgacaagagctacatcgagggctacgtgcccagccaggccgacgtggccgtgttcgaggccgtgagcagccccccccccgccgacctgtgccacgccctgagatggtacaaccacatcaagagctacgagaaggagaaggccagcctgcccggcgtgaagaaggccctgggcaagtacggccccgccgacgtggaggacaccaccggcagcggcgccaccgacagcaaggacgacgacgacatcgacctgttcggcagcgacgacgaggaggagagcgaggaggccaagagactgagagaggagagactggcccagtacgagagcaagaaggccaagaagcccgccctggtggccaagagcagcatcctgctggacgtgaagccctgggacgacgagaccgacatggccaagctggaggagtgcgtgagaagcatccaggccgacggcctggtgtggggcagcagcaagctggtgcccgtgggctacggcatcaagaagctgcagatccagtgcgtggtggaggacgacaaggtgggcaccgacatgctggaggagcagatcaccgccttcgaggactacgtgcagagcatggacgtggccgccttcaacaagatctag

SEQ ID NO: 31471 - DNA, 372 bp, Artificial Sequence
  derived and/or modified sequence
atgggcttcggcgacctgaagagccccgccggcctgcaggtgctgaacgactacctggccgacaagagctacatcgagggctacgtgcccagccaggccgacgtggccgtgttcgaggccgtgagcagccccccccccgccgacctgtgccacgccctgagatggtacaaccacatcaagagctacgagaaggagaaggccagcctgcccggcgtgaagaaggccctgggcaagtacggccccgccgacgtggaggacaccaccggcagcggcgccaccgacagcaaggacgacgacgacatcgacctgttcggcagcgacgacgaggaggagagcgaggaggccaagagactgagagaggagagactgtag

SEQ ID NO: 31472 - DNA, 844 bp, Artificial Sequence
  derived and/or modified sequence
cgcagttccgccggaagtggccccagcctcgaggccgggcgtcttcggtcatctccggcgcttctagggctggttcccgtcatcttcgggagccgtggagctctcggatacagccgacaccatgggtttcggagacctgaaaagccctgccggcctccaggtgctcaacgattacctggcggacaagagctacatcgaggggtatgtgccatcacaagcagatgtggcagtatttgaagccgtgtccagcccaccgcctgccgacttgtgtcatgccctacgttggtataatcacatcaagtcttacgaaaaggaaaaggccagcctgccaggagtgaagaaagctttgggcaaatatggtcctgccgatgtggaagacactacaggaagtggagctacagatagtaaagatgatgatgacattgacctctttggatctgatgatgaggaggaaagtgaagaagcaaagaggctaagggaagaacgtcttgcacaatatgaatcaaagaaagccaaaaaacctgcacttgttgccaagtcttccatcttactagatgtgaaaccttgggatgatgagacagatatggcgaaattagaggagtgcgtcagaagcattcaagcagacggcttagtctggggctcatctaaactagttccagtgggatacggaattaagaaacttcaaatacagtgtgtagttgaagatgataaagttggaacagatatgctggaggagcagatcactgcttttgaggactatgtgcagtccatggatgtggctgctttcaacaagatctaaaatccatcctggatcatggcatttaaataaaagattgaaagatta

SEQ ID NO: 31473 - DNA, 880 bp, Artificial Sequence
  derived and/or modified sequence
gccggaagtggccccagcctcgaggccgggcgtcttcggtcatctccggcgcttctagggctggttcccgtcatcttcgggagccgtggagcgtggggcgcccacaatttgcgcgctctctttctgctgctccccagctctcggatacagccgacaccatgggtttcggagacctgaaaagccctgccggcctccaggtgctcaacgattacctggcggacaagagctacatcgaggggtatgtgccatcacaagcagatgtggcagtatttgaagccgtgtccagcccaccgcctgccgacttgtgtcatgccctacgttggtataatcacatcaagtcttacgaaaaggaaaaggccagcctgccaggagtgaagaaagctttgggcaaatatggtcctgccgatgtggaagacactacaggaagtggagctacagatagtaaagatgatgatgacattgacctctttggatctgatgatgaggaggaaagtgaagaagcaaagaggctaagggaagaacgtcttgcacaatatgaatcaaagaaagccaaaaaacctgcacttgttgccaagtcttccatcttactagatgtgaaaccttgggatgatgagacagatatggcgaaattagaggagtgcgtcagaagcattcaagcagacggcttagtctggggctcatctaaactagttccagtgggatacggaattaagaaacttcaaatacagtgtgtagttgaagatgataaagttggaacagatatgctggaggagcagatcactgcttttgaggactatgtgcagtccatggatgtggctgctttcaacaagatctaaaatccatcctggatcatggcatttaaataaaagattgaaagatt

SEQ ID NO: 31474 - DNA, 1098 bp, Artificial Sequence
  derived and/or modified sequence
ccccagcctcgaggccgggcgtcttcggtcatctccggcgcttctagggctggttcccgtcatcttcgggagccgtggaggtacgaacttaagacatgcctattttattaatttacttccaaacgcaacgaaaggtccatggacaatttgtgggccatttaattcagggcccccaattcgtacgtggagaagtgggaatgcaaaagtactttgacctttaaccttcggtccggcgcggtggagggaaacgcctccgtctctatataaggaattttccggtctcttcgggtcctttttcctctcttcagcgtggggcgcccacaatttgcgcgctctctttctgctgctccccagctctcggatacagccgacaccatgggtttcggagacctgaaaagccctgccggcctccaggtgctcaacgattacctggcggacaagagctacatcgaggggtatgtgccatcacaagcagatgtggcagtatttgaagccgtgtccagcccaccgcctgccgacttgtgtcatgccctacgttggtataatcacatcaagtcttacgaaaaggaaaaggccagcctgccaggagtgaagaaagctttgggcaaatatggtcctgccgatgtggaagacactacaggaagtggagctacagatagtaaagatgatgatgacattgacctctttggatctgatgatgaggaggaaagtgaagaagcaaagaggctaagggaagaacgtcttgcacaatatgaatcaaagaaagccaaaaaacctgcacttgttgccaagtcttccatcttactagatgtgaaaccttgggatgatgagacagatatggcgaaattagaggagtgcgtcagaagcattcaagcagacggcttagtctggggctcatctaaactagttccagtgggatacggaattaagaaacttcaaatacagtgtgtagttgaagatgataaagttggaacagatatgctggaggagcagatcactgcttttgaggactatgtgcagtccatggatgtggctgctttcaacaagatctaaaatccatcctggatcatggcatttaaataaaagattgaaagatta

SEQ ID NO: 31475 - DNA, 515 bp, Artificial Sequence
  derived and/or modified sequence
ccagcctcgaggccgggcgtcttcggtcatctccggcgcttctagggctggttcccgtcatcttcgggagccgtggagcgtggggcgcccacaatttgcgcgctctctttctgctgctccccagctctcggatacagccgacaccatgggtttcggagacctgaaaagccctgccggcctccaggtgctcaacgattacctggcggacaagagctacatcgaggggtatgtgccatcacaagcagatgtggcagtatttgaagccgtgtccagcccaccgcctgccgacttgtgtcatgccctacgttggtataatcacatcaagtcttacgaaaaggaaaaggccagcctgccaggagtgaagaaagctttgggcaaatatggtcctgccgatgtggaagacactacaggaagtggagctacagatagtaaagatgatgatgacattgacctctttggatctgatgatgaggaggaaagtgaagaagcaaagaggctaagggaagaacgtcttg

SEQ ID NO: 31476 - protein, 259 aa, Artificial Sequence
  derived and/or modified sequence
MEDSMDMDMSPLRPQNYLFGCELKADKDYHFKVDNDENEHQLSLRTVSLGAGAKDELHIVEAEAMNYEGSPIKVTLATLKMSVQPTVSLGGFEITPPVVLRLKCGSGPVHISGQHLVAVEEDAESEDEEEEDVKLLSISGKRSAPGGGSKVPQKKVKLAADEDDDDDDEEDDDEDDDDDDFDDEEAEEKAPVKKSIRDTPAKNAQKSNQNGKDSKPSSTPRSKGQESFKKQEKTPKTPKGPSSVEDIKAKMQASIEKAH

SEQ ID NO: 31477 - DNA, 780 bp, Artificial Sequence
  derived and/or modified sequence
atggaggacagcatggacatggacatgagccccctgagaccccagaactacctgttcggctgcgagctgaaggccgacaaggactaccacttcaaggtggacaacgacgagaacgagcaccagctgagcctgagaaccgtgagcctgggcgccggcgccaaggacgagctgcacatcgtggaggccgaggccatgaactacgagggcagccccatcaaggtgaccctggccaccctgaagatgagcgtgcagcccaccgtgagcctgggcggcttcgagatcaccccccccgtggtgctgagactgaagtgcggcagcggccccgtgcacatcagcggccagcacctggtggccgtggaggaggacgccgagagcgaggacgaggaggaggaggacgtgaagctgctgagcatcagcggcaagagaagcgcccccggcggcggcagcaaggtgccccagaagaaggtgaagctggccgccgacgaggacgacgacgacgacgacgaggaggacgacgacgaggacgacgacgacgacgacttcgacgacgaggaggccgaggagaaggcccccgtgaagaagagcatcagagacacccccgccaagaacgcccagaagagcaaccagaacggcaaggacagcaagcccagcagcacccccagaagcaagggccaggagagcttcaagaagcaggagaagacccccaagacccccaagggccccagcagcgtggaggacatcaaggccaagatgcaggccagcatcgagaaggcccactag

SEQ ID NO: 31478 - DNA, 780 bp, Artificial Sequence
  derived and/or modified sequence
atggaggattccatggacatggacatgtcccctctccgaccacagaactatctgtttggatgtgagctgaaagccgacaaggactaccatttcaaagtggacaatgatgagaatgaacaccagctatcactgaggacagtcagcctgggagcgggggccaaagacgaactgcacattgtagaagccgaggctatgaactacgaagggtctcctataaaggtgaccttagccactttgaagatgtccgtgcaacccaccgtctcattgggaggattcgagattacgcctccagtggtacttcgcctgaagtgcggctccgggcccgtccacatttccggccagcacttagtggctgtcgaggaggatgccgaatcagaggatgaggaggaggaagatgtcaagttgttgtcaatctctgggaaacggtctgctcccggaggcggatcaaaagtcccacaaaaaaaggtcaagctcgcagctgatgaggacgatgacgatgacgacgaggaagacgatgacgaggacgacgacgacgacgacttcgacgatgaggaggcagaggagaaggctcccgtgaaaaagtctattagagatacaccggcaaagaatgctcagaaaagcaatcagaatgggaaagatagcaagccttcaagcacccctaggtcaaagggacaggaaagcttcaagaaacaggaaaagactcctaaaactcctaagggaccatcatcggtggaggatatcaaggccaaaatgcaagcttcaatcgagaaggctcattag

SEQ ID NO: 31479 - DNA, 780 bp, Artificial Sequence
  derived and/or modified sequence
atggaggacagcatggacatggacatgagccccctgcggccccagaactacctgtttggctgtgagctgaaggctgacaaggactaccacttcaaggtggacaatgatgaaaatgagcaccagctgagcctgaggacagtgtccctgggcgctggggccaaggatgagctgcacatcgtggaggccgaggccatgaactatgagggcagccccatcaaggtgaccctggccaccctgaagatgtctgtgcagcccaccgtgtccctgggcggctttgagatcaccccacctgtggtgctgcggctgaagtgtggcagcggccctgtgcacatcagcggccagcacctggtggccgtggaggaggatgctgagagtgaagatgaggaggaggaggatgtgaagctgctgagcatcagcggcaagaggtctgcccctgggggcggcagcaaggtgccccagaagaaggtgaagctggccgcagatgaagatgatgatgatgatgatgaggaggatgatgatgaagatgatgatgatgatgactttgatgatgaggaggccgaggagaaggcccctgtgaagaagagcatccgggacaccccagccaagaatgcccagaagagcaaccagaatggcaaggacagcaagcccagcagcacccccaggagcaagggccaggagagcttcaagaagcaggagaagacccccaagacccccaagggccccagctctgtggaggacatcaaggccaagatgcaggccagcattgagaaggcccactag

SEQ ID NO: 31480 - DNA, 780 bp, Artificial Sequence
  derived and/or modified sequence
atggaggacagcatggacatggacatgagccccctgcggccccagaattatcttttcggttgcgagctcaaggctgacaaggattaccatttcaaagtggataatgacgaaaatgagcatcaattgagcttgcggacagtttccttgggcgcaggagcaaaggacgaattgcatatcgtcgaggccgaagcgatgaactacgagggcagccctatcaaggtgaccctggcaacccttaaaatgtctgtccagcctactgtgtctctgggcgggttcgaaattacccccccagtcgtcctccggctgaaatgcgggagcgggcctgtgcacattagcggccagcatctagttgcagttgaagaggatgccgaatcagaggacgaggaggaggaggatgtgaagctgttgtcaatatcaggcaaacggagtgccccaggtggcggctcaaaggtgcctcagaagaaggtgaagctcgccgctgatgaggatgacgatgacgacgacgaagaggacgatgatgaggacgacgacgatgatgacttcgacgacgaggaggccgaggagaaagcccctgtcaaaaaatcaatacgcgatacccccgccaagaatgctcagaagagcaaccagaacggaaaggatagtaagcccagctctaccccccgctctaagggacaggagtcttttaaaaagcaggagaagaccccgaaaacccctaaaggtccatccagtgtcgaggacatcaaggcaaaaatgcaggcctcgatcgaaaaggcacactag

SEQ ID NO: 31481 - DNA, 1598 bp, Artificial Sequence
  derived and/or modified sequence
ttccctggtgtgattccgtcctgcgcggttgttctctggagcagcgttcttttatctccgtccgccttctctcctacctaagtgcgtgccgccacccgatggaagattcgatggacatggacatgagccccctgaggccccagaactatcttttcggttgtgaactaaaggccgacaaagattatcactttaaggtggataatgatgaaaatgagcaccagttatctttaagaacggtcagtttaggggctggtgcaaaggatgagttgcacattgttgaagcagaggcaatgaattacgaaggcagtccaattaaagtaacactggcaactttgaaaatgtctgtacagccaacggtttcccttgggggctttgaaataacaccaccagtggtcttaaggttgaagtgtggttcagggccagtgcatattagtggacagcacttagtagctgtggaggaagatgcagagtcagaagatgaagaggaggaggatgtgaaactcttaagtatatctggaaagcggtctgcccctggaggtggtagcaaggttccacagaaaaaagtaaaacttgctgctgatgaagatgatgacgatgatgatgaagaggatgatgatgaagatgatgatgatgatgattttgatgatgaggaagctgaagaaaaagcgccagtgaagaaatctatacgagatactccagccaaaaatgcacaaaagtcaaatcagaatggaaaagactcaaaaccatcatcaacaccaagatcaaaaggacaagaatccttcaagaaacaggaaaaaactcctaaaacaccaaaaggacctagttctgtagaagacattaaagcaaaaatgcaagcaagtatagaaaaagcgcattgaacagtcctgggcactacatgtaaattaagcccaaagatggggagaaaggaaaaggagagacaaatatagtccatactgagtgtcatcaacaatccagactgaagtcttctattttaatctcaatccccttttctgatttgccacccatgcctcttcaggctggaaacaatctcttggttccctaaagcactttcttctgactgctgtgattcagtgaaccttgccctttgctttctattacttgtgcatttgcctcacctgacaatgttttaaatcgcctttgtatctccttagctgctcaataaatatttgaatgcatcaattaagaatgtatgtgacaataattttgaaatggaaattgtgaggtttattttactaggttattggaggcagttaagtttcttaatgctatacctgattctgccaaagtcccttggacatttgaaaaccttttcaatcttttaaaaatgcataaaagatacttagagggaaaggtattaattaaatttagtaaaaacaaatatattcaatgctttaaattccaaagtagtgataaatacaaacatttcaagatatttgcaatagtaatgttttgaaattttggttacaaagtcacaggtcttgccaatactgttgtagtttcttgcctatatccgtaatttgaaggaaatggtgagagtgattagagaagtgtaattactgtaattttttcccctattg

SEQ ID NO: 31482 - DNA, 780 bp, Artificial Sequence
  derived and/or modified sequence
atggaagattctatggatatggacatgtccccactgcggcctcaaaattacctctttggatgcgagctgaaggccgataaagattaccattttaaagtggacaacgacgagaacgaacatcagctgtcccttcggactgttagccttggagcaggcgctaaggatgagctacacatagtagaagccgaggccatgaattacgaaggttcaccgattaaagtgacccttgctacgctgaagatgtcggtccagccgaccgtttccttgggtggatttgagattacgcctcccgtagttctgcgactcaagtgtggttccggccctgtgcacatttcaggccagcatctggttgctgttgaggaggatgccgagagcgaggacgaagaagaggaggatgtcaaactgctgtctatttcaggtaaaaggtctgccccaggaggtggttctaaagtgcctcagaagaaggttaagctggcagcagacgaggatgatgatgacgatgatgaagaggacgacgatgaggatgatgatgacgatgactttgacgacgaagaagccgaggagaaagcccctgtaaagaaaagcatacgcgacactcctgcaaaaaacgcacagaaatccaatcagaatggcaaagactctaaaccatcatctaccccccgatctaaggggcaggaaagcttcaaaaagcaggagaagaccccaaagacccctaaaggaccctcatctgttgaagacatcaaggcaaagatgcaggcctctattgaaaaggcccattag

SEQ ID NO: 31483 - protein, 296 aa, Artificial Sequence
  derived and/or modified sequence
MASSPLPGPNDILLASPSSAFQPDTLSQPRPGHANLKPNQVGQVILYGIPIVSLVIDGQERLCLAQISNTLLKNFSYNEIHNRRVALGITCVQCTPVQLEILRRAGAMPISSRRCGMITKREAERLCKSFLGENRPPKLPDNFAFDVSHECAWGCRGSFIPARYNSSRAKCIKCSYCNMYFSPNKFIFHSHRTPDAKYTQPDAANFNSWRRHLKLTDKSPQDELVFAWEDVKAMFNGGSRKRALPQPGAHPACHPLSSIRTRSIAFSSQTLMLLEEIFGEKDQEDYMRINEDNIWL

SEQ ID NO: 31484 - DNA, 309 bp, Artificial Sequence
  derived and/or modified sequence
atggccaatacccagctggatcatctgcactatacgaccgagttcacacgcaatgacctgctcattatctgcaaaaagttcaatttgatgttgatggacgaagatatcatttccttgctggccatatttataaagatgtgcctgtggttgtggaagcagtttcttaagcgcggatcaaaatgcagtgagaccagcgaattgttagagaaagtcaaactgcagcttgctttcaccgcctataaatacgtagatatctgctttccagagcagatggcttactccagatacattaggtggtatattcattag

SEQ ID NO: 31485 - DNA, 891 bp, Artificial Sequence
  derived and/or modified sequence
atggccagcagccccctgcccggccccaacgacatcctgctggccagccccagcagcgccttccagcccgacaccctgagccagcccagacccggccacgccaacctgaagcccaaccaggtgggccaggtgatcctgtacggcatccccatcgtgagcctggtgatcgacggccaggagagactgtgcctggcccagatcagcaacaccctgctgaagaacttcagctacaacgagatccacaacagaagagtggccctgggcatcacctgcgtgcagtgcacccccgtgcagctggagatcctgagaagagccggcgccatgcccatcagcagcagaagatgcggcatgatcaccaagagagaggccgagagactgtgcaagagcttcctgggcgagaacagaccccccaagctgcccgacaacttcgccttcgacgtgagccacgagtgcgcctggggctgcagaggcagcttcatccccgccagatacaacagcagcagagccaagtgcatcaagtgcagctactgcaacatgtacttcagccccaacaagttcatcttccacagccacagaacccccgacgccaagtacacccagcccgacgccgccaacttcaacagctggagaagacacctgaagctgaccgacaagagcccccaggacgagctggtgttcgcctgggaggacgtgaaggccatgttcaacggcggcagcagaaagagagccctgccccagcccggcgcccaccccgcctgccaccccctgagcagcatcagaaccagaagcatcgccttcagcagccagaccctgatgctgctggaggagatcttcggcgagaaggaccaggaggactacatgagaatcaacgaggacaacatctggctgtag

SEQ ID NO: 31486 - DNA, 891 bp, Artificial Sequence
  derived and/or modified sequence
atggcatccagcccactcccggggcctaacgacatactccttgcctcaccctcttctgcatttcagccagatacactctctcagccccgcccaggacatgcaaaccttaagcctaatcaagtgggccaggtgatcctttatggtattcccattgtgtctctggtcatagatgggcaggaacgactttgcctggctcagatcagcaacacacttctgaaaaacttcagctataatgaaatccacaatcggagggtggcactaggaatcacctgcgtccagtgtacaccggtacagcttgaaatcctgcgccgagctggggctatgcccatcagctcaagaaggtgcgggatgattactaagcgggaagctgaacggttgtgcaagtcgttcctgggcgagaacagaccaccaaaacttcctgataactttgcattcgatgtgagtcatgaatgtgcctggggttgcagggggagcttcatccccgctagatacaactctagtagggccaagtgtattaagtgctcttactgtaatatgtacttttctccgaacaaattcatcttccactcacacaggacgcctgatgccaagtatacccaacccgacgccgccaactttaattcctggcgcagacatctcaagcttacagataagtccccacaggatgagctcgtttttgcttgggaggacgtgaaagctatgtttaatgggggatctaggaaacgtgcactccctcagcccggtgcgcatcctgcctgtcacccgttatcctccattcgcacccggtctatcgccttttctagccaaacactgatgctgcttgaagagattttcggcgaaaaggatcaggaggattacatgcggattaatgaggacaacatttggctgtag

SEQ ID NO: 31487 - DNA, 891 bp, Artificial Sequence
  derived and/or modified sequence
atggccagcagccccctgcccggccccaatgacatcctgctggccagccccagcagcgccttccagcctgacaccctgagccagcccaggcctggccacgccaacctgaagcccaaccaggtgggccaggtgatcctgtatggcatccccatcgtgtccctggtgattgatggccaggagcggctgtgcctggcccagatcagcaacaccctgctgaagaacttctcctacaatgagatccacaacagaagagtggccctgggcatcacctgtgtgcagtgcacccctgtgcagctggagatcctgcggcgggccggggccatgcccatcagcagcagaagatgtggcatgatcaccaagcgggaggccgagcggctgtgcaagagcttcctgggagaaaatcggccccccaagctgcctgacaactttgcctttgatgtgtcccatgaatgtgcctggggctgccggggcagcttcatcccagcccgctacaacagcagccgggccaagtgcatcaagtgcagctactgcaacatgtacttcagccccaacaagttcatcttccacagccacaggaccccagatgccaagtacacccagccagatgctgccaacttcaacagctggaggaggcacctgaagctgacagacaagagcccccaggatgagctggtgtttgcctgggaggatgtgaaggccatgttcaacggcggcagcaggaagagggccctgccccagcccggggcccacccagcctgccaccccctgagcagcatccgcaccaggagcatcgccttcagcagccagaccctgatgctgctggaggagatctttggagagaaggaccaggaggactacatgaggatcaatgaagacaacatctggctgtag

SEQ ID NO: 31488 - DNA, 891 bp, Artificial Sequence
  derived and/or modified sequence
atggccagcagccccctgcccggccccaacgacatcctgctggcctctccaagctcagcatttcagccggacactctctcacagccccgccctggccacgcaaatttgaagccgaatcaggttggacaagtgatcctctacgggatacctatcgtctcattggtcatcgatgggcaggagaggttatgcctcgcacagatcagtaacacattactgaagaactttagctataacgagattcataaccgacgcgtggccttagggatcacctgcgtccagtgcacccccgtacagttggagatactgagacgtgccggcgcaatgcctatttcaagccggaggtgcggcatgataactaaacgagaagctgaaaggctttgtaagagcttcctgggtgaaaaccgacctcccaaactccccgataacttcgccttcgacgtgagccacgaatgcgcttgggggtgtcggggcagcttcattccagctagatacaacagctcgagggccaaatgcataaaatgttcgtattgcaatatgtatttttcaccaaacaagtttatttttcatagtcatcggacacccgatgctaaatacacccagcccgatgcggccaacttcaatagctggaggagacacctcaagctgaccgataaatcgccgcaggatgaactggtgtttgcttgggaggatgtcaaggccatgttcaacggagggtcccgcaaacgtgcactcccgcagcctggtgcacaccccgcctgccaccccttgtcgtccattaggacccgaagcattgcctttagctcccagaccttaatgctgctggaggaaatcttcggtgaaaaggatcaggaagattatatgcgaattaacgaggacaatatctggctctag

SEQ ID NO: 31489 - DNA, 891 bp, Artificial Sequence
  derived and/or modified sequence
atggcttccagtccgctgccagggcccaacgacatcctgctggcgtcgccgtcgagcgccttccagcccgacacgctgagccagccgcggccagggcacgccaacctcaaacccaaccaggtgggccaggtgatcctctacggcattcccatcgtgtcgttggtgatcgacgggcaagagcgcctgtgcctggcgcagatctccaacactctgctcaagaacttcagctacaacgagatccacaaccgtcgcgtggcactgggcatcacgtgtgtgcagtgcacgccggtgcaactggagatcctgcggcgtgccggggccatgcccatctcatcgcgccgctgcggcatgatcaccaaacgcgaggccgagcgtctgtgcaagtcgttcctgggcgaaaacaggccgcccaagctgccagacaatttcgccttcgacgtgtcacacgagtgcgcctggggctgccgcggcagcttcattcccgcgcgctacaacagctcgcgcgccaagtgcatcaaatgcagctactgcaacatgtacttctcgcccaacaagttcattttccactcccaccgcacgcccgacgccaagtacactcagccagacgcagccaacttcaactcgtggcgccgtcatctcaagctcaccgacaagagtccccaggacgagctggtcttcgcctgggaggacgtcaaggccatgttcaacggcggcagccgcaagcgcgcactgccccagccgggcgcgcaccccgcctgccacccgctcagctctataagaacaaggagcatagctttttcatcacagactctgatgcttctggaggagatttttggagagaaagatcaggaggattatatgcgaataaatgaggacaacatttggttatga

SEQ ID NO: 31490 - DNA, 891 bp, Artificial Sequence
  derived and/or modified sequence
atggcttcttccccgctccccggacccaatgacatcttgctagcatccccgagctccgcttttcaaccagatactctatctcagccccgtcccggacacgcaaatctgaaacccaaccaagtcgggcaggtgatattgtatggaatcccgattgtgtccctggttattgacgggcaggagagactgtgcctggcccagatttccaacaccctgttgaagaacttttcatataatgagatccataaccgacgtgtagctctcggcattacttgtgttcagtgtacccccgtccagctggaaatattaaggcgagccggtgctatgcccatcagctctcggaggtgcggcatgatcacaaagcgtgaagccgaacggttgtgcaagtccttcctgggggagaaccgcccacctaagctgcccgataatttcgcgttcgacgtctcgcatgagtgtgcctgggggtgtagagggagctttattccagcacgttacaacagctctcgcgcaaagtgtattaagtgctcttattgcaacatgtacttctcgccaaataagtttatctttcactcgcatagaacccccgatgcgaagtatactcaacccgacgcagccaactttaattcatggaggcgtcatcttaagcttaccgacaagagtcctcaggacgagttggtgttcgcttgggaggacgtgaaagccatgtttaacggcggatcgcgtaaaagagccctgccccagccaggggcacaccctgcgtgtcacccactgtcatctatccggacccgaagcatcgcgttttcgtctcagactctcatgctgctggaggaaattttcggagagaaagatcaagaagattatatgcgcataaacgaggataacatctggctctag

SEQ ID NO: 31491 - protein, 252 aa, Artificial Sequence
  derived and/or modified sequence
MAAACRSVKGLVAVITGGASGLGLATAERLVGQGASAVLLDLPNSGGEAQAKKLGNNCVFAPADVTSEKDVQTALALAKGKFGRVDVAVNCAGIAVASKTYNLKKGQTHTLEDFQRVLDVNLMGTFNVIRLVAGEMGQNEPDQGGQRGVIINTASVAAFEGQVGQAAYSASKGGIVGMTLPIARDLAPIGLFGTPLLTSLPEKVCNFLASQVPFPSRLGDPAEYAHLVQAIIENPFLNGEVIRLDGAIRMQP

SEQ ID NO: 31492 - DNA, 510 bp, Artificial Sequence
  derived and/or modified sequence
atggcagctgcctgtcgctccgtgaaaggactggtggcggtcatcacaggaggagccagcggtttgggccttgctacagccgagcgattagtggggcagggcgccagcgccgtactcttggacctgcccaatagcgggggggaggcccaggccaagaaactgggaaacaattgtgtttttgccccagcggatgtgacatcagaaaaggatgttcagaccgccctggctcttgccaagggtaaattcggaagagtggacgtggctgtcaactgtgcgggaatcgcagtggcttctaaaacatacaacttgaagaaggggcaaacccacacactcgaagactttcagcgagtcctcgacgtgaatttgatggggacattcaacgtgattcggttagtggccggcgaaatgggccagaacgagcccgaccagggcggtcagcgcggagtgatcatcaacactgcttctgtggccgcttttgagggccaggtgtgtctcgctccccattgctag

SEQ ID NO: 31493 - DNA, 759 bp, Artificial Sequence
  derived and/or modified sequence
atggccgccgcctgcagatctgtgaaggggctggtcgccgtgatcactgggggggcaagtggcctaggcctcgcaaccgcagagaggctggtcggacagggggctagtgctgtgcttctggatttgccgaacagcggtggcgaggcccaggccaaaaagcttgggaataactgtgtcttcgctccagcagatgtcacatcggagaaggacgtgcagacagccctggccctagccaaaggcaaatttggtagggtggatgttgcagtgaattgtgccgggatagccgtggcgagcaagacctacaacctcaaaaaggggcagacgcacacactcgaagactttcaaagagttctggacgtgaatttaatgggaactttcaatgttatccggcttgtcgccggtgagatgggccagaacgaacccgaccaaggtggccagcgcggggtgataattaacaccgcttccgtggccgccttcgaaggccaggtcggccaagcagcttattcagcttcgaaaggggggatagttggcatgaccctgcccatagcacgcgacctggcacccattggactcttcgggactcccctcttgacctcgcttcccgagaaggtatgcaattttctggcctcacaggttccattccctagccgactgggcgaccctgctgagtacgcccacctggtgcaggctatcatcgaaaacccctttctgaatggggaagtcattagattagatggcgctatccgcatgcagccttag

SEQ ID NO: 31494 - DNA, 916 bp, Artificial Sequence
  derived and/or modified sequence
ccggcgacaagatggcagcagcgtgtcggagcgtgaagggcctggtggcggtaataaccggaggagcctcgggcctgggcctggccacggcggagcgacttgtggggcagggagcctctgctgtgcttctggacctgcccaactcgggtggggaggcccaagccaagaagttaggaaacaactgcgttttcgccccagccgacgtgacctctgagaaggatgtgcaaacagctctggctctagcaaaaggaaagtttggccgtgtggatgtagctgtcaactgtgcaggcatcgcggtggctagcaagacgtacaacttaaagaagggccagacccataccttggaagacttccagcgagttcttgatgtgaatctcatgggcaccttcaatgtgatccgcctggtggctggtgagatgggccagaatgaaccagaccagggaggccaacgtggggtcatcatcaacactgccagtgtggctgccttcgagggtcaggttggacaagctgcatactctgcttccaaggggggaatagtgggcatgacactgcccattgctcgggatctggctcccataggtctgtttggcaccccactgctgaccagcctcccagagaaagtgtgcaacttcttggccagccaagtgcccttccctagccgactgggtgaccctgctgagtatgctcacctcgtacaggccatcatcgagaacccattcctcaatggagaggtcatccggctggatggggccattcgtatgcagccttgaagggagaaggcagagaaaacacacgctcctctgcccttcctttccctggggtactactctccagcttgggaggaagcccagtagccattttgtaactgcctaccagtcgccctctgtgcctaataaagtctctttttctcacagag

SEQ ID NO: 31495 - DNA, 510 bp, Artificial Sequence
  derived and/or modified sequence
atggctgctgcctgccgctctgtgaagggcctggtggccgtcatcaccggcggggccagcggcctgggcctggccacagctgagcggctggtgggccagggcgccagcgctgtgctgctggacctgcccaacagcggcggggaggcccaggccaagaagctgggcaacaactgtgtgtttgccccagcagatgtgaccagcgagaaggatgtgcagacagccctggccctggccaagggcaagtttggccgggtggatgtggccgtgaactgtgccggcattgctgtggccagcaagacctacaacctgaagaagggccagacccacaccctggaggacttccagagggtgctggatgtgaacctgatgggcaccttcaacgtcatccggctggtggccggggagatgggccagaatgaaccagaccagggcggccagaggggcgtcatcatcaacacagcctctgtggccgcctttgagggccaggtgtgcctggccccccactgctag

SEQ ID NO: 31496 - DNA, 759 bp, Artificial Sequence
  derived and/or modified sequence
atggctgctgcctgccgctctgtgaagggcctggtggccgtcatcaccggcggggccagcggcctgggcctggccacagctgagcggctggtgggccagggcgccagcgctgtgctgctggacctgcccaacagcggcggggaggcccaggccaagaagctgggcaacaactgtgtgtttgccccagcagatgtgaccagcgagaaggatgtgcagacagccctggccctggccaagggcaagtttggccgggtggatgtggccgtgaactgtgccggcattgctgtggccagcaagacctacaacctgaagaagggccagacccacaccctggaggacttccagagggtgctggatgtgaacctgatgggcaccttcaacgtcatccggctggtggccggggagatgggccagaatgaaccagaccagggcggccagaggggcgtcatcatcaacacagcctctgtggccgcctttgagggccaggtgggccaggccgcctacagcgccagcaagggcggcatcgtgggcatgaccctgcccatcgcccgggacctggcccccatcggcctgtttggcacccccctgctgaccagcctgcctgagaaggtgtgcaacttcctggccagccaggtgcccttccccagccggctgggggaccctgcagaatatgcccacctggtgcaggccatcatcgagaaccccttcctgaatggagaggtgatccggctggatggagccatccgcatgcagccctag

SEQ ID NO: 31497 - DNA, 510 bp, Artificial Sequence
  derived and/or modified sequence
atggccgccgcctgccggagcgtgaagggcctggtggccgtgatcacaggcggtgccagtggacttgggcttgccacagccgagaggcttgttgggcagggcgcttccgctgttctcttagatctccccaactctggtggggaagcacaggccaaaaagctaggcaataattgtgtcttcgcccctgccgacgtaacaagtgaaaaagacgtgcagaccgcgctggcactcgccaaaggcaagttcgggagggtagatgtcgccgtcaactgcgctgggatagcggtggcgtccaagacatataatcttaaaaagggtcagactcacactttagaagactttcagcgcgttctggatgtaaacctgatggggacctttaatgtaattcgacttgtggctggggaaatggggcagaacgagccagaccagggcggacagcgaggcgtgattatcaataccgccagcgtcgccgcttttgagggccaagtatgccttgcaccgcattgctag

SEQ ID NO: 31498 - DNA, 759 bp, Artificial Sequence
  derived and/or modified sequence
atggccgccgcctgccggagcgtgaagggcctggtggccgtgatcacgggaggtgcttccgggctcgggttggccaccgcggaacggctggtaggccaaggagcttcagcagtgctcctggacttgccaaatagcggcggcgaggcccaagccaagaagctggggaataattgtgtcttcgcccccgcggatgtgacctctgaaaaagacgtgcagacggcgcttgcactggcaaagggtaagtttggtcgcgtggatgtggctgtcaactgcgccgggattgcagtcgcaagcaagacatataacctcaagaaggggcaaacgcacacactggaggatttccaaagagtgcttgacgtgaatctgatgggaactttcaacgtcattcgcttggtcgcaggagagatgggccagaacgaacccgaccaaggcgggcaacggggagttattataaacactgcgagtgtcgccgcctttgagggacaggttgggcaggccgcttactctgccagtaagggtggcatcgtgggaatgacgttgcccattgcaagagacctcgctcctatcggattattcggcacccctctgctgacctctctgcctgagaaggtctgtaatttcctcgcttcacaggtgccattccctagtcggttgggcgaccctgcagagtacgcccatctggtgcaggccattatcgaaaacccctttctcaacggggaagtcatccgactcgatggtgctattagaatgcagccctag

SEQ ID NO: 31499 - DNA, 510 bp, Artificial Sequence
  derived and/or modified sequence
atggcagccgcatgcagaagcgtgaaaggactggtcgctgtcataactggtggtgcttccggcctcggactcgccaccgcagagcggcttgtcggccaaggggcatccgctgtgctgctagatctccctaacagtgggggtgaagcacaggctaaaaaattgggcaacaattgtgtgttcgccccagccgacgtgaccagcgaaaaagacgtgcaaactgccctggcattagccaaagggaaatttggccgagtggacgtcgccgtaaattgtgcagggatagccgtcgcttcaaaaacttataatttgaaaaaagggcaaacgcacacattggaagactttcagcgggtcctggacgtaaacctgatgggaacattcaacgtgatcagactggtggcgggagagatgggccagaacgaacctgaccaagggggtcagcgtggcgtgatcataaatactgcctccgtggccgcatttgaaggacaggtgtgtctagccccacattgctag

SEQ ID NO: 31500 - DNA, 759 bp, Artificial Sequence
  derived and/or modified sequence
atggccgcagcatgtaggagcgtcaagggcttagtggctgtgatcaccgggggagcgtcaggcttgggattggcaactgctgagagactcgtgggccagggcgcttcggccgtgctgctagatcttccaaacagcggaggcgaagctcaagctaaaaaactagggaacaattgtgtcttcgctcctgccgacgtgacctcagaaaaggatgtgcaaaccgccctggccttagcaaagggtaagtttggcagggttgacgtcgccgtgaattgcgctggaatcgccgtggctagtaaaacttacaacctgaaaaagggccagactcacacactcgaggacttccagcgggtactagatgttaacctcatggggacttttaacgtgatccgattggtggcgggagaaatgggccaaaatgagcccgatcagggagggcagcggggtgtgataatcaatacagcatctgtagctgcgtttgaaggccaggtggggcaagcagcatatagtgcctcaaaggggggaatcgtgggaatgactttgcctattgcccgtgatctggctccaatcggacttttcgggacacctctgctaacgtcccttcctgaaaaggtgtgcaattttctggctagccaagtaccttttcccagccggctgggcgacccggcagagtacgcacacctggtgcaggccataatagagaatccctttctgaatggtgaggtcattaggctggacggtgctattaggatgcagccctag

SEQ ID NO: 31501 - DNA, 510 bp, Artificial Sequence
  derived and/or modified sequence
atggccgccgcctgcagaagcgtgaagggcctggtggccgtgatcaccggcggcgccagcggcctgggcctggccaccgccgagagactggtgggccagggcgccagcgccgtgctgctggacctgcccaacagcggcggcgaggcccaggccaagaagctgggcaacaactgcgtgttcgcccccgccgacgtgaccagcgagaaggacgtgcagaccgccctggccctggccaagggcaagttcggcagagtggacgtggccgtgaactgcgccggcatcgccgtggccagcaagacctacaacctgaagaagggccagacccacaccctggaggacttccagagagtgctggacgtgaacctgatgggcaccttcaacgtgatcagactggtggccggcgagatgggccagaacgagcccgaccagggcggccagagaggcgtgatcatcaacaccgccagcgtggccgccttcgagggccaggtgtgcctggccccccactgctag

SEQ ID NO: 31502 - DNA, 759 bp, Artificial Sequence
  derived and/or modified sequence
atggccgccgcctgcagaagcgtgaagggcctggtggccgtgatcaccggcggcgccagcggcctgggcctggccaccgccgagagactggtgggccagggcgccagcgccgtgctgctggacctgcccaacagcggcggcgaggcccaggccaagaagctgggcaacaactgcgtgttcgcccccgccgacgtgaccagcgagaaggacgtgcagaccgccctggccctggccaagggcaagttcggcagagtggacgtggccgtgaactgcgccggcatcgccgtggccagcaagacctacaacctgaagaagggccagacccacaccctggaggacttccagagagtgctggacgtgaacctgatgggcaccttcaacgtgatcagactggtggccggcgagatgggccagaacgagcccgaccagggcggccagagaggcgtgatcatcaacaccgccagcgtggccgccttcgagggccaggtgggccaggccgcctacagcgccagcaagggcggcatcgtgggcatgaccctgcccatcgccagagacctggcccccatcggcctgttcggcacccccctgctgaccagcctgcccgagaaggtgtgcaacttcctggccagccaggtgcccttccccagcagactgggcgaccccgccgagtacgcccacctggtgcaggccatcatcgagaaccccttcctgaacggcgaggtgatcagactggacggcgccatcagaatgcagccctag

SEQ ID NO: 31503 - protein, 1250 aa, Artificial Sequence
  derived and/or modified sequence
MRRGGWRKRAENDGWETWGGYMAAKVQKLEEQFRSDAAMQKDGTSSTIFSGVAIYVNGYTDPSAEELRKLMMLHGGQYHVYYSRSKTTHIIATNLPNAKIKELKGEKVIRPEWIVESIKAGRLLSYIPYQLYTKQSSVQKGLSFNPVCRPEDPLPGPSNIAKQLNNRVNHIVKKIETENEVKVNGMNSWNEEDENNDFSFVDLEQTSPGRKQNGIPHPRGSTAIFNGHTPSSNGALKTQDCLVPMVNSVASRLSPAFSQEEDKAEKSSTDFRDCTLQQLQQSTRNTDALRNPHRTNSFSLSPLHSNTKINGAHHSTVQGPSSTKSTSSVSTFSKAAPSVPSKPSDCNFISNFYSHSRLHHISMWKCELTEFVNTLQRQSNGIFPGREKLKKMKTGRSALVVTDTGDMSVLNSPRHQSCIMHVDMDCFFVSVGIRNRPDLKGKPVAVTSNRGTGRAPLRPGANPQLEWQYYQNKILKGKADIPDSSLWENPDSAQANGIDSVLSRAEIASCSYEARQLGIKNGMFFGHAKQLCPNLQAVPYDFHAYKEVAQTLYETLASYTHNIEAVSCDEALVDITEILAETKLTPDEFANAVRMEIKDQTKCAASVGIGSNILLARMATRKAKPDGQYHLKPEEVDDFIRGQLVTNLPGVGHSMESKLASLGIKTCGDLQYMTMAKLQKEFGPKTGQMLYRFCRGLDDRPVRTEKERKSVSAEINYGIRFTQPKEAEAFLLSLSEEIQRRLEATGMKGKRLTLKIMVRKPGAPVETAKFGGHGICDNIARTVTLDQATDNAKIIGKAMLNMFHTMKLNISDMRGVGIHVNQLVPTNLNPSTCPSRPSVQSSHFPSGSYSVRDVFQVQKAKKSTEEEHKEVFRAAVDLEISSASRTCTFLPPFPAHLPTSPDTNKAESSGKWNGLHTPVSVQSRLNLSIEVPSPSQLDQSVLEALPPDLREQVEQVCAVQQAESHGDKKKEPVNGCNTGILPQPVGTVLLQIPEPQESNSDAGINLIALPAFSQVDPEVFAALPAELQRELKAAYDQRQRQGENSTHQQSASASVPKNPLLHLKAAVKEKKRNKKKKTIGSPKRIQSPLNNKLLNSPAKTLPGACGSPQKLIDGFLKHEGPPAEKPLEELSASTSGVPGLSSLQSDPAGCVRPPAPNLAGAVEFNDVKTLLREWITTISDPMEEDILQVVKYCTDLIEEKDLEKLDLVIKYMKRLMQQSVESVWNMAFDFILDNVQVVLQQTYGSTLKVT

SEQ ID NO: 31504 - DNA, 3753 bp, Artificial Sequence
  derived and/or modified sequence
atgagaagaggcggctggagaaagagagccgagaacgacggctgggagacctggggcggctacatggccgccaaggtgcagaagctggaggagcagttcagaagcgacgccgccatgcagaaggacggcaccagcagcaccatcttcagcggcgtggccatctacgtgaacggctacaccgaccccagcgccgaggagctgagaaagctgatgatgctgcacggcggccagtaccacgtgtactacagcagaagcaagaccacccacatcatcgccaccaacctgcccaacgccaagatcaaggagctgaagggcgagaaggtgatcagacccgagtggatcgtggagagcatcaaggccggcagactgctgagctacatcccctaccagctgtacaccaagcagagcagcgtgcagaagggcctgagcttcaaccccgtgtgcagacccgaggaccccctgcccggccccagcaacatcgccaagcagctgaacaacagagtgaaccacatcgtgaagaagatcgagaccgagaacgaggtgaaggtgaacggcatgaacagctggaacgaggaggacgagaacaacgacttcagcttcgtggacctggagcagaccagccccggcagaaagcagaacggcatcccccaccccagaggcagcaccgccatcttcaacggccacacccccagcagcaacggcgccctgaagacccaggactgcctggtgcccatggtgaacagcgtggccagcagactgagccccgccttcagccaggaggaggacaaggccgagaagagcagcaccgacttcagagactgcaccctgcagcagctgcagcagagcaccagaaacaccgacgccctgagaaacccccacagaaccaacagcttcagcctgagccccctgcacagcaacaccaagatcaacggcgcccaccacagcaccgtgcagggccccagcagcaccaagagcaccagcagcgtgagcaccttcagcaaggccgcccccagcgtgcccagcaagcccagcgactgcaacttcatcagcaacttctacagccacagcagactgcaccacatcagcatgtggaagtgcgagctgaccgagttcgtgaacaccctgcagagacagagcaacggcatcttccccggcagagagaagctgaagaagatgaagaccggcagaagcgccctggtggtgaccgacaccggcgacatgagcgtgctgaacagccccagacaccagagctgcatcatgcacgtggacatggactgcttcttcgtgagcgtgggcatcagaaacagacccgacctgaagggcaagcccgtggccgtgaccagcaacagaggcaccggcagagcccccctgagacccggcgccaacccccagctggagtggcagtactaccagaacaagatcctgaagggcaaggccgacatccccgacagcagcctgtgggagaaccccgacagcgcccaggccaacggcatcgacagcgtgctgagcagagccgagatcgccagctgcagctacgaggccagacagctgggcatcaagaacggcatgttcttcggccacgccaagcagctgtgccccaacctgcaggccgtgccctacgacttccacgcctacaaggaggtggcccagaccctgtacgagaccctggccagctacacccacaacatcgaggccgtgagctgcgacgaggccctggtggacatcaccgagatcctggccgagaccaagctgacccccgacgagttcgccaacgccgtgagaatggagatcaaggaccagaccaagtgcgccgccagcgtgggcatcggcagcaacatcctgctggccagaatggccaccagaaaggccaagcccgacggccagtaccacctgaagcccgaggaggtggacgacttcatcagaggccagctggtgaccaacctgcccggcgtgggccacagcatggagagcaagctggccagcctgggcatcaagacctgcggcgacctgcagtacatgaccatggccaagctgcagaaggagttcggccccaagaccggccagatgctgtacagattctgcagaggcctggacgacagacccgtgagaaccgagaaggagagaaagagcgtgagcgccgagatcaactacggcatcagattcacccagcccaaggaggccgaggccttcctgctgagcctgagcgaggagatccagagaagactggaggccaccggcatgaagggcaagagactgaccctgaagatcatggtgagaaagcccggcgcccccgtggagaccgccaagttcggcggccacggcatctgcgacaacatcgccagaaccgtgaccctggaccaggccaccgacaacgccaagatcatcggcaaggccatgctgaacatgttccacaccatgaagctgaacatcagcgacatgagaggcgtgggcatccacgtgaaccagctggtgcccaccaacctgaaccccagcacctgccccagcagacccagcgtgcagagcagccacttccccagcggcagctacagcgtgagagacgtgttccaggtgcagaaggccaagaagagcaccgaggaggagcacaaggaggtgttcagagccgccgtggacctggagatcagcagcgccagcagaacctgcaccttcctgccccccttccccgcccacctgcccaccagccccgacaccaacaaggccgagagcagcggcaagtggaacggcctgcacacccccgtgagcgtgcagagcagactgaacctgagcatcgaggtgcccagccccagccagctggaccagagcgtgctggaggccctgccccccgacctgagagagcaggtggagcaggtgtgcgccgtgcagcaggccgagagccacggcgacaagaagaaggagcccgtgaacggctgcaacaccggcatcctgccccagcccgtgggcaccgtgctgctgcagatccccgagccccaggagagcaacagcgacgccggcatcaacctgatcgccctgcccgccttcagccaggtggaccccgaggtgttcgccgccctgcccgccgagctgcagagagagctgaaggccgcctacgaccagagacagagacagggcgagaacagcacccaccagcagagcgccagcgccagcgtgcccaagaaccccctgctgcacctgaaggccgccgtgaaggagaagaagagaaacaagaagaagaagaccatcggcagccccaagagaatccagagccccctgaacaacaagctgctgaacagccccgccaagaccctgcccggcgcctgcggcagcccccagaagctgatcgacggcttcctgaagcacgagggcccccccgccgagaagcccctggaggagctgagcgccagcaccagcggcgtgcccggcctgagcagcctgcagagcgaccccgccggctgcgtgagaccccccgcccccaacctggccggcgccgtggagttcaacgacgtgaagaccctgctgagagagtggatcaccaccatcagcgaccccatggaggaggacatcctgcaggtggtgaagtactgcaccgacctgatcgaggagaaggacctggagaagctggacctggtgatcaagtacatgaagagactgatgcagcagagcgtggagagcgtgtggaacatggccttcgacttcatcctggacaacgtgcaggtggtgctgcagcagacctacggcagcaccctgaaggtgacctag

SEQ ID NO: 31505 - DNA, 3753 bp, Artificial Sequence
  derived and/or modified sequence
atgcgaagggggggctggaggaagcgggcggagaacgacggctgggagacgtggggcggctacatggctgctaaggtgcaaaaattggaggagcagtttcgatctgacgcggccatgcagaaagacggcacctcttcaacgattttttcaggcgtcgccatttacgtcaatggttacactgaccccagtgcagaagagctccgtaagcttatgatgctccacggcggccagtaccacgtgtactactcccgcagcaagactacacatataatcgcaactaatcttccaaatgccaagattaaggagctaaaaggcgaaaaagtgatcagaccggagtggatagtggagtccatcaaagcaggccgattacttagctatataccataccagttgtacaccaaacaaagttcggtgcagaaaggactcagtttcaatcccgtgtgccgcccggaagatccactgccaggtcccagtaatattgctaagcagctgaataacagggtaaaccacatcgtgaagaagatcgaaacagagaatgaagtcaaggtgaacggcatgaactcctggaacgaggaagacgagaacaatgacttctcatttgtggatcttgaacagacatcacctggtagaaaacagaacggcataccacatccccggggttccacagcaatttttaacgggcatacgccatcttcgaatggcgccctcaaaacacaggattgtctggtgcccatggtcaattccgtggcttcgcggctatcccctgctttttcacaggaggaagataaagccgagaaatccagcaccgacttcagagattgcacgttacagcagctgcaacagagcacacggaataccgatgccctcagaaatccccatagaactaatagcttctccctatcacctctccacagcaacacgaaaattaacggcgctcaccatagcaccgttcagggccctagctctacaaaatctacgtctagcgtgagtaccttcagtaaggccgcacctagtgtgccttccaagccttccgattgtaacttcatctccaacttttattcacatagccgcctccaccatatctctatgtggaagtgtgagttgaccgagttcgttaacaccctccagcgccaatctaatggaatatttccagggagggagaagctaaagaaaatgaagactggccgttctgcactggtcgtaactgacaccggagacatgtcggtcctcaactcaccccggcatcagagctgtattatgcacgtggacatggactgcttttttgtatctgtagggataaggaaccgaccggatctcaaaggtaagccagtcgcagtgactagtaaccggggaaccggtcgcgcgcccctgcgtccaggagcaaaccctcagctggagtggcaatattatcagaataagatactgaaagggaaagctgatatcccagattctagtttgtgggagaatcctgactccgcgcaggccaacggcattgactcagtgctgtcgcgcgccgaaatcgcctcttgtagctacgaagcccgtcagctgggcatcaaaaatgggatgttctttggacacgccaagcagctctgccctaatctgcaggctgtaccttacgacttccacgcttacaaggaagtagcccagacactctatgaaacactagcaagctatactcacaatatcgaggccgtaagctgcgacgaggccttagttgatatcacggagattctggctgagacaaagctgacccccgacgagttcgctaacgccgtgcggatggagatcaaggatcagacaaaatgtgctgcatcagtgggcattggctccaatattttgcttgcacgtatggctaccagaaaggcaaagccagatggccagtaccacctgaagcccgaggaggtcgacgactttatccgtggacagctggtgactaacctgcctggagtgggtcacagcatggagagcaaattggcgtcactcggtatcaagacatgtggggatctgcaatatatgacaatggctaaactgcagaaggaattcggacctaagacgggacagatgctgtatcgcttttgccgtggcctggatgatcggcctgtcagaactgaaaaggaacggaagtctgtctctgctgagatcaactacggcatccggttcacccagccgaaggaagccgaggcttttttactctccctcagcgaagaaatacagcggaggctggaggcaacaggaatgaagggaaaaagacttactctgaagatcatggttaggaaaccaggggcccctgtggagactgcgaaatttggcggccatggcatatgcgacaatattgccaggacggtgactttggatcaggccactgacaacgctaagatcatcggcaaggcaatgctgaatatgttccacaccatgaagctaaacatttccgatatgcgcggggtgggcatacacgtgaatcagcttgtccctaccaacctcaacccctccacatgcccatcaagaccaagcgtccagtctagccatttcccctctggtagctattcagtgagggatgtgtttcaggttcagaaggctaaaaagtccactgaagaagaacacaaggaggtgttcagagctgccgtggatttggaaatatcatcagcctctcgtacctgcacctttctgcctccattccctgctcatctgcctaccagcccggacacaaacaaagccgagagcagtgggaagtggaacgggctacacactcccgttagcgtgcagagccggctgaacctgtctattgaggttccatcaccctcccaactagaccaatcagtccttgaggcccttccgcctgatctgcgggaacaagtcgagcaggtttgtgccgttcagcaggccgagagccatggcgataaaaagaaagagcccgttaacgggtgtaataccgggatcctgcctcagcccgtgggaactgtgttgctgcagattcccgagccccaagagagcaatagcgacgctggcatcaacctcattgccctacccgctttttcacaggtcgacccagaggtgttcgccgcattgccagcggagttgcagagagagctaaaggccgcatatgaccagagacagcgccagggtgagaactctacacatcagcagtccgcttcggcatctgtcccaaaaaatccacttctgcacttaaaagctgcagtgaaggagaaaaagcgtaataaaaagaagaaaacgatcgggagccccaagaggatccagagtccattgaacaacaagctgctcaatagtccagcaaaaaccttgcccggggcttgcggatcccctcaaaagcttattgacgggttcctgaaacatgagggcccacccgctgagaagccactagaagagctatcagcttctacaagtggtgtgcccgggctgagctcccttcaatcagaccctgcggggtgtgtgaggccaccagctcccaacctcgccggtgcagtcgaatttaatgatgtcaagacccttctacgcgaatggattacaacaatcagcgatcctatggaagaggacatacttcaggtggtgaagtattgtaccgatctgatcgaggaaaaggacctggagaaactcgacctcgttatcaaatatatgaaaagattgatgcagcagtcggtggagtctgtgtggaatatggccttcgactttatcctggataacgtgcaggtggttctacaacagacttacgggagcactctcaaggttacctag

SEQ ID NO: 31506 - DNA, 3753 bp, Artificial Sequence
  derived and/or modified sequence
atgaggcggggcggctggaggaagagagcagaaaatgatggctgggagacctggggcggctacatggccgccaaggtgcagaagctggaggagcagttcagaagtgatgctgccatgcagaaggatggcaccagcagcaccatcttcagcggcgtggccatctacgtgaatggctacacagaccccagcgctgaggagctgaggaagctgatgatgctgcacggcggccagtaccacgtgtactacagccgcagcaagaccacccacatcatcgccaccaacctgcccaatgccaagatcaaggagctgaagggggagaaggtgatccggcctgagtggatcgtggagagcatcaaggccggccgcctgctgagctacatcccctaccagctgtacaccaagcagagctctgtgcagaagggcctgtccttcaaccctgtgtgcaggcctgaggaccccctgcccggccccagcaacatcgccaagcagctgaacaacagagtgaaccacatcgtgaagaagattgaaacagaaaatgaggtgaaggtgaatggcatgaacagctggaatgaggaggatgagaacaatgacttctcctttgtggacctggagcagaccagccctggcaggaagcagaatggcatcccccacccccggggcagcacagccatcttcaacggccacacccccagcagcaatggagccctgaagacccaggactgcctggtgcccatggtgaacagcgtggccagccggctgagccctgccttcagccaggaggaggacaaggccgagaagagcagcacagacttccgggactgcaccctgcagcagctgcagcagagcaccaggaacacagatgccctgaggaacccccacaggaccaacagcttcagcctgagccccctgcacagcaacaccaagatcaacggggcccaccacagcacagtgcagggccccagcagcaccaagagcaccagctctgtgtccaccttcagcaaggccgcccccagcgtgcccagcaagcccagcgactgcaacttcatcagcaacttctacagccacagccggctgcaccacatctccatgtggaagtgtgagctgacagaatttgtgaacaccctgcagaggcagagcaatggcatcttccctggccgggagaagctgaagaagatgaagacaggccgcagcgccctggtggtgacagacaccggggacatgtctgtgctgaacagccccaggcaccagagctgcatcatgcacgtggacatggactgcttctttgtgtctgtgggcatccggaacagaccagacctgaagggcaagcctgtggccgtgaccagcaacagaggcaccggccgggcccccctgcggcctggggccaacccccagctggagtggcagtactaccagaacaagatcctgaagggcaaggctgacatcccagacagcagcctgtgggagaacccagacagcgcccaggccaacggcatcgacagcgtgctgagcagagctgagatcgccagctgcagctatgaggcccggcagctgggcatcaagaatggcatgttctttggacatgccaagcagctgtgccccaacctgcaggccgtgccctatgacttccacgcctacaaggaggtggcccagaccctgtatgagaccctggccagctacacccacaacattgaagctgtgtcctgtgatgaggccctggtggacatcacagagatcctggccgagaccaagctgaccccagatgaatttgccaatgctgtgaggatggagatcaaggaccagaccaagtgtgccgcctctgtgggcatcggcagcaacatcctgctggccaggatggccaccaggaaggccaagccagatggccagtaccacctgaagccagaggaggtggatgacttcatccggggccagctggtgaccaacctgcccggggtgggccacagcatggagagcaagctggccagcctgggcatcaagacctgtggggacctgcagtacatgaccatggccaagctgcagaaggagtttggccccaagacaggccagatgctgtaccgcttctgccggggcctggatgacaggcctgtgaggacagagaaggagaggaagtctgtgtctgctgagatcaactacggcatccgcttcacccagcccaaggaggccgaggccttcctgctgagcctgtctgaggagatccagaggcggctggaggccaccggcatgaagggcaagaggctgaccctgaagatcatggtgaggaagccaggggcccctgtggagacagccaagtttggaggccacggcatctgtgacaacatcgccaggacagtgaccctggaccaggccacagacaatgccaagatcatcggcaaggccatgctgaacatgttccacaccatgaagctgaacatcagtgacatgagaggagtgggcatccacgtgaaccagctggtgcccaccaacctgaaccccagcacctgccccagccggcccagcgtgcagagcagccacttccccagcggcagctacagcgtgagagatgtgttccaggtgcagaaggccaagaagagcacagaggaggagcacaaggaggtgttccgggctgctgtggacctggagatcagcagcgccagcaggacctgcaccttcctgccccccttccctgcccacctgcccaccagcccagacaccaacaaggccgagagcagcggcaagtggaatggcctgcacacccctgtgtctgtgcagagccggctgaacctgagcattgaggtgcccagccccagccagctggaccagagcgtgctggaggccctgcccccagacctgcgggagcaggtggagcaggtgtgtgctgtgcagcaggccgagagccatggagacaagaagaaggagcctgtgaatggctgcaacacaggcatcctgccccagcctgtgggcaccgtgctgctgcagatccctgagccccaggagagcaacagtgatgctggcatcaacctgattgccctgcctgccttcagccaggtggaccctgaggtgtttgctgccctgcctgctgagctgcagcgggagctgaaggccgcctatgaccagaggcagaggcagggcgagaacagcacccaccagcagagcgccagcgcctctgtgcccaagaaccccctgctgcacctgaaggctgctgtgaaggagaagaagaggaacaagaagaagaagaccatcggcagccccaagaggatccagagccccctgaacaacaagctgctgaacagccctgccaagaccctgcccggggcctgtggcagcccccagaagctgattgatggcttcctgaagcatgagggccccccagctgagaagcccctggaggagctgagcgccagcaccagcggcgtgcccggcctgagcagcctgcagagcgaccctgctggctgtgtgcggcccccagcccccaacctggccggggctgtggagttcaatgatgtgaagaccctgctgcgggagtggatcaccaccatcagtgaccccatggaggaggacatcctgcaggtggtgaagtactgcacagacctgattgaggagaaggacctggagaagctggacctggtgatcaagtacatgaagaggctgatgcagcagagcgtggagagcgtgtggaacatggcctttgacttcatcctggacaacgtgcaggtggtgctgcagcagacctacggcagcaccctgaaggtgacctag

SEQ ID NO: 31507 - DNA, 3753 bp, Artificial Sequence
  derived and/or modified sequence
atgcggcggggcggctggcggaagcgggccgagaacgacggctgggaaacttggggtggatatatggccgcgaaagtgcaaaagctggaggagcaattccgaagtgacgctgcaatgcagaaggatggcacatcatcaacaattttttcaggtgttgccatctatgtcaacggctatacagaccccagcgctgaagaactgagaaaactcatgatgctacacggcgggcagtatcacgtgtattatagccggtcgaagaccacacatattatagccacaaacctgccgaacgctaagattaaagaactgaaaggcgagaaagtgatccgtccagagtggattgtcgagtccataaaggcgggccggctgctgtcctacattccatatcagctatacactaaacagtctagcgtccagaagggcctgagctttaatcccgtatgccggccagaggaccctttgcccgggccctccaatatcgcgaagcaactgaacaaccgggtgaatcacatcgtgaaaaaaatcgaaaccgaaaacgaggtgaaagttaacggcatgaattcttggaacgaagaggacgaaaacaacgatttcagtttcgttgacctcgagcagacatctcctggcagaaagcaaaatggcattccacatccgcggggctccaccgcaatctttaatgggcataccccgagtagcaatggggctcttaagactcaggactgcttggtgccaatggtgaattctgtggcttcaaggctctctccagcattctctcaggaagaggacaaggctgagaagtcatcaacagactttcgggattgtaccctccaacagctgcaacagtctacgcgcaacaccgatgcattaagaaacccgcaccgcactaactctttcagcctgagtccccttcatagcaacaccaagatcaatggtgctcatcactcaactgtgcagggaccctcttctactaagagcaccagctctgtgtccaccttttccaaggccgcgccatcagtgccctcaaagccttcagattgcaattttatcagcaacttctattcccactctcgtctccaccatatttctatgtggaaatgcgagctcacagaatttgtgaatacattacagcggcagtccaatggcatctttccgggtcgagaaaaactaaagaaaatgaaaacaggacgctccgccctggttgttaccgatactggagacatgagtgtcttaaatagcccacgacatcaatcctgcatcatgcacgtggacatggattgtttcttcgtttctgtcgggatcaggaatagacccgatctgaagggcaaaccagtggcagtgacatctaacagggggactggtcgtgcgcccctgcggcccggggccaatcctcagctggagtggcagtactatcagaataaaattctcaaagggaaggccgatatcccggattcttctctgtgggagaatccggactcagcacaagccaacggaattgattcagttcttagtcgagctgagattgctagctgcagctacgaggctaggcagctcggaataaaaaacggaatgttcttcggccacgccaaacaactgtgtccaaatcttcaagcagttccctatgattttcatgcctataaggaagttgctcagacactctatgagacactcgcatcttatacacacaacatcgaagcggtgtcttgcgacgaagcactggtggacattactgagatcctcgctgagaccaagctgacacccgacgaattcgctaacgccgtccgtatggaaattaaggatcagactaaatgcgccgctagcgtggggatcggttcaaacattctcctggcacgaatggccacaagaaaagcaaagccagacggacaatatcatctgaagcctgaggaagtggacgatttcatacgcggccagttggtgaccaatctgccaggagtggggcactccatggaatcaaaactcgctagcttgggaataaagacatgcggtgatctccaatatatgacgatggcaaagctgcaaaaggaattcggacctaaaaccggccaaatgctttaccggttttgcagaggtcttgatgaccgccccgtgcggaccgagaaggagaggaaaagcgtcagtgccgaaattaactacgggattaggttcacacaaccgaaggaggctgaggcattcctgctttcactcagcgaggaaatacaacggcgactagaggccacgggcatgaaaggcaaacgcctgaccctgaagattatggtaagaaaaccaggagcccccgtcgagacagcaaagtttggaggccacggtatctgcgataacatcgctcgtactgtgacgctggatcaagcaactgataatgccaaaattatcgggaaggccatgctcaatatgtttcataccatgaagctgaacattagtgacatgcgaggcgtgggcattcatgtcaaccagttggtcccaactaaccttaatccttccacttgtccaagccgccccagcgtgcagtctagtcacttccccagcgggtcatactcagtgagagacgtgttccaagtgcagaaggccaagaaatctaccgaggaagagcacaaggaggtttttagggctgcagtggacctggagatcagctccgcctctagaacatgcactttcctgccacctttccccgcacacctgcccacttccccagacactaacaaggccgagagctcagggaagtggaatgggctgcacacccctgtctcagtccagtcacgactcaacctgtcgattgaggtaccatccccctcccagctcgaccaaagcgttttggaggccctaccccccgaccttcgggagcaggtcgaacaggtgtgtgctgttcagcaagctgagagccatggtgataaaaaaaaggaaccagtgaacggctgcaacactggaatcttaccgcagcctgtgggaactgttctgctgcagatccctgaaccccaagaaagcaactctgatgccggtataaatctgattgccctgcccgccttctcccaagtggatcccgaggtttttgccgccttacccgccgagcttcaaagagagttgaaggccgcctacgatcaaagacagaggcaaggagaaaattctacgcaccagcagagcgcaagcgcttcagtgccaaagaatcccctgctgcatttaaaggccgcagtcaaggagaagaaaaggaacaagaagaagaagaccatcggctctcctaagcgcatccagagccccctaaacaataagcttctcaactcccctgccaagactctccctggagcatgcgggtccccacagaaactcatcgacggttttctcaagcatgagggacctcccgccgagaagccattggaggagctgtcagcatccacaagtggggtgccggggctgtccagtctgcagtcagatccagctgggtgtgtgcggccccccgcgcctaaccttgcaggagcggtcgaattcaatgatgtgaaaactctgttgagggagtggatcaccacgatcagtgatcccatggaagaagacatcttacaagtggttaagtactgtactgatttgatcgaagagaaggacctagagaagctcgatctcgtgatcaaatatatgaagagactgatgcagcagtccgtcgaaagcgtgtggaacatggcttttgactttatcctcgataacgttcaggttgtgctgcagcagacttacggctcgacactcaaggtaacctag

SEQ ID NO: 31508 - DNA, 3753 bp, Artificial Sequence
  derived and/or modified sequence
atgagaagggggggttggcggaagcgggcagagaatgatgggtgggagacctggggcggatacatggccgctaaagtgcagaagctcgaagagcaattccggtccgatgctgccatgcagaaagacggcacctcctcaactattttttctggggtggcaatttacgtgaacggctacaccgacccgagcgctgaggaactgcgaaagctgatgatgcttcatggtggccagtatcatgtctattacagtaggagcaaaacaacccacatcatagccactaatttgcccaatgctaagatcaaagaactcaagggcgagaaggtgatacggccagaatggatagtggaatcgattaaggccggtcgacttctctcttatatcccataccagttgtacacaaagcagagtagcgttcagaagggactgtcatttaatccagtctgccggcctgaagatcccttgccgggaccctccaacatagctaagcagctcaataaccgggtcaatcatatcgtcaaaaagatcgagacagagaatgaggtcaaggtgaatgggatgaacagctggaacgaagaggacgagaataacgatttctcatttgtcgacttggaacagacaagtcccggacggaagcaaaacggtataccccacccgaggggcagtaccgccatctttaacggccacactcctagttctaatggcgctctgaagacgcaggattgtcttgtcccgatggtgaactctgtagccagtcgcctgagccctgcattttctcaagaggaagacaaggcagagaagagcagcactgacttccgtgactgtacactgcagcaactacagcagtctacacgtaacactgacgcccttaggaatccccatcggaccaatagtttttctctttctccccttcacagcaatacaaaaataaatggtgcccaccacagcacagtacagggaccatcttctactaagagtacctcttctgtttcaaccttcagcaaggcagcaccatcagtgccaagtaagccatccgactgcaatttcatatccaatttttattcacattcccgactccatcacatctcaatgtggaagtgcgagcttaccgagttcgttaacaccctgcagaggcaaagtaacggaatttttcctggcagggaaaagctcaagaaaatgaagactggccgtagtgcgctggtggtgacggatactggagacatgagcgtcttgaattcccccagacaccaaagctgcatcatgcacgtagatatggactgcttttttgtatccgttgggatcaggaaccgccctgacctcaagggaaagcctgttgctgttaccagtaatcgtggcaccgggagggcccctctgaggcctggggctaatccccagctcgagtggcaatactaccaaaacaagatactgaaggggaaggcggatatacccgactctagtttgtgggaaaacccagatagcgcccaggccaacggcatcgattccgtgttgtcaagagccgaaattgcttcatgttcttacgaagccagacagctgggtattaagaatggcatgttcttcgggcacgccaaacagctgtgcccaaacctgcaggctgtcccatatgatttccacgcctacaaagaagtcgcccagaccctttatgaaaccttggcctcgtacacccacaacatcgaggccgtgagttgcgatgaggccctggtcgatattaccgagattctggcggaaacgaaacttactcccgacgagtttgctaacgccgtgcgcatggaaatcaaagaccagaccaagtgtgcagctagtgtggggataggctccaacattctgctggcaagaatggcaactcgtaaagccaagcccgacggacaataccacctgaagccagaggaggtagacgattttatccgagggcagcttgtaaccaatctccccggagtcggacacagcatggaatccaagctggcatcgctcggtatcaaaacatgtggtgatttgcaatatatgactatggcgaagctgcagaaggagttcgggcctaagacaggccagatgctgtatcggttctgccgtggcctggacgatcgacctgtgaggactgaaaaggagcggaagagcgtctcggccgaaattaactacggaatccggttcacccaacccaaagaggctgaggcgtttctgttatctctgagcgaggagattcagcgacgcctcgaggcaaccggtatgaagggcaaaagactgaccctgaaaattatggtgcgcaaaccaggtgctccagtcgagactgctaagttcggcggacacggcatttgcgacaatatcgctcgcacggtgactctcgaccaggccactgacaacgccaaaatcattggcaaagccatgctgaacatgtttcataccatgaagctaaacataagcgatatgaggggagtgggaatccatgttaatcagctggtacctacaaatttgaatcctagcacatgcccttctcgtccatctgttcaatctagccattttccatccggatcctattccgtgcgcgacgtcttccaggtgcaaaaggccaaaaagtcaactgaggaggagcacaaggaggtgttccgcgcagcggtcgatctggagatctccagtgctagcaggacctgtaccttcctccctccattcccagcccacctcccgacatcaccagacacaaataaggcagaatcgagcggaaagtggaatggtcttcacacccccgtctctgtgcaatccaggctgaatctttcgatcgaggttccgagccctagccagctcgatcagtctgtgctggaagctctaccacctgacctccgcgaacaggtcgagcaggtttgcgctgttcagcaggccgagtcacatggcgacaagaagaaagaacctgtgaacggctgtaatactggaatcctcccccagccagtcgggaccgtcctgctccagataccggagcctcaggagtccaactccgacgcgggaattaacctcattgccctgccagctttctctcaagtagaccctgaagtttttgctgccctgcctgcagagctgcagagggaattgaaagccgcatacgatcagaggcagcgccagggggagaactctacccaccagcagtcagcatccgcatcagttcccaagaatccacttctgcatctgaaggctgctgttaaagaaaaaaagagaaataaaaaaaaaaaaacaattgggtccccgaagcgcattcagtctcccctcaacaacaagttactgaactcaccagctaaaaccctgcctggcgcttgcggttctcctcagaaactgattgacgggttcctaaagcacgagggccctcccgctgagaaaccccttgaggagctttccgcttccacttcaggagtaccgggactgagcagcctgcagtctgaccccgcagggtgcgtgagacccccagccccaaaccttgcaggagccgtggagttcaacgatgtcaagaccttgctccgggaatggattactaccattagcgaccctatggaggaggatatcctccaggttgtgaaatactgcaccgacctgatcgaggaaaaggaccttgaaaagttagatctggtaattaagtatatgaagaggctgatgcagcagtctgtggaaagcgtgtggaacatggcttttgatttcattcttgataacgttcaggtggtactgcaacagacttacggatccaccctgaaagtgacctag

SEQ ID NO: 31509 - DNA, 4686 bp, Artificial Sequence
  derived and/or modified sequence
gggagcgtggaccgcggcgctgctcagcggtggggctgccttcccccggccctcctccctggtccctggcgagggcactggcggcggcggggccggggtccgcaaggccggagaaggccgccgggcccgggcatggtggtctggggcaacgcggaagaagctccaccatgaggcgaggtggatggaggaagcgagctgaaaatgatggctgggaaacatggggtgggtatatggctgccaaggtccagaaattggaggaacagtttcgatcagatgctgctatgcagaaggatgggacttcatctacaatttttagtggagttgccatctatgttaatggatacacagatccttccgctgaggaattgagaaaactaatgatgttgcatggaggtcaataccatgtatattattccagatctaaaacaacacatattattgccacaaatcttcccaatgccaaaattaaagaattaaagggggaaaaagtaattcgaccagaatggattgtggaaagcatcaaagctggacgactcctctcctacattccatatcagctgtacaccaagcagtccagtgtgcagaaaggtctcagctttaatcctgtatgcagacctgaggatcctctgccaggtccaagcaatatagccaaacagctcaacaacagggtaaatcacatcgttaagaagattgaaacggaaaatgaagtcaaagtcaatggcatgaacagttggaatgaagaagatgaaaataatgattttagttttgtggatctggagcagacctctccgggaaggaaacagaatggaattccgcatcccagagggagcactgccatttttaatggacacactcctagctctaatggtgccttaaagacacaggattgcttggtgcccatggtcaacagtgttgccagcaggctttctccagccttttcccaggaggaggataaggctgagaagagcagcactgatttcagagactgcactctgcagcagttgcagcaaagcaccagaaacacagatgctttgcggaatccacacagaactaattctttctcattatcacctttgcacagtaacactaaaatcaatggtgctcaccactccactgttcaggggccttcaagcacaaaaagcacttcttcagtatctacgtttagcaaggcagcaccttcagtgccatccaaaccttcagactgcaattttatttcaaacttctattctcattcaagactgcatcacatatcaatgtggaagtgtgaattgactgagtttgtcaataccctacaaagacaaagtaatggtatctttccaggaagggaaaagttaaaaaaaatgaaaacaggcaggtctgcacttgttgtaactgacacaggagatatgtcagtattgaattctcccagacatcagagctgtataatgcatgttgatatggattgcttctttgtatcagtgggtatacgaaatagaccagatctcaaaggaaaaccagtggctgttacaagtaacagaggcacaggaagggcacctttacgtcctggcgctaacccccagctggagtggcagtattaccagaataaaatcctgaaaggcaaagcagatataccagattcatcattgtgggagaatccagattctgcgcaagcaaatggaattgattctgttttgtcaagggctgaaattgcatcttgtagttatgaggccaggcaacttggcattaagaacggaatgttttttgggcatgctaaacaactatgtcctaatcttcaagctgttccatacgattttcatgcatataaggaagtcgcacaaacattgtatgaaacattggcaagctacactcataacattgaagctgtcagttgtgatgaagcgctggtagacattaccgaaatccttgcagagaccaaacttactcctgatgaatttgcaaatgctgttcgtatggaaatcaaagaccagacgaaatgtgctgcctctgttggaattggttctaatattctcctggctagaatggcaactagaaaagcaaaaccagatgggcagtaccacctaaaaccagaagaagtagatgattttatcagaggccagctagtgaccaatctaccaggagttggacattcaatggaatctaagttggcatctttgggaattaaaacttgtggagacttgcagtatatgaccatggcaaaactccaaaaagaatttggtcccaaaacaggtcagatgctttataggttctgccgtggcttggatgatagaccagttcgaactgaaaaggaaagaaaatctgtttcagctgagatcaactatggaataaggtttactcagccaaaagaggcagaagcttttcttctgagtctttcagaagaaattcaaagaagactagaagccactggcatgaagggtaaacgtctaactctcaaaatcatggtacgaaagcctggggctcctgtagaaactgcaaaatttggaggccatggaatttgtgataacattgccaggactgtaactcttgaccaggcaacagataatgcaaaaataattggaaaggcgatgctaaacatgtttcatacaatgaaactaaatatatcagatatgagaggggttgggattcacgtgaatcagttggttccaactaatctgaacccttccacatgtcccagtcgcccatcagttcagtcaagccactttcctagtgggtcatactctgtccgtgatgtcttccaagttcagaaagctaagaaatccaccgaagaggagcacaaagaagtatttcgggctgctgtggatctggaaatatcatctgcttctagaacttgcactttcttgccaccttttcctgcacatctgccgaccagtcctgatactaacaaggctgagtcttcagggaaatggaatggtctacatactcctgtcagtgtgcagtcgagacttaacctgagtatagaggtcccgtcaccttcccagctggatcagtctgttttagaagcacttccacctgatctccgggaacaagtagagcaagtctgtgctgtccagcaagcagagtcacatggcgacaaaaagaaagaaccagtaaatggctgtaatacaggaattttgccacaaccagttgggacagtcttgttgcaaataccagaacctcaagaatcgaacagtgacgcaggaataaatttaatagcccttccagcattttcacaggtggaccctgaggtatttgctgcccttcctgctgaacttcagagggagctgaaagcagcgtatgatcaaagacaaaggcagggcgagaacagcactcaccagcagtcagccagcgcatctgtgccaaagaatcctttacttcatctaaaggcagcagtgaaagaaaagaaaagaaacaagaagaaaaaaaccattggttcaccaaaaaggattcagagtcctttgaataacaagctgcttaacagtcctgcaaaaactctgccaggggcctgtggcagtccccagaagttaattgatgggtttctaaaacatgaaggacctcctgcagagaaacccctggaagaactctctgcttctacttcaggtgtgccaggcctttctagtttgcagtctgacccagctggctgtgtgagacctccagcacccaatctagctggagctgttgaattcaatgatgtgaagaccttgctcagagaatggataactacaatttcagatccaatggaagaagacattctccaagttgtgaaatactgtactgatctaatagaagaaaaagatttggaaaaactggatctagttataaaatacatgaaaaggctgatgcagcaatcggtggaatcggtttggaatatggcatttgactttattcttgacaatgtccaggtggttttacaacaaacttatggaagcacattaaaagttacataaatattaccagagagcctgatgctctctgatagctgtgccataagtgcttgtgaggtatttgcaaagtgcatgatagtaatgctcggagtttttataattttaaatttcttttaaagcaagtgttttgtacatttcttttcaaaaagtgccaaatttgtcagtattgcatgtaaataattgtgttaattattttactgtagcatagattctatttacaaaatgtttgtttataaagttttatggatttttacagtgaagtgtttacagttgtttaataaagaactgtatgtatattttgtacaggctcctttttgtgaatccttaaaaactcaactctaggaagcaactactgtttattatactaaaaggctgaaaaacctccaggccagactgctaagctctgaaattcctgagaggtctcagaccgggattctacttgttccaagaaagggtaaagcttctaaaccatcttattcttgtctccaagcatgaacacaggagcatgttaagaaaatctttactacttcttccatgcggagaaatctacatattttgaattagaaacaccctcacacccacttgaagatttttttcctgggaacattatgtcccgtagatcagaggtggtgttgtctttttgcttctactggccattgagaaactttgatgataaaaaagaacggtatagatttttcaaacgtatataaaatatttttatgttatatgttatgccataactttaaaataaaaatagtttaaaattcta

SEQ ID NO: 31510 - protein, 1827 aa, Artificial Sequence
  derived and/or modified sequence
MARKKFSGLEISLIVLFVIVTIIAIALIVVLATKTPAVDEISDSTSTPATTRVTTNPSDSGKCPNVLNDPVNVRINCIPEQFPTEGICAQRGCCWRPWNDSLIPWCFFVDNHGYNVQDMTTTSIGVEAKLNRIPSPTLFGNDINSVLFTTQNQTPNRFRFKITDPNNRRYEVPHQYVKEFTGPTVSDTLYDVKVAQNPFSIQVIRKSNGKTLFDTSIGPLVYSDQYLQISTRLPSDYIYGIGEQVHKRFRHDLSWKTWPIFTRDQLPGDNNNNLYGHQTFFMCIEDTSGKSFGVFLMNSNAMEIFIQPTPIVTYRVTGGILDFYILLGDTPEQVVQQYQQLVGLPAMPAYWNLGFQLSRWNYKSLDVVKEVVRRNREAGIPFDTQVTDIDYMEDKKDFTYDQVAFNGLPQFVQDLHDHGQKYVIILDPAISIGRRANGTTYATYERGNTQHVWINESDGSTPIIGEVWPGLTVYPDFTNPNCIDWWANECSIFHQEVQYDGLWIDMNEVSSFIQGSTKGCNVNKLNYPPFTPDILDKLMYSKTICMDAVQNWGKQYDVHSLYGYSMAIATEQAVQKVFPNKRSFILTRSTFAGSGRHAAHWLGDNTASWEQMEWSITGMLEFSLFGIPLVGADICGFVAETTEELCRRWMQLGAFYPFSRNHNSDGYEHQDPAFFGQNSLLVKSSRQYLTIRYTLLPFLYTLFYKAHVFGETVARPVLHEFYEDTNSWIEDTEFLWGPALLITPVLKQGADTVSAYIPDAIWYDYESGAKRPWRKQRVDMYLPADKIGLHLRGGYIIPIQEPDVTTTASRKNPLGLIVALGENNTAKGDFFWDDGETKDTIQNGNYILYTFSVSNNTLDIVCTHSSYQEGTTLAFQTVKILGLTDSVTEVRVAENNQPMNAHSNFTYDASNQVLLIADLKLNLGRNFSVQWNQIFSENERFNCYPDADLATEQKCTQRGCVWRTGSSLSKAPECYFPRQDNSYSVNSARYSSMGITADLQLNTANARIKLPSDPISTLRVEVKYHKNDMLQFKIYDPQKKRYEVPVPLNIPTTPISTYEDRLYDVEIKENPFGIQIRRRSSGRVIWDSWLPGFAFNDQFIQISTRLPSEYIYGFGEVEHTAFKRDLNWNTWGMFTRDQPPGYKLNSYGFHPYYMALEEEGNAHGVFLLNSNAMDVTFQPTPALTYRTVGGILDFYMFLGPTPEVATKQYHEVIGHPVMPAYWALGFQLCRYGYANTSEVRELYDAMVAANIPYDVQYTDIDYMERQLDFTIGEAFQDLPQFVDKIRGEGMRYIIILDPAISGNETKTYPAFERGQQNDVFVKWPNTNDICWAKVWPDLPNITIDKTLTEDEAVNASRAHVAFPDFFRTSTAEWWAREIVDFYNEKMKFDGLWIDMNEPSSFVNGTTTNQCRNDELNYPPYFPELTKRTDGLHFRTICMEAEQILSDGTSVLHYDVHNLYGWSQMKPTHDALQKTTGKRGIVISRSTYPTSGRWGGHWLGDNYARWDNMDKSIIGMMEFSLFGMSYTGADICGFFNNSEYHLCTRWMQLGAFYPYSRNHNIANTRRQDPASWNETFAEMSRNILNIRYTLLPYFYTQMHEIHANGGTVIRPLLHEFFDEKPTWDIFKQFLWGPAFMVTPVLEPYVQTVNAYVPNARWFDYHTGKDIGVRGQFQTFNASYDTINLHVRGGHILPCQEPAQNTFYSRQKHMKLIVAADDNQMAQGSLFWDDGESIDTYERDLYLSVQFNLNQTTLTSTILKRGYINKSETRLGSLHVWGKGTTPVNAVTLTYNGNKNSLPFNEDTTNMILRIDLTTHNVTLEEPIEINWS

SEQ ID NO: 31511 - protein, 682 aa, Artificial Sequence
  derived and/or modified sequence
MLACLTRGNLLDVLQEGFNEQQLQAYVAWVNAQLKKRPAVKPVQDLRQDLRDGVILAYLIEIVAGEKLSGVQLSPGNQQEMKNNVEKVLQFVASKKIRMHQTSAKDIVDGNLKSIMRLVLALAAHFKPGSSRTVNQGRDSRAPLQSHRPHCATAVAQGAAAALADVCHDMSRSGRDVFRYRQRNSSMDEEIENPYWSVRALVQQYEGQQRSPSESSCSSLTSPSPIHSAKSESIITQSEEKADFVIIPAEGIENRTEGTDSPLSRDWRPGPGTYLETSWEEQLLEQQEYLEKEMEEAKKMISGLQALLLNGSLPEDEQERPLALCEPGVNPEEQLIIIQSRLDQSMEENQDLKKELLKCKQEARNLQGIKDALQQRLTQQDTSVLQLKQELLRANMDKDELHNQNVDLQRKLDERNRLLGEYKKELGQKDRLLQQHQAKLEEALRKLSDVSYHQVDLERELEHKDVLLAHCMKREADEATNYNSHNSQSNGFLLPTAGKGATSVSNRGTSDLQLVRDALRSLRNSFSGHDPQHHTIDSLEQGISSLMERLHVMETQKKQERKVRVKSPRTQVGSEYRESWPPNSKLPHSQSSPTVSSTCTKVLYFTDRSLTPFMVNIPKRLEEVTLKDFKAAIDREGNHRYHFKALDPEFGTVKEEIFHDDDAIPGWEGKIVAWVEEDHGEN

SEQ ID NO: 31512 - protein, 683 aa, Artificial Sequence
  derived and/or modified sequence
MLACLTRGNLLDVLQEGFNEQQLQAYVAWVNAQLKKRPAVKPVQDLRQDLRDGVILAYLIEIVAGEKLSGVQLSPGNQQEMKNNVEKVLQFVASKKIRMHQTSAKDIVDGNLKSIMRLVLALAAHFKPGSSRTVNQGRDSRAPLQSHRPHCATAVAQGAAAALADVCHDMSRSGRDVFRYRQRNSSMDEEIENPYWSVRALVQQYEGQQRSPSESSCSSLTSPSPIHSAKSESIITQSEEKADFVIIPAEGIENRTEGTDSPLSRDWRPGSPGTYLETSWEEQLLEQQEYLEKEMEEAKKMISGLQALLLNGSLPEDEQERPLALCEPGVNPEEQLIIIQSRLDQSMEENQDLKKELLKCKQEARNLQGIKDALQQRLTQQDTSVLQLKQELLRANMDKDELHNQNVDLQRKLDERNRLLGEYKKELGQKDRLLQQHQAKLEEALRKLSDVSYHQVDLERELEHKDVLLAHCMKREADEATNYNSHNSQSNGFLLPTAGKGATSVSNRGTSDLQLVRDALRSLRNSFSGHDPQHHTIDSLEQGISSLMERLHVMETQKKQERKVRVKSPRTQVGSEYRESWPPNSKLPHSQSSPTVSSTCTKVLYFTDRSLTPFMVNIPKRLEEVTLKDFKAAIDREGNHRYHFKALDPEFGTVKEEIFHDDDAIPGWEGKIVAWVEEDHGEN

SEQ ID NO: 31513 - DNA, 2049 bp, Artificial Sequence
  derived and/or modified sequence
atgctggcctgcctgaccagaggcaacctgctggacgtgctgcaggagggcttcaacgagcagcagctgcaggcctacgtggcctgggtgaacgcccagctgaagaagagacccgccgtgaagcccgtgcaggacctgagacaggacctgagagacggcgtgatcctggcctacctgatcgagatcgtggccggcgagaagctgagcggcgtgcagctgagccccggcaaccagcaggagatgaagaacaacgtggagaaggtgctgcagttcgtggccagcaagaagatcagaatgcaccagaccagcgccaaggacatcgtggacggcaacctgaagagcatcatgagactggtgctggccctggccgcccacttcaagcccggcagcagcagaaccgtgaaccagggcagagacagcagagcccccctgcagagccacagaccccactgcgccaccgccgtggcccagggcgccgccgccgccctggccgacgtgtgccacgacatgagcagaagcggcagagacgtgttcagatacagacagagaaacagcagcatggacgaggagatcgagaacccctactggagcgtgagagccctggtgcagcagtacgagggccagcagagaagccccagcgagagcagctgcagcagcctgaccagccccagccccatccacagcgccaagagcgagagcatcatcacccagagcgaggagaaggccgacttcgtgatcatccccgccgagggcatcgagaacagaaccgagggcaccgacagccccctgagcagagactggagacccggccccggcacctacctggagaccagctgggaggagcagctgctggagcagcaggagtacctggagaaggagatggaggaggccaagaagatgatcagcggcctgcaggccctgctgctgaacggcagcctgcccgaggacgagcaggagagacccctggccctgtgcgagcccggcgtgaaccccgaggagcagctgatcatcatccagagcagactggaccagagcatggaggagaaccaggacctgaagaaggagctgctgaagtgcaagcaggaggccagaaacctgcagggcatcaaggacgccctgcagcagagactgacccagcaggacaccagcgtgctgcagctgaagcaggagctgctgagagccaacatggacaaggacgagctgcacaaccagaacgtggacctgcagagaaagctggacgagagaaacagactgctgggcgagtacaagaaggagctgggccagaaggacagactgctgcagcagcaccaggccaagctggaggaggccctgagaaagctgagcgacgtgagctaccaccaggtggacctggagagagagctggagcacaaggacgtgctgctggcccactgcatgaagagagaggccgacgaggccaccaactacaacagccacaacagccagagcaacggcttcctgctgcccaccgccggcaagggcgccaccagcgtgagcaacagaggcaccagcgacctgcagctggtgagagacgccctgagaagcctgagaaacagcttcagcggccacgacccccagcaccacaccatcgacagcctggagcagggcatcagcagcctgatggagagactgcacgtgatggagacccagaagaagcaggagagaaaggtgagagtgaagagccccagaacccaggtgggcagcgagtacagagagagctggccccccaacagcaagctgccccacagccagagcagccccaccgtgagcagcacctgcaccaaggtgctgtacttcaccgacagaagcctgacccccttcatggtgaacatccccaagagactggaggaggtgaccctgaaggacttcaaggccgccatcgacagagagggcaaccacagataccacttcaaggccctggaccccgagttcggcaccgtgaaggaggagatcttccacgacgacgacgccatccccggctgggagggcaagatcgtggcctgggtggaggaggaccacggcgagaactag

SEQ ID NO: 31514 - DNA, 660 bp, Artificial Sequence
  derived and/or modified sequence
atgctggcctgcctgaccagaggcaacctgctggacgtgctgcaggagggcttcaacgagcagcagctgcaggcctacgtggcctgggtgaacgcccagctgaagaagagacccgccgtgaagcccgtgcaggacctgagacaggacctgagagacggcgtgatcctggcctacctgatcgagatcgtggccggcgagaagctgagcggcgtgcagctgagccccggcaaccagcaggagatgaagaacaacgtggagaaggtgctgcagttcgtggccagcaagaagatcagaatgcaccagaccagcgccaaggacatcgtggacggcaacctgaagagcatcatgagactggtgctggccctggccgcccacttcaagcccggcagcagcagaaccgtgaaccagggcagagacagcagagcccccctgcagagccacagaccccactgcgccaccgccgtggcccagggcgccgccgccgccctggccgacgtgtgccacgacatgagcagaagcggcagagacgtgttcagatacagacagagaaacagcagcatggacgaggagatcgagaacccctactggagcgtgagagccctggtgcagcagtacgagggccagcagagaagccccagcgagagcagctgcagcagatag

SEQ ID NO: 31515 - DNA, 5891 bp, Artificial Sequence
  derived and/or modified sequence
tcccgcaggaaagcggggctgggggcagcccggcagcgccgctcaacctagtgcgcgcccagttgtttccataggaaccgcgaccgcgccgggcccctccagcggaggcccccgtgcgagcatgcccagtgcaagccgctagtttggctccagtctaggtttccagtaagtggcatgcgggactccggagggatcccaatgagctgagccgagagcctttgtgtgcagagggaggaggaggaggcggcggcggccgccgggctggagaccccgcccggggagcccccagcaggaacaatgctagcctgcctgacccgagggaacttactggacgtcctgcaggagggcttcaatgagcaacagctgcaggcctatgtggcctgggtgaatgcacagctgaagaagaggccagcagtgaagcctgtgcaggacctgcgacaagatctccgggatggggtgatcctggcatatctcatcgagattgttgcaggagaaaagctgagtggggtacagctgagtcccggtaaccaacaggagatgaagaataatgtggagaaagtgctacagtttgtggcctctaaaaagattcgtatgcaccagacttcggctaaagatattgtggatggaaacctgaagtctatcatgaggctggtccttgccttggcagctcatttcaaacctggctccagcaggacggtgaaccaaggacgggactccagagcccctctgcaaagtcaccgaccacactgtgccactgctgttgcccagggagcagctgctgctctggccgatgtgtgtcatgacatgtcccgatcaggacgggatgtctttcgatatagacagaggaacagcagcatggatgaggaaattgagaatccatactggagtgtgcgggccctagtgcagcagtacgaagggcaacaaaggtccccgtctgaatccagctgctccagcctgacttcacccagtccaatccacagtgcaaagagcgagtccattataacccagtcagaagagaaggcagattttgtgattattcccgctgaaggaatagagaacagaacagaagggacagattctccattatctcgagactggcggccagggcctggaacctatctggagacctcatgggaagaacagctgttggaacaacaagaatatttagaaaaagaaatggaggaagcaaagaaaatgatatcaggactacaggccttactgctcaatggatccttacctgaagatgaacaggagaggcccttggccctctgtgaaccaggtgtcaatcccgaggaacaactgattataatccaaagtcgtctggatcagagtatggaggagaatcaggacttaaagaaggaactgctgaaatgtaaacaagaagccagaaacttacaggggataaaggatgccttgcagcagagattgactcagcaggacacatctgttcttcagctcaaacaagagctactgagggcaaatatggacaaagatgagctgcacaaccagaatgtggatctgcagaggaagctagatgagaggaaccggctcttgggagaatataaaaaagagctggggcagaaggatcgccttcttcagcagcaccaggccaagttagaagaagcactccggaaactctctgatgtcagttaccaccaggtggatctagagcgagagctagaacacaaagatgtcctcttggctcactgtatgaaaagagaggcagatgaggcgaccaactacaacagtcacaactctcaaagcaatggttttctccttccaacggcaggaaaaggagctacttcagtcagcaacagagggaccagcgacctgcagcttgttcgagatgctctccgcagcctgcgcaacagcttcagtggccacgatcctcagcaccacactattgacagcttggagcagggcatttctagcctcatggagcgcctgcatgttatggagacgcagaagaaacaagaaagaaaggttcgggtcaagtcacccagaactcaagtaggtagtgaataccgggagtcctggccccctaactcaaagttgcctcactcacagagctctccaactgtcagcagcacctgtactaaagtgctctatttcactgaccggtcacttacgcccttcatggtcaatataccaaagaggttggaggaggtgacgttaaaggattttaaagcagctattgatcgggaaggaaatcaccggtatcacttcaaagcactggatcctgagtttggcactgtcaaagaggagattttccatgatgatgatgccatccctggatgggaagggaaaattgtagcttgggtggaagaagaccatggagagaattaatgccaagtatcagattgagggcttatggaacctggtcactccctggctgcttcactcaggaaagggaactaaaaccagaatacactaagaagtttctagtttgtgtgccaaaacagaagcttctccaagcatgatggccacaggtcagtcctctttctgtgcctggcatatctggtacttaaaattctgtccaaatgtagaccatgggttcatctggagttccttgtccgtgggaacacagtgttctattctactctgaggacaacaaaccgaaggccttaaacgatggggatggatgatcccgcctctgtaggggcatggctgctattatctggaaattaggaattggatgcatcattcctgtgtgttacagtattattttaattggcctcaatggttgcagcaatcagagtcccagcgtttgtactcacagacaaggcaaaggtaccagcttttctgtttctttgaacctactgcaaaccaagaataactcatgaggtggtaccaaagatgaaagcccagacttcagtaatcttttgaaccagacgtggatggtgctgaattgttgcttggatggaaaaagggctgcccatgttgtgctacactatgctaaaactgtaatttagtaagaccttgggctgcctcttctgtcttaactggttctgcagcttgtccttttgcccacatagggcctatttcatgtactgttagttttctctggggactctttaactttagagccatttctttttcttcaaactgatgaacttttgtttgaaaggcataaggagtgaaaagctccttgaaaatccaggcgggtatggaaaggtgctgctacccatatctttttgactttctttgtttcatgactttaactcatggcatctcctttgtagtaaaaggagacagaccattaatttcagcatttctttgtgatttataagtactgagcatgaagtacttgtctgcccctcatttcaaggccagagttattttctatttatgtattagtctaggctgatcttttagggcacaatagaaaccatggggcgtggagcatgagttgtgaatggcagggatcattctgggtaaaaaaaacctagaatcatttctgatgtgcaacattgtcaagtgaagaagctaacagttcaactaccgagattatttgataacctgggttttctcattcatccatcaagcaccatcaaccagtcagccattattatttatatatgtattaccaaaagcagtctatctgcctgtgacctccaatgtacactgccaaacacaagagtaggacacatctgttctgggttcttgacctatctgtctccaattcatctccccttttcagccatttcaacaaactactctttggagctctgagatgacatcttgttgttttatatagatgtatcttttaaaaatagttcacgtttggagaattcttttgtactcatttgctttttgtctgagaaccatgtctatttttataactggagtgtgagttctgtatcttctcacattctgtatactgtatccattttctagagaacccagtagcttttatacagtctcttcttaccaccccttgtggtttcagaacaagctttattttattacgagtatattaatgacaactaattcctgttccaattctacctgttttagttgtgaaggtagttttgtgtaatccagttgattgctcctctggcagagagaaggagctcaaaagatacttgatgtctttcatgtaagtttacctggtcttttcctattgaagaatttttcatcagaaacgactgggaaagtttgggaaagtcagcaaaagaaagaatgcatttcgaaagcaaacagaagaaaaaagtatattctcacagtttttccccaggaagtctggagaaaaagtcctcatgtcaccaatttctctgttgcatgaattttagtgttttgctataagacagcatgagggctatcaggccaaaattcattattgtatttccaatacagtttgtcttgaatgtctgtctcttaaaccagtttttacttgtcagttttctctcagcaaacagtcttactattatgtggaatttaacttttcagagaaaatttccaaagtcctctaccttatttggcttttatctgtgtcttttggaaaaggagctgcatggcctcagtgcctccataaaaagcttaagttgagttcatgggagaacattaagatcgttttttttcccttttagctcggtaatctcatgtaccacaggtaatgaccaagcatctctgctagaggatgtaactctcataactcctgtgtaaaatgaggatcctgttggtgatcctcattccagtttccaaagcgagaggagccttctgagcagaagtatgcaagactgattctgtttggaacagtttcctatttggctgcattctaggaggcctcctgacttattcatagtattgtcgcctggtggcattggtgtggggtagcttgtcctgctacttgctaaagttctctttctttgagaaaactgaggaaccagaatgcttagagttcataaaataatctctaaaccatgttaggttaaaacaaaatgaccatctcacaaaaacgagtttagttgaatgctcaattccttacaaaatcttcatttaaggctgagtgtggtggctcatgcctgtaattccagcactttgggaggccgaggcaggaagactgcttgagcccaggagttcaagaccagcctgggcaacgtaggaagactccgtctctacatagaaattttattataaaagtagctggggatggtggcacacacctgtagtcccagctactcaggaggttgaggtgggaagattgcttgagcccaggagtttgaggttgcagtgagctgatcatgccactgcactctagcctaggctacagagcaggaccccatctccaaaaaaaaaaaaaaaaaagtcatttaaaaactgaagaatgttctcttcttgctcagttccctaaattagctggggggattgggatactttacaatttttacatttttaaatttgaagaatttgttttaaacttacttggtaatggcacttctacttactgaccaacttttcagctctttttgaccaggatggttgcaaattagggaaaatatctttatactatacatccaattcaagaggactttaattacttaaaagcatttaggtcataattaaaattattttcactgtttccataaaataagcattatgattgcacactccttctactgtctgaatttatgtaagaggtatagcttgcttaaaatacatatatatgtaaagttatattttcttagaaacatggatgtttacagccattgctttcaaagagattattactgtgtattctccctgttttacaatatgttttcatgaagactatgttacaccagaggcttctgattatcaaagtgataaccagttttaactgccggtatgtaccagatttgtgaactaatttaaaaaaccacaaactatgaataaaatggggtttgcaaact

SEQ ID NO: 31516 - DNA, 786 bp, Artificial Sequence
  derived and/or modified sequence
gcagagggaggaggaggaggcggcggcggccgccgggctggagaccccgcccggggagcccccagcaggaacaatgctagcctgcctgacccgagggaacttactggacgtcctgcaggagggcttcaatgagcaacagctgcaggcctatgtggcctgggtgaatgcacagctgaagaagaggccagcagtgaagcctgtgcaggacctgcgacaagatctccgggatggggtgatcctggcatatctcatcgagattgttgcaggagaaaagctgagtggggtacagctgagtcccggtaaccaacaggagatgaagaataatgtggagaaagtgctacagtttgtggcctctaaaaagattcgtatgcaccagacttcggctaaagatattgtggatggaaacctgaagtctatcatgaggctggtccttgccttggcagctcatttcaaacctggctccagcaggacggtgaaccaaggacgggactccagagcccctctgcaaagtcaccgaccacactgtgccactgctgttgcccagggagcagctgctgctctggccgatgtgtgtcatgacatgtcccgatcaggacgggatgtctttcgatatagacagaggaacagcagcatggatgaggaaattgagaatccatactggagtgtgcgggccctagtgcagcagtacgaagggcaacaaaggtccccgtctgaatccagctgctccaggtaactgtggcctctgaaacctgaattctggaggattctcggagttctcggcttcaa

SEQ ID NO: 31517 - DNA, 2049 bp, Artificial Sequence
  derived and/or modified sequence
atgctcgcctgtttaactagaggcaatctgctcgatgtgcttcaggagggattcaatgagcagcagctgcaagcttatgtcgcgtgggtcaatgcccaactcaagaaacgtccagccgtgaaaccagttcaggacttacgccaggacctacgcgacggcgtcattttggcatatttgattgagatcgtggctggcgaaaagctcagcggcgtgcagctttctcccggcaaccagcaggagatgaagaacaatgtcgagaaagtcctgcaatttgtcgcgagcaaaaagattaggatgcaccagacgtcagctaaggacatcgtcgacggaaatctcaaatccatcatgaggctggtgttagctttggcagcccattttaagccgggcagcagtagaaccgtcaatcagggcagggattccagggctccattgcagagccacaggccgcactgtgccacagccgttgcccagggggcggcggcggcgcttgctgacgtttgccacgatatgtccagaagtggccgggatgtcttcaggtatcgacagcggaacagtagcatggacgaggaaatagaaaacccgtattggtccgtccgggcgctggtgcagcaatacgagggccaacagcgctccccctcagaaagcagttgctcatctcttactagcccttcaccgatccatagcgccaaaagcgagtcaattattacacagtctgaggagaaagccgactttgttatcattcccgccgaagggattgagaaccgcactgaaggcacggactcacccctctcccgcgattggcgacctggccctgggacatatctggaaacctcatgggaagagcaactgttagagcaacaggaatacctggagaaagaaatggaggaggcaaaaaagatgatttccggactgcaggccctgctgctgaatggttcgctacccgaggacgaacaggaaaggccgttggccctgtgcgagcccggtgtgaaccctgaagaacagctgataatcattcagagccgcctggatcagagcatggaagagaatcaagaccttaaaaaagaactcctcaagtgtaagcaagaagccagaaatctccaaggcatcaaggatgcccttcagcaacggctgactcagcaggacacctctgtgctgcagctgaagcaggagcttctgcgggccaatatggacaaggacgagctccacaatcagaacgtggatcttcagcgaaagcttgatgaaagaaataggctactgggggaatataagaaagagctggggcagaaagatcgtcttctgcaacagcaccaggccaagcttgaggaggcattgaggaaactgtctgatgtgtcctaccaccaggtggacttagagcgggaactagagcacaaggacgttctcctggcacattgtatgaagcgggaggccgatgaggcgactaattataactcacataacagccaatctaacgggtttctgcttcctaccgccggcaagggcgccacctctgtttctaacaggggcaccagtgatctgcagttggtgagagatgccctaagatctctgagaaactctttttctggccacgacccccagcaccatacgattgacagcctagaacaagggatctctagcctcatggagagactgcacgtgatggagacccagaaaaaacaagagagaaaagtgcgcgtgaagtccccaagaacccaagtaggaagtgagtatagggaaagctggccacccaatagcaagctaccccactcccagagcagccctacagtgtcttctacctgcaccaaggtcttatactttacagatagatcactgacgccctttatggttaatatcccaaaaagacttgaagaggttaccctgaaagatttcaaggcggcaatcgacagggagggcaatcaccgatatcatttcaaagcattagatccagagtttgggacagtcaaagaggagatctttcacgacgatgatgcaatcccagggtgggagggaaaaatcgtggcctgggtagaagaagatcacggcgagaactag

SEQ ID NO: 31518 - DNA, 660 bp, Artificial Sequence
  derived and/or modified sequence
atgttagcgtgcctgacacggggaaatctgttggatgtgctccaggaggggttcaacgagcaacaacttcaggcgtacgtggcctgggtcaacgcccagctcaagaagcgacctgctgtcaagcctgtgcaagatttaagacaggacctccgggacggagtcattcttgcctaccttatcgaaattgttgcaggcgagaagctttccggggtccaactctcccctggtaatcaacaggagatgaagaacaatgtggagaaggtgctgcaattcgtggcaagcaaaaagattcggatgcaccagacctccgccaaggatatagtggatggcaacttgaaaagcatcatgagactggtgttggcgttggccgcccacttcaaaccagggtctagtcggacagttaaccagggccgcgactcacgtgctccactccaatctcacagaccccattgcgccactgctgtcgcgcagggcgcagctgctgcgttggccgatgtatgtcacgatatgagtcgatccgggcgagatgtgtttagatataggcagcggaattcctctatggatgaagaaatagagaacccatattggtccgtgagagcattggttcagcagtacgagggccagcagcgaagccccagtgaatcctcctgctctcgctag

SEQ ID NO: 31519 - DNA, 2049 bp, Artificial Sequence
  derived and/or modified sequence
atgctggcctgcctgacccggggcaacctgctggatgtgctgcaggagggcttcaatgagcagcagctgcaggcctacgtggcctgggtgaatgcccagctgaagaagaggcctgctgtgaagcctgtgcaggacctgcggcaggacctgagagatggagtcatcctggcctacctgattgagatcgtggccggggagaagctgtctggagtgcagctgagccctggcaaccagcaggagatgaagaacaacgtggagaaggtgctgcagtttgtggccagcaagaagatccgcatgcaccagaccagcgccaaggacatcgtggatggcaacctgaagagcatcatgaggctggtgctggccctggccgcccacttcaagccaggcagcagcaggacagtgaaccagggccgggacagccgggcccccctgcagagccaccggccccactgtgccacagctgtggcccagggcgctgctgctgccctggctgatgtgtgccacgacatgagccgcagcggcagagatgtgttccgctaccggcagaggaacagctccatggatgaggagattgagaacccctactggagcgtgcgggccctggtgcagcagtatgagggccagcagaggagccccagcgagagcagctgcagcagcctgaccagccccagccccatccacagcgccaagtctgagagcatcatcacccagagcgaggagaaggctgactttgtgatcatcccagctgagggcattgaaaatagaacagagggcacagacagccccctgagccgggactggaggcctggccctggcacctacctggagacctcctgggaggagcagctgctggagcagcaggagtacctggagaaggagatggaggaggccaagaagatgatcagcggcctgcaggccctgctgctgaatggcagcctgcctgaagatgagcaggagcggcccctggccctgtgtgagcccggggtgaaccctgaggagcagctgatcatcatccagagccggctggaccagagcatggaggagaaccaggacctgaagaaggagctgctgaagtgcaagcaggaggccaggaacctgcagggcatcaaggatgccctgcagcagaggctgacccagcaggacacctctgtgctgcagctgaagcaggagctgctgcgggccaacatggacaaggatgagctgcacaaccagaatgtggacctgcagaggaagctggatgaaagaaaccggctgctgggggagtacaagaaggagctgggccagaaggaccggctgctgcagcagcaccaggccaagctggaggaggccctgaggaagctgagtgatgtgtcctaccaccaggtggacctggagcgggagctggagcacaaggatgtgctgctggcccactgcatgaagcgggaggctgatgaggccaccaactacaacagccacaacagccagagcaatggcttcctgctgcccacagctggaaaaggagccacctctgtgagcaacagaggcaccagtgacctgcagctggtgagagatgccctgcggagcctgagaaattccttcagcggccatgacccccagcaccacaccatcgacagcctggagcagggcatcagcagcctgatggagcggctgcacgtgatggagacccagaagaagcaggagaggaaggtgcgggtgaagagccccaggacccaggtgggcagcgagtaccgggagagctggccacccaacagcaagctgccccacagccagagcagccccaccgtgagcagcacctgcaccaaggtgctgtacttcacagacaggagcctgacccccttcatggtgaacatccccaagaggctggaggaggtgaccctgaaggacttcaaggccgccatcgaccgggagggcaaccaccgctaccacttcaaggccctggaccctgagtttggcaccgtgaaggaggagatcttccatgatgatgatgccatccctggctgggagggcaagatcgtggcctgggtggaggaggaccatggagaaaattag

SEQ ID NO: 31520 - DNA, 660 bp, Artificial Sequence
  derived and/or modified sequence
atgctggcctgcctgacccggggcaacctgctggatgtgctgcaggagggcttcaatgagcagcagctgcaggcctacgtggcctgggtgaatgcccagctgaagaagaggcctgctgtgaagcctgtgcaggacctgcggcaggacctgagagatggagtcatcctggcctacctgattgagatcgtggccggggagaagctgtctggagtgcagctgagccctggcaaccagcaggagatgaagaacaacgtggagaaggtgctgcagtttgtggccagcaagaagatccgcatgcaccagaccagcgccaaggacatcgtggatggcaacctgaagagcatcatgaggctggtgctggccctggccgcccacttcaagccaggcagcagcaggacagtgaaccagggccgggacagccgggcccccctgcagagccaccggccccactgtgccacagctgtggcccagggcgctgctgctgccctggctgatgtgtgccacgacatgagccgcagcggcagagatgtgttccgctaccggcagaggaacagctccatggatgaggagattgagaacccctactggagcgtgcgggccctggtgcagcagtatgagggccagcagaggagccccagcgagagcagctgcagcaggtag

SEQ ID NO: 31521 - DNA, 2049 bp, Artificial Sequence
  derived and/or modified sequence
atgctggcctgcctgacccggggcaacctgctggacgtgctgcaggaagggttcaatgaacagcagctccaagcgtacgttgcctgggtgaacgcccaactcaagaagcggccagccgtgaaaccggtgcaggatttaaggcaagatctacgcgatggcgttattctggcatacctcatcgagatcgtggccggagagaagctgagtggcgtccaactctcccccgggaaccagcaggagatgaaaaacaacgtggagaaggtgttacagtttgtcgcttctaaaaagatccggatgcatcagacttctgccaaggacatagtagatggcaacctaaagtcaattatgcgtctggtgctggcactggcagcacatttcaaacccggaagcagccgcacggtaaaccagggtcgtgacagcagagctcccctccaatcacaccgtccccactgcgctacagctgtcgcgcagggcgccgccgcagcgctggcggatgtgtgtcacgatatgtcaagaagtggacgagacgtgttcagatataggcagcgcaattcgagcatggatgaagagatcgagaatccgtactggtcagtccgcgccctagtgcagcagtacgagggtcagcagcgatccccgtcagaaagcagctgttccagcctgacaagcccctcaccgatacactcagccaagagtgagtcaatcatcacgcaatccgaggaaaaagctgatttcgtgataattccagctgaaggaatcgaaaacaggactgaggggacagatagtcctctgagccgtgattggcgaccgggacccggaacgtatctggaaacctcatgggaagagcagctactggagcagcaagagtatctcgagaaggagatggaagaggccaaaaagatgattagcgggctccaagcccttctgttgaacggttctctgccggaggacgaacaggaacgccccttagctctttgtgagcctggggtgaaccctgaagagcagcttatcatcatacagtccaggctagaccagagcatggaagagaatcaggatcttaaaaaggagttactgaaatgcaagcaggaggctagaaacctgcagggcatcaaagacgcccttcagcagcggctaacccagcaagacaccagcgttctgcagttgaagcaggagctgctgcgggccaatatggataaagatgaactgcataaccagaacgtggacctgcagaggaagctggacgaaaggaatcgattattgggcgagtataaaaaagaactgggccagaaggaccggctcctacagcagcatcaggctaagctggaagaagccctgaggaagctaagtgacgtgtcttaccaccaagtggatctggagcgggaactcgaacataaggacgtcctgttggcccattgtatgaaaagagaagccgacgaagccacgaactacaactcccataatagccaatccaacggatttctgttgcccactgccggaaagggggctacatctgtctctaaccgggggacatctgatttgcagctggtccgtgacgctctcaggagcctgcgcaattctttcagcggccacgaccctcagcaccacaccattgatagcctggaacagggaatatctagtctgatggaacggttgcacgtgatggaaacacagaaaaaacaggagaggaaagtgcgtgtgaagagccccaggactcaggtggggtccgagtaccgtgaatcctggcctcccaattccaagttgccgcatagtcaaagtagccctacagtctcaagtacctgtaccaaggtactttattttaccgaccgtagtcttactcctttcatggtcaacatcccaaaacgccttgaggaggtaacacttaaggactttaaggccgcaattgaccgagagggcaatcaccgctaccatttcaaggcccttgacccagagttcggcacagtaaaggaggagatctttcatgacgatgatgccatacccggctgggagggcaagatcgtcgcttgggtcgaagaggaccatggggagaactag

SEQ ID NO: 31522 - DNA, 660 bp, Artificial Sequence
  derived and/or modified sequence
atgctggcctgcctgacccggggcaacctgctggacgtgctgcaggaaggcttcaatgagcaacagctgcaggcttacgtggcctgggtgaacgctcaactgaaaaaaaggccagccgtcaagcctgtgcaagatctcaggcaagatttgagagatggagtgattctggcttatcttatcgaaatcgtagccggggagaagctaagcggggtacaactgtcccccggaaatcagcaagagatgaagaacaatgtagagaaggtcctgcagttcgttgcttccaagaaaatcaggatgcaccagacaagcgccaaggacatcgtggacggcaatctcaagagcataatgaggctcgtgctggcgctggcggcccattttaagcccggcagttccagaactgttaatcaggggagagactcgagggcccctttgcaaagtcatcgcccccactgcgctacagccgtcgctcagggagcagctgccgcattggccgacgtctgccacgatatgtcaagaagcgggcgggatgtctttagatataggcagcggaattctagcatggatgaagaaatagaaaatccctattggtctgttcgggccctcgtgcagcagtacgaaggtcagcagcggagtccgtcagaaagtagctgttccagatag

SEQ ID NO: 31523 - DNA, 2049 bp, Artificial Sequence
  derived and/or modified sequence
atgctggcatgcctgacacgcggaaatctattggacgttctccaagaaggcttcaacgagcaacagctccaggcttatgtggcctgggtgaatgcccaactcaagaaacgtcccgctgttaaaccagtccaggatctgaggcaagacttgcgagatggggtgattctcgcctatctcatcgaaatcgtggctggagaaaagctgtcaggagtccagttaagcccaggaaatcagcaagagatgaagaataatgtggagaaggttttgcagtttgtggcctcaaagaagattcgtatgcatcagacttccgctaaggacatcgtggacggcaatctcaagagcatcatgcgcctggtgttagccctcgccgctcacttcaagccaggttctagccggacagttaatcaggggcgtgattccagggctccattgcagagtcacagacctcattgcgctacggccgtggcccagggcgctgcagctgctctcgctgatgtttgccatgatatgtctagatctggccgtgatgtgttcagatatcggcagagaaactccagtatggacgaggaaatcgagaatccatactggtccgtccgcgctctcgtgcaacagtatgaagggcagcagcggagccctagcgaatcctcctgctcctctctgaccagcccctcaccaattcattctgcaaagtcggagtcgatcatcacccagagcgaagaaaaggcggatttcgtgattattcctgctgaaggtatcgaaaacaggacagagggtactgactcccctctgtcccgggactggaggcctggcccaggtacctatctggaaaccagctgggaggaacaacttctcgagcaacaggagtacctcgaaaaagagatggaggaagccaagaaaatgatttctggactccaggcgctacttttgaacggcagccttcccgaagatgagcaggagcggcctctcgccctttgcgagccaggcgtcaacccagaagagcaactcattatcatacagagtcggctggatcagtccatggaagagaatcaggatttgaagaaggagctgcttaagtgtaaacaggaggcgcgaaatttacagggcatcaaggacgcgttacagcaacggttgactcagcaggatacgtctgtgcttcagctgaagcaggaactgctgcgcgctaatatggacaaagacgaactccacaatcaaaatgtcgacctgcagaggaaactggacgagcgcaatcgtctgcttggcgagtacaagaaggagctgggccaaaaggatcggctacttcagcaacaccaggccaaattagaggaagcactgcgcaagctgtcagacgtatcttatcatcaggtggatcttgagcgggagctcgaacacaaggacgtgctcctggcccactgcatgaaaagggaggctgatgaggccacaaactacaatagccacaattcacagtccaatggctttctgcttcccacggctggcaaaggcgcaactagcgtgtccaatcggggaacctccgatctccagttggtgagggacgctctgcggtctttgaggaactcctttagcggccatgacccccagcatcacaccattgactcactcgaacagggaatttcttccctgatggagcgcctgcacgttatggaaactcagaaaaagcaggaacgaaaggtgcgcgtcaagagcccaagaactcaggtgggctccgagtatcgagagtcatggcccccaaattctaaattgcctcactcgcaaagtagcccaacagtttcatccacctgtacaaaggtgttatatttcactgacaggtctctgactccattcatggttaatattcccaagaggctggaagaggttaccctgaaggactttaaagcagctatcgatcgggaggggaaccataggtaccattttaaagctcttgaccccgaattcggcacagtcaaggaggaaattttccacgacgacgatgccatccccggatgggaaggaaaaatagttgcttgggtggaggaagaccacggagaaaattag

SEQ ID NO: 31524 - DNA, 660 bp, Artificial Sequence
  derived and/or modified sequence
atgctcgcctgcctcacccgaggcaatctgcttgatgtgttacaggaaggattcaacgagcaacagcttcaagcctacgtggcctgggtaaacgcacaactcaaaaagaggccggcagtcaaacctgtgcaggatctgagacaagatttacgggacggcgtaatcctggcttatctcatcgagatcgtcgcgggagagaaactctcaggtgtgcagctgtctcccggaaaccagcaggagatgaaaaacaacgtggagaaggtgctgcagttcgttgcttcgaagaaaattcggatgcatcagacgagcgccaaagacatagtggatggcaatctgaagtctataatgcgcttagttctggccctagcggctcattttaaaccaggctcttcccgcaccgtcaatcagggcagggactcccgagccccactgcagagccaccgacctcactgcgcaactgccgtggcgcaaggggctgctgcagcactggccgacgtttgtcacgatatgtcacgctcgggacgtgacgtttttcgttaccggcaaaggaattcaagcatggatgaggagatagaaaatccatattggtccgtccgggcattggtacagcaatacgagggccagcagaggagtcccagcgagtcttcctgcagtcgctag

SEQ ID NO: 31525 - DNA, 2052 bp, Artificial Sequence
  derived and/or modified sequence
atgctggcctgcctgaccagaggcaacctgctggacgtgctgcaggagggcttcaacgagcagcagctgcaggcctacgtggcctgggtgaacgcccagctgaagaagagacccgccgtgaagcccgtgcaggacctgagacaggacctgagagacggcgtgatcctggcctacctgatcgagatcgtggccggcgagaagctgagcggcgtgcagctgagccccggcaaccagcaggagatgaagaacaacgtggagaaggtgctgcagttcgtggccagcaagaagatcagaatgcaccagaccagcgccaaggacatcgtggacggcaacctgaagagcatcatgagactggtgctggccctggccgcccacttcaagcccggcagcagcagaaccgtgaaccagggcagagacagcagagcccccctgcagagccacagaccccactgcgccaccgccgtggcccagggcgccgccgccgccctggccgacgtgtgccacgacatgagcagaagcggcagagacgtgttcagatacagacagagaaacagcagcatggacgaggagatcgagaacccctactggagcgtgagagccctggtgcagcagtacgagggccagcagagaagccccagcgagagcagctgcagcagcctgaccagccccagccccatccacagcgccaagagcgagagcatcatcacccagagcgaggagaaggccgacttcgtgatcatccccgccgagggcatcgagaacagaaccgagggcaccgacagccccctgagcagagactggagacccggcagccccggcacctacctggagaccagctgggaggagcagctgctggagcagcaggagtacctggagaaggagatggaggaggccaagaagatgatcagcggcctgcaggccctgctgctgaacggcagcctgcccgaggacgagcaggagagacccctggccctgtgcgagcccggcgtgaaccccgaggagcagctgatcatcatccagagcagactggaccagagcatggaggagaaccaggacctgaagaaggagctgctgaagtgcaagcaggaggccagaaacctgcagggcatcaaggacgccctgcagcagagactgacccagcaggacaccagcgtgctgcagctgaagcaggagctgctgagagccaacatggacaaggacgagctgcacaaccagaacgtggacctgcagagaaagctggacgagagaaacagactgctgggcgagtacaagaaggagctgggccagaaggacagactgctgcagcagcaccaggccaagctggaggaggccctgagaaagctgagcgacgtgagctaccaccaggtggacctggagagagagctggagcacaaggacgtgctgctggcccactgcatgaagagagaggccgacgaggccaccaactacaacagccacaacagccagagcaacggcttcctgctgcccaccgccggcaagggcgccaccagcgtgagcaacagaggcaccagcgacctgcagctggtgagagacgccctgagaagcctgagaaacagcttcagcggccacgacccccagcaccacaccatcgacagcctggagcagggcatcagcagcctgatggagagactgcacgtgatggagacccagaagaagcaggagagaaaggtgagagtgaagagccccagaacccaggtgggcagcgagtacagagagagctggccccccaacagcaagctgccccacagccagagcagccccaccgtgagcagcacctgcaccaaggtgctgtacttcaccgacagaagcctgacccccttcatggtgaacatccccaagagactggaggaggtgaccctgaaggacttcaaggccgccatcgacagagagggcaaccacagataccacttcaaggccctggaccccgagttcggcaccgtgaaggaggagatcttccacgacgacgacgccatccccggctgggagggcaagatcgtggcctgggtggaggaggaccacggcgagaactag

SEQ ID NO: 31526 - DNA, 2052 bp, Artificial Sequence
  derived and/or modified sequence
atgctggcttgcttgacccgtggcaacctgttggatgtgctgcaggagggcttcaacgagcagcagctgcaagcctatgtcgcatgggtcaacgcacaactcaagaagagaccagccgttaaacccgtgcaggacctgaggcaggacctgagagatggagtgatcctggcttaccttattgagatcgtagccggcgagaaactgtccggggttcagctaagccccggtaaccagcaggagatgaagaacaatgtggaaaaggtgctgcagtttgttgcatccaagaaaattcggatgcatcagacttccgccaaggatatagttgacggcaatctgaaatcaatcatgcggctagttcttgcgctggccgcccatttcaaaccgggctcctcccgtactgtgaatcaaggccgggattctcgggctcctctccagagtcatcgcccacactgtgccacggcagttgcccagggcgccgccgcagcactggcggacgtgtgtcatgatatgtcacgatcggggagagacgtgtttcggtacagacagagaaattccagtatggatgaagagatcgagaacccgtattggtccgttcgggctctggtgcagcagtacgaaggacagcagagatcgccgtcggaatcctcatgttcaagcctcacctctccctcgcctatacatagcgcaaagtcagagagtatcataacccaatctgaagaaaaggcagactttgtcattatcccggcagagggaatcgaaaaccgcacagaagggacggatagcccgttaagtcgagattggcggcctggaagtccaggtacctatctggagacgagctgggaggaacaattgctggaacagcaggagtacctggagaaagagatggaggaggccaagaaaatgatcagtggcctgcaagcattactgctgaatggatctctgcctgaggacgaacaggaaagacctttagccctatgcgagcctggggtcaacccagaggaacagctgattataatccagtctaggctggatcagagtatggaggagaaccaggatcttaagaaagaactactaaagtgtaagcaagaagcacggaacctgcagggtataaaagacgcactacagcagcgcctaactcagcaagacacctctgttctccagttaaaacaggagctgctaagggctaacatggataaggatgagcttcacaaccagaacgtggacctgcagagaaaattggacgaaaggaatcgacttttaggggagtataagaaagaattgggacagaaggatagattactccagcagcaccaggccaaactggaagaggcactgcgtaaattgtccgacgtgtcttaccatcaggtagacttagagcgagagctggagcacaaggatgtactactcgcgcactgtatgaaacgggaggctgatgaggcgacaaattataatagccacaattctcagtccaatggattcttattacctactgctgggaagggcgccacctcagtcagcaatagaggaactagcgatctacaactcgtgagggatgctttaagaagtcttaggaattcattctccgggcacgaccctcaacaccatactatagacagcctggaacagggaataagttctctcatggaacgtctgcacgtgatggaaactcagaaaaagcaggaacgcaaggtgagagtgaagtctcctagaacgcaggtcgggtcagagtacagggagagctggccaccaaattccaagcttccacattctcagagctctcccaccgtgtcatcaacctgtacaaaagtactttactttacagataggagcctgacccctttcatggttaacattccaaaacgactcgaggaagtcaccctcaaggattttaaggccgccatcgaccgcgaagggaatcacagatatcactttaaagccctggatcctgagttcggcaccgttaaggaagaaattttccacgacgatgatgcaatccctggctgggaaggaaagatcgtcgcatgggtcgaggaggatcacggggaaaactag

SEQ ID NO: 31527 - DNA, 5897 bp, Artificial Sequence
  derived and/or modified sequence
tcccgcaggaaagcggggctgggggcagcccggcagcgccgctcaacctagtgcgcgcccagttgtttccataggaaccgcgaccgcgccgggcccctccagcggaggcccccgtgcgagcatgcccagtgcaagccgctagtttggctccagtctaggtttccagtaagtggcatgcgggactccggagggatcccaatgagctgagccgagagcctttgtgtgcagagggaggaggaggaggcggcggcggccgccgggctggagaccccgcccggggagcccccagcaggaacaatgctagcctgcctgacccgagggaacttactggacgtcctgcaggagggcttcaatgagcaacagctgcaggcctatgtggcctgggtgaatgcacagctgaagaagaggccagcagtgaagcctgtgcaggacctgcgacaagatctccgggatggggtgatcctggcatatctcatcgagattgttgcaggagaaaagctgagtggggtacagctgagtcccggtaaccaacaggagatgaagaataatgtggagaaagtgctacagtttgtggcctctaaaaagattcgtatgcaccagacttcggctaaagatattgtggatggaaacctgaagtctatcatgaggctggtccttgccttggcagctcatttcaaacctggctccagcaggacggtgaaccaaggacgggactccagagcccctctgcaaagtcaccgaccacactgtgccactgctgttgcccagggagcagctgctgctctggccgatgtgtgtcatgacatgtcccgatcaggacgggatgtctttcgatatagacagaggaacagcagcatggatgaggaaattgagaatccatactggagtgtgcgggccctagtgcagcagtacgaagggcaacaaaggtccccgtctgaatccagctgctccagcctgacttcacccagtccaatccacagtgcaaagagcgagtccattataacccagtcagaagagaaggcagattttgtgattattcccgctgaaggaatagagaacagaacagaagggacagattctccattatctcgagactggcggccagggagccctggaacctatctggagacctcatgggaagaacagctgttggaacaacaagaatatttagaaaaagaaatggaggaagcaaagaaaatgatatcaggactacaggccttactgctcaatggatccttacctgaagatgaacaggagaggcccttggccctctgtgaaccaggtgtcaatcccgaggaacaactgattataatccaaagtcgtctggatcagagtatggaggagaatcaggacttaaagaaggaactgctgaaatgtaaacaagaagccagaaacttacaggggataaaggatgccttgcagcagagattgactcagcaggacacatctgttcttcagctcaaacaagagctactgagggcaaatatggacaaagatgagctgcacaaccagaatgtggatctgcagaggaagctagatgagaggaaccggctcttgggagaatataaaaaagagctggggcagaaggatcgccttcttcagcagcaccaggccaagttagaagaagcactccggaaactctctgatgtcagttaccaccaggtggatctagagcgagagctagaacacaaagatgtcctcttggctcactgtatgaaaagagaggcagatgaggcgaccaactacaacagtcacaactctcaaagcaatggttttctccttccaacggcaggaaaaggagctacttcagtcagcaacagagggaccagcgacctgcagcttgttcgagatgctctccgcagcctgcgcaacagcttcagtggccacgatcctcagcaccacactattgacagcttggagcagggcatttctagcctcatggagcgcctgcatgttatggagacgcagaagaaacaagaaagaaaggttcgggtcaagtcacccagaactcaagtaggtagtgaataccgggagtcctggccccctaactcaaagttgcctcactcacagagctctccaactgtcagcagcacctgtactaaagtgctctatttcactgaccggtcacttacgcccttcatggtcaatataccaaagaggttggaggaggtgacgttaaaggattttaaagcagctattgatcgggaaggaaatcaccggtatcacttcaaagcactggatcctgagtttggcactgtcaaagaggagattttccatgatgatgatgccatccctggatgggaagggaaaattgtagcttgggtggaagaagaccatggagagaattaatgccaagtatcagattgagggcttatggaacctggtcactccctggctgcttcactcaggaaagggaactaaaaccagaatacactaagaagtttctagtttgtgtgccaaaacagaagcttctccaagcatgatggccacaggtcagtcctctttctgtgcctggcatatctggtacttaaaattctgtccaaatgtagaccatgggttcatctggagttccttgtccgtgggaacacagtgttctattctactctgaggacaacaaaccgaaggccttaaacgatggggatggatgatcccgcctctgtaggggcatggctgctattatctggaaattaggaattggatgcatcattcctgtgtgttacagtattattttaattggcctcaatggttgcagcaatcagagtcccagcgtttgtactcacagacaaggcaaaggtaccagcttttctgtttctttgaacctactgcaaaccaagaataactcatgaggtggtaccaaagatgaaagcccagacttcagtaatcttttgaaccagacgtggatggtgctgaattgttgcttggatggaaaaagggctgcccatgttgtgctacactatgctaaaactgtaatttagtaagaccttgggctgcctcttctgtcttaactggttctgcagcttgtccttttgcccacatagggcctatttcatgtactgttagttttctctggggactctttaactttagagccatttctttttcttcaaactgatgaacttttgtttgaaaggcataaggagtgaaaagctccttgaaaatccaggcgggtatggaaaggtgctgctacccatatctttttgactttctttgtttcatgactttaactcatggcatctcctttgtagtaaaaggagacagaccattaatttcagcatttctttgtgatttataagtactgagcatgaagtacttgtctgcccctcatttcaaggccagagttattttctatttatgtattagtctaggctgatcttttagggcacaatagaaaccatggggcgtggagcatgagttgtgaatggcagggatcattctgggtaaaaaaaacctagaatcatttctgatgtgcaacattgtcaagtgaagaagctaacagttcaactaccgagattatttgataacctgggttttctcattcatccatcaagcaccatcaaccagtcagccattattatttatatatgtattaccaaaagcagtctatctgcctgtgacctccaatgtacactgccaaacacaagagtaggacacatctgttctgggttcttgacctatctgtctccaattcatctccccttttcagccatttcaacaaactactctttggagctctgagatgacatcttgttgttttatatagatgtatcttttaaaaatagttcacgtttggagaattcttttgtactcatttgctttttgtctgagaaccatgtctatttttataactggagtgtgagttctgtatcttctcacattctgtatactgtatccattttctagagaacccagtagcttttatacagtctcttcttaccaccccttgtggtttcagaacaagctttattttattacgagtatattaatgacaactaattcctgttccaattctacctgttttagttgtgaaggtagttttgtgtaatccagttgattgctcctctggcagagagaaggagctcaaaagatacttgatgtctttcatgtaagtttacctggtcttttcctattgaagaatttttcatcagaaacgactgggaaagtttgggaaagtcagcaaaagaaagaatgcatttcgaaagcaaacagaagaaaaaagtatattctcacagtttttccccaggaagtctggagaaaaagtcctcatgtcaccaatttctctgttgcatgaattttagtgttttgctataagacagcatgagggctatcaggccaaaattcattattgtatttccaatacagtttgtcttgaatgtctgtctcttaaaccagtttttacttgtcagttttctctcagcaaacagtcttactattatgtggaatttaacttttcagagaaaatttccaaagtcctctaccttatttggcttttatctgtgtcttttggaaaaggagctgcatggcctcagtgcctccataaaaagcttaagttgagttcatgggagaacattaagatcgttttttttcccttttagctcggtaatctcatgtaccacaggtaatgaccaagcatctctgctagaggatgtaactctcataactcctgtgtaaaatgaggatcctgttggtgatcctcattccagtttccaaagcgagaggagccttctgagcagaagtatgcaagactgattctgtttggaacagtttcctatttggctgcattctaggaggcctcctgacttattcatagtattgtcgcctggtggcattggtgtggggtagcttgtcctgctacttgctaaagttctctttctttgagaaaactgaggaaccagaatgcttagagttcataaaataatctctaaaccatgttaggttaaaacaaaatgaccatctcacaaaaacgagtttagttgaatgctcaattccttacaaaatcttcatttaaggctgagtgtggtggctcatgcctgtaattccagcactttgggaggccgaggcaggaagactgcttgagcccaggagttcaagaccagcctgggcaacgtaggaagactccgtctctacatagaaattttattataaaagtagctggggatggtggcacacacctgtagtcccagctactcaggaggttgaggtgggaagattgcttgagcccaggagtttgaggttgcagtgagctgatcatgccactgcactctagcctaggctacagagcaggaccccatctccaaaaaaaaaaaaaaaaaagtcatttaaaaactgaagaatgttctcttcttgctcagttccctaaattagctggggggattgggatactttacaatttttacatttttaaatttgaagaatttgttttaaacttacttggtaatggcacttctacttactgaccaacttttcagctctttttgaccaggatggttgcaaattagggaaaatatctttatactatacatccaattcaagaggactttaattacttaaaagcatttaggtcataattaaaattattttcactgtttccataaaataagcattatgattgcacactccttctactgtctgaatttatgtaagaggtatagcttgcttaaaatacatatatatgtaaagttatattttcttagaaacatggatgtttacagccattgctttcaaagagattattactgtgtattctccctgttttacaatatgttttcatgaagactatgttacaccagaggcttctgattatcaaagtgataaccagttttaactgccggtatgtaccagatttgtgaactaatttaaaaaaccacaaactatgaataaaatggggtttgcaaactaaa

SEQ ID NO: 31528 - DNA, 2052 bp, Artificial Sequence
  derived and/or modified sequence
atgctggcctgcctgacccggggcaacctgctggatgtgctgcaggagggcttcaatgagcagcagctgcaggcctacgtggcctgggtgaatgcccagctgaagaagaggcctgctgtgaagcctgtgcaggacctgcggcaggacctgagagatggagtcatcctggcctacctgattgagatcgtggccggggagaagctgtctggagtgcagctgagccctggcaaccagcaggagatgaagaacaacgtggagaaggtgctgcagtttgtggccagcaagaagatccgcatgcaccagaccagcgccaaggacatcgtggatggcaacctgaagagcatcatgaggctggtgctggccctggccgcccacttcaagccaggcagcagcaggacagtgaaccagggccgggacagccgggcccccctgcagagccaccggccccactgtgccacagctgtggcccagggcgctgctgctgccctggctgatgtgtgccacgacatgagccgcagcggcagagatgtgttccgctaccggcagaggaacagctccatggatgaggagattgagaacccctactggagcgtgcgggccctggtgcagcagtatgagggccagcagaggagccccagcgagagcagctgcagcagcctgaccagccccagccccatccacagcgccaagtctgagagcatcatcacccagagcgaggagaaggctgactttgtgatcatcccagctgagggcattgaaaatagaacagagggcacagacagccccctgagccgggactggaggcctggcagccctggcacctacctggagacctcctgggaggagcagctgctggagcagcaggagtacctggagaaggagatggaggaggccaagaagatgatcagcggcctgcaggccctgctgctgaatggcagcctgcctgaagatgagcaggagcggcccctggccctgtgtgagcccggggtgaaccctgaggagcagctgatcatcatccagagccggctggaccagagcatggaggagaaccaggacctgaagaaggagctgctgaagtgcaagcaggaggccaggaacctgcagggcatcaaggatgccctgcagcagaggctgacccagcaggacacctctgtgctgcagctgaagcaggagctgctgcgggccaacatggacaaggatgagctgcacaaccagaatgtggacctgcagaggaagctggatgagaggaaccggctgctgggggagtacaagaaggagctgggccagaaggaccggctgctgcagcagcaccaggccaagctggaggaggccctgaggaagctgagtgatgtgtcctaccaccaggtggacctggagcgggagctggagcacaaggatgtgctgctggcccactgcatgaagcgggaggctgatgaggccaccaactacaacagccacaacagccagagcaatggcttcctgctgcccacagctgggaagggggccacctctgtgagcaacagaggcaccagtgacctgcagctggtgagagatgccctgcggagcctgaggaacagcttcagcggccatgacccccagcaccacaccatcgacagcctggagcagggcatcagcagcctgatggagcggctgcacgtgatggagacccagaagaagcaggagaggaaggtgcgggtgaagagccccaggacccaggtgggcagcgagtaccgggagagctggccacccaacagcaagctgccccacagccagagcagccccaccgtgagcagcacctgcaccaaggtgctgtacttcacagacaggagcctgacccccttcatggtgaacatccccaagaggctggaggaggtgaccctgaaggacttcaaggccgccatcgaccgggagggcaaccaccgctaccacttcaaggccctggaccctgagtttggaacagtgaaggaggagatcttccatgatgatgatgccatccctggctgggagggcaagatcgtggcctgggtggaggaggaccacggggagaactag

SEQ ID NO: 31529 - DNA, 2052 bp, Artificial Sequence
  derived and/or modified sequence
atgctggcctgcctgacccggggcaacctgctggacgtgctgcaggaggggttcaatgagcagcagctgcaggcctacgtggcatgggtcaacgctcagcttaaaaagcggccagccgtcaagcccgtgcaagacctgcggcaggatctgcgggacggggtaattctcgcttacctcattgaaatcgtagccggagagaaactgtcgggtgtccaactttctcccgggaatcagcaagaaatgaaaaataacgtggaaaaggtgttgcagtttgttgcatctaaaaagatccgtatgcatcagaccagtgctaaagacattgtcgatggaaaccttaaaagcattatgaggctggtactagccctggccgcccatttcaaacccggaagttctcgcaccgttaatcagggaagggactcgcgagcgcccctgcaatcacatcgccctcattgtgcaactgccgtcgcccaaggcgctgcagctgccctcgcagacgtttgccacgatatgtcaagaagcggccgagatgtttttagatatcggcagagaaattcatcaatggacgaggagattgagaatccctactggtcagttagagcattggtgcagcagtatgaaggccagcagaggtccccatcagaaagctcctgtagctcacttaccagcccgtccccaatccattcggcaaagagtgagtctatcatcacccagtcggaggagaaggctgatttcgtgatcataccagccgaggggattgagaatcggactgaaggcacagacagtcctctctccagagactggcggccgggcagccccgggacctacctcgagacgtcctgggaggagcagctgcttgaacagcaagaatatctcgaaaaggagatggaggaggctaagaagatgattagtggcttgcaagctctgctgcttaacggctcactacccgaggatgagcaggaacggcctcttgccctgtgcgaacctggtgtgaatcccgaagagcaactgataattatccagtctaggctcgatcagagcatggaagaaaatcaggacctgaagaaagagctgctaaagtgtaaacaggaggccaggaatctgcagggaattaaagatgccctccaacaacggcttacacagcaggacaccagtgtgcttcagctgaaacaggagctcctgcgcgcgaacatggataaagacgagctgcataaccagaacgtggatctgcagaggaaattagacgagcggaacagactactgggcgaatataaaaaagaattgggtcaaaaggacagattgctgcagcaacatcaggccaagctggaagaggctcttcgcaaactgtcagatgtcagttaccatcaggttgacctggagagagagctggaacacaaagacgttctgctggctcattgcatgaaacgtgaagcagatgaggccaccaattataattctcacaactctcagagtaatggttttttgctccccacagccggcaaaggcgctacatcagtatccaaccggggcacctccgatcttcagctggtccgtgacgccctgagatctttgagaaactcgttctcgggtcatgacccacaacaccacacgattgatagcctggaacagggaatatcctcccttatggagcggcttcacgtcatggagactcagaagaagcaggagcggaaggtgcgagtgaagagcccaagaacacaggtgggatcagagtaccgcgagtcctggccacctaatagtaaactccctcactctcagagcagccctacagtgtccagcacctgtacaaaggtgctgtactttaccgatcgctctcttacccccttcatggtgaatattccaaaaagactggaagaagttaccctaaaagacttcaaagctgccattgacagagagggcaaccaccgttaccatttcaaagccctagatccagaattcgggacagtaaaggaggaaatctttcatgacgatgacgccattcccggctgggaaggaaaaatcgtggcttgggtggaggaagatcatggggagaattag

SEQ ID NO: 31530 - DNA, 2052 bp, Artificial Sequence
  derived and/or modified sequence
atgttggcttgcttgaccagaggaaacctgctggacgttcttcaggagggatttaacgagcagcagcttcaggcctatgttgcttgggtaaatgctcagcttaagaaaagaccggcagtgaagcctgttcaggacctgaggcaggatctgcgggatggagttattcttgcatacctcatcgaaatcgtggctggggagaagttgtcaggagtgcagttgtcacccggaaaccagcaagagatgaaaaacaatgttgagaaggtgttgcagtttgtcgccagtaaaaagatccggatgcatcagactagcgctaaagacattgtggatgggaacctgaaaagcatcatgaggctggtccttgccctggccgctcacttcaagccaggctcttcccgtacagtcaaccagggcagggactcaagggcgcctttacagtctcatagaccccactgcgcgaccgccgtcgcccaaggtgcagctgccgcactggcagacgtctgccacgatatgtccaggagcgggagagatgtgtttcgttacaggcaacgcaatagcagtatggacgaggaaattgaaaacccctactggagtgtgcgtgccctggtgcagcagtacgagggacagcaacggagtccttcagagtcatcctgctcatccttgacctcgccaagccccatccatagtgctaaaagcgaatccataattactcagtccgaggaaaaggcggatttcgttataatcccggctgaaggcatcgagaaccgcaccgagggtacagactcccctctctcgcgcgattggcgacccggtagtccgggaacatacctggaaacgagctgggaggaacaactcctcgagcagcaggagtacctcgaaaaagagatggaggaagcgaagaagatgatctccggtcttcaggctctccttctgaatggcagcctgcctgaagacgaacaggaacggcctctggctttatgcgagccgggagtgaaccccgaagagcagctcatcattattcagtctaggctggatcagagcatggaagagaaccaagatctgaagaaggaacttttgaagtgcaaacaagaagcccgaaacttgcaaggaatcaaggatgcactgcagcagcgcctcactcagcaggatacttccgtgctgcagctgaaacaggagctgcttagggcaaatatggacaaagacgaactccataatcagaatgtcgatctccagaggaagctggacgagcgcaatcgactcctaggagagtataagaaagagctggggcagaaagatcgcctcctacagcagcatcaggccaaactggaagaggcactgcggaaactgtctgacgttagctatcatcaagtggacctcgagcgcgaactcgaacacaaggatgtgctgcttgcgcattgcatgaagagagaggccgacgaagcgacaaattacaacagccataactcccagtccaatggtttcctgcttccgaccgccggaaaaggtgctaccagtgtctctaacagagggaccagcgatctgcagctggtgagagacgccctcaggagcctgcgcaacagctttagcggtcacgacccccagcatcacacaatagacagcctggaacaggggattagctccctcatggagcgcctccatgtgatggaaacacagaaaaaacaagaaagaaaggtcagggtgaagtccccaagaacacaggtcggatctgagtaccgggaaagctggccaccaaactctaagcttccccactcacagagttcccctaccgtgagctccacttgtacgaaggtgctttactttaccgatcggtccctaacaccctttatggtgaatattccgaagaggctggaggaagtgacactgaaagatttcaaagccgctattgatcgggaggggaatcatagataccattttaaggcgttagatccggagtttggtactgtgaaggaggagatcttccatgacgatgacgccattcccggttgggagggtaagattgtcgcctgggtggaggaggatcacggcgagaattag

SEQ ID NO: 31531 - protein, 550 aa, Artificial Sequence
  derived and/or modified sequence
MVTAAMLLQCCPVLARGPTSLLGKVVKTHQFLFGIGRCPILATQGPNCSQIHLKATKAGGDSPSWAKGHCPFMLSELQDGKSKIVQKAAPEVQEDVKAFKTGNYVFSYDQFFRDKIMEKKQDHTYRVFKTVNRWADAYPFAQHFSEASVASKDVSVWCSNDYLGMSRHPQVLQATQETLQRHGAGAGGTRNISGTSKFHVELEQELAELHQKDSALLFSSCFVANDSTLFTLAKILPGCEIYSDAGNHASMIQGIRNSGAAKFVFRHNDPDHLKKLLEKSNPKIPKIVAFETVHSMDGAICPLEELCDVSHQYGALTFVDEVHAVGLYGSRGAGIGERDGIMHKIDIISGTLGKAFGCVGGYIASTRDLVDMVRSYAAGFIFTTSLPPMVLSGALESVRLLKGEEGQALRRAHQRNVKHMRQLLMDRGLPVIPCPSHIIPIRVGNAALNSKLCDLLLSKHGIYVQAINYPTVPRGEELLRLAPSPHHSPQMMEDFVEKLLLAWTAVGLPLQDVSVAACNFCRRPVHFELMSEWERSYFGNMGPQYVTTYA

SEQ ID NO: 31532 - protein, 574 aa, Artificial Sequence
  derived and/or modified sequence
MRGGEVALGWNKKKRLFCEDFRFKMVTAAMLLQCCPVLARGPTSLLGKVVKTHQFLFGIGRCPILATQGPNCSQIHLKATKAGGDSPSWAKGHCPFMLSELQDGKSKIVQKAAPEVQEDVKAFKTGNYVFSYDQFFRDKIMEKKQDHTYRVFKTVNRWADAYPFAQHFSEASVASKDVSVWCSNDYLGMSRHPQVLQATQETLQRHGAGAGGTRNISGTSKFHVELEQELAELHQKDSALLFSSCFVANDSTLFTLAKILPGCEIYSDAGNHASMIQGIRNSGAAKFVFRHNDPDHLKKLLEKSNPKIPKIVAFETVHSMDGAICPLEELCDVSHQYGALTFVDEVHAVGLYGSRGAGIGERDGIMHKIDIISGTLGKAFGCVGGYIASTRDLVDMVRSYAAGFIFTTSLPPMVLSGALESVRLLKGEEGQALRRAHQRNVKHMRQLLMDRGLPVIPCPSHIIPIRVGNAALNSKLCDLLLSKHGIYVQAINYPTVPRGEELLRLAPSPHHSPQMMEDFVEKLLLAWTAVGLPLQDVSVAACNFCRRPVHFELMSEWERSYFGNMGPQYVTTYA

SEQ ID NO: 31533 - DNA, 1653 bp, Artificial Sequence
  derived and/or modified sequence
atggtgactgctgcgatgctgctccagtgctgccctgtcctagccagagggccaacctccctgctgggaaaggtggtaaagacacaccagttcctatttggaatcgggcgttgtccaattctggccacccagggcccaaactgttcccagatacacttaaaggctaccaaagccggcggggatagtccttcctgggcaaagggacattgccctttcatgctgagcgagttacaggacggtaaaagtaagatcgtgcaaaaggcagctcctgaagtccaggaggatgtcaaagccttcaagaccggcaactacgtgttttcatatgatcagttcttccgcgacaagatcatggaaaaaaagcaagatcatacctatagggtcttcaaaactgtcaaccgctgggccgacgcttatccttttgctcagcatttctctgaggcttcagtggctagcaaagacgtttcagtctggtgctctaatgattatcttgggatgtcaaggcatccccaggttctccaggctactcaggagacactccagcgacatggggcaggggccggcggtacccggaatatttctggtaccagtaaatttcatgttgaactcgagcaagagcttgccgagttgcatcagaaagacagcgcactcctcttttccagttgcttcgtagccaacgactccaccctgtttacactggcaaaaatcctacccggctgtgagatctactcagacgccggaaatcacgcttcaatgatccagggcatccggaacagcggcgccgctaagttcgtgttcaggcacaatgatcccgaccatttaaagaaactgctcgagaaaagtaatcccaagattcccaaaatcgtagcgttcgagacagtccattctatggacggcgccatctgcccacttgaggaactttgtgacgtgagccatcagtacggggcgctaaccttcgtggacgaagttcacgcggtgggcttgtacgggtctagaggtgccggcatcggggaacgcgatgggatcatgcacaaaattgatatcatctcaggtactctggggaaggcattcggatgcgtgggcggatatatcgcctcaactagggacctcgtggatatggttaggtcctatgctgccggttttattttcaccacctcactgccccccatggtgctgtcaggagccctggagagcgtcagactgctcaaaggcgaggagggccaggcgctgaggagggctcaccagaggaatgtaaaacacatgcgccaactgctcatggaccgcggactgcccgtgatcccatgtcccagtcacattattccaatccgcgtagggaatgccgccttgaattccaagttgtgtgacctcctcctgtctaagcacgggatctacgtgcaagctatcaattacccaactgtgccacgtggagaggagcttctccgacttgccccatctcctcatcatagtccccaaatgatggaggacttcgtggagaaactgctactggcctggaccgcagtcggtctgcccctgcaggacgtctctgtagcagcatgtaatttctgcaggcgtccagtgcactttgagcttatgagcgaatgggagcgcagttacttcggaaacatgggaccccaatacgtgaccacatatgcctag

SEQ ID NO: 31534 - DNA, 1725 bp, Artificial Sequence
  derived and/or modified sequence
atgagggggggggaggttgccctcggatggaacaagaagaagcgtctcttttgtgaagattttagattcaagatggtaaccgccgctatgctgctgcaatgctgccctgtcctggctcgaggcccgacgtcacttctgggcaaggtcgtgaaaacacatcagttcttattcggcatcggaagatgcccaatactggccactcagggacctaattgctcacagatacacctgaaggccaccaaggctggtggtgactcccccagctgggccaaagggcactgccccttcatgctgagcgaactgcaggacggaaaatccaagattgtccagaaagctgctcctgaagtgcaggaagatgtgaaagctttcaagaccggaaattacgtgtttagctacgatcagtttttcagggacaaaatcatggaaaaaaagcaggaccatacctatcgggtatttaagaccgtgaacagatgggcagatgcatacccgtttgctcaacacttctccgaggccagtgtagcgtctaaagacgtctctgtgtggtgttccaacgactatctgggcatgtcacggcacccgcaggtcctgcaagccacccaggaaaccttgcagaggcacggagcgggggccggcggtacccgaaatattagtggtacttccaagttccatgtggaactcgagcaggagctggccgagctgcatcagaaggatagcgcattgttgttctcctcatgtttcgttgccaatgattccactttattcaccctggctaagatactgccaggttgcgagatttatagtgacgctgggaatcatgcttcaatgattcagggaatccgaaattccggagccgctaaattcgtatttaggcataacgaccccgaccacctaaaaaagctattggagaaatcgaatccaaagataccgaaaatcgtggccttcgagactgtacattcaatggatggagctatctgccccctggaggagctgtgcgacgtctcacaccagtatggtgcattgacctttgtcgatgaagtgcacgcagtcggtctgtacgggtctcgtggggcggggatcggtgagagagatggcattatgcataagatagatatcatatccgggacgttaggtaaggcatttggctgcgtcggtggttacattgcttcaacacgggatcttgtggatatggtgagatcctatgccgcaggctttatctttactactagcctcccgcccatggtgttatccggcgccttggaaagcgtacggctcctaaagggagaggaaggccaggccctgcgcagagcacaccagcggaacgtaaagcacatgaggcagctactgatggacagagggctgcctgtcattccatgcccatcccacataatcccgattcgggtaggcaatgccgccttaaacagtaaactctgtgacctgcttctgagtaagcacggcatctatgttcaagcaataaactacccaactgtcccccggggagaggagctcttgaggctcgccccatcgccccatcacagtccgcagatgatggaggacttcgtcgagaaactcctgcttgcttggaccgccgtgggtctaccgctgcaagatgtgtctgtcgccgcctgcaatttctgccggcgacctgtccactttgaattaatgtcagagtgggaacgcagctattttggcaacatgggtcctcaatatgtgacaacctacgcatag

SEQ ID NO: 31535 - DNA, 1653 bp, Artificial Sequence
  derived and/or modified sequence
atggtgacagctgccatgctgctgcagtgctgccctgtgctggcccggggccccaccagcctgctgggcaaggtggtgaagacccaccagttcctgtttggaattggccgctgccccatcctggccacccagggccccaactgcagccagatccacctgaaggccaccaaggccggcggggacagccccagctgggccaagggccactgccccttcatgctgtctgagctgcaggacggcaagagcaagatcgtgcagaaggccgcccctgaggtgcaggaggatgtgaaggccttcaagacaggcaactacgtgttctcctatgaccagttcttccgggacaagatcatggagaagaagcaggaccacacctacagagtcttcaagacagtgaaccgctgggcagatgcctacccctttgcccagcacttcagcgaggcctctgtggccagcaaggatgtgtctgtgtggtgcagcaatgactacctgggcatgagccgccacccccaggtgctgcaggccacccaggagaccctgcagagacatggagctggggccggcggcaccaggaacatcagcggcaccagcaagttccacgtggagctggagcaggagctggccgagctgcaccagaaggacagcgccctgctcttcagcagctgctttgtggccaatgacagcaccctcttcaccctggccaagatcctgcccggctgtgagatctacagtgatgctggcaaccacgcctccatgatccagggcatccggaacagcggggccgccaagtttgtgttccgccacaatgaccctgaccacctgaagaagctgctggagaagagcaaccccaagatccccaagatcgtggcctttgagaccgtgcacagcatggatggagccatctgccccctggaggagctgtgtgatgtgagccaccagtatggagccctgacctttgtggatgaggtgcatgctgtgggcctgtatggcagcagaggagctggcattggagagagagatggcatcatgcacaagattgacatcatcagcggcaccctgggcaaggccttcggctgtgtgggcggctacatcgccagcacccgggacctggtggacatggtgcgctcctatgctgctggcttcatcttcaccaccagcctgccccccatggtgctgagcggggccctggagagcgtgcggctgctgaagggggaggagggccaggccctgcggcgggcccaccagagaaatgtgaagcacatgaggcagctgctgatggaccggggcctgcccgtcatcccctgccccagccacatcatccccatccgggtgggcaatgctgccctgaacagcaagctgtgtgacctgctgctgagcaagcacggcatctacgtgcaggccatcaactaccccaccgtgcccagaggagaggagctgctgcggctggcccccagcccccaccacagcccccagatgatggaggactttgtggagaagctgctgctggcctggacagctgtgggcctgcccctgcaggatgtgtctgtggccgcctgcaacttctgccggcggcctgtgcactttgagctgatgtctgagtgggagaggagctacttcggcaacatgggcccccagtatgtgaccacctacgcctag

SEQ ID NO: 31536 - DNA, 1725 bp, Artificial Sequence
  derived and/or modified sequence
atgagaggaggagaggtggccctgggctggaacaagaagaagaggctcttctgtgaggacttccgcttcaagatggtgacagctgccatgctgctgcagtgctgccctgtgctggcccggggccccaccagcctgctgggcaaggtggtgaagacccaccagttcctgtttggaattggccgctgccccatcctggccacccagggccccaactgcagccagatccacctgaaggccaccaaggccggcggggacagccccagctgggccaagggccactgccccttcatgctgtctgagctgcaggacggcaagagcaagatcgtgcagaaggccgcccctgaggtgcaggaggatgtgaaggccttcaagacaggcaactacgtgttctcctatgaccagttcttccgggacaagatcatggagaagaagcaggaccacacctacagagtcttcaagacagtgaaccgctgggcagatgcctacccctttgcccagcacttcagcgaggcctctgtggccagcaaggatgtgtctgtgtggtgcagcaatgactacctgggcatgagccgccacccccaggtgctgcaggccacccaggagaccctgcagagacatggagctggggccggcggcaccaggaacatcagcggcaccagcaagttccacgtggagctggagcaggagctggccgagctgcaccagaaggacagcgccctgctcttcagcagctgctttgtggccaatgacagcaccctcttcaccctggccaagatcctgcccggctgtgagatctacagtgatgctggcaaccacgcctccatgatccagggcatccggaacagcggggccgccaagtttgtgttccgccacaatgaccctgaccacctgaagaagctgctggagaagagcaaccccaagatccccaagatcgtggcctttgagaccgtgcacagcatggatggagccatctgccccctggaggagctgtgtgatgtgagccaccagtatggagccctgacctttgtggatgaggtgcatgctgtgggcctgtatggcagcagaggagctggcattggagagagagatggcatcatgcacaagattgacatcatcagcggcaccctgggcaaggccttcggctgtgtgggcggctacatcgccagcacccgggacctggtggacatggtgcgctcctatgctgctggcttcatcttcaccaccagcctgccccccatggtgctgagcggggccctggagagcgtgcggctgctgaagggggaggagggccaggccctgcggcgggcccaccagagaaatgtgaagcacatgaggcagctgctgatggaccggggcctgcccgtcatcccctgccccagccacatcatccccatccgggtgggcaatgctgccctgaacagcaagctgtgtgacctgctgctgagcaagcacggcatctacgtgcaggccatcaactaccccaccgtgcccagaggagaggagctgctgcggctggcccccagcccccaccacagcccccagatgatggaggactttgtggagaagctgctgctggcctggacagctgtgggcctgcccctgcaggatgtgtctgtggccgcctgcaacttctgccggcggcctgtgcactttgagctgatgtctgagtgggagaggagctacttcggcaacatgggcccccagtatgtgaccacctacgcctag

SEQ ID NO: 31537 - DNA, 1795 bp, Artificial Sequence
  derived and/or modified sequence
acctgtcattcgttcgtcctcagtgcagggcaacaggactttaggttcaagatggtgactgcagccatgctgctacagtgctgcccagtgcttgcccggggccccacaagcctcctaggcaaggtggttaagactcaccagttcctgtttggtattggacgctgtcccatcctggctacccaaggaccaaactgttctcaaatccaccttaaggcaacaaaggctggaggagattctccatcttgggcgaagggccactgtcccttcatgctgtcggaactccaggatgggaagagcaagattgtgcagaaggcagccccagaagtccaggaagatgtgaaggctttcaagacaggaaactatgtcttcagttatgaccagtttttcagggacaagatcatggagaagaaacaggatcacacctaccgtgtgttcaagactgtgaaccgctgggctgatgcatatccctttgcccaacatttctctgaggcatctgtggcctcaaaggatgtgtccgtctggtgtagtaatgattacctgggcatgagccgacaccctcaggtcttgcaagccacacaggagaccctgcagcgtcatggtgctggagctggtggcacccgcaacatctcaggcaccagtaagtttcatgtggagcttgagcaggagctggctgagctgcaccagaaggactcagccctgctcttctcctcctgctttgttgccaatgactctactctcttcaccttggccaagatcctgccagggtgcgagatttactcagacgcaggcaaccatgcttccatgatccaaggtatccgtaacagtggagcagccaagtttgtcttcaggcacaatgaccctgaccacctaaagaaacttctagagaagtctaaccctaagatacccaaaattgtggcctttgagactgtccactccatggatggtgccatctgtcccctcgaggagttgtgtgatgtgtcccaccagtatggggccctgaccttcgtggatgaggtccatgctgtaggactgtatgggtcccggggcgctgggattggggagcgtgatggaattatgcataagattgacatcatctctggaactcttggcaaggcctttggctgtgtgggcggctacattgccagcacccgtgacttggtggacatggtgcgctcctatgctgcaggcttcatctttaccacttctctgccccccatggtgctctctggagctctagaatctgtgcggctgctcaagggagaggagggccaagccctgaggcgagcccaccagcgcaatgtcaagcacatgcgccagctactcatggacaggggccttcctgtcatcccctgccccagccacatcatccccatccgggtgggcaatgcagcactcaacagcaagctctgtgatctcctgctctccaagcatggcatctatgtgcaggccatcaactacccaactgtcccccggggtgaagagctcctgcgcttggcaccctccccccaccacagccctcagatgatggaagattttgtggagaagctgctgctggcttggactgcggtggggctgcccctccaggatgtgtctgtggctgcctgcaatttctgtcgccgtcctgtacactttgagctcatgagtgagtgggaacgttcctacttcgggaacatggggccccagtatgtcaccacctatgcctgagaagccagctgcctaggattcacaccccacctgcgcttcacttgggtccaggcctactcctgtcttctgctttgttgtgtgcctctagctg

SEQ ID NO: 31538 - DNA, 1653 bp, Artificial Sequence
  derived and/or modified sequence
atggtgaccgccgccatgctgctgcagtgctgccccgtgctggccagaggccccactagcctgctgggaaaggtggtgaagacccatcagttcttatttgggataggaaggtgccctatactggctacacaaggcccaaattgctcacaaatccacctgaaggccacaaaggccggcggcgacagcccaagttgggcaaaaggccactgccccttcatgctgtcagaactgcaggacggcaagtcaaagatcgtgcaaaaggccgcccctgaggtgcaggaggacgtcaaggcttttaagaccgggaactacgtattcagctacgatcagttctttcgcgataagatcatggaaaaaaagcaggatcacacatacagagtgttcaaaaccgtgaatcgatgggcggatgcgtacccttttgcccagcatttttctgaggcaagtgtagcctcaaaagacgtaagtgtttggtgttccaacgactacctggggatgtcgagacacccccaggtactgcaggccacacaggagactctgcagaggcacggcgcaggggcaggaggcacgcgcaatatctccggtacttccaagttccacgtcgagctggaacaggagctggcagaattgcaccaaaaggactctgctcttttgttcagctcctgtttcgtagcaaacgactctacgctgttcacactggccaagatcctaccgggatgcgagatctatagcgacgccggcaatcatgcaagcatgatccagggcatccgtaactccggcgccgccaagttcgttttcagacacaatgatcctgatcacttaaaaaagctcttggagaagtctaaccctaagattcctaagatcgtagcttttgaaacagtacactcaatggatggggccatatgcccactggaggaactgtgcgacgttagccaccaatatggcgccctcacattcgtcgatgaggtgcacgccgtgggactctacggctccagaggggcaggcataggggagagggacggcatcatgcacaagatcgatataataagtgggacgctagggaaggctttcggttgcgtcggggggtacatcgcttctacaagagacttggtcgacatggtcaggagctacgctgccggattcatctttacaacaagtctgccacccatggtgttatctggggctctggaatcggtgaggctcctgaagggcgaagagggtcaggccctaaggcgggcacatcagcgcaacgtcaaacacatgaggcaactgctgatggacagaggactgccagtgatcccctgcccaagccacattatccctattcgcgtcggtaatgccgcgctgaactccaaactctgcgacctgcttttgtctaagcacggtatttatgtgcaggccatcaattacccaactgtacctcggggtgaagagctgctcaggctggccccttcaccacatcactccccacagatgatggaggactttgtggagaagctgctgctggcctggacagccgtgggccttccgttacaggacgtgtctgttgccgcttgcaacttttgtcggagacctgtccactttgaactgatgagtgaatgggaaaggtcctactttggcaatatgggacctcaatatgtcaccacttatgcctag

SEQ ID NO: 31539 - DNA, 1725 bp, Artificial Sequence
  derived and/or modified sequence
atgcggggcggcgaggtggccctgggctggaacaagaagaagcggctgttttgcgaagactttcgatttaagatggttacggctgccatgctccttcagtgctgtcccgtgttggccagaggacctacttcccttctgggcaaagtggttaagacccatcagtttttatttgggataggaaggtgtccgatcttggcaacgcaggggcccaactgttcccaaattcatttgaaagcaaccaaggctgggggagattccccgagttgggccaagggccattgccctttcatgctctcggagctgcaagacgggaagtctaagatcgtacagaaggccgcccccgaagtccaagaggatgttaaggctttcaagaccggcaattacgttttttcatatgaccagttctttagagacaagatcatggaaaagaagcaggaccatacctatcgggtgtttaagaccgtcaaccgctgggcagacgcatatccattcgcccagcacttctctgaagcgtctgttgccagcaaggatgtgtccgtgtggtgctctaacgattacctcggaatgtcccggcatccccaggtgctccaagccacccaggaaactctgcagcggcacggagcaggcgcagggggtacaaggaatatcagcgggacttcgaagttccacgtggagctggaacaggagctggctgagttgcaccagaaggattctgcactgctgtttagctcttgttttgtggcaaatgatagcacactttttaccctcgctaagatcctgccgggctgcgagatttattcagacgcagggaatcacgcatcaatgatacagggtatccggaactctggcgctgcaaaatttgttttcaggcacaacgaccctgatcacctgaaaaagttactggagaaatctaatccgaagatcccaaagatcgtagccttcgagacagtgcactcaatggacggggcaatttgccctttggaggagctgtgcgatgtgagtcaccagtatggcgcacttaccttcgtggacgaagtgcacgccgtgggcttgtatggatcacggggcgctgggataggtgaacgagacggcatcatgcataaaatagatatcatttctggaactcttggcaaagcgttcgggtgcgtggggggctacatagcatccactcgggatttagttgatatggtgcgttcatatgccgctggtttcatctttaccacatccctccctccaatggttctgtccggcgcactggagtctgtgagactgttaaagggggaggaagggcaggcgctgcgacgggcacaccaacggaacgttaaacacatgaggcagctgcttatggataggggcctcccagtaattccatgtcccagccatatcatcccgataagggtggggaatgccgccttaaactccaagctctgcgatctcctgttaagtaaacacggtatctacgttcaggccatcaactacccaaccgtgcctcgtggtgaggagcttttgaggctggcaccgagccctcaccatagccctcaaatgatggaggattttgtggagaaactgctgctggcctggacagccgttggcctgccactccaagacgtctctgtagcagcctgtaacttttgtagacgtcccgtgcattttgagctgatgagtgaatgggagaggagctactttggcaatatgggccctcagtacgttaccacttacgcttag

SEQ ID NO: 31540 - DNA, 1936 bp, Artificial Sequence
  derived and/or modified sequence
acctgtcattcgttcgtcctcagtgcagggcaacagggcccacatgccttggccccacataccaacccaggctgctgtgacagcccatgagagggggagaggttgctctgggatggaacaagaaaaagaggttgttttgtgaggactttaggttcaagatggtgactgcagccatgctgctacagtgctgcccagtgcttgcccggggccccacaagcctcctaggcaaggtggttaagactcaccagttcctgtttggtattggacgctgtcccatcctggctacccaaggaccaaactgttctcaaatccaccttaaggcaacaaaggctggaggagattctccatcttgggcgaagggccactgtcccttcatgctgtcggaactccaggatgggaagagcaagattgtgcagaaggcagccccagaagtccaggaagatgtgaaggctttcaagacaggaaactatgtcttcagttatgaccagtttttcagggacaagatcatggagaagaaacaggatcacacctaccgtgtgttcaagactgtgaaccgctgggctgatgcatatccctttgcccaacatttctctgaggcatctgtggcctcaaaggatgtgtccgtctggtgtagtaatgattacctgggcatgagccgacaccctcaggtcttgcaagccacacaggagaccctgcagcgtcatggtgctggagctggtggcacccgcaacatctcaggcaccagtaagtttcatgtggagcttgagcaggagctggctgagctgcaccagaaggactcagccctgctcttctcctcctgctttgttgccaatgactctactctcttcaccttggccaagatcctgccagggtgcgagatttactcagacgcaggcaaccatgcttccatgatccaaggtatccgtaacagtggagcagccaagtttgtcttcaggcacaatgaccctgaccacctaaagaaacttctagagaagtctaaccctaagatacccaaaattgtggcctttgagactgtccactccatggatggtgccatctgtcccctcgaggagttgtgtgatgtgtcccaccagtatggggccctgaccttcgtggatgaggtccatgctgtaggactgtatgggtcccggggcgctgggattggggagcgtgatggaattatgcataagattgacatcatctctggaactcttggcaaggcctttggctgtgtgggcggctacattgccagcacccgtgacttggtggacatggtgcgctcctatgctgcaggcttcatctttaccacttctctgccccccatggtgctctctggagctctagaatctgtgcggctgctcaagggagaggagggccaagccctgaggcgagcccaccagcgcaatgtcaagcacatgcgccagctactcatggacaggggccttcctgtcatcccctgccccagccacatcatccccatccgggtgggcaatgcagcactcaacagcaagctctgtgatctcctgctctccaagcatggcatctatgtgcaggccatcaactacccaactgtcccccggggtgaagagctcctgcgcttggcaccctccccccaccacagccctcagatgatggaagattttgtggagaagctgctgctggcttggactgcggtggggctgcccctccaggatgtgtctgtggctgcctgcaatttctgtcgccgtcctgtacactttgagctcatgagtgagtgggaacgttcctacttcgggaacatggggccccagtatgtcaccacctatgcctgagaagccagctgcctaggattcacaccccacctgcgcttcacttgggtccaggcctactcctgtcttctgctttgttgtgtgcctctagctgaattgagcctaaaaataaagcacaaaccacagca

SEQ ID NO: 31541 - DNA, 1653 bp, Artificial Sequence
  derived and/or modified sequence
atggtgacagctgctatgctgttgcagtgttgtcctgtactggccaggggacctacctcattgctaggaaaagttgttaaaacgcaccagttcttgttcggaatcggcagatgtccaatcttggccacgcaagggccaaattgttcgcaaatccatctgaaggcaacgaaggcgggaggcgattctccaagttgggcaaagggacactgccctttcatgcttagtgaactgcaggacggtaaaagcaagatcgtccagaaagctgccccagaggtgcaggaggatgtcaaagcttttaagactggcaactacgtgtttagctatgaccagtttttccgagacaaaattatggaaaagaaacaggaccatacgtacagggtattcaaaaccgtgaacaggtgggctgatgcgtacccattcgcccagcacttcagcgaggcttctgtggcttccaaggacgtctccgtgtggtgcagtaatgattaccttggtatgtcacggcatccacaggttctacaggcaactcaggaaactcttcagagacacggcgcaggggcaggaggcactagaaatatttctggcaccagtaagtttcatgttgagttggaacaggagcttgcagagctccaccagaaggattcagccttactgttttcaagctgtttcgtggcaaacgattccacactctttacactcgccaaaattctcccgggttgtgagatttactctgacgccggaaatcatgcatccatgatccaaggtatcagaaactcaggggcagcaaagtttgtgttccggcacaacgacccggaccaccttaagaagctcctggaaaagagcaatccaaagatccctaaaattgtggcctttgaaaccgtgcacagtatggatggcgcaatctgccccttggaagagctctgcgatgtgagccaccagtatggtgccttaacattcgtagacgaagtgcacgccgtgggcttgtacggcagcagaggcgcaggaatcggcgagcgagatggaatcatgcacaaaatcgacataatttcgggcactttggggaaggcttttggctgcgtgggtgggtatattgcttccacgcgggatctggtcgacatggtcaggtcttatgctgcaggcttcatatttacaaccagtttgcctcccatggtcctatctggggctctggagtcagttagactgctgaagggcgaagagggccaggccctccgaagagcccatcaaagaaacgttaagcatatgaggcagcttctcatggacaggggcttacctgtgatcccttgcccatcccacatcattcctatccgcgtgggcaatgccgctctgaatagtaagctttgtgatctgttactgagcaaacacggcatctatgtccaagctattaattaccccaccgttcctcggggagaggaactcctaaggctggctcctagcccccaccacagccctcagatgatggaagactttgtcgaaaaattgcttctggcctggacagccgtcggccttcctctccaggacgtttctgtggcagcttgcaacttctgtcgtaggcctgttcactttgagctgatgagcgaatgggaacggtcctatttcggcaatatggggcctcagtacgtaaccacctatgcctag

SEQ ID NO: 31542 - DNA, 1725 bp, Artificial Sequence
  derived and/or modified sequence
atgcgcggaggcgaggtagccctgggttggaataagaaaaagcgcttattttgtgaggatttccgctttaagatggttacggcggctatgcttttacaatgctgccccgtgcttgctaggggccctacttcactcctagggaaagtggttaaaacgcaccagtttctctttggaatcggacggtgccctatactggctactcaggggccaaactgtagccagattcatcttaaggctacgaaagcaggcggagactcaccctcatgggcgaagggccactgtccctttatgctgtctgaactacaggacggcaagtcgaagattgtgcagaaggccgcacctgaagtgcaggaggatgtgaaagccttcaagactgggaactatgtcttctcttatgatcagttttttcgagataaaataatggagaaaaagcaagatcacacctatcgcgtgttcaagaccgtcaacaggtgggctgacgcctatcccttcgcacagcactttagtgaagcttcagtggcctcaaaggatgtctccgtctggtgtagcaacgactacctaggtatgagcagacacccccaggtactgcaggcaacacaggagactcttcaacgacacggtgccggagccggaggaaccaggaacatttccggaacctccaagttccatgtggaattagagcaagaactggctgaactgcaccagaaagactctgctctgctgttttcatcttgttttgtcgccaacgacagcacgctcttcactctcgccaagatccttcctggatgcgagatatatagcgatgcgggtaaccacgctagcatgatccaaggaattcgaaacagcggcgctgccaagttcgtattccgccacaacgacccggatcacctcaagaagctcctcgagaagagtaatcccaaaattccgaaaatcgtcgctttcgaaacagtgcattctatggatggagccatttgtccactggaagaactttgcgacgtgagccatcagtatggcgcacttaccttcgtcgacgaggtgcacgccgtggggctatacggctctagaggcgcaggaattggtgaacgcgatggaatcatgcataaaattgacatcatctcaggcaccctgggaaaggcctttgggtgcgtcggcggatatatcgcgtctacccgggacttggtagatatggtgcgctcctacgctgcaggcttcatcttcactacttctttgcctcctatggtattgtctggagctttggagtccgtgcgactgctgaagggggaggagggtcaagcccttcggagggcgcatcagagaaacgtgaaacacatgagacagcttctcatggaccggggactaccagttattccatgtcctagtcacatcatacccattagggtgggaaacgcagcgctcaacagtaagctgtgcgacctgctgctttctaaacatggcatctatgtccaagcaatcaactaccccacagttcccagaggggaggagctgctgcgtttggctccaagccctcaccatagtccacaaatgatggaagattttgtagagaaattgctgctcgcttggaccgcagttggtctaccactgcaggacgtatcagttgccgcatgcaatttttgtcgccgacctgtgcactttgagctaatgtctgaatgggagcgcagttattttgggaatatgggtcctcagtacgttactacatacgcctag

SEQ ID NO: 31543 - DNA, 1653 bp, Artificial Sequence
  derived and/or modified sequence
atggtgaccgccgccatgctgctgcagtgctgccccgtgctggccagaggccccaccagcctgctgggcaaggtggtgaagacccaccagttcctgttcggcatcggcagatgccccatcctggccacccagggccccaactgcagccagatccacctgaaggccaccaaggccggcggcgacagccccagctgggccaagggccactgccccttcatgctgagcgagctgcaggacggcaagagcaagatcgtgcagaaggccgcccccgaggtgcaggaggacgtgaaggccttcaagaccggcaactacgtgttcagctacgaccagttcttcagagacaagatcatggagaagaagcaggaccacacctacagagtgttcaagaccgtgaacagatgggccgacgcctaccccttcgcccagcacttcagcgaggccagcgtggccagcaaggacgtgagcgtgtggtgcagcaacgactacctgggcatgagcagacacccccaggtgctgcaggccacccaggagaccctgcagagacacggcgccggcgccggcggcaccagaaacatcagcggcaccagcaagttccacgtggagctggagcaggagctggccgagctgcaccagaaggacagcgccctgctgttcagcagctgcttcgtggccaacgacagcaccctgttcaccctggccaagatcctgcccggctgcgagatctacagcgacgccggcaaccacgccagcatgatccagggcatcagaaacagcggcgccgccaagttcgtgttcagacacaacgaccccgaccacctgaagaagctgctggagaagagcaaccccaagatccccaagatcgtggccttcgagaccgtgcacagcatggacggcgccatctgccccctggaggagctgtgcgacgtgagccaccagtacggcgccctgaccttcgtggacgaggtgcacgccgtgggcctgtacggcagcagaggcgccggcatcggcgagagagacggcatcatgcacaagatcgacatcatcagcggcaccctgggcaaggccttcggctgcgtgggcggctacatcgccagcaccagagacctggtggacatggtgagaagctacgccgccggcttcatcttcaccaccagcctgccccccatggtgctgagcggcgccctggagagcgtgagactgctgaagggcgaggagggccaggccctgagaagagcccaccagagaaacgtgaagcacatgagacagctgctgatggacagaggcctgcccgtgatcccctgccccagccacatcatccccatcagagtgggcaacgccgccctgaacagcaagctgtgcgacctgctgctgagcaagcacggcatctacgtgcaggccatcaactaccccaccgtgcccagaggcgaggagctgctgagactggcccccagcccccaccacagcccccagatgatggaggacttcgtggagaagctgctgctggcctggaccgccgtgggcctgcccctgcaggacgtgagcgtggccgcctgcaacttctgcagaagacccgtgcacttcgagctgatgagcgagtgggagagaagctacttcggcaacatgggcccccagtacgtgaccacctacgcctag

SEQ ID NO: 31544 - DNA, 1725 bp, Artificial Sequence
  derived and/or modified sequence
atgagaggcggcgaggtggccctgggctggaacaagaagaagagactgttctgcgaggacttcagattcaagatggtgaccgccgccatgctgctgcagtgctgccccgtgctggccagaggccccaccagcctgctgggcaaggtggtgaagacccaccagttcctgttcggcatcggcagatgccccatcctggccacccagggccccaactgcagccagatccacctgaaggccaccaaggccggcggcgacagccccagctgggccaagggccactgccccttcatgctgagcgagctgcaggacggcaagagcaagatcgtgcagaaggccgcccccgaggtgcaggaggacgtgaaggccttcaagaccggcaactacgtgttcagctacgaccagttcttcagagacaagatcatggagaagaagcaggaccacacctacagagtgttcaagaccgtgaacagatgggccgacgcctaccccttcgcccagcacttcagcgaggccagcgtggccagcaaggacgtgagcgtgtggtgcagcaacgactacctgggcatgagcagacacccccaggtgctgcaggccacccaggagaccctgcagagacacggcgccggcgccggcggcaccagaaacatcagcggcaccagcaagttccacgtggagctggagcaggagctggccgagctgcaccagaaggacagcgccctgctgttcagcagctgcttcgtggccaacgacagcaccctgttcaccctggccaagatcctgcccggctgcgagatctacagcgacgccggcaaccacgccagcatgatccagggcatcagaaacagcggcgccgccaagttcgtgttcagacacaacgaccccgaccacctgaagaagctgctggagaagagcaaccccaagatccccaagatcgtggccttcgagaccgtgcacagcatggacggcgccatctgccccctggaggagctgtgcgacgtgagccaccagtacggcgccctgaccttcgtggacgaggtgcacgccgtgggcctgtacggcagcagaggcgccggcatcggcgagagagacggcatcatgcacaagatcgacatcatcagcggcaccctgggcaaggccttcggctgcgtgggcggctacatcgccagcaccagagacctggtggacatggtgagaagctacgccgccggcttcatcttcaccaccagcctgccccccatggtgctgagcggcgccctggagagcgtgagactgctgaagggcgaggagggccaggccctgagaagagcccaccagagaaacgtgaagcacatgagacagctgctgatggacagaggcctgcccgtgatcccctgccccagccacatcatccccatcagagtgggcaacgccgccctgaacagcaagctgtgcgacctgctgctgagcaagcacggcatctacgtgcaggccatcaactaccccaccgtgcccagaggcgaggagctgctgagactggcccccagcccccaccacagcccccagatgatggaggacttcgtggagaagctgctgctggcctggaccgccgtgggcctgcccctgcaggacgtgagcgtggccgcctgcaacttctgcagaagacccgtgcacttcgagctgatgagcgagtgggagagaagctacttcggcaacatgggcccccagtacgtgaccacctacgcctag

SEQ ID NO: 31545 - protein, 129 aa, Artificial Sequence
  derived and/or modified sequence
MTMTTMPESLNSPVSGKAVFMEFGPPNQQMSPSPMSHGHYSMHCLHSAGHSQPDGAYSSASSFSRPLGYPYVNSVSSHASSPYISSVQSYPGSASLAQSRLEDPGQDLVPKQAIQVQEADEAGWGGSGG

SEQ ID NO: 31546 - DNA, 390 bp, Artificial Sequence
  derived and/or modified sequence
atgactatgacaactatgccagagtcacttaattctcccgtctcagggaaagctgtgtttatggagttcgggcccccaaaccagcagatgagcccgtctcccatgtctcacggccactactccatgcattgtctccattctgcaggtcattcccagcccgacggcgcttattctagtgcatctagtttctcccgtccgttggggtacccttatgtgaattcagtctcctcacacgcaagcagtccctacatctcctctgtgcagagttatccaggctcagctagtctagcgcaatcccgactggaggaccctgggcaggatctggtgccgaagcaggccatacaggtgcaggaggcagatgaggcagggtggggagggagcggcggctag

SEQ ID NO: 31547 - DNA, 390 bp, Artificial Sequence
  derived and/or modified sequence
atgaccatgaccaccatgcctgagagcctgaacagccctgtgtctgggaaggctgtgttcatggagtttggaccacccaaccagcagatgagccccagccccatgagccacggccactacagcatgcactgcctgcacagcgctggccacagccagccagatggagcctacagcagcgccagcagcttcagccggcccctgggctacccctacgtgaacagcgtgagcagccacgccagcagcccctacatcagctctgtgcagagctacccaggcagcgccagcctggcccagagccggctggaggaccccggccaggacctggtgcccaagcaggccatccaggtgcaggaggctgatgaggccggctggggcggcagcggcggctag

SEQ ID NO: 31548 - DNA, 390 bp, Artificial Sequence
  derived and/or modified sequence
atgaccatgaccaccatgcccgagagcctgaacagccccgtgagcggcaaagcagttttcatggagtttggaccacctaatcagcagatgagcccctcccccatgagtcacggccattatagcatgcactgtttgcactccgcaggccacagtcagcctgacggcgcatattcatcggccagctccttctctaggccactgggttatccgtacgtgaattccgtcagctcacacgcgagctccccctatatcagctctgtccaatcatacccaggctccgcgagtctggcccagagcagactggaggaccctggccaggacctcgtacccaaacaggctatccaggtgcaggaggcggacgaagccggatgggggggtagtggcgggtag

SEQ ID NO: 31549 - DNA, 390 bp, Artificial Sequence
  derived and/or modified sequence
atgaccatgacaaccatgcccgagtccctgaatagtcctgtttccggaaaagctgttttcatggaatttggaccacccaatcagcagatgtccccctctccaatgtcacacggacactattccatgcactgcctccacagcgccggacatagtcaaccagacggcgcatattctagcgccagctcatttagtagaccattaggctatccctatgtgaattctgtttcctcacacgcatcttcaccctacatctcctcggtgcaaagctatcctggcagtgcctctctcgcccagagccgactcgaggaccccggacaggacctggtgccgaagcaggcaatccaggtgcaggaagcggacgaggctggctggggaggcagtgggggatag

SEQ ID NO: 31550 - DNA, 390 bp, Artificial Sequence
  derived and/or modified sequence
atgaccatgaccaccatgcccgagagcctgaacagccccgtgagcggcaaggccgtgttcatggagttcggcccccccaaccagcagatgagccccagccccatgagccacggccactacagcatgcactgcctgcacagcgccggccacagccagcccgacggcgcctacagcagcgccagcagcttcagcagacccctgggctacccctacgtgaacagcgtgagcagccacgccagcagcccctacatcagcagcgtgcagagctaccccggcagcgccagcctggcccagagcagactggaggaccccggccaggacctggtgcccaagcaggccatccaggtgcaggaggccgacgaggccggctggggcggcagcggcggctag

SEQ ID NO: 31551 - DNA, 2130 bp, Artificial Sequence
  derived and/or modified sequence
gacaaactccattttcttatgaatggaaagtgaaaacccctgttccgcttaaattgggttccttcctgtcctgagaaacatagagacccccaaaagggaagcagaggagagaaagtcccacacccagaccccgcgagaagagatgaccatgaccaccatgccagaaagtctcaacagccccgtgtcgggcaaggcggtgtttatggagtttgggccgcccaaccagcaaatgtctccttctcccatgtcccacgggcactactccatgcactgtttacactcggcgggccattcgcagcccgacggcgcctacagctcagcctcgtccttctcccgaccgctgggctacccctacgtcaactcggtcagcagccacgcatccagcccctacatcagttcggtgcagtcctacccgggcagcgccagcctcgcccagagccgcctggaggacccaggtcaagatctggttccaaaacaagcgatccaagttcaagaagctgatgaagcagggtggggcggctctggagggtagtgcgttggccaacggtcgggccctgtctgctggctccccacccgtgccgcccggctggaaccctaactcttcatccgggaagggctcaggaggaaacgcgggctcctatatccccagctacacatcgtggtacccttcagcgcaccaagaagctatgcagcaaccccaacttatgtgaggttgcccgcccgtctccttcttgtctccccggcccaggtccctcccgcctccaggtccatccatcccgtccggaaaagaaggacccagagggaagaaggaacagtggaggcgggacgccctccatctcctcggagccccgcgaggtccggcccagcaacttcccggcatccgcgctctagcctgaaccctggcctgggccgagcagtggcagcagagagtggcctcggagggaagccactgccacctgagacagcccaagcagcaagataaacccgctccacccgacccgccgaccttcagctttgtgggactatcaggaaaaaacaaaacaaaaacaaaatgtagaaaaagcaaaagctcttttctgtcctgtcagtctcctgtctccttttgctctgtctgtgcgctggtaaagtccaggtcctcatccgtccgctgtcctcattctgcggcctcagcaaaaagccacaaggtctgagcggcccgggtcctgccgggctgaccatctccggatcctgggacactctgcctgaccatctgtgtagctggtgtgggaatctgggggcattggagggagggggttttatttattgagaaatggacttcgcctgaggctgtttgccaattcagggttctgctgggcgcaaggaacgcactgttcaaacgcactgtttactttaagcgcacggggagaaacgaataaggaggacgtggtgatttttaatttatacagtaacttttgtacttctctggtatggagagtttggagccgaatgatttgcattttttacatgtccgacattatttaataaataatttttaaaagaaaagaacgataaatgaagccaacatgattttctcatttcgggaggaactctgttgcttcgcctggacaagaaggaaaatgctgatttcctccttgggtagaaagagggagcgagggcaaatggggagtagagagaaaacaggcgagaacaagcactctaattccagtgggctttaaaataagacaaaatcagctttacaacaatccctagaggctcgaccacagaataatgccagtcaccaccctgaacgcacaatctccagtgcaggatctaatgactgtacatattattgttattattattattgttattattgttgttctgtaaacatgttgcacaagcttagcctttttgcgttctgttgtgtgtggctgtaaaaccccatgctttgtgaaatgagaatcttgacatttttcttgtgaaatttggaaaatgtgatcaattgaaatcaactgtgttttgtgttctctatgtcaaagtttagttttatattgagaatgttaacttattgctttgtatcttgggaaaaaaactttgtaaataagttataaagtttctttgagacagtaaaattatgatttcttgaaagaa

SEQ ID NO: 31552 - protein, 84 aa, Artificial Sequence
  derived and/or modified sequence
MSEFWLCFNCCIAEQPQPKRRRRIDRSMIGEPTNFVHTAHVGSGDLFSGMNSVSSIQNQMQSKGGYGGGMPANVQMQLVDTKAG

SEQ ID NO: 31553 - DNA, 255 bp, Artificial Sequence
  derived and/or modified sequence
atgagcgagttctggctgtgcttcaactgctgcatcgccgagcagccccagcccaagagaagaagaagaatcgacagaagcatgatcggcgagcccaccaacttcgtgcacaccgcccacgtgggcagcggcgacctgttcagcggcatgaacagcgtgagcagcatccagaaccagatgcagagcaagggcggctacggcggcggcatgcccgccaacgtgcagatgcagctggtggacaccaaggccggctag

SEQ ID NO: 31554 - DNA, 255 bp, Artificial Sequence
  derived and/or modified sequence
atgtctgagttttggttgtgcttcaactgttgtatcgctgaacagcctcagccaaaacggaggcggaggattgaccgatcgatgattggggagcccaccaactttgttcataccgctcacgtgggaagcggggatctcttttccgggatgaactccgtgtcgtctatccagaatcagatgcagtctaagggagggtacggggggggaatgccggctaacgtgcagatgcagctggttgatactaaagcaggctag

SEQ ID NO: 31555 - DNA, 255 bp, Artificial Sequence
  derived and/or modified sequence
atgagcgagttctggctgtgttttaactgctgtatagcagaacagccacagcctaagcgtagacgtagaatcgacagaagcatgattggagagcctacgaacttcgtgcatactgcccatgttggctccggcgatctctttagcgggatgaactcagtgtcctccatccaaaatcaaatgcaatccaaaggaggttatggcgggggtatgcccgcaaatgtgcaaatgcaactcgtcgacaccaaagccggctag

SEQ ID NO: 31556 - DNA, 255 bp, Artificial Sequence
  derived and/or modified sequence
atgagcgagttttggctctgcttcaactgctgcatcgcggagcagccccagcctaagagaaggcgcagaattgacaggagtatgatcggggagccaaccaatttcgtgcatactgctcacgtcgggtccggcgatctgttctcagggatgaatagcgtttcaagcatccagaatcagatgcagagcaagggaggctacggagggggtatgcccgcaaatgtacagatgcagctcgttgatacaaaagcggggtag

SEQ ID NO: 31557 - DNA, 255 bp, Artificial Sequence
  derived and/or modified sequence
atgtctgagttctggctgtgcttcaactgctgcatcgccgagcagccccagcccaagagaagaagaagaattgaccgctccatgattggagagcccaccaactttgtgcacacagcccacgtgggcagcggggacctcttcagcggcatgaacagcgtgagcagcatccagaaccagatgcagagcaaaggaggctacggcggcggcatgcctgccaacgtgcagatgcagctggtggacaccaaggccggctag

SEQ ID NO: 31558 - DNA, 255 bp, Artificial Sequence
  derived and/or modified sequence
atgagcgagttctggctgtgcttcaactgctgcatcgccgagcagcctcagccaaagagaagacggagaattgatagaagcatgatcggggagcctactaattttgttcacacagctcacgttggatcgggggatctctttagcggaatgaacagcgtctcttcgatccaaaaccagatgcaatccaagggtggatatggggggggaatgccagcaaacgtgcagatgcagctggtggataccaaagccggttag

SEQ ID NO: 31559 - DNA, 255 bp, Artificial Sequence
  derived and/or modified sequence
atgagcgagttctggctgtgcttcaactgctgcatcgccgagcagccacagccaaaaaggcgccgccggattgacaggagcatgataggggagcctacaaatttcgtccacacagcccacgtgggctctggggaccttttttcaggaatgaactccgtcagctctattcagaatcagatgcagagcaagggaggttacggaggtggcatgcctgccaacgtgcagatgcagctggtcgatacaaaagcgggctag

SEQ ID NO: 31560 - DNA, 255 bp, Artificial Sequence
  derived and/or modified sequence
atgagcgagttctggctgtgcttcaactgctgcatcgccgagcagccccagcccaaacgcaggcggcgcatagacaggtcaatgataggggaaccaacaaattttgtgcataccgctcacgtcggtagcggagatctgttttccggcatgaacagcgtaagctccatacagaaccagatgcagtcaaaaggagggtatgggggaggtatgcctgctaacgtgcagatgcagcttgtcgatacaaaagctggatag

SEQ ID NO: 31561 - DNA, 255 bp, Artificial Sequence
  derived and/or modified sequence
atgtccgagttttggctgtgctttaactgttgcatcgctgaacaaccccagcccaaaagacgccgaagaatagacaggtctatgataggcgaacccacaaactttgtccataccgctcacgtcgggtcgggcgacctattttccggcatgaatagtgttagcagtatccaaaatcaaatgcagtctaagggaggatacgggggaggaatgcccgcaaacgtccagatgcagctggttgatacgaaagccggatag

SEQ ID NO: 31562 - DNA, 255 bp, Artificial Sequence
  derived and/or modified sequence
atgtccgagttctggctttgctttaactgctgcatcgccgaacagccacagccaaagagaaggcgtcggattgacagatccatgattggcgagccaactaatttcgttcataccgcccatgtcggatcaggcgacctattctcaggcatgaattccgttagttccatccagaatcagatgcagtcaaaaggcggttatggcggtggcatgcccgcaaacgtgcaaatgcagcttgtcgacactaaagcagggtag

SEQ ID NO: 31563 - DNA, 255 bp, Artificial Sequence
  derived and/or modified sequence
atgtcagagttttggctgtgttttaactgctgcatagcagaacagcctcagcctaaaagacgtaggagaatcgaccggtctatgataggcgaacccactaattttgtgcatacggcccatgtgggtagtggcgatttgtttagtgggatgaattcagtaagctccatccagaaccaaatgcagtccaagggagggtatggagggggaatgccagctaatgtgcaaatgcagttagtggacacaaaagcgggttag

SEQ ID NO: 31564 - DNA, 3591 bp, Artificial Sequence
  derived and/or modified sequence
gagcgcagctgcaggcgttggggcggcaggagccgcggagccggcgctgagaggggctgcggccggagcgggcggctgagacaaaggcgacgatagggccagatttgagtgtgtgaatttttgagtgaaacctggaacccaaatgagaagaaatctgcaaggaataactactgacagtgaatctgcggtcatctgtatgcataatatggaatgttcttaacccagaagtagctgaatgtgttactccattgctgaggagtgactatctgttatagtccctgggtcaagacaacaatttttataccttcgtcgtggttcagaaaggagtctctgtagaaccagaagcaaagaaaggaaacaatccaaatttttctttattaaatcgactgtgtaagatacttgacttccaggaacaaaaacacggtgaaataataaaatttcatcttggcatcactggacatcatcgtattgaggagcgtatttttggaacttcccgagttgagatttggaaccttcattggtgctcatttactgtggactgtaagcatgagtgaattctggttgtgtttcaactgctgtattgcagaacagcctcagcctaaaaggcgacggcggattgacagaagtatgattggagagcccacaaactttgtgcatacagctcatgttggatcaggagacctgttcagtggaatgaattcagttagctccattcagaaccaaatgcagtccaagggaggttatggaggtggaatgcctgccaatgtccagatgcagctcgtggatacgaaggcgggatagccctggtcctttctccaaagtgtgatggcaccttgtccaccctgtcgtgattattccagtgagatgttactgttctgctctgaagaagatactgtcagacgaatcctgcatttccttcagctggcatgcatgcctttggactcatggacagagttctttggattgtcactgaattttcaatgtttaatcagtatggatctgatcttcgcatgatcttttttgtgaatgctaacaccattttgcagttttttttttctattttaaacatttttcttttcactgccgaccccctgccttacgattttattggaaagcaaggacctgctattatttgttaatttgccatcatttatgtatattttggaaggtatgagacccacaagcacaatgatcatttttatttgtttgtttgtttgaaacttcagcagaatagatatctgcatgctttatgaagttgttgcttcggtaagagcccatgggatgccagaaattaacatttctttgctgccatgggctgatgatgctgctattagataaagtttagctgtggcaccaagtcacatcattttcatagaaaaagattacttgtagcttattttagaagtatgaccttttggtctgtttgattgattgattagaattgcaataaaagaaaagcttgcattcataaggcattcattctgttgtaaatgttcaatatatttattttgagagcaaggacctgtggttgtaaacaggtgtggttacaggtgtggttatgtatctgagtgttgcggtcatactctcctccagtccaatcctgagcatcttcatcttattaattagctgttcgtttctttgtgcactcattcttttatttttacttctttttaatgttatggtatccagttgtttccagtagcagtttcttgaacttctggcctgtactactaactgcagacctccagagtcactggcctttctgtgctctacatattattttaggggccacatcagttgccaagagcaacatacataccgacctggctgaattattgccagtgaaaacaacctgtacgaagcctttgctcaggttctaaaatatgtttgtccttgcacgaattttgtatatttcaaatatttctgtaaaggtttcttcttttctgttagagtgtggtgttaagccagagtcagtggtttgtgttctcattaaaatgtttgtttaaatcctatgtccaattcaagcctatctaactacatttggtaggattaacatttcatataacaaatggggcttaattaaaaactttaacttggaataaaggaacagggatcactttatcttctgccttcatttaccttagtccaagattcttgcaaaacaggcaactgaacaaacattaggtttatgtaggtaaaatgtgaaagcatttctcctccactttttaaaatttaatttacccagtacagcggggcaccagattacttgatctttgtattttgcagttttgagcctttgtgtcaatcccaagcacagagaggatctgccaaggaaaaacatttgcatcttcggagtagacattttgcagtttgtttaataacaacttctaaagtaagttgaattcatccattgtcactgattcaccaagtggatgttgcattgtggaatttgcctgagtactgttgtcattctgctcagccaggcacggtcagtttcttggccagggacattgctatgtgctgtgtgcaagctctttagaagagagattggattttcttggcattatcagcactcatgctatttagtctacttctattttgactgactctttaaattagtacaatttttctacttgtcatataactcctggaacaatagtacgggaagccgtgatccttttccctgactcatgattttagtctttttccaaatcgctgttttttttttttttttttttttttttgctgctccaacgaccagcatgtgttggagcagatctccatggtaagccaaaagtggacttgtcagcctataactactctgcagctgccactaactctacaggcacagtaactacactttatacaggagcacatgccaaagtgcctgggaggtgccaataaaatcaagaaataagaaaactacaaaaaaagatacggtattaaccttggacataattttttttagggaggcagctttcccacttttataaagggggttgtaaatctcaagaggtcatttgttccccatagcagcatatctcatttttaaattgaagcgaattaaataggattttactactcaacattcattatactgttaatctttgctgaaatatatgctaacaaatgttaagcaagggaaactgaagacttagtcatgtggattgttagcagtgatctgcattctgtaaaagaggtactttcccatgatgtaggcatgaagtggtgccagtaagcgtagagcggaaatgttgactttagttaacattgggtttagcatttccagtgcagcattatcagtgggcctttaaaaatacttcgtaagtacattagctttcactttgttgttaaattatagcagactcattatagagaacaagtttgccttgattttgtttaaaatgacttctgctaagcacccagaagataaaattgacatatttttataatataagcatactttttttgtacattgtgttcattcttgaataaaatgagttctgtgttggcttgtagatactaaaaagaaagtattgattttgattcaataaatgttttctttcaatcctggttggcctttcctttaaa

SEQ ID NO: 31565 - DNA, 3485 bp, Artificial Sequence
  derived and/or modified sequence
gctccgcccaacccgcgcgcgagcctgggcggggagggggagccaggaagctgcgagcgcgctggggagcgcagctgcaggcgttggggcggcaggagccgcggagccggcgctgagaggggctgcggccggagcgggcggctgagacaaaggcgacgactatctgttatagtccctgggtcaagacaacaatttttataccttcgtcgtggttcagaaaggagtctctgtagaaccagaagcaaagaaaggaaacaatccaaatttttctttattaaatcgactgtgtaagatacttgacttccaggaacaaaaacacggtgaaataataaaatttcatcttggcatcactggacatcatcgtattgaggagcgtatttttggaacttcccgagttgagatttggaaccttcattggtgctcatttactgtggactgtaagcatgagtgaattctggttgtgtttcaactgctgtattgcagaacagcctcagcctaaaaggcgacggcggattgacagaagtatgattggagagcccacaaactttgtgcatacagctcatgttggatcaggagacctgttcagtggaatgaattcagttagctccattcagaaccaaatgcagtccaagggaggttatggaggtggaatgcctgccaatgtccagatgcagctcgtggatacgaaggcgggatagccctggtcctttctccaaagtgtgatggcaccttgtccaccctgtcgtgattattccagtgagatgttactgttctgctctgaagaagatactgtcagacgaatcctgcatttccttcagctggcatgcatgcctttggactcatggacagagttctttggattgtcactgaattttcaatgtttaatcagtatggatctgatcttcgcatgatcttttttgtgaatgctaacaccattttgcagttttttttttctattttaaacatttttcttttcactgccgaccccctgccttacgattttattggaaagcaaggacctgctattatttgttaatttgccatcatttatgtatattttggaaggtatgagacccacaagcacaatgatcatttttatttgtttgtttgtttgaaacttcagcagaatagatatctgcatgctttatgaagttgttgcttcggtaagagcccatgggatgccagaaattaacatttctttgctgccatgggctgatgatgctgctattagataaagtttagctgtggcaccaagtcacatcattttcatagaaaaagattacttgtagcttattttagaagtatgaccttttggtctgtttgattgattgattagaattgcaataaaagaaaagcttgcattcataaggcattcattctgttgtaaatgttcaatatatttattttgagagcaaggacctgtggttgtaaacaggtgtggttacaggtgtggttatgtatctgagtgttgcggtcatactctcctccagtccaatcctgagcatcttcatcttattaattagctgttcgtttctttgtgcactcattcttttatttttacttctttttaatgttatggtatccagttgtttccagtagcagtttcttgaacttctggcctgtactactaactgcagacctccagagtcactggcctttctgtgctctacatattattttaggggccacatcagttgccaagagcaacatacataccgacctggctgaattattgccagtgaaaacaacctgtacgaagcctttgctcaggttctaaaatatgtttgtccttgcacgaattttgtatatttcaaatatttctgtaaaggtttcttcttttctgttagagtgtggtgttaagccagagtcagtggtttgtgttctcattaaaatgtttgtttaaatcctatgtccaattcaagcctatctaactacatttggtaggattaacatttcatataacaaatggggcttaattaaaaactttaacttggaataaaggaacagggatcactttatcttctgccttcatttaccttagtccaagattcttgcaaaacaggcaactgaacaaacattaggtttatgtaggtaaaatgtgaaagcatttctcctccactttttaaaatttaatttacccagtacagcggggcaccagattacttgatctttgtattttgcagttttgagcctttgtgtcaatcccaagcacagagaggatctgccaaggaaaaacatttgcatcttcggagtagacattttgcagtttgtttaataacaacttctaaagtaagttgaattcatccattgtcactgattcaccaagtggatgttgcattgtggaatttgcctgagtactgttgtcattctgctcagccaggcacggtcagtttcttggccagggacattgctatgtgctgtgtgcaagctctttagaagagagattggattttcttggcattatcagcactcatgctatttagtctacttctattttgactgactctttaaattagtacaatttttctacttgtcatataactcctggaacaatagtacgggaagccgtgatccttttccctgactcatgattttagtctttttccaaatcgctgttttttttttttttttttttttttttgctgctccaacgaccagcatgtgttggagcagatctccatggtaagccaaaagtggacttgtcagcctataactactctgcagctgccactaactctacaggcacagtaactacactttatacaggagcacatgccaaagtgcctgggaggtgccaataaaatcaagaaataagaaaactacaaaaaaagatacggtattaaccttggacataattttttttagggaggcagctttcccacttttataaagggggttgtaaatctcaagaggtcatttgttccccatagcagcatatctcatttttaaattgaagcgaattaaataggattttactactcaacattcattatactgttaatctttgctgaaatatatgctaacaaatgttaagcaagggaaactgaagacttagtcatgtggattgttagcagtgatctgcattctgtaaaagaggtactttcccatgatgtaggcatgaagtggtgccagtaagcgtagagcggaaatgttgactttagttaacattgggtttagcatttccagtgcagcattatcagtgggcctttaaaaatacttcgtaagtacattagctttcactttgttgttaaattatagcagactcattatagagaacaagtttgccttgattttgtttaaaatgacttctgctaagcacccagaagataaaattgacatatttttataatataagcatactttttttgtacattgtgttcattcttgaataaaatgagttctgtgttggcttgtagatactaaaaagaaagtattgattttgattcaataaatgttttctttcaatcctggttggcctttccttt

SEQ ID NO: 31566 - DNA, 4352 bp, Artificial Sequence
  derived and/or modified sequence
gcaggagccgcggagccggcgctgagaggggctgcggccggagcgggcggctgagacaaaggcgacgatagggccagatttgagtgtgtgaatttttgagtgaaacctggaacccaaatgagaagaaatctgcaaggaataactactgacagtgaatctgcggtcatctgtatgcataatatggaatgttcttaacccagaagtagctgaatgtgttactccattgctgaggagtgactatctgttatagtccctgggtcaagacaacaatttttataccttcgtcgtggttcagaaaggagtctctgtagaaccagaagcaaagaaaggaaacaatccaaatttttctttattaaatcgactgtgtaagatacttgacttccaggaacaaaaacacggtgaaataataaaatttcatcttggcatcactggacatcatcgtattgaggagcgtatttttggaacttcccgagttgagatttggaaccttcattggtgctcatttactgtggactgtaagcatgagtgaattctggttgtgtttcaactgctgtattgcagaacagcctcagcctaaaaggcgacggcggattgacagaagtatgattggagagcccacaaactttgtgcatacagctcatgttggatcaggagacctgttcagtggaatgaattcagttagctccattcagaaccaaatgcagtccaagggaggttatggaggtggaatgcctgccaatgtccagatgcagctcgtggatacgaaggcgggatagccctggtcctttctccagtgagtactcagagctggggtctggacctgacggccagacatggccaggccaataatagtaaatatatgtatatatatataattttttaatggtgaacttattgggaaaggcaaaattactcagctaagtgtagtttctgcacttggaatgtaagttttaggttcttttccttattaagaactttaaatactttaaaacatctggttggggaggattctgatgacaagatgcttcttatgtgtcctttaaacaagagtgaaatcattattttgagtattgaggccgagcatggtggctcacacctgtaatcccagcactttgggaggcctaggtgggctgatcacctgaggccaggaattggagactagcctggccaacatggtgaaaccccatctctactaaaaatacaaaaattagctgggcatggtggcgcatgcctgtaatcgcagctactcaggaggctgaggcacgagaattgcttgaacctgggaggcaggggttgcagtcagctgagaatgcgccactgcgctccagcctgggtgacagagcaagaccctgtctcaaaaaagtactgatactaaagataatctcttgggtagtaattttacagttaagacttcattgtttataaacttttcaaattaattaaaaagactactttgaaaaaggataaaccctgaaaatgtagaaataatttcaagtttttttttgttttatagggttattgtgaatttctatattttctctgtccactattctgtaatttttttttgtcctgtgattgcttttattttgaattacaaaaaagaagtgtgatggcaccttgtccaccctgtcgtgattattccagtgagatgttactgttctgctctgaagaagatactgtcagacgaatcctgcatttccttcagctggcatgcatgcctttggactcatggacagagttctttggattgtcactgaattttcaatgtttaatcagtatggatctgatcttcgcatgatcttttttgtgaatgctaacaccattttgcagttttttttttctattttaaacatttttcttttcactgccgaccccctgccttacgattttattggaaagcaaggacctgctattatttgttaatttgccatcatttatgtatattttggaaggtatgagacccacaagcacaatgatcatttttatttgtttgtttgtttgaaacttcagcagaatagatatctgcatgctttatgaagttgttgcttcggtaagagcccatgggatgccagaaattaacatttctttgctgccatgggctgatgatgctgctattagataaagtttagctgtggcaccaagtcacatcattttcatagaaaaagattacttgtagcttattttagaagtatgaccttttggtctgtttgattgattgattagaattgcaataaaagaaaagcttgcattcataaggcattcattctgttgtaaatgttcaatatatttattttgagagcaaggacctgtggttgtaaacaggtgtggttacaggtgtggttatgtatctgagtgttgcggtcatactctcctccagtccaatcctgagcatcttcatcttattaattagctgttcgtttctttgtgcactcattcttttatttttacttctttttaatgttatggtatccagttgtttccagtagcagtttcttgaacttctggcctgtactactaactgcagacctccagagtcactggcctttctgtgctctacatattattttaggggccacatcagttgccaagagcaacatacataccgacctggctgaattattgccagtgaaaacaacctgtacgaagcctttgctcaggttctaaaatatgtttgtccttgcacgaattttgtatatttcaaatatttctgtaaaggtttcttcttttctgttagagtgtggtgttaagccagagtcagtggtttgtgttctcattaaaatgtttgtttaaatcctatgtccaattcaagcctatctaactacatttggtaggattaacatttcatataacaaatggggcttaattaaaaactttaacttggaataaaggaacagggatcactttatcttctgccttcatttaccttagtccaagattcttgcaaaacaggcaactgaacaaacattaggtttatgtaggtaaaatgtgaaagcatttctcctccactttttaaaatttaatttacccagtacagcggggcaccagattacttgatctttgtattttgcagttttgagcctttgtgtcaatcccaagcacagagaggatctgccaaggaaaaacatttgcatcttcggagtagacattttgcagtttgtttaataacaacttctaaagtaagttgaattcatccattgtcactgattcaccaagtggatgttgcattgtggaatttgcctgagtactgttgtcattctgctcagccaggcacggtcagtttcttggccagggacattgctatgtgctgtgtgcaagctctttagaagagagattggattttcttggcattatcagcactcatgctatttagtctacttctattttgactgactctttaaattagtacaatttttctacttgtcatataactcctggaacaatagtacgggaagccgtgatccttttccctgactcatgattttagtctttttccaaatcgctgttttttttttttttttttttttttttgctgctccaacgaccagcatgtgttggagcagatctccatggtaagccaaaagtggacttgtcagcctataactactctgcagctgccactaactctacaggcacagtaactacactttatacaggagcacatgccaaagtgcctgggaggtgccaataaaatcaagaaataagaaaactacaaaaaaagatacggtattaaccttggacataattttttttagggaggcagctttcccacttttataaagggggttgtaaatctcaagaggtcatttgttccccatagcagcatatctcatttttaaattgaagcgaattaaataggattttactactcaacattcattatactgttaatctttgctgaaatatatgctaacaaatgttaagcaagggaaactgaagacttagtcatgtggattgttagcagtgatctgcattctgtaaaagaggtactttcccatgatgtaggcatgaagtggtgccagtaagcgtagagcggaaatgttgactttagttaacattgggtttagcatttccagtgcagcattatcagtgggcctttaaaaatacttcgtaagtacattagctttcactttgttgttaaattatagcagactcattatagagaacaagtttgccttgattttgtttaaaatgacttctgctaagcacccagaagataaaattgacatatttttataatataagcatactttttttgtacattgtgttcattcttgaataaaatgagttctgtgttggcttgtagatactaaaaagaaagtattgattttgattcaataaatgttttctttcaa

SEQ ID NO: 31567 - protein, 731 aa, Artificial Sequence
  derived and/or modified sequence
MSLFLSNLSTNDSSLWKENHNSTDLLNPPGTLNIYLFCLTCLMTFAALVGSIYSLISLLKMQNRTVVSMLVASWSVDDLMSVLSVTIFMFLQWPNEVPGYFQFLCTTSALMYLCQGLSSNLKATLLVSYNFYTMHRGVGSQTASRRSGQVLGVVLTVWAASLLLSALPLCGWGAFVRTPWGCLVDCSSSYVLFLSIVYALAFGLLVGLSVPLTHRLLCSEEPPRLHSNYQEISRGASIPGTPPTAGRVVSLSPEDAPGPSLRRSGGCSPSSDTVFGPGAPAAAGAEACRRENRGTLYGTRSFTVSVAQKRFALILALTKVVLWLPMMMHMVVQNVVGFQSLPLETFSFLLTLLATTVTPVFVLSKRWTHLPCGCIINCRQNAYAVASDGKKIKRKGFEFNLSFQKSYGIYKIAHEDYYDDDENSIFYHNLMNSECETTKDPQRDNRNIFNAIKVEISTTPSLDSSTQRGINKCTNTDITEAKQDSNNKKDAFSDKTGGDINYEETTFSEGPERRLSHEESQKPDLSDWEWCRSKSERTPRQRSGYALAIPLCAFQGTVSLHAPTGKTLSLSTYEVSAEGQKITPASKKIEVYRSKSVGHEPNSEDSSSTFVDTSVKIHLEVLEICDNEEALDTVSIISNISQSSTQVRSPSLRYSRKENRFVSCDLGETASYSLFLPTSNPDGDINISIPDTVEAHRQNSKRQHQERDGYQEEIQLLNKAYRKREEESKGS

SEQ ID NO: 31568 - DNA, 2196 bp, Artificial Sequence
  derived and/or modified sequence
atgagcctgttcctgagcaacctgagcaccaacgacagcagcctgtggaaggagaaccacaacagcaccgacctgctgaacccccccggcaccctgaacatctacctgttctgcctgacctgcctgatgaccttcgccgccctggtgggcagcatctacagcctgatcagcctgctgaagatgcagaacagaaccgtggtgagcatgctggtggccagctggagcgtggacgacctgatgagcgtgctgagcgtgaccatcttcatgttcctgcagtggcccaacgaggtgcccggctacttccagttcctgtgcaccaccagcgccctgatgtacctgtgccagggcctgagcagcaacctgaaggccaccctgctggtgagctacaacttctacaccatgcacagaggcgtgggcagccagaccgccagcagaagaagcggccaggtgctgggcgtggtgctgaccgtgtgggccgccagcctgctgctgagcgccctgcccctgtgcggctggggcgccttcgtgagaaccccctggggctgcctggtggactgcagcagcagctacgtgctgttcctgagcatcgtgtacgccctggccttcggcctgctggtgggcctgagcgtgcccctgacccacagactgctgtgcagcgaggagccccccagactgcacagcaactaccaggagatcagcagaggcgccagcatccccggcaccccccccaccgccggcagagtggtgagcctgagccccgaggacgcccccggccccagcctgagaagaagcggcggctgcagccccagcagcgacaccgtgttcggccccggcgcccccgccgccgccggcgccgaggcctgcagaagagagaacagaggcaccctgtacggcaccagaagcttcaccgtgagcgtggcccagaagagattcgccctgatcctggccctgaccaaggtggtgctgtggctgcccatgatgatgcacatggtggtgcagaacgtggtgggcttccagagcctgcccctggagaccttcagcttcctgctgaccctgctggccaccaccgtgacccccgtgttcgtgctgagcaagagatggacccacctgccctgcggctgcatcatcaactgcagacagaacgcctacgccgtggccagcgacggcaagaagatcaagagaaagggcttcgagttcaacctgagcttccagaagagctacggcatctacaagatcgcccacgaggactactacgacgacgacgagaacagcatcttctaccacaacctgatgaacagcgagtgcgagaccaccaaggacccccagagagacaacagaaacatcttcaacgccatcaaggtggagatcagcaccacccccagcctggacagcagcacccagagaggcatcaacaagtgcaccaacaccgacatcaccgaggccaagcaggacagcaacaacaagaaggacgccttcagcgacaagaccggcggcgacatcaactacgaggagaccaccttcagcgagggccccgagagaagactgagccacgaggagagccagaagcccgacctgagcgactgggagtggtgcagaagcaagagcgagagaacccccagacagagaagcggctacgccctggccatccccctgtgcgccttccagggcaccgtgagcctgcacgcccccaccggcaagaccctgagcctgagcacctacgaggtgagcgccgagggccagaagatcacccccgccagcaagaagatcgaggtgtacagaagcaagagcgtgggccacgagcccaacagcgaggacagcagcagcaccttcgtggacaccagcgtgaagatccacctggaggtgctggagatctgcgacaacgaggaggccctggacaccgtgagcatcatcagcaacatcagccagagcagcacccaggtgagaagccccagcctgagatacagcagaaaggagaacagattcgtgagctgcgacctgggcgagaccgccagctacagcctgttcctgcccaccagcaaccccgacggcgacatcaacatcagcatccccgacaccgtggaggcccacagacagaacagcaagagacagcaccaggagagagacggctaccaggaggagatccagctgctgaacaaggcctacagaaagagagaggaggagagcaagggcagctag

SEQ ID NO: 31569 - DNA, 2323 bp, Artificial Sequence
  derived and/or modified sequence
cttggtaggaggaatgaaatctgatttgcagcagccggtctttcttttgagaaaattatcagactcattgataagggaaattaaatattgaccaaggacaatgtctttatttctcagtaacttatcaacaaatgactctagcctgtggaaagagaatcataattctacggaccttttaaatccgccaggaaccctgaatatctatcttttttgcttgacatgtctcatgacttttgcagccttggtgggcagcatttattcactaatttccctgctgaaaatgcagaacagaactgttgtgtccatgcttgtggcttcctggtctgtggatgatctcatgagcgtcctgtcggtgaccatcttcatgtttttgcagtggccaaacgaggtccccggttacttccaatttctgtgcaccacctctgccttaatgtatttatgccagggcctctctagcaacttgaaggcgactctcctagtctcttacaacttttatacgatgcacagaggtgtggggagccagacagcctccagaagatcgggccaggtgctcggcgtggtgctgaccgtgtgggcagccagtctgctgctctcggcgctcccgctgtgcggctggggcgccttcgtgcgcacgccctggggctgcctggtggactgctccagctcctacgtactattcctctctatcgtgtacgctttggccttcggactcctcgtgggcctctcagtcccactcactcaccgattgctgtgttcggaggagccgccgagactccactccaactaccaggaaatttcccgtggagcttcaattcctgggacccctcctactgcggggagagtggtttccctgtccccagaggatgctccaggcccgagtctgcggcgctctgggggatgctctccgagctccgacaccgtgttcggaccgggtgcgcccgctgccgctggggctgaagcctgcaggcgtgagaaccgggggactctctatggcaccaggagcttcaccgtgagcgtagcgcagaagcgcttcgctttgatcctagcgcttacaaaagtcgtcctttggctgcccatgatgatgcacatggtggtccagaacgtcgtggggtttcagagccttcccttggagacattcagctttctacttaccctgctggccaccactgtaaccccagtgtttgtcttgtccaaacgctggacccacttgccctgtggctgcatcatcaactgcaggcagaacgcatatgcagtggcgtccgatgggaaaaaaatcaagagaaaaggctttgaattcaatctatcattccaaaaaagttatgggatttataaaatagcacatgaagattactatgatgatgatgaaaattccatattctatcacaacctgatgaactctgagtgtgaaactacaaaagaccctcagagagacaaccgtaacatcttcaatgctataaaagtagaaatcagcaccacgccctctctggacagctccacacaaagaggcatcaacaaatgcacaaatactgatattacagaagctaaacaggattccaacaacaaaaaggatgcgttttctgacaaaacaggaggtgatattaactatgaagaaactaccttttctgaagggccagaaagaagactgtctcatgaagagagtcagaaaccagatctttcagactgggagtggtgtaggagtaaatcagaaagaacccctcgtcagcgttccggttatgcccttgccattcccttgtgtgcattccaggggactgtgtctctccatgcacctacagggaaaaccctatctctttctacctatgaggtaagcgcagaagggcaaaaaataactccagcctctaagaaaatagaagtctatcgatccaaaagtgttggccatgaaccaaactcagaagattcttcatccacgtttgtggacaccagtgtgaaaatacacttggaggttcttgaaatttgtgataatgaagaggccttggacactgtgtcaatcattagtaacatcagtcagtcctccacacaagtcagatctccatccctacgttactccaggaaagaaaacagatttgtttcatgtgacctaggggaaacagcctcatactccctctttttgcccaccagtaatcctgatggtgatattaatatctccattccagacacagtagaagcacacaggcagaacagtaaaaggcagcatcaagagagggatggctaccaggaggaaatccagttgttaaataaagcttacagaaaaagagaggaagaaagcaagggtagttagtgggtatttggtctaacaggagcaaga

SEQ ID NO: 31570 - DNA, 2196 bp, Artificial Sequence
  derived and/or modified sequence
atgtcgctgtttctgagtaacctctccactaacgattccagcctatggaaagagaatcacaacagcacagatctgctgaacccccccggtaccctaaacatatacttattctgtctcacatgccttatgacttttgctgccctggtaggcagcatctactcactgatcagccttctgaagatgcagaatcgaactgtggtctcaatgctcgtggcctcgtggagtgtggatgacctgatgtcagtcttatcggtaacaatcttcatgttcctgcagtggccaaatgaagtacccggctacttccagtttctctgtacaacgtccgcattgatgtacctttgtcaggggctgagcagcaatctgaaggccaccctgcttgtgtcctataacttctacacgatgcaccgcggagtgggctcacagactgctagtaggcgttcaggccaagtgctaggtgttgtgttaacagtctgggctgcttcgcttttgcttagtgctcttcctctctgcggttggggagctttcgttcgcacaccgtgggggtgtcttgtagactgctctagcagctatgtgctattccttagcatcgtgtacgctttggcctttggacttctcgttgggctttccgtgcctctaacacaccgactcttatgttcggaggaaccacccaggttgcactcaaattaccaggaaatatcaaggggagccagcatcccaggcactcctccaaccgctgggcgggtggttagtctgtcccctgaggatgctcccggtccatcgctcaggcgaagtgggggttgtagcccatcctccgataccgtgttcggcccaggcgccccggcggctgccggagccgaggcctgccggagagagaaccgtggcaccctgtatggcacaaggagctttaccgtttctgttgcccagaagcggttcgcgttaatccttgccctaaccaaggtcgttttatggcttcccatgatgatgcacatggtcgtacagaacgtggtcggctttcagtccctcccccttgaaaccttcagcttcttacttacactgctggccaccactgtaacaccagtgttcgtactgtccaaaagatggacacacctgccatgcggatgtataatcaactgccggcaaaatgcctacgcagtggccagtgatggcaaaaagataaagcggaagggatttgaattcaacctgagtttccagaagagctacggtatctacaagattgcccatgaggattactatgacgatgatgaaaattcgatcttctaccacaacctgatgaactcagaatgcgagacaaccaaagatccccagagagacaataggaatatttttaacgctatcaaggtcgaaatatccactacccctagtttggactcaagtacacaaagagggatcaacaagtgcacgaacaccgacattacagaagccaaacaagacagcaataataagaaggatgcatttagcgataaaaccgggggggacataaattacgaagaaaccactttctccgaggggcctgagaggcggctttcacacgaggagagccagaaacctgacctctcagactgggagtggtgcaggtccaaaagcgagcgcacacctcgccagagaagcggatatgccctcgctatcccgctgtgtgccttccagggaacagtgagcttacatgcaccaaccggaaaaaccctgagcctatcaacctacgaggtttctgccgaggggcagaaaatcacgccagcttccaaaaagattgaagtataccggtcaaaatcagttggtcacgaacctaattctgaggattcttcatctacattcgtcgacacatcagttaagatccaccttgaagtgcttgagatctgcgataatgaagaggctcttgacaccgtatctattatatccaatatctcacaaagcagtacacaggtcaggtcacctagcctgcgctactccagaaaggagaaccggttcgtctcttgtgacttgggtgagactgccagttactctctgtttttgcccactagtaaccctgacggcgacatcaacatttccattcctgataccgtggaggcacaccgtcagaacagcaaacgacaacaccaagaaagagacggctaccaagaagagatccaactgctgaataaagcttacaggaagcgcgaggaggagtccaaggggtcttag

SEQ ID NO: 31571 - DNA, 2196 bp, Artificial Sequence
  derived and/or modified sequence
atgagcctcttcctgagcaacctgagcaccaatgacagcagcctgtggaaggagaaccacaacagcacagacctgctgaaccccccaggcaccctgaacatctacctgttctgcctgacctgcctgatgacctttgctgccctggtgggcagcatctacagcctcatcagcctgctgaagatgcagaacagaacagtggtgtccatgctggtggcctcctggagcgtggatgacctgatgtctgtgctgtctgtgaccatcttcatgttcctgcagtggcccaatgaggtgcccggctacttccagttcctgtgcaccaccagcgccctgatgtacctgtgccagggcctgagcagcaacctgaaggccaccctgctggtgtcctacaacttctacaccatgcacagaggagtgggcagccagacagccagcagaagaagtggccaggtgctgggcgtggtgctgactgtgtgggccgccagcctgctgctgagcgccctgcccctgtgtggctggggcgcctttgtgaggaccccctggggctgcctggtggactgcagcagcagctatgtgctcttcctgagcatcgtgtatgccctggccttcggcctgctggtgggcctgtctgtgcccctgacccaccggctgctgtgcagcgaggagcccccccggctgcacagcaactaccaggagatcagcagaggagccagcatccctggcaccccacccacagctggccgggtggtgtccctgagcccagaagatgcccctggccccagcctgcggcgcagcggcggctgcagccccagcagtgacacagtgtttggacctggggccccagctgctgctggagctgaggcctgcagaagagaaaatagaggcaccctgtatggcaccaggagcttcaccgtgtctgtggcccagaagagatttgccctgatcctggccctgaccaaggtggtgctgtggctgcccatgatgatgcacatggtggtgcagaatgtggtgggcttccagagcctgcccctggagaccttctccttcctgctgaccctgctggccaccaccgtgacccctgtgtttgtgctgagcaagcgctggacccacctgccctgtggctgcatcatcaactgccggcagaatgcctatgctgtggccagtgatggcaagaagatcaagaggaaaggatttgagttcaacctgtccttccagaagagctatggcatctacaagatcgcccacgaggactactatgatgatgatgagaacagcatcttctaccacaacctgatgaacagtgaatgtgagaccaccaaggacccccagagggacaacagaaacatcttcaatgccatcaaggtggagatcagcaccacccccagcctggacagcagcacccagaggggcatcaacaagtgcaccaacacagacatcacagaggccaagcaggacagcaacaacaagaaggatgccttcagtgacaagacaggaggagacatcaactatgaggagaccaccttcagcgagggccctgagcggcggctgagccatgaggagagccagaagccagacctgagtgactgggagtggtgccgcagcaagtctgagaggaccccccggcagaggagcggctacgccctggccatccccctgtgtgccttccagggcaccgtgtccctgcacgcccccaccgggaagaccctgagcctgagcacctatgaggtgtctgctgagggccagaagatcaccccagccagcaagaagattgaggtgtaccgcagcaagtctgtgggccacgagcccaacagcgaggacagcagcagcacctttgtggacacctctgtgaagatccacctggaggtgctggagatctgtgacaatgaggaggccctggacacagtgtccatcatcagcaacatcagccagagcagcacccaggtgcgcagccccagcctgcgctacagcaggaaggagaacagatttgtgtcctgtgacctgggggagacagccagctacagcctcttcctgcccaccagcaacccagatggagacatcaacatcagcatcccagacacagtggaggcccaccggcagaacagcaagaggcagcaccaggagagagatggctaccaggaggagatccagctgctgaacaaggcctacaggaagcgggaggaggagagcaagggcagctag

SEQ ID NO: 31572 - DNA, 2196 bp, Artificial Sequence
  derived and/or modified sequence
atgagcctgttcctgagcaacctgagcaccaacgacagcagcctgtggaaggagaaccacaactctaccgacttgttgaatccgcccgggacattgaacatttacctgttttgcctcacttgtctgatgacctttgcagctttggtaggaagcatctattccctgatctccttgcttaagatgcagaaccggacagttgtttctatgctggtcgcctcttggtctgtggacgacctgatgtcagttctttcggttactatatttatgtttttacagtggcccaatgaagtgcccggctatttccagtttctttgtactacatccgccctcatgtatctgtgccagggtcttagcagtaatctgaaggcaacattactagtctcctataatttttatacaatgcatcggggagtcggcagccagactgcatcaagaagatctggccaggtgctgggcgtggtgctcaccgtctgggcagcgagcctgctactctctgcccttcccctgtgcgggtggggcgcattcgtgcgaacgccctgggggtgtctggtcgactgctcctcttcctatgtactgttcctctccatcgtgtacgccctggcatttggactccttgtgggacttagtgttcccttgacacaccggcttctttgttctgaagaaccgccccgtctgcactccaactaccaggagatttcccgcggagcctctatacccggaacgcctccaacagccggaagggtggtgagtctatcccccgaagatgcacctgggccatccctgagacgttcgggcggctgcagtccaagcagcgacactgttttcggccccggagctccagcagctgctggagccgaggcatgtcgaagggagaatcgcggcactctgtacgggacccgctcctttaccgtctcagttgcgcagaaaagattcgcactgatccttgccctgaccaaggtggtgctctggcttccaatgatgatgcacatggtcgtccaaaatgtcgtgggctttcagtccctgcctttggaaacatttagtttccttcttacgctgctggcaaccacggtaacccccgtatttgttctctccaagcgatggacccacctgccctgtggatgcatcatcaactgcagacaaaatgcatacgctgtagccagcgatggcaaaaagataaagaggaagggattcgagtttaacctgtcttttcagaaatcctatgggatctacaagattgcccacgaagactattacgatgacgatgagaactcgatcttttaccacaacctaatgaattcggagtgcgagaccacaaaggatcctcagcgggacaaccggaatatcttcaatgctattaaagtagaaataagcacaaccccctctctggattccagcacccagcgcggcatcaataaatgcacaaacaccgacatcacagaggctaagcaagactcaaataacaaaaaagacgccttctccgacaaaacaggaggagatattaattacgaggaaaccactttctctgaaggtccagaacgccggctgagtcacgaggaatcccagaaacctgacctgtctgactgggagtggtgccgctcgaaatcagagcgaactcctcgtcagcgctctggctacgccctggccattcctctgtgtgcctttcaggggactgtgtctcttcacgcgcctacgggaaaaacactctccctgtctacatatgaggtctccgccgagggacaaaaaatcacacctgccagcaagaagatcgaggtttacagaagcaaatctgttggccacgagccaaattccgaagacagctcttctaccttcgtggatacttcagtcaaaattcacctcgaagttcttgaaatttgtgacaatgaggaggccctagacactgtttccatcattagcaacatttcacagtcctccactcaggtgcggagccccagtctgcgatattcccgcaaagagaatcggttcgtgtcttgtgatcttggggagacagctagttattccctctttctgccaacatctaatcccgacggtgatattaatataagcatcccagacacagtcgaagcacatagacagaactctaagcggcaacaccaggaacgcgatggctaccaggaggagatccagctgctgaataaagcttacaggaagcgcgaggaagaaagtaagggaagttag

SEQ ID NO: 31573 - DNA, 2196 bp, Artificial Sequence
  derived and/or modified sequence
atgtccctcttcttgtctaatctgtcgacaaacgactcctctctttggaaggagaatcacaattccaccgacctattgaatccccctggcactctgaatatctacctcttctgccttacatgcctcatgacgtttgcggcattggtcggaagcatttatagtctgatatcgttactgaaaatgcagaatcgcactgtcgttagtatgctggtggccagttggtcagtcgacgacctgatgagtgtcctcagtgtgactatcttcatgttcctgcaatggcccaatgaagtaccaggctattttcagttcctctgtacaacgtccgccctgatgtacttgtgtcagggactgagttctaatctcaaagcaacactgcttgtttcctacaacttttacacgatgcaccgcggtgtcggatcacagaccgcatccagaaggtccggccaagtgctgggagtagtacttaccgtctgggctgccagcctgctactgtcagcgctccccctgtgtggttggggtgcattcgtgagaacaccgtgggggtgccttgtagattgttcatcctcttatgtgttatttctgtccatcgtctacgcactggcattcgggctccttgttggtttatccgtgcccctgacccatcgattactgtgctccgaggaaccccctaggctccattccaactaccaggaaatcagccgcggagcctcgattccgggtacaccaccgacagcagggagggtcgtctcactctcccctgaagatgctcctggacctagcctccggcgtagcggagggtgcagccctagcagcgacactgtcttcggtccaggggctccggcagcggcaggcgctgaagcctgtcggagagagaaccgtggaacgttatatggtaccaggagcttcactgtgtcggtggctcagaaacgctttgcacttattctcgccctgactaaggtggtcttgtggctgccgatgatgatgcacatggtggtacagaacgtcgtggggttccagtctctccctctggagacgttcagctttctgctgacactgctggctactaccgtcacccctgtgtttgtcctatcaaaaaggtggacccatttaccctgcggctgcataattaactgcaggcagaatgcttacgcagttgcctccgacggtaagaaaatcaaacgcaaaggcttcgagttcaacttgagctttcagaagagctacggcatctacaagatcgcacacgaggactattacgatgacgatgaaaacagtatattttaccacaatctgatgaatagtgaatgtgagactaccaaggacccacaacgtgataatcgcaacattttcaacgcaattaaagttgaaattagcacaacaccctcattggattcctcaacacagaggggcataaacaagtgcacaaacactgacatcacagaggctaagcaagactccaacaataagaaagacgccttctcagacaaaaccgggggagacatcaactacgaagaaactactttctcagaggggccagaaaggcgattgagccatgaggagtcccagaaaccggacctgagcgattgggagtggtgccgcagcaagtcggaacgcactcccagacaaagaagtggatatgccctcgcgattcctttatgcgccttccagggaaccgttagcctccatgccccaacagggaaaactctcagtctatcgacatacgaggtatccgctgaagggcagaagattactcctgcctccaaaaagatcgaagtctacaggagcaagagtgttgggcatgagccgaactcagaagatagtagcagtacattcgtggatacatcagtgaagattcacctggaggtgctggaaatctgtgacaatgaagaagcgctcgacactgtgtctattatcagcaatattagtcaaagctcaactcaagttagatccccatccctccggtacagtaggaaagagaaccggttcgtgtcctgtgatctgggagagaccgccagctattccctgttcttgcctacgtccaacccagacggtgacattaacatttctatccctgataccgtcgaagcccaccggcagaactcaaagagacagcaccaggaacgcgatggatatcaggaagaaattcagcttcttaacaaagcatatcgtaaacgtgaagaagagtctaagggaagctag

SEQ ID NO: 31574 - protein, 321 aa, Artificial Sequence
  derived and/or modified sequence
MPNIVLFSGSSHQDLSQRVADRLGLELGKVVTKKFSNQETSVEIGESVRGEDVYIIQSGCGEINDNLMELLIMINACKIASSSRVTAVIPCFPYARQDKKDKVGESRAPISAKLVANMLSVAGADHIITMDLHASQIQGFFDIPVDNLYAEPAVLQWIRENIAEWKNCIIVSPDAGGAKRVTSIADRLNVEFALIHKERKKANEVDRMVLVGDVKDRVAILVDDMADTCGTICHAADKLLSAGATKVYAILTHGIFSGPAISRINNAAFEAVVVTNTIPQEDKMKHCTKIQVIDISMILAEAIRRTHNGESVSYLFSHVPL

SEQ ID NO: 31575 - DNA, 966 bp, Artificial Sequence
  derived and/or modified sequence
atgccaaatatagtgttattcagcggaagttctcatcaggatttgagccagagggtagcagataggttgggattggagttagggaaggtggtgacaaaaaagtttagcaaccaggagacgtctgtggaaataggcgaatctgtgcgcggagaagatgtgtacattattcaatccggctgtggggaaataaacgataacctgatggagctcctgataatgataaatgcctgcaagattgcctcatcatcgcgggttactgctgttattccctgttttccttacgccaggcaggacaaaaaagataaggtgggcgagtcccgggcgccaatcagcgccaaattggtggctaacatgctatctgtggctggggccgaccacattataactatggacctgcatgcctcacaaatccagggcttcttcgacattcctgtagacaatctctacgcagaacctgccgtccttcagtggattcgggagaacatcgccgagtggaaaaattgcatcatagtcagccccgatgccggcggcgccaaacgcgtgacctccattgctgaccgcctcaatgttgagtttgctttaatacacaaagaaagaaagaaggcaaatgaggtcgatcgtatggtgttagtcggtgacgtcaaagaccgagttgccatattagtcgacgatatggccgatacttgtggtactatttgtcacgcagccgataagctgcttagcgccggtgcaaccaaagtttacgctatcctgacccatggtatcttctcggggccagctataagtcgtattaataacgccgcattcgaggccgtcgtggtcactaataccatcccacaggaagacaagatgaaacactgcacgaagattcaagtcatcgacatcagcatgatcctcgccgaggctattagaagaacacataatggagagtccgtgagctacctgttctcccatgtacctctttag

SEQ ID NO: 31576 - DNA, 966 bp, Artificial Sequence
  derived and/or modified sequence
atgcccaacatcgtgctcttcagcggcagcagccaccaggacctgagccagagggtggccgaccggctgggcctggagctgggcaaggtggtgaccaagaagttcagcaaccaggagacctctgtggagatcggggagagcgtgagaggagaagatgtgtacatcatccagagcggctgtggggagatcaatgacaacctgatggagctgctgatcatgatcaatgcctgcaagatcgccagcagcagccgggtgacagctgtgatcccctgcttcccctatgcccggcaggacaagaaggacaaggtgggggagagccgggcccccatcagcgccaagctggtggccaacatgctgtctgtggccggggctgaccacatcatcaccatggacctgcacgccagccagatccagggcttctttgacatccctgtggacaacctgtatgcagagcctgctgtgctgcagtggatccgggagaacattgctgagtggaagaactgcatcatcgtgtccccagatgctggaggagccaagagggtgaccagcattgctgaccggctgaatgtggagtttgccctgatccacaaggagaggaagaaggccaatgaggtggacaggatggtgctggtgggagatgtgaaggacagagtggccatcctggtggatgacatggctgacacctgtggcaccatctgccacgccgctgacaagctgctgtctgctggggccaccaaggtgtatgccatcctgacccacggcatcttcagcggccctgccatcagccgcatcaacaatgctgcctttgaagctgtggtggtgaccaacaccatcccccaggaggacaagatgaagcactgcaccaagatccaggtgattgacatctccatgatcctggccgaggccatccggaggacccacaacggggagagcgtgtcctacctgttcagccacgtgcccctgtag

SEQ ID NO: 31577 - DNA, 966 bp, Artificial Sequence
  derived and/or modified sequence
atgcccaacatcgtgctgttcagcggcagcagccaccaggacctgagccagagggtcgcagacagacttggcctcgaactcggcaaggtcgtgacgaaaaagttttctaatcaggaaacttctgtagagatcggggagagcgttcggggcgaagacgtgtacataatacaatctggatgcggcgagataaacgataacctgatggaactactcatcatgattaacgcttgcaaaatcgcttcctcatctagagtgacagccgtgatcccctgttttccttacgcgagacaggacaaaaaggataaggtgggagaatcaagagcaccaataagcgcaaaactcgttgcgaatatgttgagcgtggccggggctgatcatataatcaccatggatctgcatgcttcacagatccaaggattctttgacatacccgtggataacctgtatgccgagccggctgtcctccagtggatccgcgaaaatatcgcagagtggaaaaactgtatcatcgtgagccctgatgcagggggtgcaaagagggtcaccagcattgccgataggctgaatgttgagttcgcactgatccataaggaacggaagaaggccaatgaggtggacagaatggtgttggttggagacgtgaaggacagggtggccatcttagtggacgacatggctgatacatgtggcaccatatgtcacgccgctgacaagctcctatctgcaggggccactaaggtttatgctatcctgactcacggcatctttagcggcccagccatctctaggatcaacaatgccgcatttgaagccgtggtcgtgaccaatacgattccgcaggaagacaaaatgaagcactgtaccaagattcaagtgatagatatctctatgattcttgccgaggctatcagacgaacccataacggcgaatctgtgtcgtatctgttctcccacgtacccctgtag

SEQ ID NO: 31578 - DNA, 1348 bp, Artificial Sequence
  derived and/or modified sequence
gctcccgcagcagcagcctcccgcgtcgctgtcgctgttgcctccgccacctcctccgccgccgcgcgcccctcggagttccgcgccccaccatgcccaacatcgtgctgttcagcggcagctcgcatcaggacctgtcccagcgcgtggccgaccgcctgggcctggagctgggcaaggtggtcacgaagaagttcagcaaccaggagaccagcgtggagattggtgaaagcgtgagaggggaagatgtctacatcatccagagcggctgcggggaaattaacgacaacctgatggaactcctcatcatgatcaatgcctgcaagattgcgtcatcatccagagtaactgccgtgatcccgtgtttcccatacgcccgacaagataaaaaggacaaggtaggagagagtcgtgccccaatttctgcaaaacttgtggccaatatgctgtcggtggctggggcggatcacatcatcaccatggacctgcatgcttctcagatacagggattctttgatattcctgtggataatttgtatgcggagcccgcagtcctgcagtggattcgggaaaacattgccgagtggaagaactgtatcattgtttcacctgacgcagggggagccaaaagggttacatcaattgcagacaggttgaatgtggaatttgctttgatccacaaagagaggaagaaggcgaatgaagtggaccggatggtcctggtgggcgacgtgaaggaccgtgtggccatcctcgtggatgacatggctgacacttgcggcaccatctgccatgctgcggacaagctgctgtcagctggagccaccaaagtgtatgctatccttacccatgggatcttctctggaccagctatttccagaataaataatgccgcctttgaggctgttgtcgtcacaaacacaattccgcaagaggacaaaatgaaacactgcaccaagattcaggtcattgacatttccatgatcttggccgaagcaatccgaaggacacacaatggggaatccgtgtcctacctgttcagccatgtcccgctataaatccagaatgggaagtgtccagcaagcctactctgacttctgacttgtttttgttttctggatttttagctgtaggtattcagcaatgataggttaatcactggcaaaagcatcagatctttgtatatgctaagatttattgtttccccttctaaagctcaagatcatttctttccagtttttggggaaatggtggtggttatttggtctttaagtgaactgtcttaaatgagaaacgtttttgtcattttgacttttaacaggtacaggtgatctcttcctttgttctt

SEQ ID NO: 31579 - DNA, 966 bp, Artificial Sequence
  derived and/or modified sequence
atgcccaatattgtcctgttctctggttcaagccatcaagatttgagccagcgggtcgctgaccggctcggtttagagcttggaaaagtagtgacaaagaagttctcaaaccaagagacttctgtggaaatcggtgagtccgtgaggggagaggatgtctacatcatccagtcaggatgcggggagatcaacgataatctcatggaactgctgattatgatcaatgcctgtaagatcgcatccagtagccgagtgaccgctgtgattccttgcttcccttacgcgaggcaagataagaaggacaaagtgggtgagagcagggcgccaatatccgccaaactcgtggccaacatgctgtccgtggcaggggcagaccacattattaccatggaccttcatgcatctcaaattcaggggttctttgacattcctgtcgacaatttgtacgctgagccagcagtactgcagtggatcagagaaaacatagccgagtggaaaaactgcataattgtgtcacccgatgcgggaggggctaagcgcgtcacatccattgccgacagattgaacgtggaatttgccctgattcacaaagaaagaaagaaggccaatgaggtggaccgaatggtgctagtgggcgacgtcaaagacagggtcgcaatactggtggatgacatggcagatacatgtggcacaatttgccacgcggcagataaactcctgtcagccggagccacgaaagtttatgccatcttaacccacggaattttttcaggccctgcaatcagccgcatcaacaacgcagccttcgaagccgtcgtagtgactaatacaatacctcaggaagataaaatgaagcactgcacaaaaattcaggtgatcgacatttctatgattctggctgaagccatccggcgaacccataacggagaatctgtgagttatctttttagtcatgtgcccctctag

SEQ ID NO: 31580 - DNA, 966 bp, Artificial Sequence
  derived and/or modified sequence
atgcccaacatcgtgctgttcagcggcagcagccaccaggacctgagccagagagtggccgacagactgggcctggagctgggcaaggtggtgaccaagaagttcagcaaccaggagaccagcgtggagatcggcgagagcgtgagaggcgaggacgtgtacatcatccagagcggctgcggcgagatcaacgacaacctgatggagctgctgatcatgatcaacgcctgcaagatcgccagcagcagcagagtgaccgccgtgatcccctgcttcccctacgccagacaggacaagaaggacaaggtgggcgagagcagagcccccatcagcgccaagctggtggccaacatgctgagcgtggccggcgccgaccacatcatcaccatggacctgcacgccagccagatccagggcttcttcgacatccccgtggacaacctgtacgccgagcccgccgtgctgcagtggatcagagagaacatcgccgagtggaagaactgcatcatcgtgagccccgacgccggcggcgccaagagagtgaccagcatcgccgacagactgaacgtggagttcgccctgatccacaaggagagaaagaaggccaacgaggtggacagaatggtgctggtgggcgacgtgaaggacagagtggccatcctggtggacgacatggccgacacctgcggcaccatctgccacgccgccgacaagctgctgagcgccggcgccaccaaggtgtacgccatcctgacccacggcatcttcagcggccccgccatcagcagaatcaacaacgccgccttcgaggccgtggtggtgaccaacaccatcccccaggaggacaagatgaagcactgcaccaagatccaggtgatcgacatcagcatgatcctggccgaggccatcagaagaacccacaacggcgagagcgtgagctacctgttcagccacgtgcccctgtag

SEQ ID NO: 31581 - protein, 868 aa, Artificial Sequence
  derived and/or modified sequence
MASFPETDFQICLLCKEMCGSPAPLSSNSSASSSSSQTSTSSGGGGGGPGAAARRLHVLPCLHAFCRPCLEAHRLPAAGGGAAGEPLKLRCPVCDQKVVLAEAAGMDALPSSAFLLSNLLDAVVATADEPPPKNGRAGAPAGAGGHSNHRHHAHHAHPRASASAPPLPQAPQPPAPSRSAPGGPAASPSALLLRRPHGCSSCDEGNAASSRCLDCQEHLCDNCVRAHQRVRLTKDHYIERGPPGPGAAAAAQQLGLGPPFPGPPFSILSVFPERLGFCQHHDDEVLHLYCDTCSVPICRECTMGRHGGHSFIYLQEALQDSRALTIQLLADAQQGRQAIQLSIEQAQTVAEQVEMKAKVVQSEVKAVTARHKKALEERECELLWKVEKIRQVKAKSLYLQVEKLRQNLNKLESTISAVQQVLEEGRALDILLARDRMLAQVQELKTVRSLLQPQEDDRVMFTPPDQALYLAIKSFGFVSSGAFAPLTKATGDGLKRALQGKVASFTVIGYDHDGEPRLSGGDLMSAVVLGPDGNLFGAEVSDQQNGTYVVSYRPQLEGEHLVSVTLCNQHIENSPFKVVVKSGRSYVGIGLPGLSFGSEGDSDGKLCRPWGVSVDKEGYIIVADRSNNRIQVFKPCGAFHHKFGTLGSRPGQFDRPAGVACDASRRIVVADKDNHRIQIFTFEGQFLLKFGEKGTKNGQFNYPWDVAVNSEGKILVSDTRNHRIQLFGPDGVFLNKYGFEGALWKHFDSPRGVAFNHEGHLVVTDFNNHRLLVIHPDCQSARFLGSEGTGNGQFLRPQGVAVDQEGRIIVADSRNHRVQMFESNGSFLCKFGAQGSGFGQMDRPSGIAITPDGMIVVVDFGNNRILVF

SEQ ID NO: 31582 - DNA, 2607 bp, Artificial Sequence
  derived and/or modified sequence
atggccagcttccccgagaccgacttccagatctgcctgctgtgcaaggagatgtgcggcagccccgcccccctgagcagcaacagcagcgccagcagcagcagcagccagaccagcaccagcagcggcggcggcggcggcggccccggcgccgccgccagaagactgcacgtgctgccctgcctgcacgccttctgcagaccctgcctggaggcccacagactgcccgccgccggcggcggcgccgccggcgagcccctgaagctgagatgccccgtgtgcgaccagaaggtggtgctggccgaggccgccggcatggacgccctgcccagcagcgccttcctgctgagcaacctgctggacgccgtggtggccaccgccgacgagcccccccccaagaacggcagagccggcgcccccgccggcgccggcggccacagcaaccacagacaccacgcccaccacgcccaccccagagccagcgccagcgccccccccctgccccaggccccccagccccccgcccccagcagaagcgcccccggcggccccgccgccagccccagcgccctgctgctgagaagaccccacggctgcagcagctgcgacgagggcaacgccgccagcagcagatgcctggactgccaggagcacctgtgcgacaactgcgtgagagcccaccagagagtgagactgaccaaggaccactacatcgagagaggcccccccggccccggcgccgccgccgccgcccagcagctgggcctgggcccccccttccccggcccccccttcagcatcctgagcgtgttccccgagagactgggcttctgccagcaccacgacgacgaggtgctgcacctgtactgcgacacctgcagcgtgcccatctgcagagagtgcaccatgggcagacacggcggccacagcttcatctacctgcaggaggccctgcaggacagcagagccctgaccatccagctgctggccgacgcccagcagggcagacaggccatccagctgagcatcgagcaggcccagaccgtggccgagcaggtggagatgaaggccaaggtggtgcagagcgaggtgaaggccgtgaccgccagacacaagaaggccctggaggagagagagtgcgagctgctgtggaaggtggagaagatcagacaggtgaaggccaagagcctgtacctgcaggtggagaagctgagacagaacctgaacaagctggagagcaccatcagcgccgtgcagcaggtgctggaggagggcagagccctggacatcctgctggccagagacagaatgctggcccaggtgcaggagctgaagaccgtgagaagcctgctgcagccccaggaggacgacagagtgatgttcaccccccccgaccaggccctgtacctggccatcaagagcttcggcttcgtgagcagcggcgccttcgcccccctgaccaaggccaccggcgacggcctgaagagagccctgcagggcaaggtggccagcttcaccgtgatcggctacgaccacgacggcgagcccagactgagcggcggcgacctgatgagcgccgtggtgctgggccccgacggcaacctgttcggcgccgaggtgagcgaccagcagaacggcacctacgtggtgagctacagaccccagctggagggcgagcacctggtgagcgtgaccctgtgcaaccagcacatcgagaacagccccttcaaggtggtggtgaagagcggcagaagctacgtgggcatcggcctgcccggcctgagcttcggcagcgagggcgacagcgacggcaagctgtgcagaccctggggcgtgagcgtggacaaggagggctacatcatcgtggccgacagaagcaacaacagaatccaggtgttcaagccctgcggcgccttccaccacaagttcggcaccctgggcagcagacccggccagttcgacagacccgccggcgtggcctgcgacgccagcagaagaatcgtggtggccgacaaggacaaccacagaatccagatcttcaccttcgagggccagttcctgctgaagttcggcgagaagggcaccaagaacggccagttcaactacccctgggacgtggccgtgaacagcgagggcaagatcctggtgagcgacaccagaaaccacagaatccagctgttcggccccgacggcgtgttcctgaacaagtacggcttcgagggcgccctgtggaagcacttcgacagccccagaggcgtggccttcaaccacgagggccacctggtggtgaccgacttcaacaaccacagactgctggtgatccaccccgactgccagagcgccagattcctgggcagcgagggcaccggcaacggccagttcctgagaccccagggcgtggccgtggaccaggagggcagaatcatcgtggccgacagcagaaaccacagagtgcagatgttcgagagcaacggcagcttcctgtgcaagttcggcgcccagggcagcggcttcggccagatggacagacccagcggcatcgccatcacccccgacggcatgatcgtggtggtggacttcggcaacaacagaatcctggtgttctag

SEQ ID NO: 31583 - DNA, 2607 bp, Artificial Sequence
  derived and/or modified sequence
atggccagctttcccgagaccgacttccagatttgtctgctgtgcaaagaaatgtgtggctccccagctccactgtcttccaattcatctgcctctagttccagctcccagaccagcacctccagtggaggtggcggggggggccctggcgccgccgcaaggcgactccacgtcttgccatgtctgcatgcattctgtagaccttgcctggaggcccatcgcctaccggccgccggcgggggcgccgctggcgaaccgctaaagctgaggtgtcccgtgtgtgaccagaaggttgtcctggctgaagccgcaggcatggacgctcttcctagctccgcattcctgctaagcaatctgttggatgcggtggtagctaccgctgatgagccgcccccaaaaaatggtagagccggggcccctgccggcgcaggaggacacagcaaccaccgccatcatgcccaccatgctcatccacgagctagtgcctctgctcctccccttccccaggcacctcagccacccgcgccttcacggtcagcacctggggggccagctgcttctccgagcgcccttctactgcgcagacctcatggatgttctagttgtgacgagggtaacgcggcgtcttctcggtgtcttgattgtcaggaacatctctgcgacaattgcgtccgagcccatcagcgagtccggctgacgaaggaccactacattgagcgcgggcctcctggacccggtgctgccgctgctgcccaacagctcggtctcggacctccttttccaggacctccatttagcattctcagcgtttttccggagagactaggattctgccaacaccatgacgacgaggtactccacctatactgtgacacatgctctgtgcccatctgtagagagtgcaccatgggaaggcacggcggccattcattcatctacttgcaagaggccttgcaggacagtcgggctctgacgatccagctactcgccgatgcccagcagggacgccaggcaattcagctgagcattgagcaagctcagacagtcgcagagcaagtcgagatgaaggccaaggtcgtccagagcgaggtgaaggccgtgaccgcccgtcacaaaaaggcgcttgaggagcgcgagtgtgagctcctatggaaggtggagaaaatcagacaagtgaaagcaaagagcctatacctgcaggtagagaagctgcgccagaacctgaataagctggaaagcacaattagtgctgtgcaacaagtgttggaggaggggcgggccctcgacatacttcttgcacgagatcggatgctcgcccaggtgcaggaattaaagaccgtccggtccctcttacaaccccaggaagacgacagagtgatgttcacccctcccgaccaggctctgtacctcgccattaaaagcttcgggtttgtgtcgtccggcgctttcgccccgcttaccaaggctacaggcgatggcctgaaaagagccttgcaggggaaggtcgcttcctttacagtcattgggtacgatcacgacggcgagcctaggctgtcgggcggcgacctgatgtcagcagtagttctaggacccgatgggaatttgttcggcgctgaggtgagcgatcagcagaatggtacttatgtggtctcttaccggcctcagctggagggcgagcacctggtgtcggtcacactgtgtaaccaacatatagaaaactctccctttaaggtggtggtaaaaagcggccgcagttatgttggcatcggccttccagggctgagcttcggctcagagggtgactccgacggcaagctgtgtagaccctggggtgtaagcgtcgacaaggagggctatatcatagttgccgatagatctaacaaccgaatacaggtcttcaagccatgtggggctttccaccataagtttggcacattgggctcacgacctggccagtttgatcgacccgctggggtcgcttgtgacgctagccgtagaattgtggtggctgataaggataaccacaggatccaaattttcacctttgagggtcagttcttgttaaagttcggggagaaaggtactaaaaacggacagttcaattacccatgggatgtggcggttaactctgagggaaagatattggtgtccgatactaggaaccaccggattcagctgtttggccctgacggtgtctttctcaacaaatacgggtttgagggagcgctgtggaaacacttcgactctcctcgaggtgtggcgtttaatcacgaaggccacttagtggtgacggatttcaataatcatcgcctgctcgtaattcatccagactgtcaaagtgcacgattcctggggagtgaaggaactggcaatgggcagttcctgagaccgcagggcgtagccgttgaccaggaggggaggataattgtagcagactcacggaatcacagggtccaaatgttcgaatctaacggttcttttttatgtaagttcggagcacaggggagcggattcgggcaaatggaccgaccgagtggtattgcaatcacacctgacggcatgattgtggtcgtcgacttcgggaacaaccgaatccttgtgttttag

SEQ ID NO: 31584 - DNA, 2607 bp, Artificial Sequence
  derived and/or modified sequence
atggccagcttccctgagacagacttccagatctgcctgctgtgcaaggagatgtgtggcagccctgcccccctgagcagcaacagcagcgccagcagcagcagcagccagaccagcaccagcagcggcggcggcggcggcggccctggagctgctgcccggcggctgcacgtgctgccctgcctgcacgccttctgccggccctgcctggaggcccaccggctgcctgctgctgggggcggcgctgctggggagcccctgaagctgcgctgccctgtgtgtgaccagaaggtggtgctggccgaggccgccggcatggatgccctgcccagcagcgccttcctgctgagcaacctgctggatgctgtggtggccacagcagatgagcccccacccaagaatggccgggccggggccccagctggagctgggggccacagcaaccaccgccaccacgcccaccacgcccacccccgggccagcgccagcgccccacccctgccccaggccccccagcccccagcccccagccgcagcgcccctgggggccctgctgccagccccagcgccctgctgctgcggcggccccacggctgcagcagctgtgatgagggcaatgctgccagcagccgctgcctggactgccaggagcacctgtgtgacaactgtgtgcgggcccaccagagggtgcggctgaccaaggaccactacatcgagcggggccccccaggccctggagctgctgctgctgcccagcagctgggcctgggcccccccttccctggcccccccttcagcatcctgtctgtgtttcctgagcggctgggcttctgccagcaccatgatgatgaggtgctgcacctgtactgtgacacctgcagcgtgcccatctgccgggagtgcaccatgggccgccacggcggccacagcttcatctacctgcaggaggccctgcaggacagccgggccctgaccatccagctgctggctgatgcccagcagggccggcaggccatccagctgagcattgagcaggcccagacagtggccgagcaggtggagatgaaggccaaggtggtgcagagcgaggtgaaggctgtgacagcccggcacaagaaggccctggaggagagagaatgtgagctgctgtggaaggtggagaagatccggcaggtgaaggccaagagcctgtacctgcaggtggagaagctgcggcagaacctgaacaagctggagagcaccatctctgctgtgcagcaggtgctggaggagggccgggccctggacatcctgctggcccgggacaggatgctggcccaggtgcaggagctgaagacagtgcgcagcctgctgcagccccaggaggatgacagagtgatgttcaccccaccagaccaggccctgtacctggccatcaagagctttggatttgtgagcagcggggcctttgcccccctgaccaaggccactggagatggcctgaagagggccctgcagggcaaggtggccagcttcaccgtcatcggctatgaccatgatggagagccccggctgtctggaggagacctgatgtctgctgtggtgctgggcccagatggcaacctgtttggagctgaggtgtctgaccagcagaatggcacctacgtggtgtcctaccggccccagctggagggggagcacctggtgtctgtgaccctgtgcaaccagcacatcgagaacagccccttcaaggtggtggtgaagagcggccgctcctatgtgggcatcggcctgcccggcctgagctttggcagcgagggggacagtgatggcaagctgtgccggccctggggcgtgtctgtggacaaggagggctacatcatcgtggccgacaggagcaacaaccgcatccaggtgttcaagccctgtggggccttccaccacaagtttggcaccctgggcagccggcccggccagtttgacaggcctgctggggtggcctgtgatgccagcagaagaattgtggtggccgacaaggacaaccaccgcatccagatcttcacctttgagggccagttcctgctgaagtttggagagaagggcaccaagaatggccagttcaactacccctgggatgtggccgtgaacagcgagggcaagatcctggtgtctgacaccaggaaccaccgcatccagctgtttggaccagatggagtcttcctgaacaagtatggctttgaaggagccctgtggaagcactttgacagcccccggggcgtggccttcaaccacgagggccacctggtggtgacagacttcaacaaccaccggctgctggtgatccacccagactgccagagcgcccgcttcctgggcagcgagggcactggaaatggccagttcctgcggccccagggcgtggccgtggaccaggagggccgcatcatcgtggccgacagcaggaaccaccgggtgcagatgtttgagagcaatggcagcttcctgtgcaagtttggagcccagggcagcggcttcggccagatggaccggcccagcggcatcgccatcaccccagatggcatgattgtggtggtggactttggaaacaaccgcatcctggtgttctag

SEQ ID NO: 31585 - DNA, 3138 bp, Artificial Sequence
  derived and/or modified sequence
gctctctcctcctcctcctcctcttcctctctggtctcctccctcctccgggctgggttgcaaatggcttcgttccccgagaccgatttccagatctgcttgctgtgcaaggagatgtgcggctcgccggcgccgctctcctccaactcgtccgcgtcgtcgtcctcctcgcagacgtccacgtcgtcggggggcggcggcgggggccctggggcggcggcgcgccgcctacacgtcctgccctgcctgcacgccttctgccgcccctgcctcgaggcgcaccggctgccggcggcgggcggcggcgcggcgggagagccgctcaagctgcgctgccccgtgtgcgaccagaaagtagtgctagccgaggcggcgggtatggacgcgctgccttcgtccgccttcctgcttagcaacctgctcgacgcggtggtggccactgccgacgagccgccgcccaagaacgggcgcgccggcgctccggcgggagcgggcggccacagcaaccaccggcaccacgctcaccacgcgcacccgcgcgcgtccgcctccgcgccgccactcccgcaggcgccgcagccgcccgcgccttcccgctcggcacccggcggccctgccgcttccccgtcggcgctgctgctccgccgtcctcacggctgcagctcgtgcgatgagggcaacgcagcttcttcgcgctgcctcgactgccaggagcacctgtgcgacaactgcgtccgagcgcaccagcgcgtgcgcctcaccaaggaccactacatcgagcgcggcccgccgggtcccggtgccgcagcagcggcgcagcagctcgggctcgggccgccctttcccggcccgcccttctccatcctctcagtgtttcccgagcgcctcggcttctgccagcaccacgacgacgaggtgctgcacctgtactgtgacacttgctctgtacccatctgtcgtgagtgcacaatgggccggcatgggggccacagcttcatctacctccaggaggcactgcaggactcacgggcactcaccatccagctgctggcagatgcccagcagggacgacaggcaatccagctgagcatcgagcaggcccagacggtggcggaacaggtggagatgaaggcgaaggttgtgcagtcggaggtcaaagccgtgacggcgaggcataagaaagccctggaggaacgcgagtgtgagctgctgtggaaggtagaaaagatccgccaggtgaaagccaagtctctgtacctgcaggtggagaagctgcggcaaaacctcaacaagcttgagagcaccatcagtgccgtgcagcaggtcctggaggagggtagagcgctagacatcctactggcccgagaccggatgctggcccaggtgcaggagctgaagaccgtgcggagcctcctgcagccccaggaagacgaccgagtcatgttcacaccccccgatcaggcactgtaccttgccatcaagtcttttggctttgttagcagcggggcctttgccccactcaccaaggccacaggcgatggcctcaagcgtgccctccagggtaaggtggcctccttcacagtcattggttatgaccacgatggtgagccccgcctctcaggaggcgacctgatgtcggctgtggtcctgggccctgatggcaacctgtttggtgcagaggtgagtgatcagcagaatgggacatacgtggtgagttaccgaccccagctggagggtgagcacctggtatctgtgacactgtgcaaccagcacattgagaacagccctttcaaggtggtggtcaagtcaggccgcagctacgtgggcattgggctcccgggcctgagcttcggcagtgagggtgacagcgatggcaagctctgccgcccttggggtgtgagtgtagacaaggagggctacatcattgtcgccgaccgcagcaacaaccgcatccaggtgttcaagccctgcggcgccttccaccacaaattcggcaccctgggctcccggcctgggcagttcgaccgaccagccggcgtggcctgtgacgcctcacgcaggatcgtggtggctgacaaggacaatcatcgcatccagatcttcacgttcgagggccagttcctcctcaagtttggtgagaaaggaaccaagaatgggcagttcaactacccttgggatgtggcggtgaattctgagggcaagatcctggtctcagacacgaggaaccaccggatccagctgtttgggcctgatggtgtcttcctaaacaagtatggcttcgagggggctctctggaagcactttgactccccacggggtgtggccttcaaccatgagggccacttggtggtcactgacttcaacaaccaccggctcctggttattcaccccgactgccagtcggcacgctttctgggctcggagggcacaggcaatgggcagttcctgcgcccacaaggggtagctgtggaccaggaagggcgcatcattgtggcggattccaggaaccatcgggtacagatgtttgaatccaacggcagcttcctgtgcaagtttggtgctcaaggcagcggctttgggcagatggaccgcccttccggcatcgccatcacccccgacggaatgatcgttgtggtggactttggcaacaatcgaatcctcgtcttctaattgcatttcctaggtttctgtgtttggggtgtgtgtgcgtgtctctctctctctctctctctttctctttctctctctttttgaatttcaaagaagaaacagtctcagggaaatttcttttttcttttttttttttaaagagaacaagaaaagtacaacattgcttaagtcctacctcatctttatttttttacagatgaatgtacttatcttttctgcagggattgagcctgtgaagtgataatttctatctacctcataaatctttacatttccttctgcaacaggccctcttcccctcctcagtggagtttgcatttccctcttcccctgcgtggggcatgatatgcacaagcctggcatctgtatggctgggagggcactggatgtgtgtggtggggtgtattctgtagattgagccaaggaaacacaaaaaaaaactactaagtaaaaaaacaaaaaactata

SEQ ID NO: 31586 - DNA, 2607 bp, Artificial Sequence
  derived and/or modified sequence
atggccagcttccccgagaccgacttccagatctgcctgctgtgcaaggagatgtgcggttcacccgcaccgctgtctagtaattctagcgcttcctcatcttcatcccagacctcaacaagctccgggggcggaggtggaggaccaggcgctgctgcccgaagactgcacgtgctcccctgcctccatgccttctgccggccgtgcttggaggcacaccggctccctgccgctggcggaggcgctgccggcgagcccctcaagcttaggtgcccagtatgcgaccaaaaagtggttcttgctgaagctgctggaatggacgccttgccctctagtgctttcctcctgagcaatctgttagacgcggtggtcgcgacagcggatgaacctcccccaaagaacggcagagccggcgcacctgccggggctggcggtcacagcaatcaccgtcatcatgcacaccatgcacaccctagggcgagcgcctcagccccacccctgccccaggctcctcaaccaccggctccctcccgttctgctccgggcggccctgctgcttctccctctgcccttttactacgacggcctcacgggtgtagctcttgcgacgaagggaatgccgcctcctcacgctgtctggactgtcaggagcatctgtgcgacaactgtgtgcgcgcccaccaacgggtgagactcacaaaagatcactatatcgagcgcgggccccctgggccaggggctgctgctgctgctcagcagttaggcctgggtcccccctttccaggccctccattctctatcctgtctgtctttccagagcggctggggttctgccagcaccatgacgatgaggttctgcacctgtattgcgacacatgctccgtgcccatttgcagggaatgtaccatgggacggcacggaggtcactcctttatttaccttcaggaggcgctgcaggactcacgcgccctgactatccagctccttgctgacgcgcagcagggtcggcaggcaatccagctttctatcgagcaggcacaaacagtggcggaacaggtagaaatgaaagcaaaggtggtacaaagcgaggtcaaggcagtgacggctagacataaaaaagcattagaagagagagaatgcgagctgctctggaaggtggaaaagattagacaggtgaaagctaaaagtctgtatttgcaagtggagaagctgagacagaacttaaacaagctcgagagtacaatctctgcggtgcagcaggtgttagaggaggggagagctttggacattcttctggcaagagacaggatgctcgcacaggtgcaggaactgaagaccgtgcgctccctgttgcagcctcaggaggatgaccgggtgatgttcactccccccgaccaggccctgtacctcgccatcaagtcttttggatttgtctctagtggcgcctttgcacctctgactaaggccacaggagatgggctcaagcgtgctcttcagggcaaagtagcttcatttacagtgattgggtacgaccatgatggcgagccccggctttctgggggtgatctgatgagtgccgttgttttaggtccagacggcaatctatttggagctgaggtttcggatcagcagaacggaacgtacgttgtgagttatcggcctcagcttgagggggaacaccttgtgtccgtaacactgtgcaatcaacatatcgagaacagccccttcaaagtggtcgtcaaaagtggtcggtcttacgtggggattggactaccggggcttagtttcggatctgagggagattccgatggcaagctttgcagaccatggggggtctccgttgataaggagggctacatcattgttgctgatcgaagtaacaaccggattcaggtatttaagccgtgcggtgcctttcaccacaaattcggaacactgggcagccggcctggccagttcgataggccagccggagtggcttgcgacgcctccaggagaatcgtcgtggccgataaagataaccatcgcattcaaattttcacatttgaaggccagttcctcctgaagttcggtgaaaaggggactaagaatgggcagttcaattacccttgggacgtcgctgtaaattctgagggtaagattctcgtgagtgacacgcggaatcaccgcatccagctgtttggtccagacggcgtgttcctgaataagtatggcttcgaaggtgcactgtggaagcactttgacagcccaaggggcgttgcattcaaccatgaagggcaccttgtggtgacagattttaataatcaccggctgttggtgatccatcctgattgccagagcgctcgctttttgggttccgaaggaacaggcaacggacagtttctgagacctcaaggagtcgccgtggatcaagaggggcgcatcatcgtggcagactccaggaatcaccgcgtacaaatgttcgagtcaaacggtagctttttatgtaagtttggagctcagggtagtggcttcgggcagatggacagaccgagcgggatagccataacccccgacggaatgatcgtcgtagtagacttcggaaataaccgcattttagtcttctag

SEQ ID NO: 31587 - DNA, 2607 bp, Artificial Sequence
  derived and/or modified sequence
atggcctcttttccggaaacggattttcaaatatgtctgctctgtaaggaaatgtgtgggagcccagctcccctgtcaagcaattcgtctgcctcatcaagcagcagtcagactagcacgtcctccggtggcggaggaggaggccctggtgcagcggcacgcaggctccatgtgttgccatgcctgcacgctttttgcaggccatgcctggaagcccaccggcttccagctgccggtggaggcgctgcaggggagcctttaaagttgcggtgccctgtgtgcgaccagaaagtggtccttgcagaagctgctgggatggatgcactaccgagtagtgcctttctactcagtaacctgcttgacgcggtcgtggccaccgcagatgaaccgcctcctaaaaacgggagagcaggtgccccagctggtgccggtggccattccaatcatagacatcacgctcatcatgcccatccaagagcttccgcctctgctccaccattaccccaggccccacagcccccagcccctagtagatcggcccctggaggacctgctgctagtccaagtgccctgctcttaaggaggccacatgggtgtagcagttgtgatgaaggaaacgccgctagcagccgttgtttggactgccaagagcacctgtgtgacaattgcgtaagagctcaccagagggtcagactaactaaagatcattatatcgagcgcggaccaccaggccctggcgcagccgctgccgcacagcaacttgggctcgggcctcccttccccggacctcccttttcgatactgtctgtctttccagagcgtcttggattctgccaacaccacgatgacgaagtgctccacctgtattgcgatacctgcagcgttcccatatgccgcgagtgtactatggggcgtcacggtgggcacagctttatctacctccaggaagctttgcaggatagccgtgcacttacgatccagctgctcgccgacgcccaacaaggtcgacaggcaatacaactttctatagaacaggcccagaccgtcgccgagcaggtggagatgaaagccaaggtggtgcagtcggaagtgaaagctgtgacagcacggcacaagaaagcgctcgaagagcgcgagtgcgagctgctgtggaaggtggagaaaatcaggcaggtaaaggccaagtcactctatttgcaggtggagaagctgcggcaaaatctcaacaaactcgaatcaactatcagtgctgtccagcaggtgctggaagagggacgggcattagatatactgctggctcgcgaccggatgttggcgcaagtgcaggagctcaagacagtgcggtctctgctccagccccaagaggatgaccgagtgatgtttacacctcctgatcaggcactctacctggctattaagtcgtttggcttcgtgtcatccggcgcttttgccccactgacgaaagctacgggggatggcttgaagcgtgccctgcagggcaaggtcgcttcatttacagttattgggtacgatcatgacggagagccacgtttgtccggtggggatcttatgagcgccgtggtgctgggtcccgacggcaacttgttcggggcagaggtgtccgatcaacagaatggcacatacgtggtgagttaccggccacaactggagggggagcaccttgtgagcgttacactctgcaatcagcatattgaaaattcaccttttaaggtggtcgttaagagcgggcgaagttatgtggggattggcctcccgggattatcattcgggtcagagggagattcagacgggaaattgtgcaggccttggggagtgtcagtcgataaagaaggatatattatagtggccgatcgttccaacaacagaatccaagtcttcaagccctgtggcgctttccaccataaattcgggactttgggctctcgtcccggacagttcgacaggcccgctggagtggcttgtgacgcgtcgcggcgtatcgttgtggcagacaaagacaatcatagaatacagatttttaccttcgagggtcagtttctcttaaagttcggcgagaaagggaccaagaatggccagtttaactatccatgggacgtagccgtgaacagtgaaggcaagatccttgtgtctgacacacggaatcacaggatacaactttttggccctgatggagtgtttctcaataagtatgggttcgagggcgctctctggaaacatttcgattcaccacgtggagttgcgttcaatcacgagggacatctagtcgtgacagactttaacaaccatcgcctcctcgtcatccaccccgactgccagtctgctcgttttctggggagtgaaggcactggtaatggtcaattcttgcggcctcagggcgtcgccgtggaccaggagggtcgcattattgtggccgactcacgcaatcaccgggtccagatgttcgagtcaaacggctcttttctatgtaaatttggggctcaggggagcggttttgggcagatggacagaccttctggcatcgctatcacccccgacggtatgatcgtggtcgtggactttgggaacaatagaattcttgtcttttag

SEQ ID NO: 31588 - protein, 647 aa, Artificial Sequence
  derived and/or modified sequence
MAEFRVRVSTGEAFGAGTWDKVSVSIVGTRGESPPLPLDNLGKEFTAGAEEDFQVTLPEDVGRVLLLRVHKAPPVLPLLGPLAPDAWFCRWFQLTPPRGGHLLFPCYQWLEGAGTLVLQEGTAKVSWADHHPVLQQQRQEELQARQEMYQWKAYNPGWPHCLDEKTVEDLELNIKYSTAKNANFYLQAGSAFAEMKIKGLLDRKGLWRSLNEMKRIFNFRRTPAAEHAFEHWQEDAFFASQFLNGLNPVLIRRCHYLPKNFPVTDAMVASVLGPGTSLQAELEKGSLFLVDHGILSGIQTNVINGKPQFSAAPMTLLYQSPGCGPLLPLAIQLSQTPGPNSPIFLPTDDKWDWLLAKTWVRNAEFSFHEALTHLLHSHLLPEVFTLATLRQLPHCHPLFKSTGIGIEGFSELIQRNMKQLNYSLLCLPEDIRTRGVEDIPGYYYRDDGMQIWGAVERFVSEIIGIYYPSDESVQDDRELQAWVREIFSKGFLNQESSGIPSSLETREALVQYVTMVIFTCSAKHAAVSAGQFDSCAWMPNLPPSMQLPPPTSKGLATCEGFIATLPPVNATCDVILALWLLSKEPGDQRPLGTYPDEHFTEEAPRRSIATFQSRLAQISRGIQERNQGLVLPYTYLDPPLIENSVSI

SEQ ID NO: 31589 - DNA, 1944 bp, Artificial Sequence
  derived and/or modified sequence
atggccgagttcagagtgagagtgagcaccggcgaggccttcggcgccggcacctgggacaaggtgagcgtgagcatcgtgggcaccagaggcgagagcccccccctgcccctggacaacctgggcaaggagttcaccgccggcgccgaggaggacttccaggtgaccctgcccgaggacgtgggcagagtgctgctgctgagagtgcacaaggccccccccgtgctgcccctgctgggccccctggcccccgacgcctggttctgcagatggttccagctgaccccccccagaggcggccacctgctgttcccctgctaccagtggctggagggcgccggcaccctggtgctgcaggagggcaccgccaaggtgagctgggccgaccaccaccccgtgctgcagcagcagagacaggaggagctgcaggccagacaggagatgtaccagtggaaggcctacaaccccggctggccccactgcctggacgagaagaccgtggaggacctggagctgaacatcaagtacagcaccgccaagaacgccaacttctacctgcaggccggcagcgccttcgccgagatgaagatcaagggcctgctggacagaaagggcctgtggagaagcctgaacgagatgaagagaatcttcaacttcagaagaacccccgccgccgagcacgccttcgagcactggcaggaggacgccttcttcgccagccagttcctgaacggcctgaaccccgtgctgatcagaagatgccactacctgcccaagaacttccccgtgaccgacgccatggtggccagcgtgctgggccccggcaccagcctgcaggccgagctggagaagggcagcctgttcctggtggaccacggcatcctgagcggcatccagaccaacgtgatcaacggcaagccccagttcagcgccgcccccatgaccctgctgtaccagagccccggctgcggccccctgctgcccctggccatccagctgagccagacccccggccccaacagccccatcttcctgcccaccgacgacaagtgggactggctgctggccaagacctgggtgagaaacgccgagttcagcttccacgaggccctgacccacctgctgcacagccacctgctgcccgaggtgttcaccctggccaccctgagacagctgccccactgccaccccctgttcaagagcaccggcatcggcatcgagggcttcagcgagctgatccagagaaacatgaagcagctgaactacagcctgctgtgcctgcccgaggacatcagaaccagaggcgtggaggacatccccggctactactacagagacgacggcatgcagatctggggcgccgtggagagattcgtgagcgagatcatcggcatctactaccccagcgacgagagcgtgcaggacgacagagagctgcaggcctgggtgagagagatcttcagcaagggcttcctgaaccaggagagcagcggcatccccagcagcctggagaccagagaggccctggtgcagtacgtgaccatggtgatcttcacctgcagcgccaagcacgccgccgtgagcgccggccagttcgacagctgcgcctggatgcccaacctgccccccagcatgcagctgcccccccccaccagcaagggcctggccacctgcgagggcttcatcgccaccctgccccccgtgaacgccacctgcgacgtgatcctggccctgtggctgctgagcaaggagcccggcgaccagagacccctgggcacctaccccgacgagcacttcaccgaggaggcccccagaagaagcatcgccaccttccagagcagactggcccagatcagcagaggcatccaggagagaaaccagggcctggtgctgccctacacctacctggacccccccctgatcgagaacagcgtgagcatctag

SEQ ID NO: 31590 - DNA, 1944 bp, Artificial Sequence
  derived and/or modified sequence
atggccgagtttcgtgtccgcgtcagcacgggagaggcctttggggccggcacctgggataaagtgagcgtctctattgtcggaacgcgaggtgaatccccaccattgccactcgacaatcttgggaaagaattcaccgccggcgcggaggaggacttccaagtcaccctgccggaagacgtcgggagggtgctgttgctccgtgtgcataaagctccaccagtgcttccgttacttgggccccttgctcctgatgcctggttctgccgctggtttcagctgactccaccacgggggggacatctgctttttccgtgttatcagtggctggaaggcgctggaactctggtccttcaagagggaaccgccaaggtttcatgggctgatcaccatccggtgctgcagcagcagcgacaggaagagctccaggccaggcaggaaatgtatcaatggaaagcatacaacccaggatggccacattgtttagacgaaaagacggtagaggatcttgagttgaacatcaaatacagcaccgccaaaaatgccaatttctaccttcaagctgggagcgcctttgctgagatgaaaatcaaaggcctcttggatcggaagggcctgtggaggagcctcaacgagatgaaacgcatcttcaacttccgccgcaccccggctgccgagcatgcatttgaacactggcaggaggatgcctttttcgcctcacaattcttgaatggactgaaccccgttctgattcgtaggtgtcactacctccctaaaaactttccagttactgatgcaatggtggcaagcgttctcgggcctggtacctctctacaggcggagctcgaaaaaggatctctgttccttgtggatcatgggattctgagtggcatccaaacaaatgtgattaatggaaaaccccagttttccgccgcacccatgacactgttatatcagtcccccggttgtggaccgctgttgcctctggctatacaattgtcacagactcccggccctaacagccccatatttcttcccactgatgacaagtgggactggctgctggccaaaacttgggtacggaacgccgaattctcttttcacgaggccctgacccacctcctgcactcacatctcctgccggaggtgtttaccctggccaccctaaggcagttaccgcattgtcaccctctcttcaaatctaccgggatcgggattgaaggcttctccgagctgatccagagaaatatgaagcaactcaattactcactgctgtgcttgcctgaagatattaggacaaggggtgtcgaagacattccaggttactactatagggatgacgggatgcagatttggggcgcagtcgagaggtttgtgagcgagattatcgggatttattatccttccgacgagagcgtgcaagacgatcgggagttgcaagcctgggtgagggaaatttttagtaaaggcttcctgaaccaggaatcatccggaattccttccagcctcgaaacaagggaggctttagtgcagtacgtgacaatggtgatctttacctgtagtgccaagcacgccgccgtaagcgctggacagtttgactcctgcgcgtggatgccaaatctgcctccatccatgcagctgccccctccaacaagtaaggggttggctacatgcgagggcttcatcgcgactctgccacccgtaaacgccacatgtgacgtaattctcgccctttggcttctttctaaggagccgggggaccagaggcccctagggacatacccggatgagcacttcacagaagaggctccgcggcgaagcattgctacttttcagagtcggctggcacaaatctctcggggaattcaggagaggaatcaaggtctcgtgctcccttacacgtatctcgatcctcctttaatcgagaacagcgtgtcaatatag

SEQ ID NO: 31591 - DNA, 1944 bp, Artificial Sequence
  derived and/or modified sequence
atggccgagttccgggtgcgggtgtccactggagaggccttcggggccggcacctgggacaaggtgtctgtgtccatcgtgggcaccagaggagagagcccccccctgcccctggacaacctgggcaaggagttcaccgctggagctgaggaggacttccaggtgaccctgcctgaagatgtgggccgggtgctgctgctgcgggtgcacaaggcccctcctgtgctgcccctgctgggccccctggccccagatgcctggttctgccgctggttccagctgaccccaccccggggcggccacctgctcttcccctgctaccagtggctggagggcgccggcaccctggtgctgcaggagggcacagccaaggtgtcctgggccgaccaccaccctgtgctgcagcagcagaggcaggaggagctgcaggcccggcaggagatgtaccagtggaaggcctacaaccctggctggccccactgcctggatgagaagacagtggaggacctggagctgaacatcaagtacagcacagccaagaatgccaacttctacctgcaggccggcagcgcctttgctgagatgaagatcaagggcctgctggacaggaagggcctgtggaggagcctgaatgagatgaagaggatcttcaacttccggaggaccccagctgctgagcacgcctttgagcactggcaggaggatgccttctttgccagccagttcctgaatggcctgaaccctgtgctgatccgccgctgccactacctgcccaagaacttccctgtgacagatgccatggtggcctctgtgctgggccctggcaccagcctgcaggccgagctggagaagggcagcctcttcctggtggaccacggcatcctgagcggcatccagaccaacgtcatcaacgggaagccccagttctctgctgcccccatgaccctgctgtaccagagccctggctgcggccccctgctgcccctggccatccagctgagccagaccccaggccccaacagccccatcttcctgcccacagatgacaagtgggactggctgctggccaagacctgggtgagaaatgctgagttctccttccacgaggccctgacccacctgctgcacagccacctgctgcctgaggtgttcaccctggccaccctgcggcagctgccccactgccaccccctcttcaagagcacaggcatcggcatcgagggcttcagcgagctgatccagaggaacatgaagcagctgaactacagcctgctgtgcctgcctgaggacatccgcacccggggcgtggaggacatccctggctactactacagagatgatggcatgcagatctggggcgctgtggagagatttgtgtctgagatcatcggcatctactaccccagtgatgagagcgtgcaggatgaccgggagctgcaggcctgggtgcgggagatcttcagcaagggcttcctgaaccaggagagcagcggcatccccagcagcctggagacccgggaggccctggtgcagtatgtgaccatggtgatcttcacctgcagcgccaagcatgctgctgtgtctgctggccagtttgacagctgtgcctggatgcccaacctgccccccagcatgcagctgcccccacccaccagcaagggcctggccacctgtgagggcttcatcgccaccctgccccctgtgaatgccacctgtgatgtgatcctggccctgtggctgctgagcaaggagcccggggaccagaggcccctgggcacctacccagatgagcacttcacagaggaggcccccaggaggagcatcgccaccttccagagccggctggcccagatcagccggggcatccaggagaggaaccagggcctggtgctgccctacacctacctggacccccccctgattgagaacagcgtgtccatctag

SEQ ID NO: 31592 - DNA, 2605 bp, Artificial Sequence
  derived and/or modified sequence
gtccactgggcttggagtcagtggcaataaccaggggcaataaccaggcgtgtcccaggggggagccccgctctgcagccctgtgcgccgtagagagctggacttaggctggcagcatggccgagttcagggtcagggtgtccaccggagaagccttcggggctggcacatgggacaaagtgtctgtcagcatcgtggggacccggggagagagccccccactgcccctggacaatctcggcaaggagttcactgcgggcgctgaggaggacttccaggtgacgctcccggaggacgtaggccgagtgctgctgctgcgcgtgcacaaggcgcccccagtgctgcccctgctggggcccctggccccggatgcctggttctgccgctggttccagctgacaccgccgcggggcggccacctcctcttcccctgctaccagtggctggagggggcggggaccctggtgctgcaggagggtacagccaaggtgtcctgggcagaccaccaccctgtgctccagcaacagcgccaggaggagcttcaggcccggcaggagatgtaccagtggaaggcttacaacccaggttggcctcactgcctggatgaaaagacagtggaagacttggagctcaatatcaaatactccacagccaagaatgccaacttttatctacaggctggctctgcttttgcagagatgaaaatcaaggggttgctggaccgcaaggggctctggaggagtctgaatgagatgaaaaggatcttcaacttccggaggaccccagcagctgagcacgcatttgagcactggcaggaggacgccttcttcgcctcccagttcctgaatggtctcaaccctgtcctgatccgccgctgtcactacctcccaaagaacttccccgtcactgatgccatggtggcctcagtgttgggtcctgggaccagcttgcaggctgagctagagaagggctccctgttcttggtggatcacggcatcctctctggcatccagaccaatgtcattaatgggaagcctcagttctctgcggccccaatgaccctgctataccagagcccaggctgcgggccgctgctgcctctcgccatccagctcagccagacccccggcccaaacagccccatcttcctgcccactgatgacaagtgggactggttgctggccaagacctgggtgcgcaatgccgagttctccttccatgaggccctcacgcacctgctgcactcacatctgctgcctgaggtcttcaccctggctaccctgcgtcagctgccccactgccaccctctcttcaagtccacaggcatcggcattgaaggcttctctgagttgatacagaggaacatgaagcagctgaactattctctcctgtgtctgcctgaggatatccggacccgaggagttgaagacatcccaggctactactaccgtgatgatgggatgcagatctggggtgcagtggaacgctttgtctctgaaatcatcggtatctactacccaagtgatgagtctgtccaagatgacagagagctccaggcctgggtcagagagatcttctccaagggcttcctaaaccaggagagctcaggtataccctcctcactggagacccgggaagccctggtgcagtatgtcaccatggtgatattcacctgctccgccaagcatgcggctgtcagtgcagggcagtttgactcctgtgcttggatgcccaacctgccacccagcatgcagctgccaccacccacctccaaaggcctggcaacatgcgagggcttcatagccaccctcccacctgtcaatgccacatgtgatgtcatccttgctctctggttgctgagcaaggagcctggagaccaaaggcccctgggcacctatccggatgagcacttcacagaggaggcccctcggcggagcatcgccaccttccagagccgcctggcccagatctcgaggggcatccaggagcggaaccagggcctggtgctgccctacacctacctagaccctcccctcatcgagaacagcgtctccatctaaatcccaggggaacacaggcccagatgacatccctttgaccacatcgctctaggataactggcacccagagaaaaggactcctcagaaaaaacaggcccccatgtgcctctcctgggacaaccagactctgtaactcacccccaccaccatacacacacacaaaaacagaaacaaaatcaaaacagagaaagcagaaaatctaccaagaacagagtctcaggacagaaccactgagtcttttggaggctccaagcctcaaagtgcccgcagagcccaccttgagggttttgctagttggttttgttttgcgttttacagccgtggggggaagcacataatcccgccccagggcccactagcatccactgattggaccttatggtcacccaactcaaggacagccaccaagaagtggctgccaaagagactgggcgcagtggctcatgcccataatcccagcactttgggagatggaggcgggaaaatcatttgaggtcagaagttcaaggccagcctggacgacatagcgagactccacctctacc

SEQ ID NO: 31593 - DNA, 1944 bp, Artificial Sequence
  derived and/or modified sequence
atggccgagttccgggtgcgggtgagcaccggcgaggccttcggcgctgggacttgggataaagtctccgttagtattgtgggcacacgtggtgaatcccctccacttcccctggacaatctcgggaaggaatttacggcaggcgcggaggaggattttcaggttactctgcccgaggacgtaggtcgagtcctactgctccgcgtgcataaagcacctccagtgcttcccttgctaggtcccctggctcccgacgcctggttttgtcggtggttccaacttacacccccacggggcggacacctcctgttcccttgttatcagtggcttgaaggcgctggcacactagttctgcaggaggggactgcgaaagtcagctgggccgaccaccacccagtcctgcagcaacagagacaggaggaactgcaagcacggcaggagatgtaccagtggaaagcatacaaccccggatggccacactgtctggatgaaaagactgtggaagacctggagctcaacatcaagtattccacggctaaaaatgctaatttctacctccaagcaggcagtgcatttgccgaaatgaaaatcaaaggcctgctggacaggaagggactgtggcggtccctaaatgaaatgaaacggatctttaacttccgcaggacgcccgctgcagagcacgcttttgagcattggcaggaagacgcttttttcgcaagtcaattcctcaacggactcaatcccgtgctgatcaggcgttgtcactatctgcctaagaacttccccgtgacagacgccatggtggcaagtgtgctaggccccgggacttcgctccaagcggaactcgagaaagggtccttgttccttgttgatcatggcatcctttcgggcatccagactaatgtcataaatggtaagcctcaattttctgccgcaccaatgacgctgctctaccagagtccagggtgtggacccttgttgcccctggcaatccagttgtcacagactccaggccccaattcccccatctttttgccaaccgacgataagtgggactggcttctggccaagacctgggtcagaaacgcggagttttcttttcatgaagcactcactcacctgctgcactcccacttgctgccagaagtattcaccttagccaccctgaggcagttgccacactgtcacccactattcaagtctaccggaatcgggatagagggcttctctgaattaatccagcgcaatatgaagcagcttaattactcgttactctgcctgcccgaagatatcagaaccaggggagtggaggatattcccggatattactacagggatgatgggatgcagatatggggcgccgtcgagcgttttgtgagcgaaatcattggaatttattatccgtctgatgaatccgtgcaggacgacagagaattacaagcatgggtgagagagatcttctcaaagggctttctgaaccaggagtcctcgggaatcccatccagtctcgagactcgcgaagcccttgttcagtatgtgacaatggtgatattcacatgctctgccaagcacgccgccgttagtgcaggtcaattcgattcatgcgcatggatgcctaacttgccaccttccatgcagctgccccctccaacctcgaaagggctagccacttgcgagggatttatcgctaccctccctccagttaatgctacttgtgacgtgatcctcgctctctggctactgtctaaggagcccggggatcagcgacctcttggtacataccctgatgaacatttcacagaagaggcaccaagaaggagcatcgccacattccagtctcgcctggctcagatcagtagaggcatacaagagaggaatcagggcctggtactgccgtatacctatctcgatcccccactgatcgagaactctgtgtctatctag

SEQ ID NO: 31594 - DNA, 1944 bp, Artificial Sequence
  derived and/or modified sequence
atggccgaatttcgagtccgggtgagcaccggcgaagcatttggcgcaggaacctgggacaaagtctctgttagtattgtcggaaccaggggcgagtccccgccactgccattagataaccttggcaaagagttcacagccggagcagaagaggactttcaggtcacgttaccagaggacgtgggcagggttctgttgctgagggtccacaaggccccaccagttctccctctcttaggaccccttgctcctgacgcgtggttttgcagatggttccagctcactccacctaggggtggccatctgctgtttccctgttatcaatggttggaaggagctgggaccctagtactccaagagggaacagctaaggtctcttgggccgaccaccaccccgtgctgcagcagcagcggcaggaggagctgcaagccaggcaggagatgtatcaatggaaagcctacaatcccggttggcctcactgcctagatgagaagaccgtggaggatctcgagttgaatatcaaatattccacggcgaaaaacgcaaacttctatcttcaggcaggaagcgcttttgctgaaatgaagattaagggcctcctggaccgtaagggactgtggaggtctttgaacgaaatgaagcggatattcaattttcggcgaacaccagctgccgaacatgcctttgagcactggcaggaagatgcgtttttcgcttcccagttcctcaatgggctgaatccagtgttgatacgtagatgccattatctgccaaagaacttcccagtgacagacgccatggtggcgtcagtgcttggcccaggaacgagccttcaggctgagctggagaagggctcgctcttcctggtggaccacggaatcctttcaggcatccaaaccaacgtgatcaacgggaagcctcaattcagcgccgcacctatgactttgctctatcaatcccccggatgcgggcctctgttacccctggctatccaattatcgcagacccccggacccaatagccccattttcctgcccactgacgacaaatgggactggctgctcgccaagacatgggtcaggaatgccgagttcagtttccatgaagctctgacgcacctgcttcactcacatctgctacctgaggtgtttacactggccactcttagacagctcccgcattgccacccactatttaagtccacaggaatcggaattgaagggttctccgaacttattcagagaaatatgaagcagctcaattactccctcctctgcctgccagaggatatccgcacccgcggtgtcgaggacatcccagggtattattacagagacgatggaatgcaaatttggggagccgtagaacgttttgtgtcggagattatagggatctactatccaagtgacgagtctgttcaagacgacagggagctgcaggcatgggttcgcgagatcttctcgaaaggcttcctcaatcaagaatcctcaggaatcccctcaagtctcgagactagggaagccttggtgcagtatgtaacaatggtaatctttacatgttcggcaaagcacgccgcagtgtccgcagggcagtttgatagctgcgcatggatgcccaatttgcccccttcaatgcagctcccaccccctacttcaaaaggcttagctacatgtgagggcttcatcgcaactctgccccctgtgaatgctacatgcgacgtcatactggcactgtggctgctctccaaagagccaggcgatcagcgcccactggggacatacccggatgaacacttcacagaggaggctccacggcgatccatagctacttttcagagcaggcttgcgcagatctcccggggtatccaagaaaggaatcagggactggtcttgccgtatacctacttggaccctcccctgatcgaaaactcagtatctatatag

SEQ ID NO: 31595 - protein, 602 aa, Artificial Sequence
  derived and/or modified sequence
MAEFRVRVSTGEAFGAGTWDKVSVSIVGTRGESPPLPLDNLGKEFTAGAEEDFQVTLPEDVGRVLLLRVHKAPPVLPLLGPLAPDAWFCRWFQLTPPRGGHLLFPCYQWLEGAGTLVLQEGTAKVSWADHHPVLQQQRQEELQARQEMYQWKAYNPGWPHCLDEKTVEDLELNIKYSTAKNANFYLQAGSAFAEMKIKGLLDRKGLWRSLNEMKRIFNFRRTPAAEHAFEHWQEDAFFASQFLNGLNPVLIRRCHYLPKNFPVTDAMVASVLGPGTSLQAELEKGSLFLVDHGILSGIQTNVINGKPQFSAAPMTLLYQSPGCGPLLPLAIQLSQTPGPNSPIFLPTDDKWDWLLAKTWVRNAEFSFHEALTHLLHSHLLPEVFTLATLRQLPHCHPLFKSTGIGIEGFSELIQRNMKQLNYSLLCLPEDIRTRGVEDIPGYYYRDDGMQIWGIPSSLETREALVQYVTMVIFTCSAKHAAVSAGQFDSCAWMPNLPPSMQLPPPTSKGLATCEGFIATLPPVNATCDVILALWLLSKEPGDQRPLGTYPDEHFTEEAPRRSIATFQSRLAQISRGIQERNQGLVLPYTYLDPPLIENSVSI

SEQ ID NO: 31596 - DNA, 1809 bp, Artificial Sequence
  derived and/or modified sequence
atggccgagttcagagtgagagtgagcaccggcgaggccttcggcgccggcacctgggacaaggtgagcgtgagcatcgtgggcaccagaggcgagagcccccccctgcccctggacaacctgggcaaggagttcaccgccggcgccgaggaggacttccaggtgaccctgcccgaggacgtgggcagagtgctgctgctgagagtgcacaaggccccccccgtgctgcccctgctgggccccctggcccccgacgcctggttctgcagatggttccagctgaccccccccagaggcggccacctgctgttcccctgctaccagtggctggagggcgccggcaccctggtgctgcaggagggcaccgccaaggtgagctgggccgaccaccaccccgtgctgcagcagcagagacaggaggagctgcaggccagacaggagatgtaccagtggaaggcctacaaccccggctggccccactgcctggacgagaagaccgtggaggacctggagctgaacatcaagtacagcaccgccaagaacgccaacttctacctgcaggccggcagcgccttcgccgagatgaagatcaagggcctgctggacagaaagggcctgtggagaagcctgaacgagatgaagagaatcttcaacttcagaagaacccccgccgccgagcacgccttcgagcactggcaggaggacgccttcttcgccagccagttcctgaacggcctgaaccccgtgctgatcagaagatgccactacctgcccaagaacttccccgtgaccgacgccatggtggccagcgtgctgggccccggcaccagcctgcaggccgagctggagaagggcagcctgttcctggtggaccacggcatcctgagcggcatccagaccaacgtgatcaacggcaagccccagttcagcgccgcccccatgaccctgctgtaccagagccccggctgcggccccctgctgcccctggccatccagctgagccagacccccggccccaacagccccatcttcctgcccaccgacgacaagtgggactggctgctggccaagacctgggtgagaaacgccgagttcagcttccacgaggccctgacccacctgctgcacagccacctgctgcccgaggtgttcaccctggccaccctgagacagctgccccactgccaccccctgttcaagagcaccggcatcggcatcgagggcttcagcgagctgatccagagaaacatgaagcagctgaactacagcctgctgtgcctgcccgaggacatcagaaccagaggcgtggaggacatccccggctactactacagagacgacggcatgcagatctggggcatccccagcagcctggagaccagagaggccctggtgcagtacgtgaccatggtgatcttcacctgcagcgccaagcacgccgccgtgagcgccggccagttcgacagctgcgcctggatgcccaacctgccccccagcatgcagctgcccccccccaccagcaagggcctggccacctgcgagggcttcatcgccaccctgccccccgtgaacgccacctgcgacgtgatcctggccctgtggctgctgagcaaggagcccggcgaccagagacccctgggcacctaccccgacgagcacttcaccgaggaggcccccagaagaagcatcgccaccttccagagcagactggcccagatcagcagaggcatccaggagagaaaccagggcctggtgctgccctacacctacctggacccccccctgatcgagaacagcgtgagcatctag

SEQ ID NO: 31597 - DNA, 2470 bp, Artificial Sequence
  derived and/or modified sequence
gtccactgggcttggagtcagtggcaataaccaggggcaataaccaggcgtgtcccaggggggagccccgctctgcagccctgtgcgccgtagagagctggacttaggctggcagcatggccgagttcagggtcagggtgtccaccggagaagccttcggggctggcacatgggacaaagtgtctgtcagcatcgtggggacccggggagagagccccccactgcccctggacaatctcggcaaggagttcactgcgggcgctgaggaggacttccaggtgacgctcccggaggacgtaggccgagtgctgctgctgcgcgtgcacaaggcgcccccagtgctgcccctgctggggcccctggccccggatgcctggttctgccgctggttccagctgacaccgccgcggggcggccacctcctcttcccctgctaccagtggctggagggggcggggaccctggtgctgcaggagggtacagccaaggtgtcctgggcagaccaccaccctgtgctccagcaacagcgccaggaggagcttcaggcccggcaggagatgtaccagtggaaggcttacaacccaggttggcctcactgcctggatgaaaagacagtggaagacttggagctcaatatcaaatactccacagccaagaatgccaacttttatctacaggctggctctgcttttgcagagatgaaaatcaaggggttgctggaccgcaaggggctctggaggagtctgaatgagatgaaaaggatcttcaacttccggaggaccccagcagctgagcacgcatttgagcactggcaggaggacgccttcttcgcctcccagttcctgaatggtctcaaccctgtcctgatccgccgctgtcactacctcccaaagaacttccccgtcactgatgccatggtggcctcagtgttgggtcctgggaccagcttgcaggctgagctagagaagggctccctgttcttggtggatcacggcatcctctctggcatccagaccaatgtcattaatgggaagcctcagttctctgcggccccaatgaccctgctataccagagcccaggctgcgggccgctgctgcctctcgccatccagctcagccagacccccggcccaaacagccccatcttcctgcccactgatgacaagtgggactggttgctggccaagacctgggtgcgcaatgccgagttctccttccatgaggccctcacgcacctgctgcactcacatctgctgcctgaggtcttcaccctggctaccctgcgtcagctgccccactgccaccctctcttcaagtccacaggcatcggcattgaaggcttctctgagttgatacagaggaacatgaagcagctgaactattctctcctgtgtctgcctgaggatatccggacccgaggagttgaagacatcccaggctactactaccgtgatgatgggatgcagatctggggtataccctcctcactggagacccgggaagccctggtgcagtatgtcaccatggtgatattcacctgctccgccaagcatgcggctgtcagtgcagggcagtttgactcctgtgcttggatgcccaacctgccacccagcatgcagctgccaccacccacctccaaaggcctggcaacatgcgagggcttcatagccaccctcccacctgtcaatgccacatgtgatgtcatccttgctctctggttgctgagcaaggagcctggagaccaaaggcccctgggcacctatccggatgagcacttcacagaggaggcccctcggcggagcatcgccaccttccagagccgcctggcccagatctcgaggggcatccaggagcggaaccagggcctggtgctgccctacacctacctagaccctcccctcatcgagaacagcgtctccatctaaatcccaggggaacacaggcccagatgacatccctttgaccacatcgctctaggataactggcacccagagaaaaggactcctcagaaaaaacaggcccccatgtgcctctcctgggacaaccagactctgtaactcacccccaccaccatacacacacacaaaaacagaaacaaaatcaaaacagagaaagcagaaaatctaccaagaacagagtctcaggacagaaccactgagtcttttggaggctccaagcctcaaagtgcccgcagagcccaccttgagggttttgctagttggttttgttttgcgttttacagccgtggggggaagcacataatcccgccccagggcccactagcatccactgattggaccttatggtcacccaactcaaggacagccaccaagaagtggctgccaaagagactgggcgcagtggctcatgcccataatcccagcactttgggagatggaggcgggaaaatcatttgaggtcagaagttcaaggccagcctggacgacatagcgagactccacctctacc

SEQ ID NO: 31598 - DNA, 1809 bp, Artificial Sequence
  derived and/or modified sequence
atggccgagttccgtgtgagggtcagtacaggcgaggccttcggagctggtacctgggataaagtgtcagtgagcatcgtcggtactaggggagaaagcccgcctctcccgttagataatctggggaaggagtttactgcgggtgcggaagaagacttccaggtcaccctccctgaagacgtcgggagagtattgctgctgagggtgcacaaggcgcccccggtgctgcccctgcttggaccccttgctcctgatgcctggttctgcaggtggttccaactcaccccgccgagaggcggccatctgcttttcccctgttatcagtggctggaaggagccggtacactggtgttacaagagggcaccgctaaggtgtcctgggctgatcaccacccagtgctgcagcagcagaggcaggaagagttgcaggcccggcaagagatgtaccagtggaaagcctacaatcctggttggccacactgtctggacgagaagactgttgaggatcttgagctgaatatcaagtattcgacggctaagaacgcaaacttctatttgcaggccggcagcgccttcgctgaaatgaagatcaaggggctgctggatagaaagggactgtggcgatctcttaacgaaatgaaaaggatattcaactttcggcgtacccctgcggccgagcacgcgttcgaacattggcaggaggatgccttctttgccagccagttcctgaacgggctcaacccagttcttattaggcgttgtcactatctgccaaagaattttccggtaaccgacgccatggtggccagcgtgttgggtccaggtacctcgttgcaggcagaactggaaaaggggtctctcttcttagtcgaccatgggatcctaagcggtattcagaccaacgtgatcaatggaaaaccccagttctctgccgcccccatgacactgttgtaccagtccccgggatgcggacctctgctgcccctcgcaatccagctttcacagacgcccggccctaactcccctatcttccttccaaccgacgacaaatgggactggctactcgcaaagacctgggtgcgcaatgccgagttttcttttcacgaagcactgactcacctgttgcatagccacctgctccccgaagtcttcactttggctactcttcgccagctgcctcactgccaccctctgtttaagtctactggcatcggaatcgaaggattctctgaacttatccagcggaatatgaaacagcttaattacagtctgctgtgtctaccggaagacattcgcacgcggggcgtggaggatatacccggctactactatcgagacgatggaatgcaaatctggggtatcccctccagtctagagacccgcgaggctctcgtgcagtacgtgacaatggtgattttcacatgttccgcgaagcatgctgctgtgtctgcaggccaattcgactcctgtgcgtggatgcctaacctgccgccgtctatgcaattaccaccccccaccagtaaaggcctcgccacatgcgaggggttcattgccactctcccgcccgtgaacgctacatgcgacgtcatccttgctctgtggctgctgtcaaaggaaccgggggaccagcggcccctgggtacttacccagatgagcacttcactgaagaagcccctcgcagaagcattgcgactttccaatccagacttgcccagatatcacggggaatccaggagcgcaaccaaggtctcgtgctcccatacacatacctggacccccctctgatcgagaattcagtgtctatatag

SEQ ID NO: 31599 - DNA, 1809 bp, Artificial Sequence
  derived and/or modified sequence
atggctgagtttcgggtgcgagtttccacgggagaagccttcggagccggaacgtgggataaagtgtctgtctcgattgtggggactcggggagaaagtcccccattaccactggacaacctgggcaaggagttcacagctggggcagaggaagactttcaggttacactaccggaggacgttggccgggtgttgctcttgcgcgttcataaggcgcctccggtgctgccactcttgggtcctctggctccagatgcatggttttgtcgctggttccagctcacaccccccagaggtgggcacctgctgttcccatgctaccagtggctggaaggagctggcactttagtcctgcaggagggaaccgcaaaggtgtcgtgggccgatcaccatcctgtcttacagcagcagagacaggaagaactccaggcccgccaagaaatgtaccagtggaaggcctacaaccccggctggccccattgcctggacgaaaagacagtcgaagatttggaacttaacattaagtactccactgccaagaatgccaatttttacctgcaggcagggagtgctttcgcagagatgaaaatcaaagggttacttgaccgaaagggtctctggcgctctctcaacgagatgaagcggatattcaattttcgcagaacccctgcggccgagcatgcattcgaacattggcaggaagatgcgttttttgcatctcagttcctgaacggactgaatcccgtgctcattcgtcggtgccactacttgcctaaaaactttccggttactgacgcaatggtggctagcgtcctaggacccggtacgtccctgcaggctgagcttgagaagggctctctgttcctggtagaccatggtatcttgagcggtatacaaacaaatgtgatcaacggcaagcctcagttttccgctgccccgatgaccttactatatcagtctcccgggtgtgggcctctgctgcctttagcaatccagctgtctcagacacctggccctaatagtccgatctttctacctacagacgataaatgggactggttgcttgctaaaacctgggttcgtaacgcagagttctcattccacgaagcactgacccatttattacatagccatcttctccccgaggtgtttacgctggccacgttacgtcagctcccgcactgccatcccctgttcaagtccaccggcatcggaatcgagggcttcagcgaactgattcaacgtaacatgaagcagctgaactacagtcttctgtgtttgcctgaagacatcaggacaaggggcgtcgaggatataccagggtactattatcgagatgatggtatgcagatctgggggatcccttccagcctcgaaactagggaagcgcttgtacagtatgtgacaatggtaattttcacatgttcagcaaaacacgcagccgtctctgctggccaatttgattcctgtgcctggatgcctaacctacccccctcgatgcaattgcctccaccaacatccaagggtttggcaacatgcgagggttttatcgcaaccctgccccccgtgaatgccacatgtgacgtgattctggcattgtggctccttagcaaagaaccaggcgaccagcgccctctgggcacttaccctgatgagcactttacggaggaggcaccaaggaggagcatcgcgactttccagtcgcggctggctcagatttcacgcggtattcaggagaggaatcaaggcctcgtcttgccatacacctacctggacccgcccttaatcgaaaactctgtctccatatag

SEQ ID NO: 31600 - DNA, 1809 bp, Artificial Sequence
  derived and/or modified sequence
atggccgagttccgggtgcgggtgtccactggagaggccttcggggccggcacctgggacaaggtgtctgtgtccatcgtgggcaccagaggagagagcccccccctgcccctggacaacctgggcaaggagttcaccgctggagctgaggaggacttccaggtgaccctgcctgaagatgtgggccgggtgctgctgctgcgggtgcacaaggcccctcctgtgctgcccctgctgggccccctggccccagatgcctggttctgccgctggttccagctgaccccaccccggggcggccacctgctcttcccctgctaccagtggctggagggcgccggcaccctggtgctgcaggagggcacagccaaggtgtcctgggccgaccaccaccctgtgctgcagcagcagaggcaggaggagctgcaggcccggcaggagatgtaccagtggaaggcctacaaccctggctggccccactgcctggatgagaagacagtggaggacctggagctgaacatcaagtacagcacagccaagaatgccaacttctacctgcaggccggcagcgcctttgctgagatgaagatcaagggcctgctggacaggaagggcctgtggaggagcctgaatgagatgaagaggatcttcaacttccggaggaccccagctgctgagcacgcctttgagcactggcaggaggatgccttctttgccagccagttcctgaatggcctgaaccctgtgctgatccgccgctgccactacctgcccaagaacttccctgtgacagatgccatggtggcctctgtgctgggccctggcaccagcctgcaggccgagctggagaagggcagcctcttcctggtggaccacggcatcctgagcggcatccagaccaacgtcatcaacgggaagccccagttctctgctgcccccatgaccctgctgtaccagagccctggctgcggccccctgctgcccctggccatccagctgagccagaccccaggccccaacagccccatcttcctgcccacagatgacaagtgggactggctgctggccaagacctgggtgagaaatgctgagttctccttccacgaggccctgacccacctgctgcacagccacctgctgcctgaggtgttcaccctggccaccctgcggcagctgccccactgccaccccctcttcaagagcacaggcatcggcatcgagggcttcagcgagctgatccagaggaacatgaagcagctgaactacagcctgctgtgcctgcctgaggacatccgcacccggggcgtggaggacatccctggctactactacagagatgatggcatgcagatctggggcatccccagcagcctggagacccgggaggccctggtgcagtatgtgaccatggtgatcttcacctgcagcgccaagcacgccgctgtgtctgctggccagtttgacagctgtgcctggatgcccaacctgcccccatccatgcagctgcccccacccaccagcaagggcctggccacctgtgagggcttcatcgccaccctgccccctgtgaatgccacctgtgatgtgatcctggccctgtggctgctgagcaaggagcccggggaccagaggcccctgggcacctacccagatgagcacttcacagaggaggccccccggcgcagcatcgccaccttccagagccggctggcccagatcagccggggcatccaggagaggaaccagggcctggtgctgccctacacctacctggacccccccctgattgaaaattctgtgtccatctag

SEQ ID NO: 31601 - DNA, 1809 bp, Artificial Sequence
  derived and/or modified sequence
atggccgagttccgggtgcgggtgagcaccggcgaggccttcggcgccggtacttgggataaagttagcgttagcattgtagggacaaggggcgaaagcccacctcttcctctggacaacctgggtaaggagtttaccgcaggggccgaggaggactttcaagtaaccctgcccgaagatgtgggcagggtgttattgctaagagtccacaaggcgccaccggtattgccccttcttggccctttggcccctgatgcctggttctgtcgctggttccaattgaccccccccaggggaggacacctgttattcccttgttaccagtggctagagggcgcgggtacactggtgctgcaagagggtaccgcaaaggtaagttgggccgaccatcaccccgtgctgcagcagcagcgacaggaagaactccaagcacggcaggagatgtaccagtggaaagcctataaccccgggtggccacactgccttgacgagaagacggtagaggatttggagcttaatataaaatatagcacagcgaagaatgccaacttctacctacaggccgggtcagccttcgccgaaatgaaaatcaagggactcctcgatagaaagggtctgtggcgcagcctcaacgaaatgaagagaatcttcaacttccggaggacccccgctgctgagcatgcttttgagcattggcaggaagatgccttttttgccagtcagtttttgaatggcctcaatccagtcctgattcgcaggtgccactacctgcctaagaactttcctgttacagacgcaatggttgcttccgtgctgggtcctggcaccagcctgcaagctgaactggagaagggtagcctatttcttgtcgatcacggaattctctcaggtatccagacgaatgtaattaatgggaaaccgcagttttcagccgcaccaatgactctgttgtaccagagcccgggatgcggccccctgttacctctggccatacaattgagccagaccccaggccctaatagtcctatctttctgcctacagacgacaagtgggactggttgctggcaaagacctgggtccgaaacgccgagttctcttttcacgaggcgcttacacacctcctccatagccatctccttcctgaagtgttcacattagccacgctcaggcagctgccccattgccatccactgttcaagtctacaggcatcgggattgaaggtttcagtgagctaatacagcgcaacatgaaacaactgaactacagcctgctgtgtctgcccgaggacattcggactaggggtgtcgaggacattcctggttattactaccgcgacgatgggatgcagatctggggtattccctcaagcctagaaacccgggaggctctggtgcaatatgtaaccatggtcatcttcacatgcagtgccaaacatgccgccgtgtcagccggacaatttgattcctgtgcatggatgccgaatctcccgccaagcatgcaattgccacccccaacgtccaagggcctagccacctgtgagggcttcattgcaactttaccaccagtcaacgccacttgcgacgtgatccttgcactttggctgctgtcaaaagaacccggcgatcagcgcccccttggcacttaccccgatgagcattttaccgaagaggctccccgcaggtccatcgccaccttccagagccgcctggcacagatttcccggggcatccaggaacgcaaccaggggttggttctgccctacacttacctggatccacctctgattgagaattccgtgtctatctag

SEQ ID NO: 31602 - DNA, 1809 bp, Artificial Sequence
  derived and/or modified sequence
atggccgagttccgggtgcgggtgagcaccggcgaggccttcggcgctggcacgtgggataaagtctctgtcagcatcgtcggaactcggggcgagagtccgccccttcccctggacaatttagggaaggagttcactgcgggcgccgaagaggacttccaagtgaccctccctgaagatgtggggagagttctgctgctgagggtccacaaggccccacccgtgctgcctctgcttggaccgctcgcccccgatgcatggttctgcaggtggttccaactgactccaccaagagggggccatcttttattcccctgttatcagtggctggaaggtgctggcacactggtgcttcaggaggggacagccaaggtgagctgggctgatcaccaccctgttcttcagcaacagcgacaagaagagcttcaggcacgacaggagatgtaccaatggaaagcttacaacccgggatggcctcattgcctggacgagaagaccgtggaggacctggagttaaacattaaatatagtacagccaagaacgccaacttttacctgcaggcagggagcgctttcgccgaaatgaaaattaagggactcttagatagaaagggtctttggaggtcgctgaacgaaatgaaacgtatttttaacttcagacggacccccgcagccgagcacgccttcgagcattggcaagaagatgccttctttgccagccaattcttgaacggcctgaaccccgtactcatccgccggtgtcactatttgcctaagaattttcctgtcactgacgctatggtggcatccgtgctggggcccggtacctccctgcaagccgagctggaaaaagggagcctgttcttggtcgaccacggtatactgtctggtattcagacaaatgtcattaacggaaagccacagttctctgccgcccccatgacgcttctgtatcagagccctggctgcggcccactgcttccgctggccatacagttaagccagacccccggcccgaattctccgattttccttcccactgatgacaagtgggattggctattagccaaaacctgggtgaggaatgccgaattcagcttccatgaggcattaactcacctattacatagccatctcctcccagaagtctttaccctggccaccctgaggcagctgccacattgtcaccctctgttcaagtctaccggaatagggattgagggatttagtgaactgattcaacgcaacatgaaacagctgaattactccctgctgtgcctacccgaggacatcagaacaagaggtgtggaagatattcccgggtattattatcgcgatgacgggatgcagatctgggggataccgagttcgttggagactcgggaggccttggtgcagtacgtgaccatggtgatctttacctgttcagccaaacacgcagcagttagcgctggccagttcgactcctgcgcatggatgccgaacttacctccctcaatgcagctccccccacccaccagcaaaggcctcgccacttgtgagggctttattgcaacgctgccacccgtcaacgcgacatgcgatgtgatccttgcactgtggcttttgagtaaagagcccggggatcagagacctcttggaacctatccagatgaacacttcaccgaggaggcaccaaggcgtagcattgctacctttcagagcagactcgcgcagataagcaggggaatccaggagagaaatcaaggactggtgcttccctatacatacctcgacccacccttgatcgagaactcagtttccatctag

SEQ ID NO: 31603 - DNA, 1809 bp, Artificial Sequence
  derived and/or modified sequence
atggccgagttcagggtacgtgtgagtactggggaagccttcggtgcgggaacctgggataaggtgtcagtctcaatagtggggacacgtggcgagagcccccctcttcctctcgataacctgggcaaggagttcaccgcaggggcagaagaggacttccaggtcacattgcccgaggatgtcgggagagtgctcctgctgcgcgtgcataaggcaccacccgtccttcccttactgggaccactcgcccctgatgcttggttttgccgctggtttcagttgaccccgccaagaggcggacacctcctttttccttgctatcagtggttagagggagcaggcaccctcgtgttacaagagggtaccgcaaaggtgagttgggctgatcaccacccagtactccaacagcaaaggcaggaggagctccaagcacgccaggaaatgtaccagtggaaagcctataatcctggatggccccactgtctggacgaaaaaactgtcgaagacctggagttgaacataaaatactcaacagcaaagaacgctaacttctatctgcaggccggttccgcctttgccgagatgaaaatcaagggccttctcgatcggaagggtctgtggcggagtctgaacgaaatgaagaggatattcaattttagaagaacccctgcggcagaacatgcatttgagcactggcaggaggatgccttcttcgccagccagtttctgaatgggttgaaccctgtgctcatccggaggtgccattatttaccaaaaaacttcccagtcacagatgctatggtagcatcggtactaggacctggcacatcactgcaggctgaacttgaaaaggggtctctctttctggttgatcacggtatcctgtccggcattcaaactaatgttattaatggaaagcctcagttttctgcggctcctatgacactcctctatcagtcccccggttgtggccctctcttgcctttagccattcaattgagccagacaccaggtcctaactctcccatcttcctgccgactgacgacaagtgggattggctcctcgctaaaacttgggtgagaaacgcagagttctcatttcatgaggcattgacacacttgctgcactctcacctgctccccgaggttttcactctggctacactgaggcagttacctcattgccatcctctgtttaagtctactggcatcggaatagaagggttttcggagctaatacagcgaaacatgaagcagctcaactacagcctcttgtgcctgcctgaagatatcaggactcggggagtggaggatatacccggatactactatcgtgatgatggcatgcaaatttgggggatcccctcatccctggagacgcgcgaagcgctggtgcagtacgtaactatggttattttcacttgctccgcaaagcacgccgctgtctccgcaggacagtttgactcgtgcgcctggatgcccaatttaccaccatctatgcagctccctccccctactagtaaggggctcgcgacgtgcgaaggttttatcgccaccctacctccagtgaatgctacttgtgacgtgatactggctctgtggctcctgagcaaggagccaggagaccaaagacccctgggcacttacccggatgaacactttaccgaggaagcccctaggagaagtatagctactttccagtctcgtctggcccaaatatcccggggaatccaagaaagaaatcagggtctggtgctaccctacacttacctggacccaccccttattgagaactctgtatccatttag

SEQ ID NO: 31604 - DNA, 1809 bp, Artificial Sequence
  derived and/or modified sequence
atggccgagttcagggtgagggtttcaactggggaggcattcggtgctggaacttgggacaaggtgtcggtgtctattgtgggtacccggggtgaatctccaccccttcctctggacaatttgggaaaggagttcacggccggtgcagaggaggattttcaggtgaccttaccagaggacgtgggacgcgtcctgcttctgcgcgttcacaaggcgcctccagtgctgccgctgctgggacccctggccccagacgcctggttttgccgctggtttcaactgacacccccacgaggtggccatctgctgtttccatgctaccagtggctcgagggagcaggcacgctcgtgctccaggaaggcacagcaaaagtctcttgggccgaccaccaccctgtgttacagcagcagcgccaggaagaacttcaagctagacaggagatgtatcaatggaaggcctataaccccggttggccccattgcctggacgagaagacagtggaggatctggaattaaacatcaaatactcaacagctaagaatgcaaatttctacctgcaagccggttcagcattcgctgagatgaaaatcaaggggcttctggaccgcaagggactgtggagaagtctgaatgagatgaaaagaatttttaattttagacgcaccccggctgccgaacatgcattcgagcactggcaagaggatgcatttttcgcttcccaattcttgaacggtctcaaccctgttttgatcagaagatgccattaccttcctaagaacttcccggtcacggacgcaatggtagctagcgtactgggtccagggacatcactccaggccgagcttgagaaggggagtctgtttctggttgaccacggtattttatccggtattcagacgaatgtgataaatggcaaaccacagttctctgccgcacctatgacactgttataccagtcccccggatgtgggccactgctgccgctcgcaattcagctatcgcaaactcctgggcctaattctccaattttcctgcctacagacgacaagtgggactggctgctcgctaagacctgggttcggaatgctgagttctcatttcacgaggctctcacccaccttctgcactcgcaccttctgcccgaggtattcactctcgccacacttcgtcaactgccgcactgtcaccccctcttcaaaagcactggtatcggaatagagggtttttctgagttgatccagaggaatatgaagcagctgaactactccttattgtgcctacctgaggatatcagaacacgtggggtggaagacatccccggatactactatcgagatgatggcatgcagatctggggtattccttcaagcttggagacgagggaagcgctggtgcaatacgtcacaatggtgattttcacgtgctctgccaagcacgccgcagtgagtgcaggacagtttgactcatgcgcctggatgccaaacctcccccctagcatgcagcttcctccgccaacgagcaaaggtctggccacctgcgaaggatttatcgcaacgctgccgccagtcaacgccacatgtgatgtgatcctcgccctttggctactgagcaaagagcctggggatcaacgcccactcggtacctacccggatgaacacttcactgaagaagctcctagacggagtatcgctacctttcagagccgcctagcccagatctcaagaggaatacaggagcgtaaccagggactggtgctgccctacacgtatctggatcctcccctgatcgaaaactcagtgtcaatctag

SEQ ID NO: 31605 - DNA, 1809 bp, Artificial Sequence
  derived and/or modified sequence
atggccgagttcagggtcagggtgtccaccggagaagccttcggggctggcacatgggacaaagtgtctgtcagcatcgtggggacccggggagagagccccccactgcccctggacaatctcggcaaggagttcactgcgggcgctgaggaggacttccaggtgacgctcccggaggacgtaggccgagtgctgctgctgcgcgtgcacaaggcgcccccagtgctgcccctgctggggcccctggccccggatgcctggttctgccgctggttccagctgacaccgccgcggggcggccacctcctcttcccctgctaccagtggctggagggggcggggaccctggtgctgcaggagggtacagccaaggtgtcctgggcagaccaccaccctgtgctccagcaacagcgccaggaggagcttcaggcccggcaggagatgtaccagtggaaggcttacaacccaggttggcctcactgcctggatgaaaagacagtggaagacttggagctcaatatcaaatactccacagccaagaatgccaacttttatctacaggctggctctgcttttgcagagatgaaaatcaaggggttgctggaccgcaaggggctctggaggagtctgaatgagatgaaaaggatcttcaacttccggaggaccccagcagctgagcacgcatttgagcactggcaggaggacgccttcttcgcctcccagttcctgaatggtctcaaccctgtcctgatccgccgctgtcactacctcccaaagaacttccccgtcactgatgccatggtggcctcagtgttgggtcctgggaccagcttgcaggctgagctagagaagggctccctgttcttggtggatcacggcatcctctctggcatccagaccaatgtcattaatgggaagcctcagttctctgcggccccaatgaccctgctataccagagcccaggctgcgggccgctgctgcctctcgccatccagctcagccagacccccggcccaaacagccccatcttcctgcccactgatgacaagtgggactggttgctggccaagacctgggtgcgcaatgccgagttctccttccatgaggccctcacgcacctgctgcactcacatctgctgcctgaggtcttcaccctggctaccctgcgtcagctgccccactgccaccctctcttcaagtccacaggcatcggcattgaaggcttctctgagttgatacagaggaacatgaagcagctgaactattctctcctgtgtctgcctgaggatatccggacccgaggagttgaagacatcccaggctactactaccgtgatgatgggatgcagatctggggtataccctcctcactggagacccgggaagccctggtgcagtatgtcaccatggtgatattcacctgctccgccaagcatgcggctgtcagtgcagggcagtttgactcctgtgcttggatgcccaacctgccacccagcatgcagctgccaccacccacctccaaaggcctggcaacatgcgagggcttcatagccaccctcccacctgtcaatgccacatgtgatgtcatccttgctctctggttgctgagcaaggagcctggagaccaaaggcccctgggcacctatccggatgagcacttcacagaggaggcccctcggcggagcatcgccaccttccagagccgcctggcccagatctcgaggggcatccaggagcggaaccagggcctggtgctgccctacacctacctagaccctcccctcatcgagaacagcgtctccatctaa

SEQ ID NO: 31606 - protein, 272 aa, Artificial Sequence
  derived and/or modified sequence
MGSLFPLSLLFFLAAAYPGVGSALGRRTKRAQSPKGSPLAPSGTSVPFWVRMSPEFVAVQPGKSVQLNCSNSCPQPQNSSLRTPLRQGKTLRGPGWVSYQLLDVRAWSSLAHCLVTCAGKTRWATSRITAYSVPGGLLGGDPEAWKPGHLFRKPGALHRPGSGQRDLDLRVCCWTPRLLAARDLPRAPQSRRPGGPQQLGTHYTDARLEPRAHSFGLRFHRCPCRDPPHCGRCVPMQVPSYEVPGVKGDVLCRLSEKKRNMKQSGEMAIHGG

SEQ ID NO: 31607 - DNA, 819 bp, Artificial Sequence
  derived and/or modified sequence
atggggtctctgtttcctctttccttgctcttcttccttgccgcggcctatccgggcgtgggatcagccctgggcagacggacgaaaagggcgcaatcccctaaagggtctccactggccccatccggcacttcagtgcccttttgggtgcgcatgtcacccgagttcgtcgccgtccagcctgggaagagcgtgcaactcaactgtagtaactcatgcccacaaccgcagaattcttcgctgaggaccccattacgacaaggtaagactctacgggggcccgggtgggtcagctaccagctgttggatgtgagagcttggtcctctctcgcccactgcctggtgacctgtgccgggaagactaggtgggccacttcaaggataacagcctattcggtgcccggtggtctacttgggggagaccctgaagcctggaaacctggacacctgttccgaaaacccggggcactgcatagaccaggcagtggccaaagagaccttgacttaagggtctgctgctggactccgcggctgctggctgctcgtgacttacctcgagccccccaatccaggagacccgggggtccccagcaacttggcacccattatactgacgcaagattggaaccaagggcacattccttcggcttgaggttccaccgctgcccctgcagagatcccccacactgcggaagatgtgtacctatgcaggtgccctcatacgaagtaccaggggtaaagggggatgtgctttgcagattatcagagaagaagcggaacatgaagcaatccggagagatggccattcatggtggatag

SEQ ID NO: 31608 - DNA, 1196 bp, Artificial Sequence
  derived and/or modified sequence
gctctctggcgcggggccccttagtccgggctttttgccatggggtctctgttccctctgtcgctgctgttttttttggcggccgcctacccgggagttgggagcgcgctgggacgccggactaagcgggcgcaaagccccaagggtagccctctcgcgccctccgggacctcagtgcccttctgggtgcgcatgagcccggagttcgtggctgtgcagccggggaagtcagtgcagctcaattgcagcaacagctgtccccagccgcagaattccagcctccgcaccccgctgcggcaaggcaagacgctcagagggccgggttgggtgtcttaccagctgctcgacgtgagggcctggagctccctcgcgcactgcctcgtgacctgcgcaggaaaaacacgctgggccacctccaggatcaccgcctacagtgttcccggtgggctacttggtggtgaccctgaggcatggaagccgggtcatctattccgaaagcctggagcgcttcaccggcctggatctggccaacgtgaccttgacctacgagtttgctgctggaccccgcgacttctggcagcccgtgatctgccacgcgcgcctcaatctcgacggcctggtggtccgcaacagctcggcacccattacactgatgctcgcttggagccccgcgcccacagctttggcctccggttccatcgctgcccttgtagggatcctcctcactgtgggcgctgcgtacctatgcaagtgcctagctatgaagtcccaggcgtaaagggggatgttctatgccggctgagcgagaaaaagaggaatatgaaacaatctggggaaatggccatacatggtggctgacgcctgtaatcccagcactttgggaggccgaggcaggagaatcgcttgagcccaggagttcgagaccagcctggacaacatagtgagaccccgtctatgcaaaaaatacacaaattagcctggtgtggtggcccgcacctgtggtcccagctacccgggaggctgagttgggaggatcctttgagccctgaaagtcgaggttgcagtgagccttgatcgtgccactgcactccagcctgggggacagagcacgaccctgtctccaaaaataaaataaaaataaaaataaatattggcgggggaaccctctggaatcaataaaggcttccttaaccagc

SEQ ID NO: 31609 - DNA, 819 bp, Artificial Sequence
  derived and/or modified sequence
atgggcagcctcttccccctgagcctgctcttcttcctggccgccgcctacccaggagtgggcagcgccctgggccgccgcaccaagagggcccagagccccaagggcagccccctggcccccagcggcacctctgtgcccttctgggtgaggatgagccctgagtttgtggccgtgcagcccgggaagtctgtgcagctgaactgcagcaacagctgcccccagccccagaacagcagcctgcggacccccctgcggcagggcaagaccctgcggggccctggctgggtgtcctaccagctgctggatgtgcgggcctggagcagcctggcccactgcctggtgacctgtgccggcaagacccgctgggccaccagccgcatcacagcctacagcgtgcctgggggcctgctgggcggggaccctgaggcctggaagccaggccacctgttcaggaagccaggggccctgcaccggcccggcagcggccagagggacctggacctgcgggtgtgctgctggaccccccggctgctggccgcccgggacctgccccgggccccccagagcagaagacctgggggcccccagcagctgggcacccactacacagatgcccggctggagccccgggcccacagctttggcctgcgcttccaccgctgcccctgccgggaccccccccactgcggccgctgtgtgcccatgcaggtgcccagctatgaggtgcctggggtgaagggagatgtgctgtgccgcctgtctgagaagaagaggaacatgaagcagagcggggagatggccatccacggcggctag

SEQ ID NO: 31610 - DNA, 819 bp, Artificial Sequence
  derived and/or modified sequence
atgggcagcctgttccccctgagcctgctgttcttcctggccgccgcttatccaggagtagggtccgccctgggaagaaggaccaaaagggctcaaagcccaaaaggatcccccctggcccctagcgggacgagcgtgcctttttgggtccgcatgagtccagagttcgtagccgtgcagcctggcaaatcagtacagctgaactgctcaaattcatgtccgcagccgcagaatagttccctgagaactcctttacggcagggaaagaccctccgaggcccaggctgggtctcctaccagcttctggacgttagggcctggtcctctttagcccactgtctggtgacctgtgcgggaaaaactcgttgggcgactagccgcattaccgcatattccgtacccgggggcctcctgggaggcgacccagaggcttggaagccgggccacttatttcggaaaccaggagctttacataggcctgggtctgggcagcgggacctggacttgcgagtatgttgttggaccccgagattacttgccgcccgcgacctaccccgcgctccacagtcccggagaccaggcgggcctcagcagctcggcacacattataccgacgccagactggagccaagagcacattctttcggcctgagattccacaggtgcccctgcagagatccacctcactgtggccggtgtgtcccaatgcaggtgccctcatatgaggtgcccggcgtgaaaggcgatgtgctctgccgcctgagtgaaaagaagagaaatatgaagcagtctggagagatggccatccacggtggttag

SEQ ID NO: 31611 - DNA, 819 bp, Artificial Sequence
  derived and/or modified sequence
atgggatctctctttcccctcagtctgctgttctttctggctgcagcttatccgggtgtggggtctgcactgggcaggcgaacaaagagggcacagagcccaaaagggagccctttggctccctcgggcactagcgttccgttttgggtccggatgtctccagaattcgttgctgtccagccaggcaaaagcgtgcaattgaattgcagtaactcttgcccccagccgcaaaactctagcctgagaactcccctgaggcagggcaagacactaagagggcctggttgggtgtcctatcagttactggacgtgagagcgtggagctcacttgcgcattgtctcgttacctgtgctggaaaaacacgttgggcgacctcacgcattacagcctactcagttccagggggactgctcggcggagaccctgaggcgtggaagcctggccacctgttccggaagcccggtgcgctacacagaccaggatcgggtcagagggatcttgatctccgcgtttgttgctggacaccgaggttactggcagctagagatctgcctcgggctcctcagtcccgccgacctgggggaccacaacagctgggaactcattacacggatgcgaggttagagcccagggcacattctttcgggctgcggttccacaggtgtccttgtcgtgatccacctcactgcggacgctgcgtgcctatgcaggttcctagctacgaagttcctggagtcaagggggacgttctgtgccgactttcggaaaagaagaggaatatgaagcagtcaggcgagatggcgatccatggcggttag

SEQ ID NO: 31612 - DNA, 819 bp, Artificial Sequence
  derived and/or modified sequence
atgggcagcctgttccccctgagcctgctgttcttcctggccgccgcctaccccggcgtgggcagcgccctgggcagaagaaccaagagagcccagagccccaagggcagccccctggcccccagcggcaccagcgtgcccttctgggtgagaatgagccccgagttcgtggccgtgcagcccggcaagagcgtgcagctgaactgcagcaacagctgcccccagccccagaacagcagcctgagaacccccctgagacagggcaagaccctgagaggccccggctgggtgagctaccagctgctggacgtgagagcctggagcagcctggcccactgcctggtgacctgcgccggcaagaccagatgggccaccagcagaatcaccgcctacagcgtgcccggcggcctgctgggcggcgaccccgaggcctggaagcccggccacctgttcagaaagcccggcgccctgcacagacccggcagcggccagagagacctggacctgagagtgtgctgctggacccccagactgctggccgccagagacctgcccagagccccccagagcagaagacccggcggcccccagcagctgggcacccactacaccgacgccagactggagcccagagcccacagcttcggcctgagattccacagatgcccctgcagagaccccccccactgcggcagatgcgtgcccatgcaggtgcccagctacgaggtgcccggcgtgaagggcgacgtgctgtgcagactgagcgagaagaagagaaacatgaagcagagcggcgagatggccatccacggcggctag

SEQ ID NO: 31613 - protein, 199 aa, Artificial Sequence
  derived and/or modified sequence
MAAANKGKCLPGVVGLAQALPVGPGRRAIAAGNKPRVRSIRFAAGHDAEGSHSHVHFDEKLHDSVVMVTQESDSSFLVKVGFLKILHRYEITFTLPPVHRLSKDVREAPVPSLHLKLLSVVPVPEGYSVKCEYSAHKEGVLKEEILLACEGGTGTCVRVTVQARVMDRHHGTPMLLDGVKCVGAELEYDSEHSDWHGFD

SEQ ID NO: 31614 - DNA, 600 bp, Artificial Sequence
  derived and/or modified sequence
atggctgctgccaacaaggggaaatgtctaccgggcgtcgtgggtctggcccaggccctcccagtggggcctggtagacgcgctatcgctgcgggcaacaaaccgagggtccgatcgattcgcttcgcggccggccacgacgccgagggatcgcattcacatgtgcatttcgacgagaaacttcatgactccgtggtgatggtgactcaggagtccgacagtagcttccttgtgaaggtgggctttcttaaaatcctgcatcgctatgaaattacctttaccttgccgcccgtgcacagactgagcaaggacgtgcgggaagctccggtccctagcttgcatctaaaactactatccgtggtacctgtccctgaaggttactccgtcaaatgtgaatactctgcccacaaggagggtgttctgaaggaagagatcctccttgcatgcgagggtgggacggggacctgtgtaagagtaacggtgcaggctagggtgatggatagacatcacggtacgcccatgctgcttgacggtgtgaaatgtgtgggtgcggagctagaatatgatagtgaacattctgactggcacggtttcgattag

SEQ ID NO: 31615 - DNA, 600 bp, Artificial Sequence
  derived and/or modified sequence
atggctgctgccaacaagggcaagtgcctgcccggggtggtgggcctggcccaggccctgcctgtgggccctggccggcgggccatcgctgctggcaacaagccccgggtgcgcagcatccgctttgctgctggccatgatgctgagggcagccacagccacgtgcactttgatgagaagctgcatgacagcgtggtgatggtgacccaggagagtgacagcagcttcctggtgaaggtgggcttcctgaagatcctgcacagatatgagatcaccttcaccctgccccctgtgcaccggctgagcaaggatgtgcgggaggcccctgtgcccagcctgcacctgaagctgctgtctgtggtgcctgtgcctgagggctacagcgtgaagtgtgagtacagcgcccacaaggagggcgtgctgaaggaggagatcctgctggcctgtgagggcggcaccggcacctgtgtgcgggtgacagtgcaggcccgggtgatggacagacaccacggcacccccatgctgctggatggagtgaagtgtgtgggcgctgagctggagtatgacagcgagcacagcgactggcacggctttgattag

SEQ ID NO: 31616 - DNA, 600 bp, Artificial Sequence
  derived and/or modified sequence
atggccgccgccaacaagggcaagtgcctgcccggcgtggtgggccttgcccaagctttgcccgtggggcctggcaggcgtgccatcgctgccggtaacaaaccacgagtccggagcatacgctttgctgcaggacacgatgcggaaggaagccactctcacgtgcactttgatgaaaaactgcacgactcggtggtgatggtgacacaggaatctgactcgagcttcttagtgaaagtgggtttcctgaaaatcctgcataggtacgagatcacctttaccctgccccccgtgcacaggttgagtaaagacgtgcgtgaggcccccgtcccgagtttacatctcaagctgttgtctgtggtgcctgtgccagagggttacagcgtcaaatgcgagtattccgcccacaaggaaggtgtgttgaaagaagaaattcttctggcatgcgagggtgggactgggacctgcgtgcgcgtgaccgtgcaggctagagtgatggaccgacatcatgggacacctatgctgctggacggggttaagtgtgttggtgcagaactcgagtacgattccgagcactctgattggcatggctttgactag

SEQ ID NO: 31617 - DNA, 600 bp, Artificial Sequence
  derived and/or modified sequence
atggccgctgccaataaggggaaatgtcttccaggtgtggtgggcctggcccaagctttacccgtcgggccagggagacgagcaatcgccgcaggcaacaagcctagagtgcgttcaatacggttcgctgcgggacatgacgccgaggggtcacatagccacgttcacttcgacgagaaacttcacgacagcgtggtgatggtcactcaggagtctgacagctccttcctcgtgaaagtgggattcctgaagatccttcatcggtatgaaattaccttcactttgccaccagttcatagactctcaaaggacgtgagggaagctccagtgcctagcctccaccttaagctgctgagcgttgtaccagtgcctgaaggctattcagttaaatgtgagtacagcgcacacaaagaaggcgtcctgaaggaggagatactcctggcatgtgaaggcggtaccgggacctgtgtgcgagtgaccgtccaagctcgcgtgatggaccgtcatcatggcactccaatgctgctcgacggcgtaaaatgtgtcggggcagagctcgagtatgacagtgaacattccgattggcacggatttgattag

SEQ ID NO: 31618 - DNA, 600 bp, Artificial Sequence
  derived and/or modified sequence
atggccgccgccaacaagggcaagtgcctgcccggcgtggtgggcctggcccaggccctgcccgtgggccccggcagaagagccatcgccgccggcaacaagcccagagtgagaagcatcagattcgccgccggccacgacgccgagggcagccacagccacgtgcacttcgacgagaagctgcacgacagcgtggtgatggtgacccaggagagcgacagcagcttcctggtgaaggtgggcttcctgaagatcctgcacagatacgagatcaccttcaccctgccccccgtgcacagactgagcaaggacgtgagagaggcccccgtgcccagcctgcacctgaagctgctgagcgtggtgcccgtgcccgagggctacagcgtgaagtgcgagtacagcgcccacaaggagggcgtgctgaaggaggagatcctgctggcctgcgagggcggcaccggcacctgcgtgagagtgaccgtgcaggccagagtgatggacagacaccacggcacccccatgctgctggacggcgtgaagtgcgtgggcgccgagctggagtacgacagcgagcacagcgactggcacggcttcgactag

SEQ ID NO: 31619 - DNA, 1302 bp, Artificial Sequence
  derived and/or modified sequence
tcctgcagccgccgccgctgcagtggtcgtccctgccctccccggccccggggtgcaccccgcaaggctcccgctggtgtccctggagcatgggaggctgctgagcgtgagtggcggtgtctggcaggagctgcgtggcagggagggcgtccatggctgcagccaacaagggtaagtgccttcctggcgtggtaggacttgcacaagctcttccggtgggccctggtaggagggccattgctgcaggcaacaagcccagagtccggagtatccgctttgcggcaggccacgatgcagaaggatcccacagccacgtccactttgatgagaagctgcatgactcggtggtcatggtcacccaggagagtgacagcagctttctggtcaaggttggcttcctgaagatcctgcacaggtatgagattaccttcactctgcccccagtgcacaggctgagcaaggatgtccgcgaggcacctgtccccagcctgcacctcaagctcctcagcgtggtgcccgtccctgaaggttatagtgtcaagtgtgagtactcggcgcacaaagagggcgtcctcaaagaggagatactgctagcctgcgaaggtggcactggcacctgtgtgcgcgtgacggtgcaggcccgcgtcatggaccggcaccacggcacgcccatgctgctggatggtgtcaagtgtgtgggcgccgagctggaatacgactcagagcacagcgactggcacggctttgactgaggcccgaggccccgcctgccccgggcccctcagccttaaaccccgccttgtccccccgacatgctgcgtgatggtgtggcttcctcgcccctctctggggtgggtgtgggggtggagtggccttgcccacgcctctcacctctgccttcatttgtgctgccaccctgcccctccctcgtcctcctctcccacttcctcctctctgtgtgcctcagtctcctgccggaagaaatgggttgagcccgaaaggaggctgtctgaggaagggagagggagggcctggggtgggtcccccactccccaccccaagccacagggactcccaccagggtctgggagaggacggagctggctctgtggcgtcgtggccccattactgctgccttgcttcagccacctctcctgcccctccctagtccccactgctgtccaccatgagtaggagggaggtgcagtccccagcccccacccctcaggtctgtgttacttggtttttaagcgactggttgggatagaaccctaaagaaataaacttccagtggataccgga

SEQ ID NO: 31620 - protein, 2365 aa, Artificial Sequence
  derived and/or modified sequence
MEEVPGDALCEHFEANILTQNRCQNCFHPEEAHGARYQELRSPSGAEVPYCDLPRCPPAPEDPLSASTSGCQSVVDPGLRPGPKRGPSPSAGLPEEGPTAAPRSRSRELEAVPYLEGLTTSLCGSCNEDPGSDPTSSPDSATPDDTSNSSSVDWDTVERQEEEAPSWDELAVMIPRRPREGPRADSSQRAPSLLTRSPVGGDAAGQKKEDTGGGGRSAGQHWARLRGESGLSLERHRSTLTQASSMTPHSGPRSTTSQASPAQRDTAQAASTREIPRASSPHRITQRDTSRASSTQQEISRASSTQQETSRASSTQEDTPRASSTQEDTPRASSTQWNTPRASSPSRSTQLDNPRTSSTQQDNPQTSFPTCTPQRENPRTPCVQQDDPRASSPNRTTQRENSRTSCAQRDNPKASRTSSPNRATRDNPRTSCAQRDNPRASSPSRATRDNPTTSCAQRDNPRASRTSSPNRATRDNPRTSCAQRDNPRASSPSRATRDNPTTSCAQRDNPRASRTSSPNRATRDNPRTSCAQRDNPRASSPNRAARDNPTTSCAQRDNPRASRTSSPNRATRDNPRTSCAQRDNPRASSPNRATRDNPTTSCAQRDNPRASRTSSPNRATRDNPRTSCAQRDNPRASSPNRTTQQDSPRTSCARRDDPRASSPNRTIQQENPRTSCALRDNPRASSPSRTIQQENPRTSCAQRDDPRASSPNRTTQQENPRTSCARRDNPRASSRNRTIQRDNPRTSCAQRDNPRASSPNRTIQQENLRTSCTRQDNPRTSSPNRATRDNPRTSCAQRDNLRASSPIRATQQDNPRTCIQQNIPRSSSTQQDNPKTSCTKRDNLRPTCTQRDRTQSFSFQRDNPGTSSSQCCTQKENLRPSSPHRSTQWNNPRNSSPHRTNKDIPWASFPLRPTQSDGPRTSSPSRSKQSEVPWASIALRPTQGDRPQTSSPSRPAQHDPPQSSFGPTQYNLPSRATSSSHNPGHQSTSRTSSPVYPAAYGAPLTSPEPSQPPCAVCIGHRDAPRASSPPRYLQHDPFPFFPEPRAPESEPPHHEPPYIPPAVCIGHRDAPRASSPPRHTQFDPFPFLPDTSDAEHQCQSPQHEPLQLPAPVCIGYRDAPRASSPPRQAPEPSLLFQDLPRASTESLVPSMDSLHECPHIPTPVCIGHRDAPSFSSPPRQAPEPSLFFQDPPGTSMESLAPSTDSLHGSPVLIPQVCIGHRDAPRASSPPRHPPSDLAFLAPSPSPGSSGGSRGSAPPGETRHNLEREEYTVLADLPPPRRLAQRQPGPQAQCSSGGRTHSPGRAEVERLFGQERRKSEAAGAFQAQDEGRSQQPSQGQSQLLRRQSSPAPSRQVTMLPAKQAELTRRSQAEPPHPWSPEKRPEGDRQLQGSPLPPRTSARTPERELRTQRPLESGQAGPRQPLGVWQSQEEPPGSQGPHRHLERSWSSQEGGLGPGGWWGCGEPSLGAAKAPEGAWGGTSREYKESWGQPEAWEEKPTHELPRELGKRSPLTSPPENWGGPAESSQSWHSGTPTAVGWGAEGACPYPRGSERRPELDWRDLLGLLRAPGEGVWARVPSLDWEGLLELLQARLPRKDPAGHRDDLARALGPELGPPGTNDVPEQESHSQPEGWAEATPVNGHSPALQSQSPVQLPSPACTSTQWPKIKVTRGPATATLAGLEQTGPLGSRSTAKGPSLPELQFQPEEPEESEPSRGQDPLTDQKQADSADKRPAEGKAGSPLKGRLVTSWRMPGDRPTLFNPFLLSLGVLRWRRPDLLNFKKGWMSILDEPGEPPSPSLTTTSTSQWKKHWFVLTDSSLKYYRDSTAEEADELDGEIDLRSCTDVTEYAVQRNYGFQIHTKDAVYTLSAMTSGIRRNWIEALRKTVRPTSAPDVTKLSDSNKENALHSYSTQKGPLKAGEQRAGSEVISRGGPRKADGQRQALDYVELSPLTQASPQRARTPARTPDRLAKQEELERDLAQRSEERRKWFEATDSRTPEVPAGEGPRRGLGAPLTEDQQNRLSEEIEKKWQELEKLPLRENKRVPLTALLNQSRGERRGPPSDGHEALEKEVQALRAQLEAWRLQGEAPQSALRSQEDGHIPPGYISQEACERSLAEMESSHQQVMEELQRHHERELQRLQQEKEWLLAEETAATASAIEAMKKAYQEELSRELSKTRSLQQGPDGLRKQHQSDVEALKRELQVLSEQYSQKCLEIGALMRQAEEREHTLRRCQQEGQELLRHNQELHGRLSEEIDQLRGFIASQGMGNGCGRSNERSSCELEVLLRVKENELQYLKKEVQCLRDELQMMQKDKRFTSGKYQDVYVELSHIKTRSEREIEQLKEHLRLAMAALQEKESMRNSLAE

SEQ ID NO: 31621 - protein, 1689 aa, Artificial Sequence
  derived and/or modified sequence
MEEVPGDALCEHFEANILTQNRCQNCFHPEEAHGARYQELRSPSGAEVPYCDLPRCPPAPEDPLSASTSGCQSVVDPGLRPGPKRGPSPSAGLPEEGPTAAPRSRSRELEAVPYLEGLTTSLCGSCNEDPGSDPTSSPDSATPDDTSNSSSVDWDTVERQEEEAPSWDELAVMIPRRPREGPRADSSQRAPSLLTRSPVGGDAAGQKKEDTGGGGRSAGQHWARLRGESGLSLERHRSTLTQASSMTPHSGPRSTTSQASPAQRDTAQAASTREIPRASSPHRITQRDTSRASSTQQEISRASSTQQETSRASSTQEDTPRASSTQEDTPRASSTQWNTPRASSPSRSTQLDNPRTSSTQQDNPQTSFPTCTPQRENPRTPCVQQDDPRASSPNRTTQRENSRTSCAQRDNPKASRTSSPNRATRDNPRTSCAQRDNPRASSPSRATRDNPTTSCAQRDNPRASRTSSPNRATRDNPRTSCAQRDNPRASSPSRATRDNPTTSCAQRDNPRASRTSSPNRATRDNPRTSCAQRDNPRASSPNRAARDNPTTSCAQRDNPRASRTSSPNRATRDNPRTSCAQRDNPRASSPNRATRDNPTTSCAQRDNPRASRTSSPNRATRDNPRTSCAQRDNPRASSPNRTTQQDSPRTSCARRDDPRASSPNRTIQQENPRTSCALRDNPRASSPSRTIQQENPRTSCAQRDDPRASSPNRTTQQENPRTSCARRDNPRASSRNRTIQRDNPRTSCAQRDNPRASSPNRTIQQENLRTSCTRQDNPRTSSPNRATRDNPRTSCAQRDNLRASSPIRATQQDNPRTCIQQNIPRSSSTQQDNPKTSCTKRDNLRPTCTQRDRTQSFSFQRDNPGTSSSQCCTQKENLRPSSPHRSTQWNNPRNSSPHRTNKDIPWASFPLRPTQSDGPRTSSPSRSKQSEVPWASIALRPTQGDRPQTSSPSRPAQHDPPQSSFGPTQYNLPSRATSSSHNPGHQSTSRTSSPVYPAAYGAPLTSPEPSQPPCAVCIGHRDAPRASSPPRYLQHDPFPFFPEPRAPESEPPHHEPPYIPPAVCIGHRDAPRASSPPRHTQFDPFPFLPDTSDAEHQCQSPQHEPLQLPAPVCIGYRDAPRASSPPRQAPEPSLLFQDLPRASTESLVPSMDSLHECPHIPTPVCIGHRDAPSFSSPPRQAPEPSLFFQDPPGTSMESLAPSTDSLHGSPVLIPQVCIGHRDAPRASSPPRHPPSDLAFLAPSPSPGSSGGSRGSAPPGETRHNLEREEYTVLADLPPPRRLAQRQPGPQAQCSSGGRTHSPGRAEVERLFGQERRTMLPAKQAELTRRSQAEPPHPWSPEKRPEGDRQLQGSPLPPRTSARTPERELRTQRPLESGQAGPRQPLGVWQSQEEPPGSQGPHRHLERSWSSQEGGLGPGGWWGCGEPSLGAAKAPEGAWGGTSREYKESWGQPEAWEEKPTHELPRELGKRSPLTSPPENWGGPAESSQSWHSGTPTAVGWGAEGACPYPRGSERRPELDWRDLLGLLRAPGEGVWARVPSLDWEGLLELLQARLPRKDPAGHRDDLARALGPELGPPGTNDVPEQESHSQPEGWAEATPVNGHSPALQSQSPVQLPSPACTSTQWPKIKVTRGPATATLAGLEQTGPLGSRSTAKGPSLPELQFQPEEPEESEPSRGQDPLTDQKQADS

SEQ ID NO: 31622 - protein, 256 aa, Artificial Sequence
  derived and/or modified sequence
MSILDEPGEPPSPSLTTTSTSQWKKHWFVLTDSSLKYYRDSTAEEADELDGEIDLRSCTDVTEYAVQRNYGFQIHTKDAVYTLSAMTSGIRRNWIEALRKTVRPTSAPDVTKLSDSNKENALHSYSTQKGPLKAGEQRAGSEVISRGGPRKADGQRQALDYVELSPLTQASPQRARTPARTPDRLAKQEELERDLAQRSEERRKWFEATDSRTPEVPAGEGPRRGLGAPLTEDQQNRLSEEIEKKWQELEKLPLRE

SEQ ID NO: 31623 - protein, 83 aa, Artificial Sequence
  derived and/or modified sequence
MSILDEPGEPPSPSLTTTSTSQWKKHWFVLTDSSLKYYRDSTAEEADELDGEIDLRSCTDVTEYAVQRNYGFQIHTKDAVYTL

SEQ ID NO: 31624 - DNA, 7098 bp, Artificial Sequence
  derived and/or modified sequence
atggaggaggtgcccggcgacgccctgtgcgagcacttcgaggccaacatcctgacccagaacagatgccagaactgcttccaccccgaggaggcccacggcgccagataccaggagctgagaagccccagcggcgccgaggtgccctactgcgacctgcccagatgcccccccgcccccgaggaccccctgagcgccagcaccagcggctgccagagcgtggtggaccccggcctgagacccggccccaagagaggccccagccccagcgccggcctgcccgaggagggccccaccgccgcccccagaagcagaagcagagagctggaggccgtgccctacctggagggcctgaccaccagcctgtgcggcagctgcaacgaggaccccggcagcgaccccaccagcagccccgacagcgccacccccgacgacaccagcaacagcagcagcgtggactgggacaccgtggagagacaggaggaggaggcccccagctgggacgagctggccgtgatgatccccagaagacccagagagggccccagagccgacagcagccagagagcccccagcctgctgaccagaagccccgtgggcggcgacgccgccggccagaagaaggaggacaccggcggcggcggcagaagcgccggccagcactgggccagactgagaggcgagagcggcctgagcctggagagacacagaagcaccctgacccaggccagcagcatgaccccccacagcggccccagaagcaccaccagccaggccagccccgcccagagagacaccgcccaggccgccagcaccagagagatccccagagccagcagcccccacagaatcacccagagagacaccagcagagccagcagcacccagcaggagatcagcagagccagcagcacccagcaggagaccagcagagccagcagcacccaggaggacacccccagagccagcagcacccaggaggacacccccagagccagcagcacccagtggaacacccccagagccagcagccccagcagaagcacccagctggacaaccccagaaccagcagcacccagcaggacaacccccagaccagcttccccacctgcaccccccagagagagaaccccagaaccccctgcgtgcagcaggacgaccccagagccagcagccccaacagaaccacccagagagagaacagcagaaccagctgcgcccagagagacaaccccaaggccagcagaaccagcagccccaacagagccaccagagacaaccccagaaccagctgcgcccagagagacaaccccagagccagcagccccagcagagccaccagagacaaccccaccaccagctgcgcccagagagacaaccccagagccagcagaaccagcagccccaacagagccaccagagacaaccccagaaccagctgcgcccagagagacaaccccagagccagcagccccagcagagccaccagagacaaccccaccaccagctgcgcccagagagacaaccccagagccagcagaaccagcagccccaacagagccaccagagacaaccccagaaccagctgcgcccagagagacaaccccagagccagcagccccaacagagccgccagagacaaccccaccaccagctgcgcccagagagacaaccccagagccagcagaaccagcagccccaacagagccaccagagacaaccccagaaccagctgcgcccagagagacaaccccagagccagcagccccaacagagccaccagagacaaccccaccaccagctgcgcccagagagacaaccccagagccagcagaaccagcagccccaacagagccaccagagacaaccccagaaccagctgcgcccagagagacaaccccagagccagcagccccaacagaaccacccagcaggacagccccagaaccagctgcgccagaagagacgaccccagagccagcagccccaacagaaccatccagcaggagaaccccagaaccagctgcgccctgagagacaaccccagagccagcagccccagcagaaccatccagcaggagaaccccagaaccagctgcgcccagagagacgaccccagagccagcagccccaacagaaccacccagcaggagaaccccagaaccagctgcgccagaagagacaaccccagagccagcagcagaaacagaaccatccagagagacaaccccagaaccagctgcgcccagagagacaaccccagagccagcagccccaacagaaccatccagcaggagaacctgagaaccagctgcaccagacaggacaaccccagaaccagcagccccaacagagccaccagagacaaccccagaaccagctgcgcccagagagacaacctgagagccagcagccccatcagagccacccagcaggacaaccccagaacctgcatccagcagaacatccccagaagcagcagcacccagcaggacaaccccaagaccagctgcaccaagagagacaacctgagacccacctgcacccagagagacagaacccagagcttcagcttccagagagacaaccccggcaccagcagcagccagtgctgcacccagaaggagaacctgagacccagcagcccccacagaagcacccagtggaacaaccccagaaacagcagcccccacagaaccaacaaggacatcccctgggccagcttccccctgagacccacccagagcgacggccccagaaccagcagccccagcagaagcaagcagagcgaggtgccctgggccagcatcgccctgagacccacccagggcgacagaccccagaccagcagccccagcagacccgcccagcacgaccccccccagagcagcttcggccccacccagtacaacctgcccagcagagccaccagcagcagccacaaccccggccaccagagcaccagcagaaccagcagccccgtgtaccccgccgcctacggcgcccccctgaccagccccgagcccagccagcccccctgcgccgtgtgcatcggccacagagacgcccccagagccagcagcccccccagatacctgcagcacgaccccttccccttcttccccgagcccagagcccccgagagcgagcccccccaccacgagcccccctacatcccccccgccgtgtgcatcggccacagagacgcccccagagccagcagcccccccagacacacccagttcgaccccttccccttcctgcccgacaccagcgacgccgagcaccagtgccagagcccccagcacgagcccctgcagctgcccgcccccgtgtgcatcggctacagagacgcccccagagccagcagcccccccagacaggcccccgagcccagcctgctgttccaggacctgcccagagccagcaccgagagcctggtgcccagcatggacagcctgcacgagtgcccccacatccccacccccgtgtgcatcggccacagagacgcccccagcttcagcagcccccccagacaggcccccgagcccagcctgttcttccaggacccccccggcaccagcatggagagcctggcccccagcaccgacagcctgcacggcagccccgtgctgatcccccaggtgtgcatcggccacagagacgcccccagagccagcagcccccccagacacccccccagcgacctggccttcctggcccccagccccagccccggcagcagcggcggcagcagaggcagcgccccccccggcgagaccagacacaacctggagagagaggagtacaccgtgctggccgacctgcccccccccagaagactggcccagagacagcccggcccccaggcccagtgcagcagcggcggcagaacccacagccccggcagagccgaggtggagagactgttcggccaggagagaagaaagagcgaggccgccggcgccttccaggcccaggacgagggcagaagccagcagcccagccagggccagagccagctgctgagaagacagagcagccccgcccccagcagacaggtgaccatgctgcccgccaagcaggccgagctgaccagaagaagccaggccgagcccccccacccctggagccccgagaagagacccgagggcgacagacagctgcagggcagccccctgccccccagaaccagcgccagaacccccgagagagagctgagaacccagagacccctggagagcggccaggccggccccagacagcccctgggcgtgtggcagagccaggaggagccccccggcagccagggcccccacagacacctggagagaagctggagcagccaggagggcggcctgggccccggcggctggtggggctgcggcgagcccagcctgggcgccgccaaggcccccgagggcgcctggggcggcaccagcagagagtacaaggagagctggggccagcccgaggcctgggaggagaagcccacccacgagctgcccagagagctgggcaagagaagccccctgaccagcccccccgagaactggggcggccccgccgagagcagccagagctggcacagcggcacccccaccgccgtgggctggggcgccgagggcgcctgcccctaccccagaggcagcgagagaagacccgagctggactggagagacctgctgggcctgctgagagcccccggcgagggcgtgtgggccagagtgcccagcctggactgggagggcctgctggagctgctgcaggccagactgcccagaaaggaccccgccggccacagagacgacctggccagagccctgggccccgagctgggcccccccggcaccaacgacgtgcccgagcaggagagccacagccagcccgagggctgggccgaggccacccccgtgaacggccacagccccgccctgcagagccagagccccgtgcagctgcccagccccgcctgcaccagcacccagtggcccaagatcaaggtgaccagaggccccgccaccgccaccctggccggcctggagcagaccggccccctgggcagcagaagcaccgccaagggccccagcctgcccgagctgcagttccagcccgaggagcccgaggagagcgagcccagcagaggccaggaccccctgaccgaccagaagcaggccgacagcgccgacaagagacccgccgagggcaaggccggcagccccctgaagggcagactggtgaccagctggagaatgcccggcgacagacccaccctgttcaaccccttcctgctgagcctgggcgtgctgagatggagaagacccgacctgctgaacttcaagaagggctggatgagcatcctggacgagcccggcgagccccccagccccagcctgaccaccaccagcaccagccagtggaagaagcactggttcgtgctgaccgacagcagcctgaagtactacagagacagcaccgccgaggaggccgacgagctggacggcgagatcgacctgagaagctgcaccgacgtgaccgagtacgccgtgcagagaaactacggcttccagatccacaccaaggacgccgtgtacaccctgagcgccatgaccagcggcatcagaagaaactggatcgaggccctgagaaagaccgtgagacccaccagcgcccccgacgtgaccaagctgagcgacagcaacaaggagaacgccctgcacagctacagcacccagaagggccccctgaaggccggcgagcagagagccggcagcgaggtgatcagcagaggcggccccagaaaggccgacggccagagacaggccctggactacgtggagctgagccccctgacccaggccagcccccagagagccagaacccccgccagaacccccgacagactggccaagcaggaggagctggagagagacctggcccagagaagcgaggagagaagaaagtggttcgaggccaccgacagcagaacccccgaggtgcccgccggcgagggccccagaagaggcctgggcgcccccctgaccgaggaccagcagaacagactgagcgaggagatcgagaagaagtggcaggagctggagaagctgcccctgagagagaacaagagagtgcccctgaccgccctgctgaaccagagcagaggcgagagaagaggcccccccagcgacggccacgaggccctggagaaggaggtgcaggccctgagagcccagctggaggcctggagactgcagggcgaggccccccagagcgccctgagaagccaggaggacggccacatcccccccggctacatcagccaggaggcctgcgagagaagcctggccgagatggagagcagccaccagcaggtgatggaggagctgcagagacaccacgagagagagctgcagagactgcagcaggagaaggagtggctgctggccgaggagaccgccgccaccgccagcgccatcgaggccatgaagaaggcctaccaggaggagctgagcagagagctgagcaagaccagaagcctgcagcagggccccgacggcctgagaaagcagcaccagagcgacgtggaggccctgaagagagagctgcaggtgctgagcgagcagtacagccagaagtgcctggagatcggcgccctgatgagacaggccgaggagagagagcacaccctgagaagatgccagcaggagggccaggagctgctgagacacaaccaggagctgcacggcagactgagcgaggagatcgaccagctgagaggcttcatcgccagccagggcatgggcaacggctgcggcagaagcaacgagagaagcagctgcgagctggaggtgctgctgagagtgaaggagaacgagctgcagtacctgaagaaggaggtgcagtgcctgagagacgagctgcagatgatgcagaaggacaagagattcaccagcggcaagtaccaggacgtgtacgtggagctgagccacatcaagaccagaagcgagagagagatcgagcagctgaaggagcacctgagactggccatggccgccctgcaggagaaggagagcatgagaaacagcctggccgagtag

SEQ ID NO: 31625 - DNA, 5070 bp, Artificial Sequence
  derived and/or modified sequence
atggaggaggtgcccggcgacgccctgtgcgagcacttcgaggccaacatcctgacccagaacagatgccagaactgcttccaccccgaggaggcccacggcgccagataccaggagctgagaagccccagcggcgccgaggtgccctactgcgacctgcccagatgcccccccgcccccgaggaccccctgagcgccagcaccagcggctgccagagcgtggtggaccccggcctgagacccggccccaagagaggccccagccccagcgccggcctgcccgaggagggccccaccgccgcccccagaagcagaagcagagagctggaggccgtgccctacctggagggcctgaccaccagcctgtgcggcagctgcaacgaggaccccggcagcgaccccaccagcagccccgacagcgccacccccgacgacaccagcaacagcagcagcgtggactgggacaccgtggagagacaggaggaggaggcccccagctgggacgagctggccgtgatgatccccagaagacccagagagggccccagagccgacagcagccagagagcccccagcctgctgaccagaagccccgtgggcggcgacgccgccggccagaagaaggaggacaccggcggcggcggcagaagcgccggccagcactgggccagactgagaggcgagagcggcctgagcctggagagacacagaagcaccctgacccaggccagcagcatgaccccccacagcggccccagaagcaccaccagccaggccagccccgcccagagagacaccgcccaggccgccagcaccagagagatccccagagccagcagcccccacagaatcacccagagagacaccagcagagccagcagcacccagcaggagatcagcagagccagcagcacccagcaggagaccagcagagccagcagcacccaggaggacacccccagagccagcagcacccaggaggacacccccagagccagcagcacccagtggaacacccccagagccagcagccccagcagaagcacccagctggacaaccccagaaccagcagcacccagcaggacaacccccagaccagcttccccacctgcaccccccagagagagaaccccagaaccccctgcgtgcagcaggacgaccccagagccagcagccccaacagaaccacccagagagagaacagcagaaccagctgcgcccagagagacaaccccaaggccagcagaaccagcagccccaacagagccaccagagacaaccccagaaccagctgcgcccagagagacaaccccagagccagcagccccagcagagccaccagagacaaccccaccaccagctgcgcccagagagacaaccccagagccagcagaaccagcagccccaacagagccaccagagacaaccccagaaccagctgcgcccagagagacaaccccagagccagcagccccagcagagccaccagagacaaccccaccaccagctgcgcccagagagacaaccccagagccagcagaaccagcagccccaacagagccaccagagacaaccccagaaccagctgcgcccagagagacaaccccagagccagcagccccaacagagccgccagagacaaccccaccaccagctgcgcccagagagacaaccccagagccagcagaaccagcagccccaacagagccaccagagacaaccccagaaccagctgcgcccagagagacaaccccagagccagcagccccaacagagccaccagagacaaccccaccaccagctgcgcccagagagacaaccccagagccagcagaaccagcagccccaacagagccaccagagacaaccccagaaccagctgcgcccagagagacaaccccagagccagcagccccaacagaaccacccagcaggacagccccagaaccagctgcgccagaagagacgaccccagagccagcagccccaacagaaccatccagcaggagaaccccagaaccagctgcgccctgagagacaaccccagagccagcagccccagcagaaccatccagcaggagaaccccagaaccagctgcgcccagagagacgaccccagagccagcagccccaacagaaccacccagcaggagaaccccagaaccagctgcgccagaagagacaaccccagagccagcagcagaaacagaaccatccagagagacaaccccagaaccagctgcgcccagagagacaaccccagagccagcagccccaacagaaccatccagcaggagaacctgagaaccagctgcaccagacaggacaaccccagaaccagcagccccaacagagccaccagagacaaccccagaaccagctgcgcccagagagacaacctgagagccagcagccccatcagagccacccagcaggacaaccccagaacctgcatccagcagaacatccccagaagcagcagcacccagcaggacaaccccaagaccagctgcaccaagagagacaacctgagacccacctgcacccagagagacagaacccagagcttcagcttccagagagacaaccccggcaccagcagcagccagtgctgcacccagaaggagaacctgagacccagcagcccccacagaagcacccagtggaacaaccccagaaacagcagcccccacagaaccaacaaggacatcccctgggccagcttccccctgagacccacccagagcgacggccccagaaccagcagccccagcagaagcaagcagagcgaggtgccctgggccagcatcgccctgagacccacccagggcgacagaccccagaccagcagccccagcagacccgcccagcacgaccccccccagagcagcttcggccccacccagtacaacctgcccagcagagccaccagcagcagccacaaccccggccaccagagcaccagcagaaccagcagccccgtgtaccccgccgcctacggcgcccccctgaccagccccgagcccagccagcccccctgcgccgtgtgcatcggccacagagacgcccccagagccagcagcccccccagatacctgcagcacgaccccttccccttcttccccgagcccagagcccccgagagcgagcccccccaccacgagcccccctacatcccccccgccgtgtgcatcggccacagagacgcccccagagccagcagcccccccagacacacccagttcgaccccttccccttcctgcccgacaccagcgacgccgagcaccagtgccagagcccccagcacgagcccctgcagctgcccgcccccgtgtgcatcggctacagagacgcccccagagccagcagcccccccagacaggcccccgagcccagcctgctgttccaggacctgcccagagccagcaccgagagcctggtgcccagcatggacagcctgcacgagtgcccccacatccccacccccgtgtgcatcggccacagagacgcccccagcttcagcagcccccccagacaggcccccgagcccagcctgttcttccaggacccccccggcaccagcatggagagcctggcccccagcaccgacagcctgcacggcagccccgtgctgatcccccaggtgtgcatcggccacagagacgcccccagagccagcagcccccccagacacccccccagcgacctggccttcctggcccccagccccagccccggcagcagcggcggcagcagaggcagcgccccccccggcgagaccagacacaacctggagagagaggagtacaccgtgctggccgacctgcccccccccagaagactggcccagagacagcccggcccccaggcccagtgcagcagcggcggcagaacccacagccccggcagagccgaggtggagagactgttcggccaggagagaagaaccatgctgcccgccaagcaggccgagctgaccagaagaagccaggccgagcccccccacccctggagccccgagaagagacccgagggcgacagacagctgcagggcagccccctgccccccagaaccagcgccagaacccccgagagagagctgagaacccagagacccctggagagcggccaggccggccccagacagcccctgggcgtgtggcagagccaggaggagccccccggcagccagggcccccacagacacctggagagaagctggagcagccaggagggcggcctgggccccggcggctggtggggctgcggcgagcccagcctgggcgccgccaaggcccccgagggcgcctggggcggcaccagcagagagtacaaggagagctggggccagcccgaggcctgggaggagaagcccacccacgagctgcccagagagctgggcaagagaagccccctgaccagcccccccgagaactggggcggccccgccgagagcagccagagctggcacagcggcacccccaccgccgtgggctggggcgccgagggcgcctgcccctaccccagaggcagcgagagaagacccgagctggactggagagacctgctgggcctgctgagagcccccggcgagggcgtgtgggccagagtgcccagcctggactgggagggcctgctggagctgctgcaggccagactgcccagaaaggaccccgccggccacagagacgacctggccagagccctgggccccgagctgggcccccccggcaccaacgacgtgcccgagcaggagagccacagccagcccgagggctgggccgaggccacccccgtgaacggccacagccccgccctgcagagccagagccccgtgcagctgcccagccccgcctgcaccagcacccagtggcccaagatcaaggtgaccagaggccccgccaccgccaccctggccggcctggagcagaccggccccctgggcagcagaagcaccgccaagggccccagcctgcccgagctgcagttccagcccgaggagcccgaggagagcgagcccagcagaggccaggaccccctgaccgaccagaagcaggccgacagctag

SEQ ID NO: 31626 - DNA, 7098 bp, Artificial Sequence
  derived and/or modified sequence
atggaggaagtgcccggggatgctctgtgcgaacacttcgaagccaacattctgacacaaaatagatgtcagaattgctttcacccagaggaagcacacggagcccgttaccaggagttgcgcagtccatccggagcagaagtgccctactgtgatctgcctaggtgtccacctgcccctgaggaccccctgtctgcctcaaccagcgggtgccaatcagtagtggaccccggcctgcgccccggacccaagcgggggcctagcccctccgccggcctgcctgaggaggggcctaccgcagctcccaggtctcgatccagagagttagaggctgtcccctatctggagggcctaacaacctctctgtgcggttcctgcaacgaagaccccggctcagacccgactagctcaccagatagtgcaaccccagatgacacatcaaattctagctctgtcgattgggataccgtcgaaagacaggaggaggaagcgcccagttgggacgagctggcagtgatgattccccggaggcctagagaagggccgagagccgatagctcccagcgtgcgccatccctgttgaccaggagtccggtcggcggagatgcagccggacagaaaaaagaggacaccggaggtgggggccgtagcgcaggccagcattgggcacgcctgcgaggcgagtccggcttgtcgcttgagcgccatcggagcacactcacacaggcgagttcaatgacaccacacagcgggccccggtctacaacttcccaagccagtccggcccagcgcgataccgcccaggccgcctctacacgcgagatcccccgagccagctctccccacaggatcacgcaaagagacacatcaagagccagctccacccagcaagagatctcccgggcttcttcaacacaacaggaaacatcccgggcctctagcacccaagaggacacccctagggcatcaagcactcaggaggatacccccagagctagttccacccaatggaacactccgcgagcgtcctctcccagtcggtctacacaactcgacaaccctcggacctcatccactcaacaagacaatcctcaaacaagtttccctacatgtacacctcagagggagaatccaagaacaccttgtgtccagcaggacgacccgcgggcctcaagccctaatcggacaacccagagggagaactctcggacttcgtgtgctcagcgagataatccaaaggcttcccggacaagctctcctaaccgcgctacaagagataacccaagaactagttgcgcccagcgggacaaccctagggccagtagcccgagcagggcgaccagggataacccaaccacgtcttgcgctcagagggacaatcctagggcaagccgcacaagcagcccgaatagggccacccgcgataacccgaggacatcttgcgcccagagagataatcctcgggcctcgagtcccagcagggccaccagagataacccaacaacatcatgcgcccagagagacaaccccagagcctcaaggaccagctccccaaaccgagcaacgagggacaacccccgaacatcctgcgcacagagagacaaccctcgtgcatcaagcccaaacagagccgctcgcgataaccccaccacaagctgcgcccagagagacaacccacgggcatcaagaacgtcgtcacctaacagagcgactagagacaacccacgaacgtcttgtgcgcaacgagataacccgcgagctagctctcctaatagggcaaccagagacaacccaacaacaagctgtgctcagagggataacccccgcgcaagccgcactagttcccccaatagagcaacccgcgacaacccacgcactagctgtgcccagcgcgataacccgagagcttcctctcccaacaggactacacagcaggacagtccaagaacttcatgtgcgcgacgggacgatcccagagcctcttcacccaaccggacgatccagcaggaaaatccgaggactagctgtgcccttagggataatcccagagcaagttcacctagcagaactatacaacaagaaaatccacgcacgagttgtgctcaaagggatgacccccgggcatcctcccctaatcgcacgacgcaacaggagaaccctaggacatcctgtgcacggcgcgataaccctcgtgcaagcagtagaaataggactatacagcgcgacaaccccaggacaagctgtgcgcagcgtgacaatcccagggccagttcacctaatcgcacaattcagcaagagaacctgaggacctcctgcaccagacaggataatcctaggacaagctcacccaatcgggccactcgcgataatcccagaaccagttgtgcgcaaagggacaacctgagagcgagctctcccatacgagcaacgcagcaagataacccgcgcacctgtattcagcaaaatatacctcgctcatcttccacccagcaagacaatccaaaaacatcatgcacaaagcgcgacaacctccggccaacctgcacgcagcgagaccggacacagagtttctcatttcagcgggacaacccaggtaccagcagctcccagtgctgtacacaaaaagagaatttgcgcccttcttcaccccacagaagtactcagtggaacaatcctcggaactcatcgccgcatcgcactaacaaagatattccttgggcatcctttccgctgaggccaactcaatcggatggccctaggaccagctcaccaagccgctcaaagcaaagcgaagtgccatgggccagcatcgctctccggcccacacagggggatcggccacagacgagtagccccagccgccctgcccagcacgaccctccgcaatcttcgttcggccctacccagtacaatcttccgtcacgcgccacgtcgtcttctcacaatcccggacatcaaagcacatcccggacctcctcaccagtctaccccgctgcctacggtgcacctctcacgtcccccgagccatcccaacctccctgtgcagtgtgcatcggacacagagacgcccctcgggcctcaagccctccccggtatctgcagcacgacccattcccatttttccctgagcccagagcacccgagtcagagccgccacaccatgaacccccgtacattccacccgccgtctgcattggtcatcgcgatgcgccaagagcttcaagccctcctagacacacacagtttgacccttttccttttctgcccgatacctcagatgctgagcaccaatgccagtccccccagcacgaaccactgcaactgcctgcccccgtgtgcataggctacagagatgcacctcgcgcttctagcccccctcggcaggcccctgagcctagtcttctcttccaagacctgcccagagcaagcacagagtctctggtgccatctatggattccctgcatgaatgccctcatatccctaccccggtttgcatcgggcaccgggacgccccatccttctcaagtccaccccgccaggcccctgagccttcccttttcttccaagatccgcctggcacgtccatggaatccttggcgcccagcaccgacagtctacatggctcacccgtactcatcccacaggtgtgcatcggccatcgggacgctccacgcgcgtcctcccctccccggcatccgccatcagatctcgcattcctcgctccatcaccgtctcccgggtcatccggtggatcccgtggaagtgcgccacccggggaaacacgtcacaaccttgaaagggaggagtatactgtgctggctgatttgcccccgccccgcaggttggcacagcgacaaccggggccacaggcccagtgctcaagcggcggcagaactcacagtcctggccgtgctgaggtggaacgtctcttcgggcaggaacggcgcaagagcgaggctgccggtgcattccaggcccaggatgagggcaggtcacagcagccctcacaaggccagagccaactgctgcggcgccagtcctctcccgctccgagcagacaggttacaatgctcccggcaaagcaagccgagttaacccgcaggagtcaggcagaacctccgcatccatggtcaccagagaaacgccctgagggtgaccgacagctgcagggctcacccctgccccctcggaccagcgctcgcacgcctgaacgtgaactgaggacccagagaccactggagagtgggcaagccggcccacgacagccgctaggcgtgtggcaaagccaggaagagcctcctggatcccagggcccgcaccgccatttggaaagatcttggtcctcccaggagggggggctaggtcccggaggctggtggggctgtggagagcccagcttgggcgcagccaaggccccagagggggcatggggtggcacgtcccgggagtataaggagagctggggtcagccggaagcttgggaggaaaagccgacccacgaactcccaagggagctgggtaagcgtagtccacttacctcacccccggaaaattggggaggaccagcagaaagcagccaatcatggcacagcgggactcctaccgcagttggttggggtgcggagggagcctgtccctaccctcgaggatcggagcggagaccagaactggattggagagatctgcttgggctgctgcgcgccccgggtgagggtgtttgggctcgcgtgccttccctggattgggaagggctcctcgagctcttgcaggcaagacttcccaggaaagaccctgcaggacatcgcgatgatttagcccgagctcttggtccagaactcggacccccaggaactaatgatgttcctgaacaggagtcccacagccaacctgaaggctgggcagaagcgactcccgttaacgggcactcccccgcgcttcaatcacagagtcccgttcagctcccttcacccgcatgtacatctacgcagtggccaaagattaaggttacccggggtcccgcaaccgccactcttgccggcctggaacagactggccctctcggaagtagatcgaccgcaaaagggcccagcctcccggagctgcagttccagcccgaagagcccgaagaaagtgaacctagcaggggccaggatcctctgacggaccagaagcaggcagattccgccgataaacgccctgccgaggggaaggcggggagcccactgaaaggcagactggtgacttcttggcggatgccaggcgatagacccacactgttcaatcctttcctgcttagcctcggcgtcctgaggtggcgcaggccagaccttctgaactttaagaaggggtggatgtctattctcgatgagcccggcgagcccccctctcctagcctaactacgacttctacttcacagtggaaaaagcactggttcgtgcttacggattcaagcctgaagtactatcgtgatagcaccgcagaagaggcagacgaactggacggggaaatcgatctgcgctcctgcaccgatgtgacagagtatgcagtgcagcgcaattatggattccagattcacactaaggacgctgtgtatactctttccgccatgacttctggcattcgcaggaactggatcgaagcattgcggaagaccgtgcggcccacatccgccccggacgtgaccaagctgtcagatagtaacaaagaaaacgcgctacacagttacagcacccagaaggggcccttgaaggctggcgagcagagggcagggtccgaagtaatcagtcggggcggacccagaaaggctgacgggcagagacaggctcttgactatgtagagctgtctcctcttacccaagcatccccacagcgcgcccggaccccagccagaactcccgaccgactggccaaacaggaagagctggagagggacctggcccagcggagcgaagaacgcaggaagtggttcgaggcgaccgactctaggacccctgaggtcccagccggggaggggccaagacgaggactcggcgcccccttgactgaagaccagcagaaccgcctgagtgaggagatcgaaaagaaatggcaggaacttgaaaagctgcccttacgcgaaaacaaacgcgtgcctctgactgcactcctcaatcagagtagaggagagcggcggggtccaccttcagacgggcacgaagccctggagaaagaggtgcaggccctcagggctcaactggaagcatggagactacagggtgaggccccccagtccgcactgcggagtcaagaggacggacacattccccccggttacattagccaagaagcatgtgaaagatccttagctgaaatggagtccagtcatcagcaggttatggaggaattacagcgtcaccacgagcgggagttgcaaaggctccagcaggagaaggaatggcttctggctgaggagaccgccgcgactgcctcggctatcgaggccatgaaaaaggcataccaggaggagctttcacgagaactgagtaagaccagatctctgcagcagggtcccgacgggctccggaagcagcaccagtctgacgtggaagccctcaagcgggaactgcaggtgctctctgagcagtactcacagaagtgtttagaaattggggctctcatgagacaggctgaagagcgcgagcatacgctgagacgctgtcagcaagaaggccaggaactcctgaggcacaaccaggagctgcatggtaggttaagcgaagaaatcgatcaattacggggcttcattgcctctcaggggatgggtaacgggtgtggacgaagtaacgaacggagctcatgcgagctggaagttctcctgcgcgttaaggaaaatgagttgcagtatctaaagaaggaggtgcagtgcttgcgggacgagctgcagatgatgcagaaggacaaaaggtttactagcggaaagtaccaggatgtttatgtggagcttagtcatataaaaacccgatcagagcgggaaattgaacagctgaaagagcatctgcgcttggcgatggctgcgcttcaggagaaagaatccatgcggaactctctcgcggagtag

SEQ ID NO: 31627 - DNA, 5070 bp, Artificial Sequence
  derived and/or modified sequence
atggaggaagtaccaggagacgccttatgtgagcattttgaggctaacatcctcacccaaaataggtgccaaaactgcttccatcccgaggaggcccatggcgcccggtatcaggaactgcggagcccttccggtgcagaggtgccttattgtgatttgccccgctgtcctccagcacctgaggacccgttgtccgcttccacttccgggtgccagtctgtcgttgaccctggactgcgaccgggccccaagagaggacccagccctagcgcagggctccctgaggagggcccgaccgccgctcctaggtcgaggagtcgggagctggaggcagtgccttaccttgagggtctcactactagcttgtgcggctcctgtaacgaggatcctggctccgatccaacatcttctccggacagcgcaacacccgatgacaccagcaactcctctagtgtggactgggataccgtggagaggcaggaggaggaggctccgtcttgggatgagttagcagtgatgattcctagaaggcctcgggaggggccacgagctgatagctcccagagggctccaagtctgctcacacgcagcccagtgggcggcgacgccgctgggcagaaaaaagaggatacagggggaggcgggcggtcagcaggccagcattgggcgcggctgaggggagagagtggtctatccctggagcgacacagatccaccctgactcaggcttctagcatgactcctcatagcggcccaaggagtactacaagccaggcatctcctgcacagcgcgatacggcccaagccgcatcaactcgggagattcctagagcatcatcccctcacagaatcacgcaacgggacacctcccgcgcctcctccactcagcaagaaatatcccgcgcctcttccactcagcaggagaccagcagagcctcaagtacacaggaggacaccccgagggcctcctctactcaggaggatacgcctcgcgcatcctccactcagtggaacaccccgcgcgcctcctctcccagccggtccacgcagctggacaaccccagaacgagtagtacccagcaggacaatcctcagacctccttccccacttgtactccccaacgtgagaatccacgcactccatgtgtccagcaggacgatcctcgggcctctagccccaaccgaacaacccaacgtgaaaactctagaacttcatgtgctcagagggataaccccaaagcttcccggacttcttccccaaatcgcgcaacaagagacaatcccagaaccagctgcgcccagagagacaacccgcgtgcatctagcccatcacgcgctacccgcgacaatcctacgacaagctgcgcccagagggacaatccaagggcaagtcggaccagctctcccaatagggctactcgagacaaccccagaacttcttgtgcacagcgcgataatcctcgcgccagtagcccaagtcgggcgacaagggacaacccgactacctcctgtgcgcagcgggataaccccagggcctccaggacctcttccccaaatagggcgacacgcgacaatccaaggacctcttgcgcgcaaagagacaaccctcgggcatcaagtcccaatcgcgccgccagagataacccaaccacctcctgtgcccaacgtgataatccgcgggccagccgaacctcaagtcctaaccgagctacaagagacaacccacggaccagttgcgcccagagggacaaccctcgggcttcctcccccaatagagcaacccgcgacaatcctaccactagctgtgcacagagggataatcctcgggcctctagaaccagctcccctaatcgcgctacccgtgataatcctcggacttcctgtgctcagagagacaatccgagagctagctctcccaataggaccactcaacaggactcacctagaacatcctgtgcgcggcgggatgatcctcgagctagctctccaaacaggaccattcagcaggagaacccaagaacttcttgtgccctgagggataacccccgggcctctagcccgtcccgcactatacagcaggaaaaccctagaacctcctgtgctcagagagacgatcctcgcgccagcagtccaaacaggacaacccaacaggagaacccgcgaactagttgcgctagacgcgacaatccccgggccagctccagaaatcggaccattcagcgggacaatcccaggacaagctgtgctcaacgggacaaccccagagcctcctctcccaacagaaccatacagcaagaaaacctgcgcacgagctgcactaggcaggacaatccacgtacctcatcacccaacagagccacacgcgataacccaaggacgtcctgtgctcagcgagacaacttgagagcctcaagccccattcgcgcgacacagcaagacaacccaagaacctgtatccagcaaaacatcccacgcagttctagtacccagcaggacaaccccaaaacttcttgtacaaagagagacaatctgcggcccacctgcacccaacgggatagaactcagagctttagtttccagagggataatcccggcacatcctctagccagtgttgcacacagaaagagaacctgagaccctccagcccacacagaagtactcagtggaacaaccctcggaattctagtcctcatagaactaacaaagatatcccatgggcgtcctttccacttcggcccacacagagcgacggcccgcgcacatcatctcccagccggagcaagcaaagcgaggttccgtgggcctccattgctctaagaccaacgcaaggcgatcgccctcagacatcctcgccgagccggcccgcgcaacatgatccaccacagagtagcttcggcccaacacagtacaacctccccagtcgggccacctcatccagtcacaaccccggtcaccaatctacaagtcgcacatcatctccagtgtatcccgccgcgtatggggccccactgacttcgcccgagcctagccagcctccatgtgccgtgtgcattgggcacagagatgccccacgagctagctcgccaccacgttatctacagcacgatccttttccttttttcccagaacctcgagcacccgagtcagaaccccctcatcacgagcctccatacattccgcctgccgtttgtatcggccaccgcgatgctccacgcgcatcctctccccctcgccacacgcagttcgacccatttcccttcttgccagacacttccgatgccgaacaccagtgtcagtccccacagcacgaacctcttcagcttcccgcccctgtgtgcatagggtatcgcgatgcccccagagctagttccccaccgcgccaagcgcctgagcccagtctattattccaagacttgcctcgtgcatcaacagagtccctcgtcccctccatggacagcctgcacgagtgccctcacatcccaaccccagtgtgtattggccacagagatgcccccagcttttcttcaccccccagacaggctcctgagcccagtcttttttttcaggaccccccgggcacttctatggaatccttagcacccagtaccgattcactgcatggaagcccagtcctgattcctcaggtctgtataggtcatagggacgcccccagggcctctagcccgccgcgtcatcctccctcagatttagctttcttggcgccatcgccctctcccgggtccagcggaggctcgcggggatctgccccgccgggggagacaagacataatctcgagagagaggagtatactgtactggctgacctcccccctccccggcgactagcacagagacagcccggccctcaggcgcagtgtagctctggaggccggacacactctcctggaagagccgaagtcgagcggctcttcggccaagaaaggagaactatgctgccagccaaacaggctgaattgacgagaaggtcccaggccgaacctccacatccttggagccctgaaaagagacctgagggtgacaggcaactccaagggagccctttacccccgcgcacgagcgcgcggacccctgaacgggaattgcggacacagcgacctcttgaatcaggacaggctggacctcgccagccccttggggtttggcaatctcaggaagaacctccagggagccagggcccacatcggcatctcgaacggagctggtcctctcaggagggaggacttggccctggcggatggtggggctgcggtgagcctagtctgggtgccgccaaggctcctgaaggcgcttgggggggtaccagccgagaatataaggagtcatgggggcaacctgaggcctgggaagagaaacccactcacgagctccctcgggagctggggaagcggtctcccctgacaagcccccccgagaattgggggggacctgccgaaagcagccagagttggcactccgggactccaacagcagtagggtggggcgcggagggcgcctgcccctatcctcgcggatcagagcgccgccctgagctcgactggcgggaccttctgggtctgctgagggcccctggagagggggtctgggcaagggtcccatctctggactgggagggtctgttagagctgcttcaggcgcgactccccaggaaagatccagccgggcatagagatgacctggctcgcgccctcgggcccgagctgggacctccagggactaatgatgtgccagagcaagagagtcactcccagccagaaggctgggccgaagccacaccagttaatggtcactcgcctgcactgcagagccagtctcccgttcaattgccctcaccggcttgtacaagtacgcaatggcccaaaattaaagtgaccagaggcccagccacagccacccttgctggcctggagcagacaggacctctgggcagccgctccactgcaaagggtccatcgcttcctgaactgcagtttcagcctgaggaacccgaagagtccgagcccagcagggggcaggatcccttgaccgaccaaaagcaagctgactcatag

SEQ ID NO: 31628 - DNA, 7098 bp, Artificial Sequence
  derived and/or modified sequence
atggaggaggtgcctggagatgccctgtgtgagcactttgaggccaacatcctgacccagaaccgctgccagaactgcttccaccctgaggaggcccatggagcccgctaccaggagctgcggagccccagcggggctgaggtgccctactgtgacctgccccgctgccccccagcccctgaggaccccctgagcgccagcaccagcggctgccagagcgtggtggaccccggcctgcggcccggccccaagaggggccccagccccagcgctggcctgcctgaggagggccccacagctgcccccaggagccgcagccgggagctggaggccgtgccctacctggagggcctgaccaccagcctgtgtggcagctgcaatgaagaccccggcagtgaccccaccagcagcccagacagcgccaccccagatgacaccagcaacagcagctctgtggactgggacacagtggagcggcaggaggaggaggcccccagctgggatgagctggccgtgatgatcccccggcggccccgggagggccccagggctgacagcagccagagggcccccagcctgctgaccaggagccctgtgggcggagatgctgctggccagaagaaggaggacacaggaggcggcggccgctctgctggccagcactgggcccggctgcggggggagagcggcctgagcctggagcggcacaggagcaccctgacccaggccagctccatgaccccccacagcggccccaggagcaccaccagccaggccagccctgcccagagggacacagcccaggccgccagcacccgggagatcccccgggccagcagcccccaccgcatcacccagagggacaccagccgggccagcagcacccagcaggagatcagccgggccagcagcacccagcaggagaccagccgggccagcagcacccaggaggacaccccccgggccagcagcacccaggaggacaccccccgggccagcagcacccagtggaacaccccccgggccagcagccccagccgcagcacccagctggacaaccccaggaccagcagcacccagcaggacaacccccagaccagcttccccacctgcaccccccagcgggagaaccccaggaccccctgtgtgcagcaggatgacccccgggccagcagccccaacagaaccacccagcgggagaacagcaggaccagctgtgcccagagggacaaccccaaggccagcaggaccagcagccccaacagagccacccgggacaaccccaggaccagctgtgcccagagggacaacccccgggccagcagccccagccgggccacccgggacaaccccaccaccagctgtgcccagagggacaacccccgggccagcaggaccagcagccccaacagagccacccgggacaaccccaggaccagctgtgcccagagggacaacccccgggccagcagccccagccgggccacccgggacaaccccaccaccagctgtgcccagagggacaacccccgggccagcaggaccagcagccccaacagagccacccgggacaaccccaggaccagctgtgcccagagggacaacccccgggccagcagccccaacagagctgcccgggacaaccccaccaccagctgtgcccagagggacaacccccgggccagcaggaccagcagccccaacagagccacccgggacaaccccaggaccagctgtgcccagagggacaacccccgggccagcagccccaacagagccacccgggacaaccccaccaccagctgtgcccagagggacaacccccgggccagcaggaccagcagccccaacagagccacccgggacaaccccaggaccagctgtgcccagagggacaacccccgggccagcagccccaacagaaccacccagcaggacagccccaggaccagctgtgccaggagagatgacccccgggccagcagccccaacagaaccatccagcaggagaaccccaggaccagctgtgccctgcgggacaacccccgggccagcagccccagcaggaccatccagcaggagaaccccaggaccagctgtgcccagagagatgacccccgggccagcagccccaacagaaccacccagcaggagaaccccaggaccagctgtgcccggcgggacaacccccgggccagcagcaggaacagaaccatccagagggacaaccccaggaccagctgtgcccagagggacaacccccgggccagcagccccaacagaaccatccagcaggagaacctgcggaccagctgcacccggcaggacaaccccaggaccagcagccccaacagagccacccgggacaaccccaggaccagctgtgcccagagggacaacctgcgggccagcagccccatccgggccacccagcaggacaaccccaggacctgcatccagcagaacatccccaggagcagcagcacccagcaggacaaccccaagaccagctgcaccaagagggacaacctgcggcccacctgcacccagagggacaggacccagagcttctccttccagagggacaaccctggcaccagcagcagccagtgctgcacccagaaggagaacctgcggcccagcagcccccacaggagcacccagtggaacaaccccaggaacagcagcccccacaggaccaacaaggacatcccctgggccagcttccccctgcggcccacccagagtgatggccccaggaccagcagccccagccgcagcaagcagagcgaggtgccctgggccagcatcgccctgcggcccacccagggcgaccggccccagaccagcagccccagcaggcctgcccagcacgaccccccccagagcagctttggccccacccagtacaacctgcccagccgggccaccagcagcagccacaaccctggccaccagagcaccagcaggaccagcagccctgtgtacccagctgcctacggggcccccctgaccagccctgagcccagccagcccccctgtgctgtgtgcatcggccacagagatgccccccgggccagcagccccccacgctacctgcagcacgaccccttccccttcttccctgagccccgggcccctgagagcgagcccccccaccacgagcccccctacatccccccagctgtgtgcatcggccacagagatgccccccgggccagcagcccccccaggcacacccagtttgaccccttccccttcctgcctgacaccagtgatgctgagcaccagtgccagagcccccagcacgagcccctgcagctgcctgcccctgtgtgcatcggctacagagatgccccccgggccagcagccccccccggcaggcccctgagcccagcctgctcttccaggacctgccccgggccagcacagagagcctggtgcccagcatggacagcctgcacgagtgcccccacatccccacccctgtgtgcatcggccacagagatgcccccagcttcagcagccccccccggcaggcccctgagcccagcctcttcttccaggaccccccaggcacctccatggagagcctggcccccagcacagacagcctgcacggcagccctgtgctgatcccccaggtgtgcatcggccacagagatgccccccgggccagcagccccccaagacaccccccaagtgacctggccttcctggcccccagccccagccctggcagcagcggcggcagccggggcagcgcccctcctggagagaccaggcacaacctggagcgggaggagtacacagtgctggccgacctgcccccaccccggcggctggcccagaggcagcccggcccccaggcccagtgcagcagcggcggccgcacccacagccctggccgggcagaggtggagcggctgtttggccaggagaggaggaagtctgaggccgccggggccttccaggcccaggatgagggccgcagccagcagcccagccagggccagagccagctgctgcggcggcagagcagccctgcccccagccggcaggtgaccatgctgcctgccaagcaggccgagctgaccaggaggagccaggccgagcccccccacccctggagccctgagaagaggcctgagggggaccggcagctgcagggcagccccctgccccccaggaccagcgcccggaccccagagcgggagctgcggacccagaggcccctggagagcggccaggccggcccccggcagcccctgggcgtgtggcagagccaggaggagcccccaggcagccagggcccccaccgccacctggagaggtcctggagcagccaggagggcggcctgggccctgggggctggtggggctgtggggagcccagcctgggcgccgccaaggcccctgagggcgcctggggcggcaccagccgggagtacaaggagagctggggccagcctgaggcctgggaggagaagcccacccatgagctgccccgggagctgggcaagaggagccccctgaccagccccccagagaactggggcggccctgctgagagcagccagagctggcacagcggcacccccacagctgtgggctggggcgctgagggcgcctgcccctacccccggggcagcgagaggaggcctgagctggactggagggacctgctgggcctgctgcgggcccctggagagggcgtgtgggcccgggtgcccagcctggactgggagggcctgctggagctgctgcaggcccggctgcccaggaaggaccctgctggccacagagatgacctggcccgggccctgggccctgagctgggccccccaggcaccaatgatgtgcctgagcaggagagccacagccagcctgagggctgggccgaggccacccctgtgaatggccacagccctgccctgcagagccagagccctgtgcagctgcccagccctgcctgcaccagcacccagtggcccaagatcaaggtgacccggggccctgccacagccaccctggccggcctggagcagacaggccccctgggcagccgcagcacagccaagggccccagcctgcctgagctgcagttccagcctgaggagcctgaggagagcgagcccagccggggccaggaccccctgacagaccagaagcaggccgacagcgctgacaagaggcctgctgagggcaaggccggcagccccctgaagggccgcctggtgacctcctggaggatgcctggggaccggcccaccctcttcaaccccttcctgctgagcctgggcgtgctgcgctggaggaggccagacctgctgaacttcaagaagggctggatgagcatcctggatgagcctggagagccccccagccccagcctgaccaccaccagcaccagccagtggaagaagcactggtttgtgctgacagacagcagcctgaagtactacagagacagcacagctgaggaggctgatgagctggatggagaaattgacctgcggagctgcacagatgtgacagaatatgctgtgcagaggaactacggcttccagatccacaccaaggatgctgtgtacaccctgagcgccatgaccagcggcatcagaagaaactggattgaggccctgaggaagacagtgcggcccaccagcgccccagatgtgaccaagctgagtgacagcaacaaggaaaatgccctgcacagctacagcacccagaagggccccctgaaggccggggagcagagagctggcagcgaggtgatcagcagaggaggccccaggaaggcagatggccagaggcaggccctggactatgtggagctgagccccctgacccaggccagcccccagagggcccggaccccagcccggaccccagaccggctggccaagcaggaggagctggagcgggacctggcccagaggtctgaggagaggaggaagtggtttgaggccacagacagcaggaccccagaggtgcctgctggggagggcccccggcggggcctgggcgcccccctgacagaggaccagcagaaccggctgtctgaggagattgagaagaagtggcaggagctggagaagctgcccctgcgggagaacaagagggtgcccctgacagccctgctgaaccagagcagaggagagcggcggggccccccatctgatggccacgaggccctggagaaggaggtgcaggccctgcgggcccagctggaggcctggaggctgcagggcgaggccccccagagcgccctgcggagccaggaggatggccacatccccccaggctacatcagccaggaggcctgtgagaggagcctggccgagatggagagcagccaccagcaggtgatggaggagctgcagaggcaccacgagcgggagctgcagaggctgcagcaggagaaggagtggctgctggccgaggagacagctgccacagccagcgccatcgaggccatgaagaaggcctaccaggaggagctgagccgggagctgagcaagaccaggagcctgcagcagggcccagatggcctgaggaagcagcaccagagtgatgtggaggccctgaagcgggagctgcaggtgctgtctgagcagtacagccagaagtgcctggagatcggggccctgatgaggcaggccgaggagcgggagcacaccctgcggcgctgccagcaggagggccaggagctgctgcggcacaaccaggagctgcacggccgcctgtctgaggagattgaccagctgcggggcttcatcgccagccagggcatgggaaatggctgcggccgcagcaatgaaagaagcagctgtgagctggaggtgctgctgcgggtgaaggaaaatgagctgcagtacctgaagaaggaggtgcagtgcctgagagatgagctgcagatgatgcagaaggacaagcgcttcaccagcggcaagtaccaggatgtgtatgtggagctgagccacatcaagaccaggtctgagcgggagattgagcagctgaaggagcacctgcggctggccatggccgccctgcaggagaaggagagcatgaggaacagcctggccgagtag

SEQ ID NO: 31629 - DNA, 5070 bp, Artificial Sequence
  derived and/or modified sequence
atggaggaggtgcctggagatgccctgtgtgagcactttgaggccaacatcctgacccagaaccgctgccagaactgcttccaccctgaggaggcccatggagcccgctaccaggagctgcggagccccagcggggctgaggtgccctactgtgacctgccccgctgccccccagcccctgaggaccccctgagcgccagcaccagcggctgccagagcgtggtggaccccggcctgcggcccggccccaagaggggccccagccccagcgctggcctgcctgaggagggccccacagctgcccccaggagccgcagccgggagctggaggccgtgccctacctggagggcctgaccaccagcctgtgtggcagctgcaatgaagaccccggcagtgaccccaccagcagcccagacagcgccaccccagatgacaccagcaacagcagctctgtggactgggacacagtggagcggcaggaggaggaggcccccagctgggatgagctggccgtgatgatcccccggcggccccgggagggccccagggctgacagcagccagagggcccccagcctgctgaccaggagccctgtgggcggagatgctgctggccagaagaaggaggacacaggaggcggcggccgctctgctggccagcactgggcccggctgcggggggagagcggcctgagcctggagcggcacaggagcaccctgacccaggccagctccatgaccccccacagcggccccaggagcaccaccagccaggccagccctgcccagagggacacagcccaggccgccagcacccgggagatcccccgggccagcagcccccaccgcatcacccagagggacaccagccgggccagcagcacccagcaggagatcagccgggccagcagcacccagcaggagaccagccgggccagcagcacccaggaggacaccccccgggccagcagcacccaggaggacaccccccgggccagcagcacccagtggaacaccccccgggccagcagccccagccgcagcacccagctggacaaccccaggaccagcagcacccagcaggacaacccccagaccagcttccccacctgcaccccccagcgggagaaccccaggaccccctgtgtgcagcaggatgacccccgggccagcagccccaacagaaccacccagcgggagaacagcaggaccagctgtgcccagagggacaaccccaaggccagcaggaccagcagccccaacagagccacccgggacaaccccaggaccagctgtgcccagagggacaacccccgggccagcagccccagccgggccacccgggacaaccccaccaccagctgtgcccagagggacaacccccgggccagcaggaccagcagccccaacagagccacccgggacaaccccaggaccagctgtgcccagagggacaacccccgggccagcagccccagccgggccacccgggacaaccccaccaccagctgtgcccagagggacaacccccgggccagcaggaccagcagccccaacagagccacccgggacaaccccaggaccagctgtgcccagagggacaacccccgggccagcagccccaacagagctgcccgggacaaccccaccaccagctgtgcccagagggacaacccccgggccagcaggaccagcagccccaacagagccacccgggacaaccccaggaccagctgtgcccagagggacaacccccgggccagcagccccaacagagccacccgggacaaccccaccaccagctgtgcccagagggacaacccccgggccagcaggaccagcagccccaacagagccacccgggacaaccccaggaccagctgtgcccagagggacaacccccgggccagcagccccaacagaaccacccagcaggacagccccaggaccagctgtgccaggagagatgacccccgggccagcagccccaacagaaccatccagcaggagaaccccaggaccagctgtgccctgcgggacaacccccgggccagcagccccagcaggaccatccagcaggagaaccccaggaccagctgtgcccagagagatgacccccgggccagcagccccaacagaaccacccagcaggagaaccccaggaccagctgtgcccggcgggacaacccccgggccagcagcaggaacagaaccatccagagggacaaccccaggaccagctgtgcccagagggacaacccccgggccagcagccccaacagaaccatccagcaggagaacctgcggaccagctgcacccggcaggacaaccccaggaccagcagccccaacagagccacccgggacaaccccaggaccagctgtgcccagagggacaacctgcgggccagcagccccatccgggccacccagcaggacaaccccaggacctgcatccagcagaacatccccaggagcagcagcacccagcaggacaaccccaagaccagctgcaccaagagggacaacctgcggcccacctgcacccagagggacaggacccagagcttctccttccagagggacaaccctggcaccagcagcagccagtgctgcacccagaaggagaacctgcggcccagcagcccccacaggagcacccagtggaacaaccccaggaacagcagcccccacaggaccaacaaggacatcccctgggccagcttccccctgcggcccacccagagtgatggccccaggaccagcagccccagccgcagcaagcagagcgaggtgccctgggccagcatcgccctgcggcccacccagggcgaccggccccagaccagcagccccagcaggcctgcccagcacgaccccccccagagcagctttggccccacccagtacaacctgcccagccgggccaccagcagcagccacaaccctggccaccagagcaccagcaggaccagcagccctgtgtacccagctgcctacggggcccccctgaccagccctgagcccagccagcccccctgtgctgtgtgcatcggccacagagatgccccccgggccagcagccccccacgctacctgcagcacgaccccttccccttcttccctgagccccgggcccctgagagcgagcccccccaccacgagcccccctacatccccccagctgtgtgcatcggccacagagatgccccccgggccagcagcccccccaggcacacccagtttgaccccttccccttcctgcctgacaccagtgatgctgagcaccagtgccagagcccccagcacgagcccctgcagctgcctgcccctgtgtgcatcggctacagagatgccccccgggccagcagccccccccggcaggcccctgagcccagcctgctcttccaggacctgccccgggccagcacagagagcctggtgcccagcatggacagcctgcacgagtgcccccacatccccacccctgtgtgcatcggccacagagatgcccccagcttcagcagccccccccggcaggcccctgagcccagcctcttcttccaggaccccccaggcacctccatggagagcctggcccccagcacagacagcctgcacggcagccctgtgctgatcccccaggtgtgcatcggccacagagatgccccccgggccagcagccccccaagacaccccccaagtgacctggccttcctggcccccagccccagccctggcagcagcggcggcagccggggcagcgcccctcctggagagaccaggcacaacctggagcgggaggagtacacagtgctggccgacctgcccccaccccggcggctggcccagaggcagcccggcccccaggcccagtgcagcagcggcggccgcacccacagccctggccgggcagaggtggagcggctgtttggccaggagaggaggaccatgctgcctgccaagcaggccgagctgacccggcgcagccaggccgagcccccccacccctggagccctgagaagaggcctgagggggaccggcagctgcagggcagccccctgccccccaggaccagcgcccggaccccagagcgggagctgcggacccagaggcccctggagagcggccaggccggcccccggcagcccctgggcgtgtggcagagccaggaggagcccccaggcagccagggcccccaccgccacctggagaggtcctggagcagccaggagggcggcctgggccctgggggctggtggggctgtggggagcccagcctgggcgccgccaaggcccctgagggcgcctggggcggcaccagccgggagtacaaggagagctggggccagcctgaggcctgggaggagaagcccacccatgagctgccccgggagctgggcaagaggagccccctgaccagccccccagagaactggggcggccctgctgagagcagccagagctggcacagcggcacccccacagctgtgggctggggcgctgagggcgcctgcccctacccccggggcagcgagcggcggcctgagctggactggagggacctgctgggcctgctgcgggcccctggagaaggagtgtgggcccgggtgcccagcctggactgggagggcctgctggagctgctgcaggcccggctgcccaggaaggaccctgctggccacagagatgacctggcccgggccctgggccctgagctgggccccccaggcaccaatgatgtgcctgagcaggagagccacagccagcctgagggctgggccgaggccacccctgtgaatggccacagccctgccctgcagagccagagccctgtgcagctgcccagccctgcctgcaccagcacccagtggcccaagatcaaggtgacccggggccctgccacagccaccctggccggcctggagcagacaggccccctgggcagccgcagcacagccaagggccccagcctgcctgagctgcagttccagcctgaggagcctgaggagagcgagcccagccggggccaggaccccctgacagaccagaagcaggccgacagctag

SEQ ID NO: 31630 - DNA, 7098 bp, Artificial Sequence
  derived and/or modified sequence
atggaggaggtgcccggcgacgccctgtgcgagcacttcgaggccaacatcctaactcagaaccgctgccagaactgttttcatcccgaagaggctcacggagcgcgctatcaggagctcaggagcccatccggcgcagaggtgccatattgtgatctgccaagatgcccacctgccccggaggaccccctgagcgcctccactagtggatgtcagtccgtagtggaccctgggctgagacctggccctaaaagaggcccaagcccttctgccggcttgcccgaagaaggaccaaccgcagcgcctcggagccggagcagagaactggaagctgtgccctatctggagggattgaccaccagcctttgcgggtcttgcaatgaggatcctggatccgaccctaccagctccccagactctgccactcctgacgatacttccaacagttcgtctgtggactgggacacagtggaaaggcaggaggaggaagcaccctcatgggatgagttggctgtgatgattccccggagaccgcgtgagggcccaagggctgactcctctcagcgtgctccgagccttctaactcggtcacccgttggcggtgacgctgctggccagaaaaaggaggacacagggggcggtggacggtctgcgggacagcactgggctaggctcaggggcgagtccggcctgagcctggaacgccatagaagtacactgactcaggcgagctctatgacacctcacagcgggcctagaagcactacttctcaggcaagccctgcccaaagggacaccgcacaggctgcaagcaccagggagattccacgggctagtagtccccatcgcattacccagagagacacatcaagagcctcatcgacacagcaggagatcagccgagcttcaagcacacagcaggagacgtcccgggcttctagcacacaggaagacacccctcgcgcctctagcacacaagaggacacccccagggcaagctcaactcagtggaatacccccagggcctcaagcccaagtcgtagcacgcagctcgataacccccgcacatcctcgacccagcaagataatccacaaacaagcttccccacatgtactcctcaaagggaaaatccacgcaccccgtgcgtgcaacaggacgatcccagggcttcatcccccaataggaccacacagcgggagaattctcggacaagttgtgcccagcgtgacaatccgaaagctagtagaacaagctctcccaaccgagcaacccgggacaacccaagaacctcctgcgcgcagcgcgacaacccacgggcctctagcccaagtagagcaacccgagacaaccccaccaccagctgcgctcagagggacaacccccgcgctagtcggacatcctcacctaaccgggctacaagggataacccaagaacaagctgtgcccagcgggacaaccctcgggcaagtagcccctcccgtgctacgcgggacaacccaaccacctcctgcgcccaacgggataatccacgcgctagtaggaccagctcgcctaatcgggcaaccagagataatccgcgcacgtcttgcgctcagagagataacccccgggcctccagtcccaatcgcgccgccagggacaacccgacaacctcatgcgcccagcgggacaatccccgcgcgagtcgcacatcaagcccgaaccgggccactagagataatccccgaaccagctgtgctcagcgggataacccgagggccagctcccctaaccgagcgacacgcgacaatccaaccacgtcctgtgcccagcgggacaatcctagagccagccgtacgtcaagtcctaatcgcgccactcgggataacccacgcacctcttgcgcccagagggacaatccacgagcctcatcacccaatcgcacgacacagcaggactctccaaggacatcatgtgcccgcagagatgatccccgagccagttctcccaatcgtaccatccagcaggagaatccacggacaagttgcgcactgcgtgataatccaagggcatcttcgccgtccagaaccatccaacaagagaaccccaggacttcctgtgcccagcgagacgatcccagggcatcatcaccaaaccggacaactcagcaggagaatcctagaacctcctgcgctaggcgcgacaatcccagggcctcgtcccggaatcgcacaatacagcgcgacaatcccagaacaagttgtgcacagcgcgataacccccgagcatcatctcccaacaggaccattcagcaggagaacttgcgcacaagctgcaccaggcaagacaacccacgaacctcttcccctaaccgcgctacaagagacaaccccaggacaagttgcgcgcagagggacaacctgagagcctcttccccaatccgcgccactcagcaggacaatcccagaacttgcatccagcagaatatacctagatcgagcagcacacagcaggacaatccaaagacaagctgtaccaaaagggataatctgaggcccacctgtacacaaagggaccggacacaatctttttcttttcaaagagataacccaggaaccagttcgagccagtgttgtacacaaaaggagaacctgagaccatcgtcaccacacagaagtacccaatggaataacccaagaaattccagcccacaccgcaccaataaagacattccttgggcaagtttccccctgcgtcctacgcaatccgacggaccacggacaagcagtccatctaggtcaaaacaatcggaagtcccatgggcgtcaattgccctgagacctactcagggggacagaccgcaaaccagcagtccttctaggccagctcagcacgaccctccccaatcttcattcggccccacccagtataatctgccttctcgtgctacctcttccagccataatcccggccatcagtctacttctagaactagcagccctgtgtaccctgccgcttatggcgctccgctgacttcccccgagcccagtcaaccaccttgtgccgtgtgcatcgggcatcgggacgccccacgggcaagctccccacctaggtacctacaacacgaccctttccccttctttcctgaaccgcgcgcaccagagagcgaacccccccaccacgagcctccttacattccaccagctgtgtgtattgggcaccgggatgcgccgagagccagctcaccaccgcgacacacccagttcgatccttttccgtttttacccgatacaagcgacgccgagcatcaatgtcagtctcctcagcatgagcctctgcagcttcctgcaccagtgtgcattgggtaccgggatgcgcctcgggcatcgagcccaccacgacaggccccagagcctagccttctcttccaggatctcccaagggctagcaccgagtccctcgtgccttcaatggattctcttcacgagtgtccgcacatccctacccctgtatgcattggccacagggatgctccatcattctccagcccacctcgacaggcaccagaaccgagcctcttctttcaggaccctccgggcacctcgatggaatctctggccccctcgacggactcattgcacgggtcccctgtgctcattcctcaagtgtgcatcggtcatcgcgatgccccacgtgctagttcgccccctcgccacccccccagcgacctggcctttctggcaccatctcctagtccaggaagctccggcggaagtcgtgggtccgcacctccgggcgagaccagacacaatctcgagcgcgaagagtacacagtccttgctgaccttccaccgcctcggagactcgcccaaagacaacctggaccccaggcacaatgttccagcggcggacgcacacacagccctgggcgggccgaagtggagcgccttttcggccaggagcggcgaaaaagcgaggctgcaggcgcattccaggcccaagatgaggggagatcacagcagccaagccagggtcagagccagctcctccgcaggcagtcatccccagcacccagtaggcaagtgaccatgcttcccgctaagcaggcagaactgacccggaggtcccaggccgaaccaccacatccgtggtcacctgaaaagcgcccagagggagatcggcagctgcaagggtctcccttacctccccgaacttcagctcgtacaccagagcgagagctgaggacacagagacccctggaaagcggccaggccggcccccggcagcctctgggcgtatggcaaagtcaggaggagcctcccggaagccagggaccacacaggcacctggagaggtcttggtcttcccaggaaggcgggctgggtccaggtgggtggtggggttgtggggagccctccctgggtgctgcaaaggcgccagagggagcatggggcggtacgagtagagagtacaaagaatcgtgggggcagccagaggcctgggaagagaagccgacccatgagttgccacgagaactcggtaagcgctccccattgacgagcccgccagagaattggggcggccctgcagaaagtagtcaatcttggcattccgggacacctactgccgtgggttggggtgctgagggcgcatgtccatacccccgaggctctgaacgaaggccggaactggactggcgggacctcttaggcttgttacgcgcacccggagagggcgtctgggcccgggtgccgtctctagattgggagggtctgctggagttactacaggcaagattaccgagaaaggatccagctggccaccgtgatgacctggctcgagctcttgggcctgaactgggccctcctggaaccaatgacgttcccgagcaggagtcccacagccagccggagggctgggccgaagcgacccctgtaaatggccactcccccgctcttcaatcacaaagtcctgtgcaactgccaagccctgcatgcactagtactcagtggcccaagattaaagtgacccgtgggccagcaaccgcaaccctagcagggttggagcagacaggacccctaggtagtcgttcaacagcaaagggcccctccctacctgagctgcagttccagccagaagaacccgaggagagcgagccttctaggggccaggatcctctgacggatcagaagcaggccgattctgccgacaagcggccagcagaggggaaggcaggaagccctcttaaggggagactggtgactagctggaggatgcctggggatcgccccaccctgttcaatccttttctcctttctttaggagtgctcagatggaggcggcctgatcttctaaacttcaaaaaaggttggatgtcaatattggatgaacccggtgagcctccatccccaagtcttaccacaacctctacgtcccagtggaagaaacattggtttgtactcaccgattccagcctgaaatattaccgggattctaccgcagaagaagcagatgagttagacggcgaaattgacttacggtcgtgtacagatgtgacggagtatgccgtgcagcgtaattacgggttccagatacacactaaagacgctgtgtacacgctgtctgctatgacatctggcatcaggagaaactggatcgaggctctgagaaagactgtacgccccacaagtgctcccgacgtgacaaagctgtcagattctaataaggagaacgccctgcacagctacagcacccagaaagggcccctcaaggctggcgagcagagagccggctccgaggtaatttctaggggcggaccaagaaaggcggatggacagaggcaggctctggactatgtggagctgtctccacttacccaagccagtccacagcgagccagaacgccagcccgaaccccggatcggctggccaagcaggaggagctcgagcgagacctggcccagcggtccgaagagcggaggaaatggttcgaggctaccgactctagaacaccggaggttcccgcaggtgagggccccaggcggggactaggcgcccctcttacagaagaccagcagaacagactgagcgaggagatagagaagaagtggcaggaattagagaaactgcctttgcgggaaaacaaaagagtccctctgactgccttgctcaaccagtccaggggagagcgacggggccccccatctgatggccatgaagctcttgagaaggaagttcaggccctcagagcacagctggaagcttggaggttacagggtgaagccccccagagcgctttgaggagccaagaagacggccatatacctcccggctatatctcccaggaagcgtgtgagcgaagcctggcggagatggagtcatcacatcaacaggtgatggaggagctccagagacaccacgagcgggagctgcagcggctgcagcaggagaaggagtggctccttgccgaggagaccgcagcaaccgcctctgctatcgaggctatgaagaaggcctatcaggaggaattatcccgggagcttagtaaaaccagatccttacagcaaggccccgacggcctccgtaagcaacaccaatcagatgtcgaggcgctgaaacgggagcttcaggtgctatctgaacaatatagtcaaaaatgccttgaaatcggcgccctgatgaggcaggccgaagagcgagagcacaccctgcggcgctgccagcaggaaggccaagagctccttagacataaccaggagttgcatggtcgcctcagcgaggagatcgatcagctgcgcggtttcatcgccagccagggcatgggcaatggttgcggtagatcaaacgaacggtcctcatgcgaattggaggttcttttaagagtcaaagagaacgagctccagtacctgaaaaaagaagtgcagtgcctgcgggacgagcttcagatgatgcagaaagataaacgcttcacttcgggaaagtaccaggacgtgtacgtggagctcagccacataaagaccagatcggaaagggaaatcgaacagctaaaagagcacctgaggctagcgatggccgcattgcaggaaaaggagagcatgaggaacagtttggctgagtag

SEQ ID NO: 31631 - DNA, 5070 bp, Artificial Sequence
  derived and/or modified sequence
atggaggaggtgcccggcgacgccctgtgcgagcacttcgaggccaacattctaacccagaaccggtgtcaaaattgtttccatccagaggaagcccatggggcacggtatcaagagctgcgttctccgagcggtgcggaggtaccctattgtgacctgccgcgttgcccaccagcccctgaagacccgctaagcgcaagtactagcggatgtcagtcagttgtggatccgggcctgcggcctggacccaaacgaggaccatcacccagcgcagggctacccgaggagggtccaaccgccgcaccgaggtctaggagccgtgagctcgaagccgtcccatacctggagggcctgaccacgagcctgtgcgggagctgcaatgaggacccagggagcgatcctacttccagtcccgatagtgcaacgcctgatgacacgagcaattccagtagtgtcgattgggatacagtggagcggcaagaagaggaagcaccttcctgggatgagctggctgttatgattcctcgccggcctcgtgaggggccaagagctgatagttcccagcgagcaccctcgcttttaaccaggagccctgtggggggcgacgctgccggacaaaagaaagaagatactggtggcggcggccggagcgctggccaacattgggcccgcctccggggcgaatcgggcctcagcctagagaggcacagatcaacactgactcaggcctcctcaatgactccacactctgggccccgctctaccacaagtcaagcttctcccgcgcaaagagatactgcccaggccgcaagcacacgggaaatccctcgcgcttctagcccacacaggatcacccagagggacaccagccgagcatcgagcacgcagcaggaaatctccagggcctcatcgacccagcaggagaccagccgtgcctcctcaacccaggaagacactccacgcgcatcctccactcaggaagacaccccccgagcttcatcgacacagtggaacaccccccgagcaagttcaccaagcaggtccacacagctggacaacccccgcacctctagcacccagcaggataacccccagactagttttccaacttgcacgccgcaaagagaaaatccccgcacaccgtgcgtgcaacaggacgacccccgagcatcttcccctaataggacaacgcagcgggagaacagcagaacatcctgcgcccagagggacaatcccaaggcctccagaacgagtagtcctaacagagcgacacgcgacaatcctagaacttcatgcgctcagcgcgataatcccagggcaagttcgcccagccgggctacccgggacaaccctacaacctcttgtgcacaacgcgataaccctcgagcttctcgaaccagctctcctaacagagctactcgtgacaacccgaggacgagctgcgcccaacgcgacaatccaagggcttcttcccccagtcgcgcaacacgcgacaaccccacaacaagttgtgcacaacgggacaaccctagagcttccagaacctcgtctccaaaccgggccacacgggacaatcctaggactagctgcgcacagcgggataatccacgggctagcagtccaaaccgcgctgctcgcgacaatcctacaaccagctgtgcccaacgggacaaccctcgggcctctcggaccagttcccccaatcgcgcaacccgggacaatccccgcacttcatgcgctcagcgcgacaatccccgcgcctcctcgcccaaccgggcaacgcgggataatcccaccacatcctgtgctcagcgcgacaacccccgggcctccaggaccagttcaccaaacagagctacaagggacaaccctcgcactagttgtgcgcagcgggataatccacgggcatcttctcctaaccgcactacccagcaagattctccgaggacatcatgtgctagaagggatgatcccagggcttcatcgccgaataggaccattcagcaggagaaccccagaacctcttgcgccctgagagataatcctcgagctagcagccccagtcgcaccattcaacaggagaaccctcgaacttcatgcgcacaacgggacgatccacgggccagctcccccaaccggacaacacagcaggagaatcctaggacaagctgtgccagacgcgacaacccacgagcgtcatcacgaaatagaacaatccagcgcgacaaccccaggacttcatgcgcacagagagacaatccgcgggccagtagccccaaccgcacaatccagcaagaaaatcttcgcacctcatgtactagacaggacaatccacgcacctccagcccaaaccgggctactcgcgacaatcctagaaccagttgcgcccagagggacaatcttcgggcctcaagtccaatcagggcaacccagcaggataacccgaggacatgtatacagcagaacattccccggtcctcaagtacccagcaagataaccctaaaacctcatgtacaaagcgcgataatttgcgcccaacatgtacacagcgcgatagaacgcagagcttctcatttcaaagagacaacccaggaacctcttcttcccaatgttgcacacagaaggagaatttacgccccagcagcccgcatagatcaacccagtggaacaatcccaggaatagttctcctcacagaactaacaaggatattccctgggcgagcttcccattgcggcctactcaaagcgacggacccaggacaagttcaccctctaggtcaaaacaatcagaagttccgtgggcctctattgctctgcggccaacccagggcgatagacctcagaccagctctccctctcggccggctcaacacgatccaccccagtcttctttcgggcctacacaatataacctcccatctcgcgccacttctagctctcataatcctggccatcagtcaacaagtagaacatccagccccgtgtatccggccgcatacggcgcaccactgacgagccctgagccatcccagccgccatgcgctgtgtgtataggccatcgggacgcgcctagagcgagtagtcccccccgctacctgcagcacgaccccttccccttctttcctgaaccacgagctcccgaatcagagccgcctcaccacgagcctccttatattccgcccgctgtatgtatcgggcatcgcgatgcaccgagggcgagtagcccacccagacacactcagttcgaccccttccccttcctgccggacactagtgacgcggaacaccagtgtcagtctccacagcatgaaccactgcaactaccagcgccagtgtgcatcggatacagagatgctccgcgggcatctagcccccccaggcaagctcctgagccttctcttctgtttcaggacttaccaagagcatctacagaaagcctcgtgccctcaatggacagcctgcacgaatgtccacacatcccaactcctgtctgtatcgggcatcgcgatgctccaagttttagtagcccccccaggcaggcacctgaacccagcctgttctttcaggatcctccaggtacaagcatggagagcctcgctcccagtacagacagtcttcatggatcacccgtgctgatccctcaggtgtgtatcgggcaccgcgacgccccccgtgcatctagcccaccccgccatcccccctctgatttggcttttctcgcccctagcccatcacccggatcaagcggggggtcccgaggttcagctccaccgggagaaactcggcacaatctcgaacgagaagagtatactgtgttggcagatctacccccccctagacgccttgctcagcggcagcccggaccacaggcccagtgttcttccggcgggaggacccactcgcctggcagagctgaggtcgagcggttatttgggcaggaacgacgcaccatgcttccggctaaacaagccgaactgacccgaagatcccaagctgagcctccgcacccatggtcccctgagaaacgaccggagggtgatcgccaattacaaggctccccgctgccacctaggaccagcgctaggacaccggagcgcgaactgcgtactcagcgcccgctggagagcgggcaggccggtccgcgtcagcctctgggagtgtggcagtcacaggaggaacctccgggctcccagggaccccatagacatttagagagatcctggtcgtcgcaagaaggcggtttgggccccggagggtggtggggttgtggcgagccttcactcggggcagcaaaggccccagagggcgcttggggcggtacttccagagagtacaaggaaagctggggacagcctgaggcgtgggaggaaaaacctacacacgaacttccaagggaattagggaaacgtagccctcttacaagccctccagagaattgggggggacctgcagaatcttcgcagtcatggcattctggaactccgaccgccgtgggttggggggcggaaggcgcctgcccttacccccgaggaagcgagcgccgccccgaattagattggcgcgacctcctaggcctgcttagagccccgggagagggggtctgggcacgggtgccatcacttgactgggaaggtctcctggaactgctgcaagcccggctgccccgtaaagaccctgccggtcacagggatgatctagcccgagctcttggcccagaattaggccctcccggtaccaacgacgtgccggaacaggaaagccatagtcagcccgaggggtgggccgaggctacgccagtgaacggacattctcctgcccttcagtcccagagcccagttcagctgcctagccctgcttgcacctctacccaatggcccaagatcaaggtgacacgcggacccgcaaccgcaaccttggccggtttagaacaaacgggacctctgggttctcggagtaccgcgaaagggccaagtctcccggagcttcaattccagcccgaggaaccagaagagtctgagcccagcagaggccaagaccccctgacggatcagaagcaggctgactcatag

SEQ ID NO: 31632 - DNA, 7097 bp, Artificial Sequence
  derived and/or modified sequence
atggaagaggtgccaggcgatgcactttgcgagcacttcgaagctaatatacttactcagaatcgatgccagaactgctttcaccctgaagaggctcacggggctcgctaccaagagctgcgttcaccgagtggtgctgaggtgccctactgcgatcttccgcgatgcccgcctgcacccgaggatcctctctccgcttccacctcaggatgccagtccgtggtagacccaggtctgagacccggacctaagcgcggaccttcacccagcgcaggtctccctgaggagggcccaaccgctgctccaaggtctaggagtcgggaactggaggccgtaccctacttagaagggttgaccacaagtctgtgtgggtcatgcaatgaggacccgggaagcgacccaacgtcttctcccgactccgctacccccgatgacacatctaatagctccagtgtcgattgggacactgtggagagacaggaggaggaagcaccctcctgggacgaactggccgtcatgattcctagaagacctcgggaaggcccaagagccgatagctctcaaagagccccttctctgctcacccgctccccagtcggcggagacgcagcgggtcagaagaaggaagacaccggcggtggcggtagatccgcagggcagcactgggccagacttagaggggagagcggcctgagcctggagcgacacagatcaacactgacacaggcctcttcgatgaccccgcactctgggccacggtcaactacctctcaggcttcccctgcgcagcgcgacactgcccaggcagctagcaccagagaaataccacgcgcaagctccccgcacagaataacccagagagacacgagtagggcatcctctacgcagcaggaaatatccagagcaagcagcactcaacaggaaacttcccgcgcatcctccactcaggaggacacacctagggcctcatctacgcaagaggacacaccacgcgcatcatccactcagtggaatacacctagggcctctagcccctcacgctccacccaactcgataacccaagaaccagcagcacacagcaggacaatccacagaccagtttcccaacgtgcacgccccagcgtgagaaccctcggacaccatgcgtgcagcaagatgaccccagggcctctagtcccaacaggactactcagagagagaactctcgcaccagctgcgctcagagggataacccgaaagctagccggacgtcttcccctaatagagctactcgtgacaacccgaggacctcttgcgcgcagagggacaacccgcgtgcaagctctccctcacgcgcaacacgggataaccctaccacatcttgcgcccagcgagacaaccccagagctagcagaacctcgagccccaaccgcgcaacccgggataatccaagaaccagttgcgctcagcgggacaaccctcgagcctcgagcccctcacgcgcaaccagagataatcccacgactagctgtgcacagcgcgataacccgagagccagcagaactagtagtcccaacagagctacacgcgataacccacgcacgtcctgtgctcagagagataatcctcgagctagctctcctaatagggctgccagagataatccgactacatcctgcgctcagcgtgacaaccctcgggcaagccggacgtcttcccctaacagagcaacgagggacaatccccgaaccagctgtgctcagcgtgataacccgcgagccagttcacctaaccgagcaacaagggataaccctaccacgagttgtgcccaaagggataacccacgggcatccagaacatcaagcccaaacagagcaaccagagataatcccagaacctcctgtgctcagcgggacaacccccgagcttccagccctaaccgcaccactcagcaggactctcctagaacatcttgcgctcgccgtgacgacccgcgagcctcatctccgaacaggacgatacagcaggagaatcctcgtacttcctgcgctctcagagataaccccagggcttccagtccatccagaacgatccagcaagaaaatcctaggacgtcctgtgcccagagagacgatcctagagcctcatccccaaacagaacgacacagcaggagaatcccagaacctcttgcgcccgtcgcgataatccgagggcctcttcacggaatcgcaccatccaacgagataatccgcgtacctcttgcgcacagagagataacccaagggctagttcccctaaccggacaatccagcaggaaaatcttaggactagttgcacacgtcaagataatcccaggacatccagcccaaacagagcaactcgcgacaaccctcgaacgtcatgtgcccaaagagacaacctgagggcatcctcacccattagagcaacccagcaggataaccctcgcacatgtatccagcagaatatcccccgttcctctagcacccagcaagataaccctaaaacaagttgtaccaaacgggataatctgcggccaacgtgcactcaacgtgatcgaactcagagctttagctttcagagagacaatcctggaacctcttcctcacagtgctgcacacaaaaggaaaatctccgtccttcctctcctcaccgcagcacccagtggaataatccacgaaacagtagtccacacaggactaacaaggacataccatgggcatcatttccattgagacctacacagagcgatggcccacggaccagttccccatcacgcagtaagcagagcgaagttccatgggcatcaattgcactgaggccaacgcagggagaccgaccgcagacttcctctccatctagacccgcacagcacgatccaccacagagctcctttgggccaacccagtacaacctcccttccagggcgactagctcttcccataatcctgggcaccagagcacctcccggaccagctctccggtctaccctgccgcttatggcgctccactgactagcccggaacctagccagcccccttgtgccgtctgtattggacacagggatgctccacgggcatcctcaccaccgagatacctgcaacacgatcccttcccctttttccctgaacctcgagcccctgaaagtgagccacctcaccacgaacctccttacatcccacccgctgtgtgcattggccacagggatgctccaagagcatcttcccctcctaggcatactcagttcgacccattcccctttctgcctgatacctctgatgccgaacatcagtgccagtctccccagcacgagccactgcagctgccggctcctgtttgcattggttacagggatgccccacgggcatcgtcacctccccgtcaggcaccggagccatcactgctgtttcaagacctcccacgagccagcacagaaagtcttgtgccgtctatggatagcctccacgagtgccctcacataccaactccagtttgcatcggccatagagacgcacccagtttttcatccccccctaggcaggcccctgaaccgtcattatttttccaggaccctcccggaacatccatggaatctctggccccaagtaccgacagcctgcacgggtctcccgtgttaatcccacaggtatgcattggccaccgagatgcccctagggcctcgtccccacccaggcatcccccttctgatttggctttcctcgcaccgagtcccagtcccggatccagcggcggaagtaggggctccgcccctcccggtgaaaccaggcacaacctggaacgtgaggagtacaccgtgttagcagatctgccgccacccagacgacttgcccagcggcaacctggaccgcaggcccagtgcagctctggcggtagaactcattcccctggaagagcggaggtcgaaaggctgttcggacaagaaagacgcaaatccgaggctgccggagccttccaggcccaggatgaggggagaagtcagcagccgtcccaaggacagtcacagcttctgaggcgccaatcctcacccgctccttcccgccaagtcactatgctcccagccaaacaagcagaattgacgcgcaggtctcaagccgagcccccacatccctggagcccggaaaaaagacccgaaggggacaggcagctacagggctctccgttgcccccaaggacttccgcaaggactcctgaacgggaactgcggacacagcgtcctctggagtctggccaggctggacccagacagccacttggagtgtggcagtcccaagaggagccacccggatctcagggaccccatagacacctagagagatcttggagcagccaggagggcggactggggccagggggttggtgggggtgtggggagccaagtctcggagcagctaaagctcctgagggagcctggggcggaacttctagagaatacaaggagtcatggggccagcccgaggcctgggaagaaaaacccacccacgagttacctagagaactgggcaagcgcagcccgctgacgagtcctcctgagaattgggggggaccagccgaatcttcacagagttggcactcaggaacaccgactgcggtgggctggggcgctgagggcgcatgcccctaccctcggggatccgagcggcgtcccgaattggactggagggacctcttaggcctgttaagggcgcctggagagggagtttgggctcgggttccaagtcttgactgggaaggcctgttagagcttctgcaagctcggttgccaagaaaagatcctgccggacacagggatgatctggccagggcgctggggcctgaactcgggcctcccggaactaatgatgtccccgagcaagaaagccactctcagcctgaggggtgggctgaagcaacccccgtcaacggccatagtcctgccctacagtctcagtccccagtgcaactgccatcccccgcttgtacatccactcagtggccaaagattaaagtcacccgcggacctgccaccgccacactggccggactggaacagacaggccctctcgggagcaggtccaccgctaaaggcccatctctgccagagctgcagtttcagcccgaagaacccgaagagtccgaaccgagcaggggacaggatcctctcacagaccagaagcaggccgattctgccgataagaggcccgctgaaggcaaagccggatccccccttaagggtcggctggtgacctcatggcggatgcctggggaccggcctactttgtttaatcctttcttgctttccctgggggtgctgagatggagacgcccagatttgctcaacttcaagaaaggatggatgtcaatcctcgacgaacccggagagccgccaagcccttcactcacaactacatccacttcccagtggaaaaagcattggttcgtcctcactgactcatcccttaagtattaccgagatagcaccgcagaagaagccgacgaacttgatggcgagatcgacttgaggtcttgtacagatgttactgaatacgcagtgcagcggaattacggcttccagattcatacgaaggacgctgtttacacactgtctgccatgaccagtgggattcggaggaattggattgaagcgctgaggaagacagtccgaccaacctctgcaccagatgtgaccaagctgtccgattcgaataaggagaacgccctgcacagttacagtactcaaaaaggcccactgaaggcaggtgaacagcgggctggcagtgaggtcatctcaaggggaggcccacggaaggcggatggccagcggcaggctctggactatgtggagctgagtcctctgactcaggccagtccccaacgcgctaggactcctgcgcgaacacccgatcgcctagcgaagcaggaagaactcgaacgcgacctggctcagcgttcagaggagcggagaaaatggttcgaggcaacagacagcagaactcccgaggtgccggctggagaggggccaagacgaggacttggagctccactcaccgaagatcagcagaaccgcctgagcgaggagatagagaagaaatggcaagaactggagaagctgccactgagagagaataaacgtgtgcccctcactgctctcctgaatcagtcacggggagaacgcagagggccaccttcggatgggcacgaagcactcgagaaggaagtacaggcccttagagcccagctagaggcatggcggctgcagggggaggctccacagtccgccctgaggtcacaggaggacggtcatattccgccagggtatattagccaggaggcgtgcgaaaggtcccttgccgagatggaatctagccaccagcaggtgatggaagagttgcagcgccaccatgagcgcgaactgcaaagattgcagcaggaaaaagaatggctcctcgccgaagaaactgccgcaaccgccagcgctattgaagctatgaagaaggcgtatcaggaggagctgtctcgagaactgagtaagaccaggtcacttcagcagggccctgatggactccggaaacagcaccagtccgatgtcgaggctctgaaaagagagctgcaggttctgagcgaacagtatagtcagaagtgtctggagatcggcgcactcatgcgacaggcggaggagcgggagcacaccctgcggagatgccagcaggaaggccaggaactgctcagacataaccaagagctacacggccgactgtcagaagagatcgaccagctccgcggtttcatagcctcccagggcatgggaaacggatgcggaaggtccaatgagcggtcatcttgtgagctggaggtgttactcagggtcaaggagaatgagctccagtacctgaaaaaggaagtgcagtgtcttagagatgagctgcaaatgatgcagaaggacaagcgtttcacatccggcaaatatcaggatgtctatgtggagctgtctcatatcaagacccgctccgagcgtgagattgaacagctcaaagagcatctgcgtctcgcaatggccgctcttcaagaaaaagaaagcatgcggaactccctcgcagagta

SEQ ID NO: 31633 - DNA, 5070 bp, Artificial Sequence
  derived and/or modified sequence
atggaagaggtaccaggcgatgccctgtgcgagcatttcgaagcgaacatacttacccaaaatcgctgtcaaaattgctttcacccggaagaagcgcacggagctcggtatcaggagctgcgtagcccctctggggctgaggtgccttactgtgacttgccacgatgtccccctgctcctgaggacccgcttagtgccagcacaagcggctgtcagtccgttgtcgacccgggactcagacccggtccaaagagaggcccaagtccaagcgctgggttgcctgaggagggtcctaccgccgcacctcgatcccgcagcagggagcttgaagctgtcccctatctggaaggactgactacgtctctgtgcggatcatgcaacgaagaccccggttctgatcccaccagctcccccgatagtgccacccctgacgatacctctaattcatccagtgtggactgggacaccgtggagcgccaagaggaggaggccccaagctgggacgagctcgctgtcatgatacccagaagaccacgggaggggccaagggccgacagtagccagcgcgcaccgtccctcctcactcgctccccagtaggcggtgacgccgctggacagaaaaaagaagataccggcggagggggtcgatcggcaggccaacattgggcaaggctcagaggcgagtcgggcctttcactagagaggcacaggagtaccctgacacaggcaagttcaatgacaccccactctggccctcgctctactacctcccaggcctcgccggctcagagggacactgcgcaagctgcttccactcgggaaatacctagggccagcagcccccacaggataactcagcgggacacttcgcgagcttcttctactcagcaggagatatctcgcgcttctagcactcagcaggagacaagtagggcctcctcaactcaagaggacactccccgagcctccagtacacaagaggatacccccagggcctcctcaactcaatggaatacaccacgcgcatcgtcacccagcagatctacccagctggataatccacggacatcttccactcaacaggacaacccccagacttcattcccgacctgtaccccgcaacgggagaaccctcgcaccccctgtgttcagcaggacgaccctcgcgcttcctcacccaatcgcacaacccagcgggagaacagccggacgtcatgtgcacagcgagataacccgaaggcgagccggacctctagtcccaatcgggcaacacgggacaatcctcggactagctgcgcccagcgtgacaatcccagggctagctctccaagcagggccacaagagacaaccctaccacaagttgtgcccaaagagacaatccacgagcttctaggacgagctcccccaacagggctacacgcgataatcccaggacatcgtgcgcgcagagagacaatccccgtgccagtagcccttccagggcgacacgcgacaacccgaccaccagctgtgcccagagagacaaccccagagcctctagaacaagttcgcctaaccgagccacccgggacaaccctagaactagttgcgcccagcgagataatccacgagcttcatcacccaacagggccgctagagacaatccaacaacttcatgcgcacaacgggacaaccctcgcgctagccgaactagctcgccaaaccgcgcaaccagggacaacccacggactagctgcgcacagagagacaacccacgagcttcttccccaaatcgagctacacgagacaaccccacaacctcctgcgcccagcgtgataacccccgtgcaagtcggacatcatcaccaaaccgggctacccgggacaacccaaggacgagctgcgcacagagagacaacccgagggccagcagcccaaacagaacaacccaacaagattccccgcgtactagttgcgccaggagggacgaccctcgcgctagttctcccaacaggactatacaacaggagaaccctagaacctcttgtgcgctgagagacaaccccagagcatcatcccccagccgaaccattcagcaggaaaatcctaggaccagctgcgcccaaagggacgatccacgggctagctcccctaacagaacgacgcagcaggagaatcccaggacatcatgtgctaggagggataatcctagagcctccagcagaaatagaacaattcaacgcgacaatcctcgaacgtcttgtgcccaacgtgacaatccaagagcgtcctcacctaatcgcacaatccagcaggagaaccttcgcactagctgcactaggcaagataatccgcgtacctcatcacccaacagggctacccgcgataacccacgcacaagttgcgcacaaagggacaacctcagagcaagttcgccaattcgagctacgcagcaggataaccctagaacctgtatccagcagaacattccaaggagcagtagcactcagcaggacaatcctaaaactagttgcacaaagcgagataacctgaggccaacatgcactcagagagatcgcacgcagtctttctcatttcagcgcgataatccgggaacctcttcaagccagtgttgtactcagaaagagaatcttcgtccatcctcgcctcaccggtcaacacagtggaacaaccccagaaattcttcaccccaccgtacaaacaaagatatcccgtgggcgtcctttcctcttcgccctactcagtcagatggtcctcgaaccagttcaccatctcgatccaagcagagcgaagtcccttgggcgtcaatcgccctccgtcccactcagggcgacaggccccagacatctagcccttctagaccagcccagcacgatccccctcagtcttctttcggaccaactcagtataacctaccttcacgagcaacttccagctcccacaatcccggtcatcagagcacgagtcgtacctcgagccctgtgtacccagctgcctatggcgcacccctgaccagcccagaaccctcccagcctccttgcgccgtctgtattggacaccgggatgcccctcgcgcatcgtcacctccaaggtacctccaacacgaccctttcccatttttccccgaacccagagcccctgagagtgagccaccccaccacgagcctccctacattccccctgccgtgtgcatcggtcaccgcgatgctcctagagcatcttcaccccctcgccacacgcaattcgacccgtttccgttcctgcccgacacaagcgacgccgaacaccagtgccaaagtccccagcacgagcccctgcagctccctgcaccagtgtgcattggctaccgcgatgctcctagggctagctcaccccctaggcaggccccagagcccagcctgctcttccaagacctgccaagagctagcactgagtccctggtcccgagcatggattccctacacgaatgtccccacattccgacgcccgtgtgcattgggcacagagacgcaccttccttctcctctccacctcgccaggcccctgaacctagcctctttttccaggatccccctggtacaagcatggagagtctggctccttcgaccgatagccttcacggctctcccgtgttaattcctcaggtgtgtattggacaccgggacgcacccagagcgtctagtcctccacgacatcccccttccgatttagccttcttagcccctagtccgtctcctgggtcaagcggcggaagcagagggtcagctcctcctggtgaaacccgacacaatctcgaacgggaggagtatactgtgctcgcggatcttccaccacctcgtcgattggcccagcgccaacccggtcctcaggcccagtgtagcagcggtggaagaacacatagcccaggacgtgccgaagtcgaacgactatttggacaggagagaaggaccatgctgcccgctaagcaggctgagctcacacggcgatcgcaagccgaaccgcctcatccctggagccccgaaaaaagaccagagggagatcggcagctgcaggggagcccattgcctccccgaacctctgccagaactcctgagcgagagctgcggacccagcgtccactcgagagcggtcaggcaggccctcgccaacctcttggagtctggcagtcacaggaagaacccccaggatctcaggggccacatcgccacctggagagatcttggtcctcccaagaaggtggcttggggccaggtgggtggtggggctgtggcgaaccaagtctgggtgctgccaaagcccctgaaggcgcatggggaggcacaagccgggagtacaaggagtcgtggggccaacctgaggcctgggaggagaagccgacacacgagcttccaagagagcttggtaaacgatcccccttaaccagcccacccgaaaactgggggggaccagctgagtcctctcagagctggcactcaggtacccctacagcagtgggatggggtgcagaaggcgcatgcccatacccacgtggatcggaaaggcgccctgagctcgattggagggatctcttaggactcctgcgggcaccaggcgaaggagtgtgggcaagggtgcctagtctcgactgggagggcctgttagaacttctgcaggctcggctccccaggaaggatccagcaggacacagagatgatcttgcacgcgctttggggcctgagctgggacccccaggcacaaacgacgtgcctgaacaagagtcccacagtcagccagagggatgggccgaggcaactcccgtaaacggacacagccctgctctccagtctcagagccccgtgcagctgcccagcccagcatgcacatccacccagtggcccaagataaaggtgactagaggaccggctaccgccacgctggctggactcgagcagactgggcctttgggaagtcgatctactgccaaaggaccctctttacctgagttgcagtttcagcctgaggagcccgaggagagcgaacctagcaggggccaggaccccctgaccgaccagaagcaagcagactcctag

SEQ ID NO: 31634 - DNA, 10129 bp, Artificial Sequence
  derived and/or modified sequence
atcgctctgattcattgttaaaataaagaggccatgaccctggcactcccaccccggcagcccctgtgcgtggaaacccagccaaggtctgatgatggaggagccttggccctggctgtcccaggggaggaggtgaaattcctcagctctccaccaagattggccacaaaagcctgatcccctggaacacagcaggcctcacatagacggtcagccattggatcataggaactgccctggcctgactcacccaatatggaggaggtgcctggggatgccctgtgtgaacactttgaggccaacatacttacccagaaccgctgtcaaaactgcttccaccctgaggaggcccatggagcaagataccaggagctcaggagcccttcaggtgctgaggtgccctactgcgacctgcctcgatgtccacctgcccctgaggacccactcagcgcctcaacctccggctgccagtctgtggtggacccaggcctcaggccagggcccaagaggggcccatccccctcagcagggctcccagaagagggtcccacagctgcccccaggagcaggagccgggagcttgaggcagtaccctatctggagggcctgaccacttccttgtgtggcagctgcaacgaggaccccggctctgaccccacctccagccctgactccgccacccctgatgataccagcaactcgtcctctgtggactgggacactgttgagaggcaggaggaggaggcccccagctgggacgagctcgcagtgatgatcccgaggaggcctcgggaggggccgagagctgacagctcccaaagggctccgtctctcctcaccaggtcccctgtgggaggagatgctgcaggccagaaaaaggaggacaccggcggtgggggccggagcgcaggacagcactgggcaaggctccggggagaaagcgggttgtccctggagcggcaccggtcaacactgacccaggcttcctccatgacaccacacagtggacctcgaagcaccacgtctcaggcttctcctgcccaaagggacactgctcaggctgcctctacacgtgaaatccccagagcctcctctccccatcgaatcacccaaagggacacctccagggcctcatccacccaacaggaaatctccagggcctcatccacccaacaggaaacctccagggcctcatccacccaagaggacacccctagggcctcatccacccaagaggacacccccagggcctcatctacacagtggaacacccccagagcttcctctccctcacgaagcacccaactggataaccccagaacctcttctacccagcaggacaacccccaaacttcttttcctacttgtactccccagcgggaaaaccccaggacaccctgtgtccagcaggacgatcccagagcctcctctcccaacagaaccactcaacgagagaattccagaacatcctgtgcccagcgggacaatcccaaagcctccagaacctcctctcccaatagagccacacgagacaaccccagaacatcctgcgcccagcgggacaatcccagagcctcctctcccagtagagctacacgagacaaccccacaacatcctgtgcccagcgggacaatcccagagcctccagaacctcctctcccaatagagccacacgagacaaccccagaacatcctgtgcccagcgggacaatcccagagcctcctctcccagtagagctacacgagacaaccccacaacatcctgtgcccagcgggacaatcccagagcctccagaacctcctctcccaatagagccacacgagacaaccccagaacatcctgcgcccagcgggacaatcccagagcctcctctcccaatagagctgcacgagacaaccccacaacatcctgtgcccagcgggacaatcccagagcctccagaacctcctctcccaatagagccacacgagacaaccccagaacatcctgtgcccagcgggacaatcccagagcctcctctcccaatagagctacacgagacaaccccacaacatcctgtgcccagcgggacaatcccagagcctccagaacctcctctcccaatagagccacacgagataaccccagaacatcctgtgcccagcgggacaatcccagagcctcctctcccaacagaaccacccaacaagacagccccagaacatcctgtgcccgacgggacgatcccagagcctcctctcctaacagaaccatccaacaagagaaccccagaacatcctgtgccctacgggacaatcccagagcctcctctcccagcagaaccatccaacaagagaaccccagaacatcctgtgcccaacgggacgatcccagagcctcctctcctaacagaaccacccaacaagagaaccccagaacatcctgtgcccgacgggacaatcccagagcctcctctcgcaacagaaccatccagcgagacaaccccagaacatcctgtgcccagcgggacaatcccagagcctcctctcctaacagaaccatccaacaagagaacctcagaacatcctgtacccgacaggacaatcccaggacctcctctcccaatagagccacacgagacaaccccagaacatcctgtgcccagcgggacaatctcagagcctcctctcccatcagagccacccaacaggacaaccccagaacttgtattcaacagaacatccccagatcatcttctacccaacaagacaaccctaaaacctcttgtaccaaacgagataacctcagacccacttgtacacagcgggaccgcacacagtccttttcctttcaacgagacaaccctggaacctcctcatctcaatgctgcacccaaaaggagaatctgagaccatcatctccccaccgctccactcaatggaacaatcccaggaattcatctccccatcgtactaacaaagacatcccctgggcctcgtttcccctccggccaactcagagtgatggtccccgaacctcttccccatctcgctccaagcaaagcgaggttccctgggcatccatcgccctccggccaacccaaggtgacaggcctcagacatcctctcccagcaggccagcccagcatgacccaccccagtcctcctttggccccacccagtacaacttgccatcccgggccacctcttcctcccataacccaggccaccagagcacctcccgaacttcctcacctgtgtaccccgctgcctatggggctcccctgacctctcctgagccctcccagcctccatgtgctgtgtgcattgggcaccgggatgcccctcgagcctcttcgccccctcgctatttgcagcacgaccccttccccttcttcccagagccccgcgcccctgagagtgaaccgccccaccacgagcctccctatataccacctgctgtgtgcattggacaccgagatgccccccgggcgtcctcgcccccccgccacacccaatttgaccccttccccttcctcccagacacatcagatgccgagcatcagtgtcagtccccccaacacgagccccttcagctccctgcacctgtgtgtattgggtaccgagatgcaccccgggcctcctccccaccacgccaggccccagagccttccctcttattccaggacctccccagggccagcacagagagccttgtcccttccatggactctctgcacgagtgcccccacatccccacccctgtgtgcattgggcaccgggatgcaccctccttctcatccccaccacgccaggctcctgagccatccctcttcttccaggatccccctggaactagtatggagagcctggccccctccactgactctctgcatggctccccagtgctgatcccccaagtgtgcatcgggcaccgggatgcaccccgagcctcctccccaccccgccacccacccagtgacctagcgttcctggcaccctcaccttcaccgggcagctctgggggctcccggggctcagcgcctcccggggagaccaggcacaacttggagcgggaggagtacactgtgctggccgacctgcccccacccaggaggctggcccagagacagccagggccccaggcgcagtgcagcagcgggggccgcacccacagccctggccgtgcagaggtggagcgcctcttcgggcaagagcgcaggaagtccgaggcagcgggggccttccaggcccaggacgagggacggtcacagcagcccagccaaggccagagccaacttctccgaagacagtccagccctgcccccagcaggcaggtgaccatgctccctgccaaacaggcagaactgacccggcggagccaagcagagccccctcatccttggagtcctgagaagagacctgagggagatcggcagctccaggggtccccgctgccccccaggacatcagccaggacccctgagagggagctgcggacacagagacctctggagagtggccaagcaggcccaagacagcctctgggggtgtggcagagtcaggaggaaccgccagggtcccagggccctcatagacacctagaaaggagctggagcagccaggagggaggcctgggccctgggggctggtggggatgtggagagcccagcctgggggcagccaaagccccggagggagcatgggggggcacttccagggagtacaaggagagctgggggcagccagaggcctgggaggagaagcccactcatgagctccccagagaactaggaaagagaagcccactcacgagcccccctgagaactggggaggccccgcagagtcctcacaatcctggcactctgggacacccactgctgtgggctggggggcagagggagcgtgtccatacccgcgtggctctgagaggcgacccgagcttgactggagggatctgcttggccttctccgggcaccaggagagggggtctgggcccgtgtccccagcctggactgggagggcctcttggagctcctgcaggccaggctgccccgcaaggacccagctggacacagggatgacctggccagggctttagggccagagctgggtcccccaggcacaaacgatgtccctgagcaggagtcacacagccagccagaaggctgggccgaggccaccccagtcaatggacacagccccgcactgcagtcccagagcccggtccagctgcccagccctgcctgcacctccacccagtggccaaagatcaaagtgacaagaggaccagcgaccgcaactctggcaggcctggagcagacgggccccctggggagcaggagcactgcgaagggccccagcttgccagagctgcagttccaaccagaggagcctgaggagtcagaaccaagcagaggccaagaccccctgactgaccagaagcaggcagactcggcagacaagaggccagcagagggcaaggctgggagcccgctcaagggccgactggtgacctcatggcggatgcccggggaccggcccacgctgttcaatccgttcctgctgtctctgggggtcctcaggtggcgaaggcccgatctgctcaacttcaagaagggatggatgtcgatcttggacgagcctggagagcctccctccccctcgctcaccaccacctctacttcgcagtggaagaaacattggtttgtgctgacagattcaagtctcaaatattacagagactccactgctgaggaggcagatgagctggatggtgagatcgacctgcgttcctgcacggatgtcactgagtacgcggtgcagcgcaactatggcttccagatccacaccaaggatgctgtctataccttgtcggccatgacctcaggcatccggcggaactggatcgaggctctgagaaagaccgtacgtccaacttcagccccagatgtcaccaagctctcggactctaacaaggagaacgcgctgcacagctacagcacccagaagggccccctgaaggcaggggagcagcgggcgggctctgaggtcatcagccggggtggccctcggaaggcggacgggcagcgtcaggccttggactacgtggagctctcgccgctgacccaggcttccccgcagcgggcccgcaccccagcccgcactcctgaccgcctggccaagcaggaggagctggagcgggacctggcccagcgctccgaggagcggcgcaagtggtttgaggccacagacagcaggaccccagaggtgcctgctggtgaggggccgcgccggggcctgggtgcccccctgactgaggaccagcaaaaccggcttagtgaggagatcgagaagaagtggcaggagctggagaagctgcccctgcgggagaataagcgggtgcccctcactgccctgctcaaccaaagccgcggagagcgccgagggcccccaagtgacggccacgaggcactggagaaggaggttcaggctcttcgggcccagctggaggcgtggcgtctccaaggggaggctcctcagagtgcactgagatcccaggaggatggccacatccccccgggctacatctcacaggaggcatgtgagcgcagcctggcagagatggagtcctcgcaccagcaggtgatggaggagctgcagcggcaccacgagcgggagctgcagcgcctgcagcaggagaaggagtggctcctggctgaggagacggcagccacggcctcagccattgaagccatgaagaaggcctaccaggaagagctgagccgagagctgagcaaaacacggagtctccagcagggcccggatggcctccggaagcagcaccagtcagatgtggaggcactgaagcgagagctgcaggtgctatcggagcagtactcgcagaagtgcctggagattggggcactcatgcggcaggctgaggagcgcgagcacacgctgcgccgctgccagcaggagggccaggagctgctgcgccacaaccaggagctgcatggccgcctgtcagaggagatagaccagctgcgcggcttcattgcctcgcagggcatgggcaatggctgcgggcgcagcaacgagcggagttcctgcgagctagaggtgctgcttcgcgtaaaagaaaacgaactccagtacctaaagaaggaggtgcagtgcctccgggacgagctccagatgatgcagaaggacaagcgcttcacctcgggaaagtaccaggacgtctatgtggagctgagccacatcaagacacggtctgagcgggagatcgagcagctgaaggagcacctgcgtcttgccatggccgccctccaggagaaggagtcgatgcgcaacagcctggctgagtagaggtcccgcccagctgcagaccctccaggctggaggaccagccgccctccttccctcctggatggaagtaaaaagccaagctttctccccaccctctgtgggccacacgtgcacttgcacccaccacacacacacacacacacacacacacacacacagacacacagacacatacgcacacacgtgcacacatgtacacacggatacacacacacacacacacactgcatatctgagcgcgcccctcgcactgggtctcaccttgcaccttcttcaggattttatatgtgaagagatttttatatagatttttttcctttttttccaaaacactttatactttaaaaaaaaaaaaaaaaagcaattcctggtggctgtgtgcctccaaccctggtccccctctgtctccagccaccctctgcttgggcttctgagctggtggccctggcccagaggtctggcggaggcccaggcagcagccatggcggggtgtctctacaggggagaggcgggagcctgccaccctcttcctgccctacctcctactaacacttcctgccccatttggacccgtaccatggggctcaggacagagggagctagcagctggcctccatggccccacagcctccttcgaggctgtgctgggtgcagaaccgccagagccacccaaaaggtgtttctcttctgctccctgaacctcttaacttaataaaacgttccagcagctctggtgtcctagatggctggcagaacaggaatggagattggggtttcttgaagtggcttccccactcacaccctacccacaccccacccttcctaaagcagcggcctctaggcttctgagggtggggctgaaaatccaaggtctcccttagtacagactgtgacgcccccagtgtggcttgcaggctagtggcagcggaagcatgtgggaaatagcaagtccagtcccaccccaacctactgaaccagcgtctgcattttaacagggtgccccagtgattcacgtgaccttcaaagtctgaggagccctggagtagggcccagggcccaggcctgagagagaggcctggggctaagactagccctgaccatgaccttgggcaagtcacacccctcactgagcctcagtttgcttctccatcaaatgggtgtttttctttcagtcccagtcctctcctgaggcttttcccagaggtcatgcccagccctgggcaggggtgagggcagggttgtggctgccaggcacaggtccagcgggctgggagtcctcaccatggctggctgtgctgattatggttgcatggggctgggaagaggtcccatttctgagccacagaaacaggccacatccagtaggggtcctggaaggctgtgagaacccagaggagaccctgacccagcctgcaggtagaagactgcctttggaggcagctttgaaagatgactcttccagatggaagaatcaggaagggccttcccacgtggaggcaccagcaggagcaaacgtccctggtgtgttcaggcaaagagccacaggagagtgacctcgtggagtgggaagagattgtttcccattcccttgccagggattggttgaggaatggacaaggcttgcagttcacgcaagccagtgaaatgcgaggggaagtcttgggagtggggtggaggaggtcatctgggaagggtgtccttggtcttaaaaagaggcacaagaggccgggcgcggtggctcttgcctattatcctagcactttgggaggccaaggcagggggatcacttgaggtcaggagttcgagaccagcctggccaacatggtgaaaccccgtctctactaaaaatacaaaaaattagccagacgtggtgccaagcacctgtaatcccagctactcaggaggctgaggcaggagaatcacttgaacccaggaggcagaagttgcagtgagccaagatcgcgccactgcactccagcctgtgtgacaagggcgaaactccatctcaaaaaaaaagggggagggtggcgcaaggagaggacacctctctcctggccctgtcgccatcttccctcatcaatagctaaaaatggcaaagaagaaagagccaggaccccgtgccatcaaatcctccggccttgtgctgccctgtctcggcactgcttgccttaggagatcaggagtgttcctagccactgggagatgggatgcctgccactggcagctctgccgtccatcctcaccatcccaccgtccccccaagacagctctccatcccatcctctgcctcccttctagcctcaacctaactcagggctcccccgtctcacacctgggttgcaggaacatcctcttcaccaacccccctcccatccctcctcagggctgcctagggcagctacaaaaaccaggccagcctctgaaaggtgctccacatctcattaaaaaccgtgaaatcgcactgccccactatcagaatagctcagaggagaaggtctgccagtaccaagtgctggtggggatacggagaagagcagctcccaggcgctgctggtgcaaatgtgctttgttgcacccacggcaggaaactgaccagcttctcatcaagttaaatacgcatctaccctatggcctagcatttccactcttgcttacacatccaggagaaatgagtccttacatgcacaaaaggatgagtaccgtaatactcacatcagcaaataaacaatacagctgtgtgtcagtagtagaatgaataaattgtggtcgattcata

SEQ ID NO: 31635 - DNA, 5322 bp, Artificial Sequence
  derived and/or modified sequence
atcgctctgattcattgttaaaataaagaggccatgaccctggcactcccaccccggcagcccctgtgcgtggaaacccagccaaggtctgatgatggaggagccttggccctggctgtcccaggggaggaggtgaaattcctcagctctccaccaagattggccacaaaagcctgatcccctggaacacagcaggcctcacatagacggtcagccattggatcataggaactgccctggcctgactcacccaatatggaggaggtgcctggggatgccctgtgtgaacactttgaggccaacatacttacccagaaccgctgtcaaaactgcttccaccctgaggaggcccatggagcaagataccaggagctcaggagcccttcaggtgctgaggtgccctactgcgacctgcctcgatgtccacctgcccctgaggacccactcagcgcctcaacctccggctgccagtctgtggtggacccaggcctcaggccagggcccaagaggggcccatccccctcagcagggctcccagaagagggtcccacagctgcccccaggagcaggagccgggagcttgaggcagtaccctatctggagggcctgaccacttccttgtgtggcagctgcaacgaggaccccggctctgaccccacctccagccctgactccgccacccctgatgataccagcaactcgtcctctgtggactgggacactgttgagaggcaggaggaggaggcccccagctgggacgagctcgcagtgatgatcccgaggaggcctcgggaggggccgagagctgacagctcccaaagggctccgtctctcctcaccaggtcccctgtgggaggagatgctgcaggccagaaaaaggaggacaccggcggtgggggccggagcgcaggacagcactgggcaaggctccggggagaaagcgggttgtccctggagcggcaccggtcaacactgacccaggcttcctccatgacaccacacagtggacctcgaagcaccacgtctcaggcttctcctgcccaaagggacactgctcaggctgcctctacacgtgaaatccccagagcctcctctccccatcgaatcacccaaagggacacctccagggcctcatccacccaacaggaaatctccagggcctcatccacccaacaggaaacctccagggcctcatccacccaagaggacacccctagggcctcatccacccaagaggacacccccagggcctcatctacacagtggaacacccccagagcttcctctccctcacgaagcacccaactggataaccccagaacctcttctacccagcaggacaacccccaaacttcttttcctacttgtactccccagcgggaaaaccccaggacaccctgtgtccagcaggacgatcccagagcctcctctcccaacagaaccactcaacgagagaattccagaacatcctgtgcccagcgggacaatcccaaagcctccagaacctcctctcccaatagagccacacgagacaaccccagaacatcctgcgcccagcgggacaatcccagagcctcctctcccagtagagctacacgagacaaccccacaacatcctgtgcccagcgggacaatcccagagcctccagaacctcctctcccaatagagccacacgagacaaccccagaacatcctgtgcccagcgggacaatcccagagcctcctctcccagtagagctacacgagacaaccccacaacatcctgtgcccagcgggacaatcccagagcctccagaacctcctctcccaatagagccacacgagacaaccccagaacatcctgcgcccagcgggacaatcccagagcctcctctcccaatagagctgcacgagacaaccccacaacatcctgtgcccagcgggacaatcccagagcctccagaacctcctctcccaatagagccacacgagacaaccccagaacatcctgtgcccagcgggacaatcccagagcctcctctcccaatagagctacacgagacaaccccacaacatcctgtgcccagcgggacaatcccagagcctccagaacctcctctcccaatagagccacacgagataaccccagaacatcctgtgcccagcgggacaatcccagagcctcctctcccaacagaaccacccaacaagacagccccagaacatcctgtgcccgacgggacgatcccagagcctcctctcctaacagaaccatccaacaagagaaccccagaacatcctgtgccctacgggacaatcccagagcctcctctcccagcagaaccatccaacaagagaaccccagaacatcctgtgcccaacgggacgatcccagagcctcctctcctaacagaaccacccaacaagagaaccccagaacatcctgtgcccgacgggacaatcccagagcctcctctcgcaacagaaccatccagcgagacaaccccagaacatcctgtgcccagcgggacaatcccagagcctcctctcctaacagaaccatccaacaagagaacctcagaacatcctgtacccgacaggacaatcccaggacctcctctcccaatagagccacacgagacaaccccagaacatcctgtgcccagcgggacaatctcagagcctcctctcccatcagagccacccaacaggacaaccccagaacttgtattcaacagaacatccccagatcatcttctacccaacaagacaaccctaaaacctcttgtaccaaacgagataacctcagacccacttgtacacagcgggaccgcacacagtccttttcctttcaacgagacaaccctggaacctcctcatctcaatgctgcacccaaaaggagaatctgagaccatcatctccccaccgctccactcaatggaacaatcccaggaattcatctccccatcgtactaacaaagacatcccctgggcctcgtttcccctccggccaactcagagtgatggtccccgaacctcttccccatctcgctccaagcaaagcgaggttccctgggcatccatcgccctccggccaacccaaggtgacaggcctcagacatcctctcccagcaggccagcccagcatgacccaccccagtcctcctttggccccacccagtacaacttgccatcccgggccacctcttcctcccataacccaggccaccagagcacctcccgaacttcctcacctgtgtaccccgctgcctatggggctcccctgacctctcctgagccctcccagcctccatgtgctgtgtgcattgggcaccgggatgcccctcgagcctcttcgccccctcgctatttgcagcacgaccccttccccttcttcccagagccccgcgcccctgagagtgaaccgccccaccacgagcctccctatataccacctgctgtgtgcattggacaccgagatgccccccgggcgtcctcgcccccccgccacacccaatttgaccccttccccttcctcccagacacatcagatgccgagcatcagtgtcagtccccccaacacgagccccttcagctccctgcacctgtgtgtattgggtaccgagatgcaccccgggcctcctccccaccacgccaggccccagagccttccctcttattccaggacctccccagggccagcacagagagccttgtcccttccatggactctctgcacgagtgcccccacatccccacccctgtgtgcattgggcaccgggatgcaccctccttctcatccccaccacgccaggctcctgagccatccctcttcttccaggatccccctggaactagtatggagagcctggccccctccactgactctctgcatggctccccagtgctgatcccccaagtgtgcatcgggcaccgggatgcaccccgagcctcctccccaccccgccacccacccagtgacctagcgttcctggcaccctcaccttcaccgggcagctctgggggctcccggggctcagcgcctcccggggagaccaggcacaacttggagcgggaggagtacactgtgctggccgacctgcccccacccaggaggctggcccagagacagccagggccccaggcgcagtgcagcagcgggggccgcacccacagccctggccgtgcagaggtggagcgcctcttcgggcaagagcgcaggaccatgctccctgccaaacaggcagaactgacccggcggagccaagcagagccccctcatccttggagtcctgagaagagacctgagggagatcggcagctccaggggtccccgctgccccccaggacatcagccaggacccctgagagggagctgcggacacagagacctctggagagtggccaagcaggcccaagacagcctctgggggtgtggcagagtcaggaggaaccgccagggtcccagggccctcatagacacctagaaaggagctggagcagccaggagggaggcctgggccctgggggctggtggggatgtggagagcccagcctgggggcagccaaagccccggagggagcatgggggggcacttccagggagtacaaggagagctgggggcagccagaggcctgggaggagaagcccactcatgagctccccagagaactaggaaagagaagcccactcacgagcccccctgagaactggggaggccccgcagagtcctcacaatcctggcactctgggacacccactgctgtgggctggggggcagagggagcgtgtccatacccgcgtggctctgagaggcgacccgagcttgactggagggatctgcttggccttctccgggcaccaggagagggggtctgggcccgtgtccccagcctggactgggagggcctcttggagctcctgcaggccaggctgccccgcaaggacccagctggacacagggatgacctggccagggctttagggccagagctgggtcccccaggcacaaacgatgtccctgagcaggagtcacacagccagccagaaggctgggccgaggccaccccagtcaatggacacagccccgcactgcagtcccagagcccggtccagctgcccagccctgcctgcacctccacccagtggccaaagatcaaagtgacaagaggaccagcgaccgcaactctggcaggcctggagcagacgggccccctggggagcaggagcactgcgaagggccccagcttgccagagctgcagttccaaccagaggagcctgaggagtcagaaccaagcagaggccaagaccccctgactgaccagaagcaggcagactcg

SEQ ID NO: 31636 - protein, 152 aa, Artificial Sequence
  derived and/or modified sequence
MPVKCCFYRSPTAETMTWSENMDTLLANQAGLDAFRIFLKSEFSEENVEFWLACEDFKKTKNADKIASKAKMIYSEFIEADAPKEINIDFGTRDLISKNIAEPTLKCFDEAQKLIYCLMAKDSFPRFLKSEIYKKLVNSQQVPNHKKWLPFL

SEQ ID NO: 31637 - DNA, 459 bp, Artificial Sequence
  derived and/or modified sequence
atgcccgtcaaatgttgtttctataggagtcccaccgcagaaaccatgacttggtcagagaacatggatacccttctggccaaccaggccggtttggacgcttttcgcatatttctgaaatctgagttcagcgaggagaatgtcgagttctggcttgcctgcgaagactttaaaaaaacaaaaaacgcggacaagatcgccagcaaggctaaaatgatctattccgaattcattgaagccgacgcgcccaaggagataaatatcgattttgggacaagagacctgatcagcaagaacatcgcggaacccacactgaagtgcttcgacgaagctcaaaagttgatttactgtctcatggcaaaggatagcttccctaggtttctaaaatcagaaatatataaaaaattagtgaacagccaacaggtccccaaccataagaagtggcttccattcctgtag

SEQ ID NO: 31638 - DNA, 459 bp, Artificial Sequence
  derived and/or modified sequence
atgcctgtgaagtgctgcttctaccgcagccccacagctgagaccatgacctggagcgagaacatggacaccctgctggccaaccaggccggcctggatgccttccgcatcttcctgaagtctgagttcagcgaggagaatgtggagttctggctggcctgtgaggacttcaagaagaccaagaatgctgacaagatcgccagcaaggccaagatgatctacagcgagttcatcgaggctgatgcccccaaggagatcaacatcgactttggcacccgggacctgatcagcaagaacattgctgagcccaccctgaagtgctttgatgaggcccagaagctgatctactgcctgatggccaaggacagcttcccccgcttcctgaagtctgagatctacaagaagctggtgaacagccagcaggtgcccaaccacaagaagtggctgcccttcctgtag

SEQ ID NO: 31639 - DNA, 459 bp, Artificial Sequence
  derived and/or modified sequence
atgcccgtgaagtgctgcttctaccggagccccaccgccgagaccatgacatggagtgaaaacatggacactctgctggccaatcaggccggattggacgccttccgcatttttctgaagtccgagttctccgaggagaatgtggagttctggctggcttgcgaagactttaaaaagaccaagaatgcagacaagatcgcttctaaagcaaaaatgatctactctgagttcatagaagccgacgcacctaaggagattaacatagattttggcactagggacctgataagtaagaacatcgcggagccaaccctcaaatgcttcgatgaagcacagaaactgatatattgcctgatggcaaaagatagcttcccccgtttcctgaagtcagagatttacaaaaaactggtgaactctcagcaggtccctaaccacaaaaaatggttgcccttcctgtag

SEQ ID NO: 31640 - DNA, 459 bp, Artificial Sequence
  derived and/or modified sequence
atgccagtgaaatgctgcttctaccgatcgccaacggccgaaacgatgacctggtctgaaaacatggataccctgctggccaaccaggccggactcgatgctttccgcatcttcctgaagtcagagttcagcgaagagaacgtcgaattttggttggcctgcgaagacttcaagaaaacaaagaacgccgataaaatcgcatctaaagctaagatgatttactccgaattcatcgaggcagatgcgccaaaggaaatcaacattgattttggtacccgcgacttaatttcaaagaacattgccgagcccaccctcaagtgctttgatgaggcccagaagctaatctattgccttatggcgaaggacagtttcccccgatttctcaaatccgaaatttacaagaagctggtcaactctcaacaagtacctaatcataagaagtggctacctttcctttag

SEQ ID NO: 31641 - DNA, 1794 bp, Artificial Sequence
  derived and/or modified sequence
gttaccacttggaaaacaattcatctgaaagaagcacagattttctcatctatcctgtcaacaaagaaggaatcaagagagcaaggacagtgatttcccctgcattgcatttgtcttgaagatcagtcagaaagagaaactcggcatcatctgtgacagacagtggaacgaaaaatgccagtgaaatgctgtttctacaggtcaccaactgcggaaacaatgacatggtctgaaaatatggacacgcttttagccaaccaagctggtctagatgcttttcgaatatttctaaaatcagagtttagtgaagaaaatgttgagttctggcttgcctgtgaagactttaagaaaacgaaaaatgcagacaaaattgcttccaaagccaagatgatttattctgaattcattgaagctgatgcacctaaagagattaacattgacttcggtaccagagacctcatctcaaagaatattgctgaaccaacactcaaatgctttgatgaggctcagaaattaatctattgtctcatggccaaggattctttccctcgatttctgaagtcagagatttataaaaaactggtaaatagccaacaggttccaaatcataaaaaatggctcccttttttgtgaggaaggtaaaagttaactaatcactatacttcagggctacaatattttaaatatacaagcatgatgcattgtcttttgttttgtttttaggatttagaaaacattttttacccaaacagatgaataacgttttatacaacaagcctgaatttctaactcagttgtttagaatgtatttgctttaccagctatttaatctcctactgggggagtacaaagaaagtttatagagatacaatatagtcttaaaccaaaactgaatattcttattatattataatgtaaggaattatacatatcttcacgtggcagaatgaaagacttttgagcatcatatacacaattttaaataccattgctttattcaaaaaaatctcacttttgtaaaaagagaatttctgaaccaaaatacaagctttcatttaatatatttaactgttttttttctgccatttctttccaactatttctaataatgtggttatgaaaactgctacgcctctcaaattatattttttaaatcacaggaatgtatacacatttatatgtatgtcttgaatgcaccatggaccaaagtttttcaaaatatatcacttggctcaattcaatggcatcacatataaaatgtgatgagttatgtatgaaaaggcctcaagggtggggaatactgattttcttatgttaacagaaatataaaagaaagtggaagactaaggagcatagataaatccttataagatgaagtatatagcaagtcataaaatttaagaatttgcaacattatctactcaattgtggggaagtatctattcactccttcagcactgatacttgtttataaaacccaaacaatttttaaatgcatttattttgagatgttcctaaaattgtttcattctatatgtaaatatcctgtgataaatacgaataatttcatttcaatatgagaagctgtaaagattcaacagatctcccacgtttccattttctttgcacagatttatttatctgcattgatatttctgcttttagattgtttgaacattaaaaaatggaggaaaaatagcatggcttattttatgttttcacaaactactcatttgatagacaaaattttgtcttcccttcatcatgagaaataaacatttaaacatattcaaa

SEQ ID NO: 31642 - DNA, 459 bp, Artificial Sequence
  derived and/or modified sequence
atgcccgtgaagtgctgcttctacagaagccccaccgccgagaccatgacctggagcgagaacatggacaccctgctggccaaccaggccggcctggacgccttcagaatcttcctgaagagcgagttcagcgaggagaacgtggagttctggctggcctgcgaggacttcaagaagaccaagaacgccgacaagatcgccagcaaggccaagatgatctacagcgagttcatcgaggccgacgcccccaaggagatcaacatcgacttcggcaccagagacctgatcagcaagaacatcgccgagcccaccctgaagtgcttcgacgaggcccagaagctgatctactgcctgatggccaaggacagcttccccagattcctgaagagcgagatctacaagaagctggtgaacagccagcaggtgcccaaccacaagaagtggctgcccttcctgtag

SEQ ID NO: 31643 - protein, 49 aa, Artificial Sequence
  derived and/or modified sequence
MASVVPVKDKKLLEVKLGELPSWILMRDFSPSGIFGAFQREHERLRKYH

SEQ ID NO: 31644 - DNA, 150 bp, Artificial Sequence
  derived and/or modified sequence
atggccagcgtggtgcccgtgaaggacaagaagctgctggaggtgaagctgggcgagctgcccagctggatcctgatgagagacttcagccccagcggcatcttcggcgccttccagagagagcacgagagactgagaaagtaccactag

SEQ ID NO: 31645 - DNA, 150 bp, Artificial Sequence
  derived and/or modified sequence
atggccagcgtggtgcccgtgaaggacaaaaagttgttggaagtcaagcttggcgagcttccctcgtggatcctcatgcgtgactttagcccatcaggcatctttggagcgttccagcgggagcacgagaggttgaggaagtatcactag

SEQ ID NO: 31646 - DNA, 150 bp, Artificial Sequence
  derived and/or modified sequence
atggcctctgtggtgcctgtgaaggacaagaagctgctggaggtgaagctgggggagctgcccagctggatcctgatgagggacttcagccccagcggcatctttggagccttccagcgggagcacgagcggctgaggaagtaccactag

SEQ ID NO: 31647 - DNA, 150 bp, Artificial Sequence
  derived and/or modified sequence
atggccagcgtggtgcccgtgaaggacaagaagctgctggaggtgaaattgggtgagctgcccagttggatcttgatgcgggacttttcacctagtgggatttttggcgcattccaacgcgaacatgagagactgaggaaatatcactag

SEQ ID NO: 31648 - DNA, 150 bp, Artificial Sequence
  derived and/or modified sequence
atggcttctgttgtgccagtaaaggataaaaaactcctcgaagtaaagctcggagaactgccttcttggatactcatgagggatttctctccgagcggcattttcggagccttccagcgagagcatgagagattgcggaagtatcattag

SEQ ID NO: 31649 - DNA, 306 bp, Artificial Sequence
  derived and/or modified sequence
ggcacagcggacaccaggactccaaaatggcgtcagttgtaccagtgaaggacaagaaacttctggaggtcaaactgggggagctgccaagctggatcttgatgcgggacttcagtcctagtggcattttcggagcgtttcaaagagagcacgagcggctccgcaaataccactgaagaggacacactctgcacccccccaccccacgaccttggcccgagcccctccgtgaggaacacaatctcaatcgttgctgaatcctttcatatcctaataggaattaacctccaaataaaacatgactgg

SEQ ID NO: 31650 - protein, 487 aa, Artificial Sequence
  derived and/or modified sequence
MSDLLSIYSAPVVVSTVLHITIVFPILQIRKLRLGRVHKLPRVLEVGNSGTMSRAYTFFFLRWNSMALTGYSWLLLSATFLNVGAEISITLEPAQPSEGDNVTLVVHGLSGELLAYSWYAGPTLSVSYLVASYIVSTGDETPGPAHTGREAVRPDGSLDIQGILPRHSGTYILQTFNRQLQTEVGYGHVQVHEILAQPTVLANSTALVERRDTLRLMCSSPSPTAEVRWFFNGGALPVALRLGLSPDGRVLARHGIRREEAGAYQCEVWNPVSVSRSEPINLTVYFGPERVAILQDSTTRTGCTIKVDFNTSLTLWCVSRSCPEPEYVWTFNGQALKNGQDHLNISSMTAAQEGTYTCIAKNTKTLLSGSASVVVKLSAAAVATMIVPVPTKPTEGQDVTLTVQGYPKDLLVYAWYRGPASEPNRLLSQLPSGTWIAGPAHTGREVGFPNCSLLVQKLNLTDTGRYTLKTVTVQGKTETLEVELQVA

SEQ ID NO: 31651 - protein, 425 aa, Artificial Sequence
  derived and/or modified sequence
MALTGYSWLLLSATFLNVGAEISITLEPAQPSEGDNVTLVVHGLSGELLAYSWYAGPTLSVSYLVASYIVSTGDETPGPAHTGREAVRPDGSLDIQGILPRHSGTYILQTFNRQLQTEVGYGHVQVHEILAQPTVLANSTALVERRDTLRLMCSSPSPTAEVRWFFNGGALPVALRLGLSPDGRVLARHGIRREEAGAYQCEVWNPVSVSRSEPINLTVYFGPERVAILQDSTTRTGCTIKVDFNTSLTLWCVSRSCPEPEYVWTFNGQALKNGQDHLNISSMTAAQEGTYTCIAKNTKTLLSGSASVVVKLSAAAVATMIVPVPTKPTEGQDVTLTVQGYPKDLLVYAWYRGPASEPNRLLSQLPSGTWIAGPAHTGREVGFPNCSLLVQKLNLTDTGRYTLKTVTVQGKTETLEVELQVAPLG

SEQ ID NO: 31652 - DNA, 1464 bp, Artificial Sequence
  derived and/or modified sequence
atgagcgacctgctgagcatctacagcgcccccgtggtggtgagcaccgtgctgcacatcaccatcgtgttccccatcctgcagatcagaaagctgagactgggcagagtgcacaagctgcccagagtgctggaggtgggcaacagcggcaccatgagcagagcctacaccttcttcttcctgagatggaacagcatggccctgaccggctacagctggctgctgctgagcgccaccttcctgaacgtgggcgccgagatcagcatcaccctggagcccgcccagcccagcgagggcgacaacgtgaccctggtggtgcacggcctgagcggcgagctgctggcctacagctggtacgccggccccaccctgagcgtgagctacctggtggccagctacatcgtgagcaccggcgacgagacccccggccccgcccacaccggcagagaggccgtgagacccgacggcagcctggacatccagggcatcctgcccagacacagcggcacctacatcctgcagaccttcaacagacagctgcagaccgaggtgggctacggccacgtgcaggtgcacgagatcctggcccagcccaccgtgctggccaacagcaccgccctggtggagagaagagacaccctgagactgatgtgcagcagccccagccccaccgccgaggtgagatggttcttcaacggcggcgccctgcccgtggccctgagactgggcctgagccccgacggcagagtgctggccagacacggcatcagaagagaggaggccggcgcctaccagtgcgaggtgtggaaccccgtgagcgtgagcagaagcgagcccatcaacctgaccgtgtacttcggccccgagagagtggccatcctgcaggacagcaccaccagaaccggctgcaccatcaaggtggacttcaacaccagcctgaccctgtggtgcgtgagcagaagctgccccgagcccgagtacgtgtggaccttcaacggccaggccctgaagaacggccaggaccacctgaacatcagcagcatgaccgccgcccaggagggcacctacacctgcatcgccaagaacaccaagaccctgctgagcggcagcgccagcgtggtggtgaagctgagcgccgccgccgtggccaccatgatcgtgcccgtgcccaccaagcccaccgagggccaggacgtgaccctgaccgtgcagggctaccccaaggacctgctggtgtacgcctggtacagaggccccgccagcgagcccaacagactgctgagccagctgcccagcggcacctggatcgccggccccgcccacaccggcagagaggtgggcttccccaactgcagcctgctggtgcagaagctgaacctgaccgacaccggcagatacaccctgaagaccgtgaccgtgcagggcaagaccgagaccctggaggtggagctgcaggtggcctag

SEQ ID NO: 31653 - DNA, 1278 bp, Artificial Sequence
  derived and/or modified sequence
atggccctgaccggctacagctggctgctgctgagcgccaccttcctgaacgtgggcgccgagatcagcatcaccctggagcccgcccagcccagcgagggcgacaacgtgaccctggtggtgcacggcctgagcggcgagctgctggcctacagctggtacgccggccccaccctgagcgtgagctacctggtggccagctacatcgtgagcaccggcgacgagacccccggccccgcccacaccggcagagaggccgtgagacccgacggcagcctggacatccagggcatcctgcccagacacagcggcacctacatcctgcagaccttcaacagacagctgcagaccgaggtgggctacggccacgtgcaggtgcacgagatcctggcccagcccaccgtgctggccaacagcaccgccctggtggagagaagagacaccctgagactgatgtgcagcagccccagccccaccgccgaggtgagatggttcttcaacggcggcgccctgcccgtggccctgagactgggcctgagccccgacggcagagtgctggccagacacggcatcagaagagaggaggccggcgcctaccagtgcgaggtgtggaaccccgtgagcgtgagcagaagcgagcccatcaacctgaccgtgtacttcggccccgagagagtggccatcctgcaggacagcaccaccagaaccggctgcaccatcaaggtggacttcaacaccagcctgaccctgtggtgcgtgagcagaagctgccccgagcccgagtacgtgtggaccttcaacggccaggccctgaagaacggccaggaccacctgaacatcagcagcatgaccgccgcccaggagggcacctacacctgcatcgccaagaacaccaagaccctgctgagcggcagcgccagcgtggtggtgaagctgagcgccgccgccgtggccaccatgatcgtgcccgtgcccaccaagcccaccgagggccaggacgtgaccctgaccgtgcagggctaccccaaggacctgctggtgtacgcctggtacagaggccccgccagcgagcccaacagactgctgagccagctgcccagcggcacctggatcgccggccccgcccacaccggcagagaggtgggcttccccaactgcagcctgctggtgcagaagctgaacctgaccgacaccggcagatacaccctgaagaccgtgaccgtgcagggcaagaccgagaccctggaggtggagctgcaggtggcccccctgggctag

SEQ ID NO: 31654 - DNA, 1464 bp, Artificial Sequence
  derived and/or modified sequence
atgagcgatcttcttagcatctactccgcccctgtggtcgtcagcacagtactgcacatcactattgtgtttccaattctgcagatacgcaaactgcgtctgggtagggtgcataagcttccccgagtgctggaggtgggcaattctggaacgatgtccagggcctatactttcttctttctaaggtggaattctatggccctgactgggtattcttggctgctgcttagtgcgactttcctgaatgtaggagcagagatctctattacgctcgagccagcgcagccctccgaaggcgacaacgtcacccttgtcgtgcacgggctctcgggcgagcttctggcctactcgtggtatgctgggccgacattaagcgtgagctatcttgtggccagttacattgtgtctactggcgacgagaccccaggccccgctcacacgggtagggaagcagtgcgccccgacggcagcctggatatccagggtatcttgcctagacattctgggacctatatcttacagaccttcaatcgacagctccagacagaggtcggatacggccacgtgcaggttcatgagattctggcccagcctacggttctggcaaatagtaccgcactggtggagcggcgcgacacccttcggctgatgtgttccagcccgtcacctactgccgaggtacgttggttcttcaacggaggtgccttaccggtagcattgagactgggcctgtccccagatggccgcgtgctcgcgcgccatggcatcaggagggaagaagccggggcctatcaatgcgaagtttggaaccctgtttcagtttccaggtccgagcctatcaacctcaccgtctatttcggtccagaacgagtggccattctgcaggacagtaccacccgaacaggctgtacaatcaaggttgatttcaacacttcactgacactgtggtgcgtctcacgctcttgccccgagcctgagtatgtgtggacattcaacggacaggcccttaagaacggccaggaccatctgaatatttcctcaatgaccgcagcacaggagggaacttatacatgcatcgccaaaaatactaagacactcctttccgggtctgcgagtgtcgtggtcaaattaagcgctgccgccgttgccaccatgatcgttccagttcctactaagccaaccgaaggtcaggacgtgaccttgactgtacaagggtatccgaaggatcttttggtgtacgcgtggtacaggggccctgcttctgagccgaatcggcttctgtcacaacttcctagtggaacttggatcgctggacccgcacacactgggcgggaggtagggtttcccaattgcagcctgctcgtgcaaaagctgaatcttacagacacaggccgctacactctgaagacagtgactgttcagggcaaaaccgagacattagaggtggaactgcaggtggcttag

SEQ ID NO: 31655 - DNA, 1278 bp, Artificial Sequence
  derived and/or modified sequence
atggcgctgaccgggtacagctggttgctgttatcggccacttttctcaacgtgggagcggagatctctatcactctcgagcctgcccaacctagcgagggagataacgtcactctagtggtgcacgggttgagtggagagctcttggcttacagttggtatgccggacccactctgtccgtgtcgtaccttgtcgcttcgtacattgttagcactggtgatgagacaccgggtcccgcacatacaggacgggaggcggttagacctgacggctccctggatattcaggggattttgcctcggcattctggtacttacattctgcagactttcaatagacagctgcagacggaggtaggctacgggcatgtgcaagtgcacgagattctggctcaacctaccgtacttgcaaattcaacagccttggtggagagaagggataccctgaggctgatgtgcagtagtccatcccctactgcagaagtccgttggttcttcaatggaggcgccttaccagtcgcactacgcttgggactgtctccggacgggcgcgttctggccaggcacggcatccggagggaggaggccggcgcctaccagtgcgaagtgtggaaccctgtgtcagtcagtcgctctgagccaataaatttgaccgtttacttcggccctgaacgggtcgctatccttcaggactcgacaacgagaacaggttgtacgataaaggtggatttcaacacgtctttgacactctggtgcgtctcccggtcttgtcccgaacctgagtacgtttggaccttcaacgggcaggctcttaaaaacggccaagaccatctcaacataagttccatgacagcagctcaggagggaacctacacatgcattgctaagaataccaagactttgctgtctggctccgcgtctgttgtggtgaaactaagtgcggcggccgttgctacaatgattgtacccgtgcccactaagcctaccgaggggcaggatgtcacgctgaccgtgcaagggtatcccaaagatttgcttgtgtatgcctggtataggggccccgccagcgagccgaataggctgctttcccagctaccctccgggacttggatagccggtcccgcgcatacagggagggaggtcggctttccaaattgttccctcctggttcaaaagctcaacctcactgatacaggacgatataccctaaagacagttaccgtgcaaggcaagaccgaaaccctggaggtcgagctgcaggtcgcgccgctcggctag

SEQ ID NO: 31656 - DNA, 1464 bp, Artificial Sequence
  derived and/or modified sequence
atgtctgacctgctgagcatctacagcgcccctgtggtggtgtccacagtgctgcacatcaccatcgtgttccccatcctgcagatcaggaagctgcggctgggccgggtgcacaagctgccccgggtgctggaggtgggcaacagcggcaccatgagccgggcctacaccttcttcttcctgcgctggaacagcatggccctgaccggctacagctggctgctgctgagcgccaccttcctgaatgtgggcgctgagatcagcatcaccctggagcccgcccagcccagcgagggggacaacgtgaccctggtggtgcacggcctgagcggggagctgctggcctacagctggtacgccggccccaccctgtctgtgtcctacctggtggccagctacatcgtgtccactggagatgagaccccaggccctgcccacacaggccgggaggccgtgcggccagatggcagcctggacatccagggcatcctgcccaggcacagcggcacctacatcctgcagaccttcaaccggcagctgcagacagaggtgggctacggccacgtgcaggtgcatgagatcctggcccagcccaccgtgctggccaacagcacagccctggtggagcggcgggacaccctgcggctgatgtgcagcagccccagccccacagctgaggtgcgctggttcttcaacggcggggccctgcctgtggccctgcggctgggcctgagcccagatggccgggtgctggcccggcacggcatcagaagagaggaggccggggcctaccagtgtgaggtgtggaaccctgtgtctgtgagccgctctgagcccatcaacctgactgtgtacttcggccctgagcgggtggccatcctgcaggacagcaccaccaggacaggctgcaccatcaaggtggacttcaacaccagcctgaccctgtggtgtgtgagccgcagctgcccagagccagaatatgtgtggaccttcaacggccaggccctgaagaatggccaggaccacctgaacatcagctccatgacagctgcccaggagggcacctacacctgcatcgccaagaacaccaagaccctgctgagcggcagcgcctctgtggtggtgaagctgtctgctgctgctgtggccaccatgattgtgcctgtgcccaccaagcccacagagggccaggatgtgaccctgactgtgcagggctaccccaaggacctgctggtgtatgcctggtaccggggccctgccagcgagcccaaccggctgctgagccagctgcccagcggcacctggattgctggccctgcccacacaggccgggaggtgggcttccccaactgcagcctgctggtgcagaagctgaacctgacagacaccggccgctacaccctgaagacagtgacagtgcagggcaagacagagaccctggaggtggagctgcaggtggcctag

SEQ ID NO: 31657 - DNA, 1278 bp, Artificial Sequence
  derived and/or modified sequence
atggccctgaccggctacagctggctgctgctgagcgccaccttcctgaatgtgggcgctgagatcagcatcaccctggagcccgcccagcccagcgagggggacaacgtgaccctggtggtgcacggcctgtctggagagctgctggcctacagctggtacgccggccccaccctgtctgtgtcctacctggtggccagctacatcgtgtccactggagatgagaccccaggccctgcccacacaggccgggaggccgtgcggccagatggcagcctggacatccagggcatcctgcccaggcacagcggcacctacatcctgcagaccttcaaccggcagctgcagacagaggtgggctacggccacgtgcaggtgcatgagatcctggcccagcccaccgtgctggccaacagcacagccctggtggagcggcgggacaccctgcggctgatgtgcagcagccccagccccacagctgaggtgcgctggttcttcaatggaggagccctgcctgtggccctgcggctgggcctgagcccagatggccgggtgctggcccggcacggcatccggcgggaggaggccggggcctaccagtgtgaggtgtggaaccctgtgtctgtgagccgctctgagcccatcaacctgactgtgtactttggacctgagcgggtggccatcctgcaggacagcaccaccaggacaggctgcaccatcaaggtggacttcaacaccagcctgaccctgtggtgtgtgagccgcagctgcccagagccagaatatgtgtggaccttcaacggccaggccctgaagaatggccaggaccacctgaacatcagctccatgacagctgcccaggagggcacctacacctgcatcgccaagaacaccaagaccctgctgagcggcagcgcctctgtggtggtgaagctgtctgctgctgctgtggccaccatgattgtgcctgtgcccaccaagcccacagagggccaggatgtgaccctgactgtgcagggctaccccaaggacctgctggtgtatgcctggtaccggggccctgccagcgagcccaaccggctgctgagccagctgcccagcggcacctggattgctggccctgcccacacaggccgggaggtgggcttccccaactgcagcctgctggtgcagaagctgaacctgacagacaccggccgctacaccctgaagacagtgacagtgcagggcaagacagagaccctggaggtggagctgcaggtggcccccctgggctag

SEQ ID NO: 31658 - DNA, 1464 bp, Artificial Sequence
  derived and/or modified sequence
atgagcgacctgctgagcatctacagcgcccccgtggtggtgagcacagtcttgcacatcacaatcgtgttccccattcttcagataaggaaactgcggctcgggcgtgttcacaaattgccgcgagtcctggaggttggcaattctggcacaatgagtagggcgtacacctttttctttctgagatggaattcgatggcactgaccgggtattcctggctgctgctgagtgcgaccttcctgaacgtaggcgcagaaatcagtatcacactcgagccagcgcagcctagcgaaggagataatgtcaccctcgttgtacatgggctgtccggcgagctcttggcctacagctggtacgccgggccaactctctctgtttcatacctcgtggctagctatatagtgtccaccggcgatgaaactcctggcccagcacatacaggtagggaagcagtgcgccccgacggcagcctggatattcagggtattcttccacgccactcaggaacctacatcctccagacttttaatagacagctccagacagaggtgggttatgggcatgtgcaggtgcacgagattctagcccaacctactgttctggccaattccactgctctggtggagagaagagatactctgcgtttaatgtgttcatctccatctcctacagccgaggtgaggtggtttttcaacggcggtgcactgccggtcgcattgcggcttggactcagtccagatggaagagtgcttgcccgacacggcataaggagggaggaagccggggcttatcagtgcgaagtttggaacccggtgtccgtgagtagaagtgagcccataaacctgaccgtttacttcggacccgaacgcgtcgctattttacaagatagtactactaggacaggatgtacaattaaagtagattttaacacaagtctgactctctggtgtgtgagccgctcttgtccggagcctgaatatgtgtggacatttaacggtcaggccctgaagaacgggcaagatcacctcaacatcagtagtatgacagccgcacaggaaggcacctacacctgcattgctaagaataccaaaacccttctgtccggaagcgccagtgtcgttgttaagctgtctgccgctgccgttgcaacaatgattgtgccagttccgacaaagccaaccgagggccaggacgtgacactcactgtccaagggtaccccaaggatcttctggtctacgcatggtaccgtggcccggcctccgagccaaacagactgttatctcagctgcccagcggcacttggattgccggaccagcacacactggccgcgaggtcggcttccccaattgtagcctcttggttcagaaacttaacctcactgatacagggaggtacacattgaaaacggtcactgtccagggcaaaacagaaacactcgaagtggaactgcaagtggcttag

SEQ ID NO: 31659 - DNA, 1278 bp, Artificial Sequence
  derived and/or modified sequence
atggccctgaccggctacagctggctgctgctgagcgccaccttcttgaatgtgggcgcagagattagtatcaccctggagccagcccagccaagcgaaggtgacaatgtgactctcgtggtgcacggcctgagcggagagctgcttgcttactcctggtatgccggacccacactgagtgtatcttacctcgtggcatcctatatcgtctctaccggcgatgaaacccctggacccgcccacactgggcgcgaagcagtaagacctgatggctcccttgacatccagggaattctgcctagacactctggtacctatattctccagactttcaatagacagctgcaaaccgaagtcggctacggacatgtccaagtccacgaaatactggcgcagccaacagttctcgccaactccactgctctagttgaaaggcgggataccttgcggctgatgtgcagcagtccttctccaaccgcagaggtgaggtggttcttcaatggaggagccctgcccgtggcactgagacttggattaagccccgatgggagagtcctggcccgccacggaatccgccgggaggaagctggggcctaccaatgcgaagtctggaatcctgtgtccgtttctagatccgaaccaattaacctaacagtgtactttggacctgagagagttgctatccttcaagactcgaccactagaactggttgcactatcaaagtggactttaacacaagtcttaccttgtggtgcgtctcaaggtcttgtcccgaaccagaatatgtctggaccttcaacggccaagcactgaagaatggacaggatcaccttaatatctctagtatgactgctgcacaggaaggcacttatacatgcattgcaaagaatacaaaaacactgctgtcaggctccgcaagtgtggtcgtcaaattgagtgcagccgccgtggcgacaatgattgtcccggtccctactaagccaaccgagggtcaggacgtgacactaactgtccaggggtaccctaaagatctgctggtgtacgcctggtaccggggaccagccagcgagccaaatcgtcttttgtcccagctgccctccggcacatggatcgctggtcccgcccatacaggccgcgaggtggggttccccaactgcagtctgctggttcaaaagctgaatctgactgacaccggacgatataccttgaagacggtcacagtccagggtaagacggagacactggaagtcgaactgcaagttgcgccccttggctag

SEQ ID NO: 31660 - DNA, 1464 bp, Artificial Sequence
  derived and/or modified sequence
atgagtgacctgttatcaatctattctgcacccgtggtcgtctcaaccgtgctccacatcacaattgtatttccaatccttcagattcggaagcttagactggggagggtgcataaactgcccagggtcttggaggttgggaacagcggaaccatgtctcgagcttacacattcttcttcctgcgctggaactccatggctcttaccggttattcatggctactgttaagtgctaccttcctcaatgtgggggctgagatctcaattactttggagcctgcccaaccatcagagggggacaatgttaccttagttgtacacgggctgtccggcgagctgttggcctatagttggtacgccggaccaactctatcggtgagctacctggttgcatcgtatatagttagcacaggagatgaaacccctggcccagcacatacaggtcgcgaagccgtgaggccggatggaagtctcgacatacaaggtattcttccgaggcattccgggacgtatatcttgcagactttcaacagacagttgcaaaccgaggtgggttacgggcatgtgcaggtgcatgaaattctcgcccagccaactgtgttggctaatagcaccgccctggtggagcgtcgtgacacgctgcgcttaatgtgcagcagcccatcacctactgcggaggtgcggtggttctttaatggcggtgcattacctgtggcactacggctggggctgtccccagatgggcgtgtgttagcccgtcacggcatcaggagggaagaagcaggggcttaccagtgtgaagtttggaatcctgtttcagtatcaagatcggaaccgataaatctcactgtgtactttggccctgagcgggtagccatactccaggattctactaccaggactgggtgcacgatcaaagtagacttcaacacgagcctgacactctggtgtgttagcaggtcttgccccgagccagagtacgtctggacctttaacgggcaggcgttgaaaaatggacaggatcatctcaacatttcaagcatgactgccgctcaggaaggaacttatacatgtatcgctaaaaacaccaaaacactcctctcaggcagcgcctcagtcgtggttaagttatccgccgctgcagtagccaccatgatcgtgcctgtacctaccaagcccacagaaggacaggatgtgacgttgacggtgcaagggtatcccaaagaccttttagtttacgcctggtacaggggacccgcttctgaaccgaatcggttactttctcaattgccctcgggaacctggatcgcaggcccagcccacacaggcagagaggtcgggtttcctaattgcagccttctcgtgcagaagctcaatcttacagacactggacgctatacccttaagacagtgaccgtgcaagggaagacagagaccttagaggtcgagctgcaagtcgcatag

SEQ ID NO: 31661 - DNA, 1278 bp, Artificial Sequence
  derived and/or modified sequence
atggccctcaccggctacagctggttactgctttccgcaacatttctgaacgtgggcgctgaaatcagcattactctggagcctgcccagccttccgaaggtgataatgtgacccttgtcgtccacggcctttcaggagagctcctggcatattcatggtacgctggtcctacactcagcgtcagctacctggtcgcgtcttacattgttagcacaggggatgaaacaccgggaccagcccacacagggcgagaagcagtccgcccagacggctccttagacatccagggcatcctccctcgacattccggaacgtacattctgcagactttcaatcggcagctgcagacagaagtgggatacggacacgtgcaagtgcacgagatattagcccaacctaccgtgctggccaactccacagccctcgtcgaacgcagagacactttacgcctgatgtgctcgtcaccatcccctacagctgaggttaggtggttcttcaacggcggagcactgcctgttgctctgcgtctcgggctttcaccagacggtcgcgtcctagccagacacgggatcaggagggaagaggctggcgcttatcagtgcgaggtctggaaccccgtgtcagtgagtagaagcgagccaatcaatctgactgtgtactttggtcccgaacgggtggctatccttcaggattccacaactagaaccggctgcacaatcaaagttgactttaacacctccctgaccctgtggtgtgtgagccgtagttgccccgaacctgagtatgtctggaccttcaacgggcaggccctgaaaaatggacaagaccacctgaacatcagcagtatgaccgccgctcaggaggggacgtatacctgtatagcgaaaaatacaaaaaccttactcagcgggagtgcttctgtagtagtgaaattatcggccgctgcggtggcaaccatgattgtgccagttccgaccaagcccactgaggggcaagacgtcactttaacagtccaggggtaccctaaggacctgctcgtttacgcttggtatagaggacctgctagtgaaccaaacaggctgctgagccagctgccttccggtacgtggattgccggacccgctcacaccgggagagaggtgggatttccaaattgttctctgctggtccagaagctgaatctgactgatacaggcaggtacactctgaagaccgttaccgttcagggcaaaaccgaaaccctggaggtcgaattacaggtggctcccctgggatag

SEQ ID NO: 31662 - DNA, 1462 bp, Artificial Sequence
  derived and/or modified sequence
atgagtgatttactgagcatttactctgcgccagtcgtggtaagtactgtacttcacattactattgttttccctattttacaaataaggaaactgaggcttggcagagtccataaattgcccagggtcctggaggtaggaaacagtggaactatgtccagagcctatacttttttttttttgagatggaactcgatggcgctgactgggtacagctggctgctcctcagtgccacattcctgaatgtgggggccgagatctctatcaccctggagcctgcccagccgagcgaaggggacaacgtcacgctggtcgtccatgggctttcgggggaactgctcgcctacagctggtatgcggggcccacactcagcgtgtcatacctggtggccagctacatcgtgagcacaggcgatgagactcctggcccggcccacacggggcgggaggctgtgcgccccgatggcagcctggacatccagggcatcctgccccggcactcaggcacctacatcctgcagaccttcaacaggcagttgcagaccgaggtgggctacggacacgtgcaggtccatgagatcctggcccagcccacagtcttggccaacagcacagcgctggtggaacgtcgagacaccctgcgccttatgtgcagcagccccagccccaccgccgaggtccgctggttcttcaacggtggggccctgcccgtcgctctccgcctgggcctgtcccctgacggccgggtgctggccaggcatggcatccgccgggaggaggccggcgcctatcagtgtgaggtgtggaacccggtcagtgtcagccgcagcgagcccatcaacctgaccgtgtactttggcccagagcgtgtggccatcctccaggattccaccacccgcacaggctgcaccatcaaagttgacttcaacacgtccctcaccctgtggtgcgtgtccaggtcctgcccagagcccgagtatgtgtggaccttcaacgggcaggccctaaagaacggccaagaccacctcaacatcagcagcatgacagccgcccaggaggggacgtacacatgtattgcgaagaacaccaagaccctgctatctggatctgcctcagtcgtggtcaagctctctgctgcagcagttgccacgatgatcgtgcccgtgcccaccaagccaacggagggccaggacgtaacactgaccgtgcagggctaccccaaggacctgctggtctacgcctggtaccgcgggcctgcctccgagcccaaccggctgctcagccagctgccgtcaggaacctggattgcaggccccgcgcacacaggccgggaggtgggcttccccaactgctcgctgttggtgcagaagctgaacctcacagacactggccgctacacactcaagaccgtcacagtgcagggcaagactgagacactggaagtggagctgcaggtggccc

SEQ ID NO: 31663 - DNA, 1701 bp, Artificial Sequence
  derived and/or modified sequence
ctgcatcctcagcgcctagaacagcacctggcaaacaataggtgctcattcagtatttgtccaataagtgaatgagtgatttactgagcatttactctgcgccagtcgtggtaagtactgtcctgcggcagacggagccgagccccaaccaggaagggagtccgagcactgggacttcaacgccaccatctccaagactcggtttggggtgaaagatggcgctgactgggtacagctggctgctcctcagtgccacattcctgaatgtgggggccgagatctctatcaccctggagcctgcccagccgagcgaaggggacaacgtcacgctggtcgtccatgggctttcgggggaactgctcgcctacagctggtatgcggggcccacactcagcgtgtcatacctggtggccagctacatcgtgagcacaggcgatgagactcctggcccggcccacacggggcgggaggctgtgcgccccgatggcagcctggacatccagggcatcctgccccggcactcaggcacctacatcctgcagaccttcaacaggcagttgcagaccgaggtgggctacggacacgtgcaggtccatgagatcctggcccagcccacagtcttggccaacagcacagcgctggtggaacgtcgagacaccctgcgccttatgtgcagcagccccagccccaccgccgaggtccgctggttcttcaacggtggggccctgcccgtcgctctccgcctgggcctgtcccctgacggccgggtgctggccaggcatggcatccgccgggaggaggccggcgcctatcagtgtgaggtgtggaacccggtcagtgtcagccgcagcgagcccatcaacctgaccgtgtactttggcccagagcgtgtggccatcctccaggattccaccacccgcacaggctgcaccatcaaagttgacttcaacacgtccctcaccctgtggtgcgtgtccaggtcctgcccagagcccgagtatgtgtggaccttcaacgggcaggccctaaagaacggccaagaccacctcaacatcagcagcatgacagccgcccaggaggggacgtacacatgtattgcgaagaacaccaagaccctgctatctggatctgcctcagtcgtggtcaagctctctgctgcagcagttgccacgatgatcgtgcccgtgcccaccaagccaacggagggccaggacgtaacactgaccgtgcagggctaccccaaggacctgctggtctacgcctggtaccgcgggcctgcctccgagcccaaccggctgctcagccagctgccgtcaggaacctggattgcaggccccgcgcacacaggccgggaggtgggcttccccaactgctcgctgttggtgcagaagctgaacctcacagacactggccgctacacactcaagaccgtcacagtgcagggcaagactgagacactggaagtggagctgcaggtggcccccctggggtaacagcgtgaccctggagacgtccagagagaagagctcttcgcaccatcctctggtcctcgccctctgagtgggaaccactcccccacagcgaggatgccaggctgtggtcctgctgttctcctgcctccaccctagagctagagccacagggccccactccctcgctgagctgttggggagccaccgaggccataaacgtcctggttaa

SEQ ID NO: 31664 - protein, 493 aa, Artificial Sequence
  derived and/or modified sequence
MLKALFLTMLTLALVKSQDTEETITYTQCTDGYEWDPVRQQCKDIDECDIVPDACKGGMKCVNHYGGYLCLPKTAQIIVNNEQPQQETQPAEGTSGATTGVVAASSMATSGVLPGGGFVASAAAVAGPEMQTGRNNFVIRRNPADPQRIPSNPSHRIQCAAGYEQSEHNVCQDIDECTAGTHNCRADQVCINLRGSFACQCPPGYQKRGEQCVDIDECTIPPYCHQRCVNTPGSFYCQCSPGFQLAANNYTCVDINECDASNQCAQQCYNILGSFICQCNQGYELSSDRLNCEDIDECRTSSYLCQYQCVNEPGKFSCMCPQGYQVVRSRTCQDINECETTNECREDEMCWNYHGGFRCYPRNPCQDPYILTPENRCVCPVSNAMCRELPQSIVYKYMSIRSDRSVPSDIFQIQATTIYANTINTFRIKSGNENGEFYLRQTSPVSAMLVLVKSLSGPREHIVDLEMLTVSSIGTFRTSSVLRLTIIVGPFSF

SEQ ID NO: 31665 - protein, 349 aa, Artificial Sequence
  derived and/or modified sequence
MEDTSAFRKQPRLLSIMNSLSSEHNVCQDIDECTAGTHNCRADQVCINLRGSFACQCPPGYQKRGEQCVDIDECTIPPYCHQRCVNTPGSFYCQCSPGFQLAANNYTCVDINECDASNQCAQQCYNILGSFICQCNQGYELSSDRLNCEDIDECRTSSYLCQYQCVNEPGKFSCMCPQGYQVVRSRTCQDINECETTNECREDEMCWNYHGGFRCYPRNPCQDPYILTPENRCVCPVSNAMCRELPQSIVYKYMSIRSDRSVPSDIFQIQATTIYANTINTFRIKSGNENGEFYLRQTSPVSAMLVLVKSLSGPREHIVDLEMLTVSSIGTFRTSSVLRLTIIVGPFSF

SEQ ID NO: 31666 - protein, 87 aa, Artificial Sequence
  derived and/or modified sequence
MLKALFLTMLTLALVKSQDTEETITYTQCTDGYEWDPVRQQCKDIDECDIVPDACKGGMKCVNHYGGYLCLPKTAQIIVNNEQPQQE

SEQ ID NO: 31667 - DNA, 1482 bp, Artificial Sequence
  derived and/or modified sequence
atgctcaaggcactgtttctaaccatgctcactctggcgttggtcaagtcacaggatacagaggagactatcacctatacgcagtgtacagatggttacgagtgggatcccgtgaggcagcagtgcaaagatatcgacgaatgtgatatcgtgccagatgcttgcaagggagggatgaagtgcgtgaaccattacggcggctacttatgcctgcccaaaacagcccaaattatcgtgaataacgagcagccgcaacaagagacccagcccgcagaaggaacaagtggcgcaactaccggggttgttgcagcgtcttccatggccactagcggtgtactgccaggcggtgggttcgtggcgtctgcggccgccgtggccggaccagagatgcagaccgggaggaataacttcgtgatcaggaggaaccccgcagatccacaaaggattccatctaatccctctcatagaattcagtgcgcggcaggctatgaacagagtgagcacaacgtgtgccaagacatcgacgagtgtacagccggcactcacaactgccgcgccgatcaagtctgtattaacctgagagggagttttgcctgtcaatgtccaccaggctatcagaaacgtggagagcaatgtgtagacatcgacgaatgcaccattccaccttactgtcaccagcgctgcgtgaataccccgggctccttctactgccagtgctctccgggatttcaactggcagccaataactacacctgcgtggacatcaatgaatgcgacgctagtaatcaatgcgctcaacagtgctataatattctgggttccttcatttgccagtgtaaccaaggttacgagctgtcatcagacagactgaattgcgaagacatcgacgaatgccgtacatcgtcctacttgtgtcaatatcagtgcgtaaacgaacccggcaagttcagctgcatgtgcccccagggttatcaggttgtgagaagcaggacatgtcaggatatcaatgagtgcgagaccacaaacgagtgccgcgaagatgagatgtgctggaattatcacggaggtttccgctgctatcctcggaacccctgccaggacccatatatcctgacacccgaaaatcggtgcgtctgccctgtctccaacgctatgtgtagagagctgcctcagtccatcgtatataaatacatgtctatccggtccgacaggtccgtacctagcgacatctttcagatccaggccaccaccatttatgcaaacacaataaacaccttcaggattaagtcgggcaacgagaatggtgagttttatctgcgacagaccagtccagtttctgcaatgctggtgctcgttaaatctttgagtggcccacgggagcacattgtggacctggaaatgctgacagtctcaagtatcggcacctttagaactagttcagtcctcaggctcaccatcatagtgggccctttttcgttctag

SEQ ID NO: 31668 - DNA, 1482 bp, Artificial Sequence
  derived and/or modified sequence
atgttgaaagctctgttccttaccatgttgactctggctttggtcaagagccaggatacggaagagaccattacctacacgcagtgcaccgacggctacgaatgggaccctgtgaggcagcaatgtaaggatatagacgagtgcgacatcgtaccagatgcgtgtaagggagggatgaaatgcgtgaaccactacggcggctacctgtgcctccccaaaaccgcccagattatcgtcaacaacgaacagccccagcaggagacacagccggcagagggcaccagcggagctacaactggcgtcgtggccgcgtcttcaatggccaccagcggagtactgcccgggggcggcttcgttgcatcggccgcagcagttgctggccctgaaatgcaaacaggcaggaacaacttcgtgattagaagaaatcctgccgatcctcagcggataccctccaatcccagtcatcgaattcagtgtgctgcgggatatgaacagtcagagcacaacgtgtgtcaagatatcgacgaatgtactgccggtactcacaattgcagagctgatcaggtgtgtataaacttgagaggttctttcgcctgtcagtgcccaccggggtaccaaaagcgtggcgagcagtgcgtggacatagatgaatgcactatacctccatattgtcatcagcgctgtgttaacacacccggcagtttttattgccagtgctcccccggctttcagctggctgccaataattatacttgcgtcgacattaacgagtgcgacgcaagcaaccagtgcgcacagcagtgttataatatcctggggagttttatttgccagtgtaatcaagggtatgagctgagcagtgataggttgaattgcgaggacatcgacgaatgccgtacttcgagctacctgtgccagtatcagtgtgtaaacgagccaggaaaatttagttgcatgtgtccacagggttatcaggtggttaggtctaggacctgtcaggacatcaacgaatgcgagacaaccaatgagtgccgagaggatgagatgtgttggaattatcatgggggctttagatgctacccccggaacccctgccaggatccctacatcctgaccccagaaaatcgttgtgtgtgccctgtctctaatgccatgtgccgagagctgccccagtccatcgtgtacaaatacatgtcaattcgcagcgacaggtccgtgccctccgacattttccagattcaggccaccactatctacgccaatacgataaacacatttcgcattaagtccggcaatgaaaacggagagttttaccttagacaaacctcacccgtttcggcaatgttggttctggtgaagagtctgtcagggccaagggaacatatcgtcgacctggagatgctgaccgtaagttccatcggcaccttccggacttcttcggtgttaagattaacaattatagttggtcccttcagtttttag

SEQ ID NO: 31669 - DNA, 1482 bp, Artificial Sequence
  derived and/or modified sequence
atgctgaaggctctgttcctgacaatgctcaccttggcgctagtgaagagccaggataccgaggagacgattacttacacccagtgtaccgatggatacgaatgggatcccgtccgacagcagtgcaaggacatcgatgagtgtgatatcgtgcccgatgcatgtaaaggcggaatgaagtgtgtgaaccattacggtggctatctatgtcttcccaagactgctcagatcatcgttaacaacgagcagccccagcaggaaacccaaccagccgagggaacctctggcgctactacaggagtcgtggctgccagctctatggcgacttcaggcgtccttcccggaggcggcttcgttgcaagcgctgctgctgtggctggccctgagatgcagactggccggaataactttgtaattcggagaaatcccgccgatccccaacggattccgtccaaccccagccatcggatccagtgcgccgccgggtacgagcagtccgaacacaatgtttgccaggatatcgatgaatgcacagccggcactcacaattgcagggctgaccaggtgtgcataaacctcagaggatcatttgcttgccagtgcccacccggttatcaaaagaggggcgaacaatgtgtggatatcgacgagtgcaccatacctccttattgccaccagagatgcgtaaacacccctggctccttctactgtcagtgctctcccggcttccagctggcagcaaataactatacgtgcgttgatatcaacgaatgtgatgccagtaatcaatgcgcacaacaatgctataatattctcgggtccttcatctgccaatgtaatcaggggtatgagttatcttctgatcggttgaactgtgaagatattgacgaatgcaggacttcatcatatttgtgtcagtatcagtgtgttaacgagcctggcaagttctcttgcatgtgtccacagggatatcaagtggttcgttcacgcacatgccaggatatcaacgagtgcgaaacaaccaacgaatgcagggaggatgaaatgtgttggaattaccacggagggtttcgatgttaccccaggaatccatgtcaggacccttatatactaacccctgagaaccgctgcgtgtgccccgtttcgaacgctatgtgtcgggagcttccacaatctatcgtctataagtatatgtctatccggtctgatcgctcagtcccttccgacatctttcagatccaggccacaactatctacgccaacaccatcaacactttccgaatcaaaagcggaaacgaaaatggtgagttctacctccgtcagacctctcccgtgagtgcaatgcttgtgctggtgaagtctttgtcaggacctagggaacacatcgtagatctcgaaatgctcactgtgagctctatcggtacatttagaacctcatcagtcctgcgcctgaccatcattgtcggacccttcagtttctag

SEQ ID NO: 31670 - DNA, 1050 bp, Artificial Sequence
  derived and/or modified sequence
atggaggacacgagtgcttttcggaagcagccccgactgttgagcataatgaatagtttgtcctcagaacacaacgtgtgtcaggacattgacgagtgcaccgccgggacgcataactgcagggcagatcaggtttgtataaatctgcgtgggtccttcgcctgtcaatgccctcccggctaccagaaacgcggagagcagtgcgtggacatcgacgaatgtaccatacctccttactgccaccaacgctgcgtgaatacaccaggcagtttctactgccaatgtagtccagggttccagctggccgcaaataactacacttgtgtcgacattaacgagtgcgacgcttctaatcagtgtgcccagcagtgttataatatactcgggagttttatctgtcagtgtaaccagggttacgaactgtcctctgaccgattaaattgtgaggacattgacgagtgcagaacatccagttacttatgtcagtaccagtgtgtcaatgagccggggaagttttcttgtatgtgtccgcagggctaccaggttgtacgcagtagaacctgtcaggatatcaacgagtgtgaaaccactaacgagtgcagggaggatgaaatgtgttggaattaccacggggggttcaggtgttacccgcgcaacccatgtcaggatccatacatcttgactcctgaaaatcggtgcgtgtgccctgtctcgaacgccatgtgtcgggagctacctcagtctatcgtgtacaaatatatgagtatccggtctgaccggtcagtaccaagcgacatcttccaaatccaggccacaacaatatacgcaaataccatcaatacctttagaataaaaagcggtaacgagaacggcgagttttatctgcgacagacatcccctgtgtctgccatgctggtgcttgtaaagtcactgtccgggccacgagaacacattgttgatctggagatgctgactgttagctccatcggtacctttcgcacgtcttctgtgttgcgcttgaccatcatcgtagggcctttctctttttag

SEQ ID NO: 31671 - DNA, 159 bp, Artificial Sequence
  derived and/or modified sequence
atgctgaaagccctgttccttaccatgctgacgctcgccctggtcaaatcacaggatacagaagaaaccatcacgtatacccagtgtaccgacggttatgagtgggaccctgtccgacaacagtgcaaggacatcgatgagtgcgatattgtaccctag

SEQ ID NO: 31672 - DNA, 264 bp, Artificial Sequence
  derived and/or modified sequence
atgcttaaggcgttgttcctcacgatgctgacactcgccttggtgaagtcacaggacaccgaggaaactatcacttatacacagtgcaccgatggttatgaatgggatccggttcggcaacagtgtaaagacatcgatgagtgcgacattgtgccagacgcatgcaaaggcggcatgaagtgcgttaatcactacggcggatatctttgtctgcccaaaaccgcgcagattattgtgaataacgagcagcctcagcaggagtag

SEQ ID NO: 31673 - DNA, 519 bp, Artificial Sequence
  derived and/or modified sequence
atgcttaaagcattatttctaacaatgcttaccctcgcgctcgtaaaaagccaggacacagaggagactattacgtatacccagtgtactgacggttacgagtgggaccctgtgagacagcaatgcaaggacatcgacgaatgcgatattgtgcccgacgcttgtaaagggggcatgaaatgcgttaaccactacggagggtatctatgcttacccaagaccgcgcagattatcgtgaataatgaacagcctcagcaggagacacagcccgctgagggcacctccggagcaacaacaggggtagttgccgcatctagcatggcaactagtggcgtcctcccaggcggtggctttgtggctagcgctgccgccgtggcagggccagagatgcagaccggtagaaacaattttgtgatccggcggaaccccgccgatccccaaaggatccccagcaacccttctcatcggattcagtgtgcggctgggtacgaacagtctgaacacaacgtgtgtcagtag

SEQ ID NO: 31674 - DNA, 360 bp, Artificial Sequence
  derived and/or modified sequence
atgctgaaggcacttttcctcactatgttgactctggccctggtcaagtcccaggacacagaggaaacgataacatacacccagtgcactgacgggtatgagtgggatcccgtgcgccagcagtgtaaagatatcgacgaatgcgatatcgtgccagacgcctgcaaaggggggatgaagtgcgtgaatcattatggtggctacctctgcctcccaaagaccgctcagatcatagtgaataatgagcagccacagcaggaaactcagcctgcggaaggcacctcgggggctactacaggggttgtggcggcatctagcatggcaacatcaggagttctaccaggaggcgggtttgtttag

SEQ ID NO: 31675 - DNA, 321 bp, Artificial Sequence
  derived and/or modified sequence
atgctcaaggcactcttcttaaccatgctgactctcgcgctggtgaagtcacaggataccgaggagacgataacatatacccagtgcaccgatgggtatgagtgggatcctgtgcgccagcagtgtaaggatatcgacgagtgcgatattgtgcctgacgcgtgtaaagggggcatgaagtgcgtcaatcattatggcggatacctgtgcctgccaaagaccgcccagattatcgtgaataatgaacaaccacagcaggaaactcagcctgccgaggggacaagcggagcgaccactggcgtagtagcagcctccagttag

SEQ ID NO: 31676 - DNA, 189 bp, Artificial Sequence
  derived and/or modified sequence
atgctcaaggccctttttctgacaatgttaactctcgcactggtgaagtctcaggacaccgaggaaaccattacttacacccagtgtacagatggttatgagtgggatccagtcagacaacagtgcaaagacatcgatgagtgcgacatcgtgcccgatgcatgtaaaggaggaatgaagtgtgtatag

SEQ ID NO: 31677 - DNA, 1482 bp, Artificial Sequence
  derived and/or modified sequence
atgctgaaggccctcttcctgaccatgctgaccctggccctggtgaagagccaggacacagaggagaccatcacctacacccagtgcacagatggctatgagtgggaccctgtgcggcagcagtgcaaggacattgatgaatgtgacatcgtgcctgatgcctgcaagggcggcatgaagtgtgtgaaccactatggaggctacctgtgcctgcccaagacagcccagatcatcgtgaacaatgagcagccccagcaggagacccagcctgctgagggcaccagcggggccaccactggagtggtggccgccagctccatggccaccagcggcgtgctgcccggcggcggctttgtggccagcgctgctgctgtggccggccctgagatgcagacaggcaggaacaactttgtgatcagaagaaatcctgctgacccccagaggatccccagcaaccccagccaccgcatccagtgtgccgccggctatgagcagagcgagcacaacgtgtgccaggacattgatgagtgcacagctggcacccacaactgcagagctgaccaggtgtgcatcaacctgcggggcagctttgcctgccagtgccccccaggctaccagaagagaggagagcagtgtgtggacattgatgaatgtaccatccccccctactgccaccagagatgtgtgaacaccccaggcagcttctactgccagtgcagccctggcttccagctggccgccaacaactacacctgtgtggacatcaatgaatgtgatgccagcaaccagtgtgcccagcagtgctacaacatcctgggcagcttcatctgccagtgcaaccagggctatgagctgagcagtgaccggctgaactgtgaagatattgatgaatgtaggaccagcagctacctgtgccagtaccagtgtgtgaatgaacctgggaagttcagctgcatgtgcccccagggctaccaggtggtgcgcagcaggacctgccaggacatcaatgaatgtgagaccaccaatgaatgtcgggaggatgagatgtgctggaactaccacggcggcttccgctgctaccccaggaacccctgccaggacccctacatcctgaccccagagaacagatgtgtgtgccctgtgtccaatgccatgtgccgggagctgccccagagcatcgtgtacaagtacatgagcatccgcagtgacagatctgtgcccagcgacatcttccagatccaggccaccaccatctatgccaacaccatcaacaccttccgcatcaagtctggaaatgaaaatggagagttctacctgcggcagaccagccctgtgtctgccatgctggtgctggtgaagagcctgagcggcccccgggagcacatcgtggacctggagatgctgactgtgagcagcatcggcaccttccgcaccagctctgtgctgcggctgaccatcatcgtgggccccttctccttctag

SEQ ID NO: 31678 - DNA, 1050 bp, Artificial Sequence
  derived and/or modified sequence
atggaggacaccagcgccttcaggaagcagccccggctgctgagcatcatgaacagcctgagcagcgagcacaacgtgtgccaggacattgatgagtgcacagctggcacccacaactgcagagctgaccaggtgtgcatcaacctgcggggcagctttgcctgccagtgccccccaggctaccagaagagaggagagcagtgtgtggacattgatgaatgtaccatccccccctactgccaccagagatgtgtgaacaccccaggcagcttctactgccagtgcagccctggcttccagctggccgccaacaactacacctgtgtggacatcaatgaatgtgatgccagcaaccagtgtgcccagcagtgctacaacatcctgggcagcttcatctgccagtgcaaccagggctatgagctgagcagtgaccggctgaactgtgaagatattgatgaatgtaggaccagcagctacctgtgccagtaccagtgtgtgaatgaacctgggaagttcagctgcatgtgcccccagggctaccaggtggtgcgcagcaggacctgccaggacatcaatgaatgtgagaccaccaatgaatgtcgggaggatgagatgtgctggaactaccacggcggcttccgctgctaccccaggaacccctgccaggacccctacatcctgaccccagagaacagatgtgtgtgccctgtgtccaatgccatgtgccgggagctgccccagagcatcgtgtacaagtacatgagcatccgcagtgacagatctgtgcccagcgacatcttccagatccaggccaccaccatctatgccaacaccatcaacaccttccgcatcaagtctggaaatgaaaatggagagttctacctgcggcagaccagccctgtgtctgccatgctggtgctggtgaagagcctgagcggcccccgggagcacatcgtggacctggagatgctgactgtgagcagcatcggcaccttccgcaccagctctgtgctgcggctgaccatcatcgtgggccccttctccttctag

SEQ ID NO: 31679 - DNA, 159 bp, Artificial Sequence
  derived and/or modified sequence
atgctgaaggccctcttcctgaccatgctgaccctggccctggtgaagagccaggacacagaggagaccatcacctacacccagtgcacagatggctatgagtgggaccctgtgcggcagcagtgcaaggacattgatgaatgtgacatcgtgccctag

SEQ ID NO: 31680 - DNA, 264 bp, Artificial Sequence
  derived and/or modified sequence
atgctgaaggccctcttcctgaccatgctgaccctggccctggtgaagagccaggacacagaggagaccatcacctacacccagtgcacagatggctatgagtgggaccctgtgcggcagcagtgcaaggacattgatgaatgtgacatcgtgcctgatgcctgcaagggcggcatgaagtgtgtgaaccactatggaggctacctgtgcctgcccaagacagcccagatcatcgtgaacaatgagcagccccagcaggagtag

SEQ ID NO: 31681 - DNA, 519 bp, Artificial Sequence
  derived and/or modified sequence
atgctgaaggccctcttcctgaccatgctgaccctggccctggtgaagagccaggacacagaggagaccatcacctacacccagtgcacagatggctatgagtgggaccctgtgcggcagcagtgcaaggacattgatgaatgtgacatcgtgcctgatgcctgcaagggcggcatgaagtgtgtgaaccactatggaggctacctgtgcctgcccaagacagcccagatcatcgtgaacaatgagcagccccagcaggagacccagcctgctgagggcaccagcggggccaccactggagtggtggccgccagctccatggccaccagcggcgtgctgcccggcggcggctttgtggccagcgctgctgctgtggccggccctgagatgcagacaggcaggaacaactttgtgatcagaagaaatcctgctgacccccagaggatccccagcaaccccagccaccgcatccagtgtgccgccggctatgagcagagcgagcacaacgtgtgccagtag

SEQ ID NO: 31682 - DNA, 360 bp, Artificial Sequence
  derived and/or modified sequence
atgctgaaggccctcttcctgaccatgctgaccctggccctggtgaagagccaggacacagaggagaccatcacctacacccagtgcacagatggctatgagtgggaccctgtgcggcagcagtgcaaggacattgatgaatgtgacatcgtgcctgatgcctgcaagggcggcatgaagtgtgtgaaccactatggaggctacctgtgcctgcccaagacagcccagatcatcgtgaacaatgagcagccccagcaggagacccagcctgctgagggcaccagcggggccaccactggagtggtggccgccagctccatggccaccagcggcgtgctgcccggcggcggctttgtgtag

SEQ ID NO: 31683 - DNA, 321 bp, Artificial Sequence
  derived and/or modified sequence
atgctgaaggccctcttcctgaccatgctgaccctggccctggtgaagagccaggacacagaggagaccatcacctacacccagtgcacagatggctatgagtgggaccctgtgcggcagcagtgcaaggacattgatgaatgtgacatcgtgcctgatgcctgcaagggcggcatgaagtgtgtgaaccactatggaggctacctgtgcctgcccaagacagcccagatcatcgtgaacaatgagcagccccagcaggagacccagcctgctgagggcaccagcggggccaccactggagtggtggccgccagcagctag

SEQ ID NO: 31684 - DNA, 189 bp, Artificial Sequence
  derived and/or modified sequence
atgctgaaggccctcttcctgaccatgctgaccctggccctggtgaagagccaggacacagaggagaccatcacctacacccagtgcacagatggctatgagtgggaccctgtgcggcagcagtgcaaggacattgatgaatgtgacatcgtgcctgatgcctgcaagggcggcatgaagtgtgtgtag

SEQ ID NO: 31685 - DNA, 1482 bp, Artificial Sequence
  derived and/or modified sequence
atgctgaaggccctgttcctgaccatgctgaccctggccctggtgaaaagtcaggatactgaagagacaatcacctacacacagtgcaccgacggctacgaatgggatcctgtgcgtcaacagtgcaaagacattgatgagtgtgacatcgtgccagatgcttgtaagggtgggatgaaatgtgtgaaccactacgggggatatttatgtctgcccaaaacagcccagattatcgttaacaacgaacagcctcagcaggaaacccagccagcagagggcacgagtggggcaaccaccggggtagtggcggccagcagcatggccacctctggagtgctccctggtggaggcttcgtggccagtgccgccgctgtggccgggcctgaaatgcaaacagggcgtaacaacttcgtgattaggaggaatccggctgatccacagagaataccaagtaacccttcccacaggatacagtgcgccgcaggatacgagcagagtgagcacaatgtatgtcaggatattgatgagtgcactgctggaactcataattgcagggctgaccaggtttgtattaatctccggggtagtttcgcctgtcaatgccctcctgggtaccagaaaaggggcgagcagtgtgtggacatcgatgagtgtacaatccctccgtattgccatcaaagatgcgtcaatacgcccgggtccttctactgtcagtgtagccctggttttcagctggcagccaataactacacctgtgttgatattaacgagtgcgatgcgtctaaccagtgcgcacagcagtgttacaatattctcggaagttttatctgtcagtgcaatcaagggtacgaactaagttctgacagattaaattgcgaagacatcgatgagtgccgtacctcctcttatctgtgccagtatcagtgtgtgaacgaacctggtaagttttcctgcatgtgtccccagggatatcaggtagtgaggtctaggacatgtcaggacattaacgaatgcgaaacaacaaacgagtgccgggaggacgaaatgtgctggaactatcatggggggttcagatgctatccaaggaacccctgccaggatccttacattctgaccccagagaacagatgcgtatgtcccgtatctaacgcaatgtgccgggagctcccacagtcaatcgtgtacaaatatatgtctataaggagtgatcgtagtgttccatcagacattttccagatccaggcaaccaccatatacgcaaatacgattaataccttcaggatcaaatctggtaatgagaacggagagttctatctgaggcagacatcacctgtgagcgccatgttggtcctggtgaagagcctgagtggaccccgggagcatatcgtcgacctagagatgcttactgtgagtagcatcggtaccttcaggactagtagtgtgcttcggctgactataatcgttgggcccttctcgttttag

SEQ ID NO: 31686 - DNA, 1482 bp, Artificial Sequence
  derived and/or modified sequence
atgctgaaggccctgttcctgaccatgctgaccctggccctggtgaagtcccaggatacggaagaaaccattacctatacacagtgtactgatggctatgagtgggacccagtccgccagcaatgcaaggacatagacgagtgcgacattgtaccggacgcatgtaaaggggggatgaagtgtgtgaaccattacggtggctacctttgcctaccaaagaccgcccagatcattgtcaacaatgagcaacctcaacaagaaacccagcctgcagagggtacttctggcgcgactaccggagttgtggccgcctcttccatggccaccagtggcgtcctccctggaggggggtttgtggcatcggccgcagctgttgccggccctgaaatgcagacagggcggaacaacttcgtcatccgaagaaaccctgcagatccccagaggatcccaagtaatccaagccaccgtattcagtgcgctgcaggctacgagcagtccgagcacaatgtgtgccaggatatcgatgagtgcacagccggaacacacaattgtcgcgccgaccaggtgtgcattaatctgagggggagttttgcctgccagtgtccgccaggctatcagaagagaggcgaacaatgcgtggatattgacgaatgcacaatacccccatattgccatcagcgctgcgtcaatacacctggctctttttactgtcagtgcagtcctgggtttcagctggccgcgaacaattacacatgcgtcgacattaatgaatgtgatgcatccaaccagtgcgctcagcagtgctataacatccttggctcattcatctgccaatgtaatcaaggttacgagctatcctcagatcgcctgaactgcgaagatatagatgaatgtagaactagctcttatttgtgtcagtaccagtgcgttaacgagcctggcaagttctcgtgtatgtgcccccagggatatcaggtagtcagaagtagaacatgccaagatataaacgaatgcgagaccaccaatgagtgtcgtgaagatgagatgtgttggaattaccatggaggtttccgctgttacccacgaaacccgtgtcaggatccatacatattgaccccggagaatagatgtgtctgcccggtgtccaatgcaatgtgtagagaactgccccaatctattgtgtacaaatatatgagtattcgcagcgaccggtccgtcccatcggacatatttcagatccaagcgactaccatttatgcgaacactatcaatacattccggatcaaatctggcaatgagaatggcgaattttaccttcggcaaacaagccccgtcagtgccatgctcgtgcttgtgaagagcttgtccggcccccgggaacacatcgtggacttagaaatgcttacagtgtcctccatcggaacattcaggacttccagtgttcttcgactaacaattatagtgggacccttctcgttttag

SEQ ID NO: 31687 - DNA, 1482 bp, Artificial Sequence
  derived and/or modified sequence
atgctgaaggccctgttcctgaccatgctgaccctggccctggtgaaatctcaagatacggaagagacaattacatacacccagtgtacagacggttatgagtgggatccagttcggcaacagtgtaaggatatcgatgaatgcgacatagtgccggacgcctgtaagggcggcatgaagtgcgtcaaccactatggaggttacctgtgtctgccaaagactgcgcaaattatcgtcaataacgagcagccccaacaagagactcagccggccgagggaactagcggcgccacaacaggagtcgttgcagcgagctccatggcgactagcggcgtgcttcccgggggcggcttcgtggcctcggccgccgctgtcgccggcccagaaatgcagacaggtcgcaataattttgtaattcggaggaacccggccgacccgcagcgcatccccagtaacccatcacatcggattcagtgtgccgccgggtacgaacaatcagaacataatgtttgtcaggacatagatgagtgcactgctggtactcataactgcagagcagaccaggtgtgtattaatttgcgtgggtccttcgcatgtcagtgtcctcctggttatcaaaaaaggggcgaacaatgcgtggacatcgatgaatgtaccatcccgccctactgtcaccagagatgcgttaatacaccgggaagcttctattgtcagtgctcacctggcttccagcttgcagctaataactatacatgcgtggacatcaacgagtgtgatgcctccaatcagtgtgcacagcagtgctataacatccttgggtcctttatttgccagtgtaatcaagggtacgaattgtcaagtgaccggcttaactgtgaggacattgatgagtgccgcacctctagctacctctgtcagtaccaatgtgtgaatgaacccggaaaatttagttgtatgtgtccccaaggttatcaggttgtgagaagccgaacgtgccaggatattaatgaatgcgaaacaaccaatgagtgtcgggaggatgagatgtgctggaactaccatggcggcttcaggtgctaccccaggaatccctgtcaagatccttatatcctgactcctgaaaacaggtgcgtctgtcccgtttctaatgcaatgtgcagagaactgccccagagcattgtttataaatatatgtcaatcagaagtgacagatcagttccaagcgacatcttccagatccaggctacaacgatctatgccaatactataaatacgttccgcatcaaatcaggaaacgagaacggcgagttttatttaaggcagaccagcccggtgtctgctatgttggttctggtgaaatccctctccggaccacgggagcatattgtggacctggagatgttgactgtttcgtcgatcggaactttccggacttcatctgtgttgagactgactattatcgtgggaccgtttagtttttag

SEQ ID NO: 31688 - DNA, 1050 bp, Artificial Sequence
  derived and/or modified sequence
atggaggacaccagcgccttccggaagcagccccggctgctgagcattatgaattctctgagctcagagcacaacgtttgtcaggacatcgacgaatgtactgcaggaactcacaattgtagggctgatcaggtatgtatcaacctgaggggttcatttgcctgtcagtgtccgcctgggtaccagaagaggggggagcagtgtgtcgatattgacgagtgcacgatacccccttactgtcaccagcggtgtgtgaataccccagggagtttttattgccagtgtagccctggctttcagctggccgccaacaactacacctgtgttgacatcaacgagtgcgatgcttcaaatcagtgcgcccagcagtgttataacattctggggagcttcatctgccaatgtaatcagggctacgagctcagcagtgataggctaaactgcgaagacatcgacgagtgccggacgtccagttacctatgccagtatcaatgcgttaacgaacctgggaaattctcgtgcatgtgtccgcaggggtatcaggttgtgaggtcccgcacgtgtcaagatatcaacgagtgcgagactacaaatgagtgcagagaggacgagatgtgttggaattaccacgggggcttcaggtgttatccacgcaatccttgtcaggacccctatatccttacccccgaaaacagatgcgtctgtccagtctcaaacgctatgtgcagggagctccctcagagcattgtttataagtatatgtccatccgcagtgatcggagcgtccctagcgatatctttcagatacaggccacgaccatctacgcaaacaccattaacacattcagaattaagtcaggaaatgagaatggcgaattctatttaaggcaaacaagcccagtgagcgccatgctcgtcttagtcaagtccttatcaggccccagagaacatatcgttgatctggagatgctgacggtgagcagcatcgggacttttaggaccagttccgtcctgcgcttgactatcattgtaggacccttttcgttctag

SEQ ID NO: 31689 - DNA, 159 bp, Artificial Sequence
  derived and/or modified sequence
atgctgaaggccctgttcctgaccatgctgaccctggccctggtgaaatcccaagataccgaagaaacaatcacgtacacacagtgcacagatggttacgagtgggacccagttcgtcagcagtgtaaggacatcgacgagtgcgacattgtgccgtag

SEQ ID NO: 31690 - DNA, 264 bp, Artificial Sequence
  derived and/or modified sequence
atgctgaaggccctgttcctgaccatgctgaccctggccctggtgaagtcccaggatacagaagaaacaattacttacactcaatgtacagatggatacgaatgggaccccgtccgtcagcagtgcaaggacattgacgagtgcgatatcgtgcccgatgcttgtaaaggagggatgaaatgcgtcaaccactacggaggatatctgtgtctgcctaagacagcccagattatcgtgaacaatgagcagccccagcaagaatag

SEQ ID NO: 31691 - DNA, 519 bp, Artificial Sequence
  derived and/or modified sequence
atgctgaaggccctgttcctgaccatgctgaccctggccctggtgaaaagtcaggatactgaggagactattacatacacccaatgcactgatggctatgagtgggaccccgtgagacagcagtgcaaggatattgatgaatgtgacatcgtgcccgatgcttgcaagggtggaatgaagtgtgtgaatcactatgggggatatctctgtcttccaaaaactgcccagatcatcgttaataatgagcagccacagcaggagacccagcctgccgagggaaccagcggcgccacaactggtgtggttgctgctagttctatggccacctcaggagtacttccaggtggaggctttgtggctagcgctgctgcagtcgcgggtccagaaatgcaaaccgggcgcaataactttgtcatcagacgcaaccccgccgacccacaaaggataccatctaacccctctcatagaatccagtgcgccgccgggtatgagcagagcgagcacaacgtgtgccagtag

SEQ ID NO: 31692 - DNA, 360 bp, Artificial Sequence
  derived and/or modified sequence
atgctgaaggccctgttcctgaccatgctgaccctggccctggtgaagtctcaggacacggaagagaccattacctatactcagtgtaccgatggttatgagtgggaccctgtcaggcaacagtgcaaagatatcgacgaatgcgacatcgttccagatgcctgtaaaggagggatgaaatgcgtcaatcattatggtgggtacctgtgcttgcctaaaacagcccagatcattgtcaacaacgaacagcctcagcaggagacccagccggcagagggcacgagcggggccaccacaggggtagtagcggcgagctccatggccacatcaggggttctgcctgggggcggctttgtgtag

SEQ ID NO: 31693 - DNA, 321 bp, Artificial Sequence
  derived and/or modified sequence
atgctgaaggccctgttcctgaccatgctgaccctggccctggtgaagagccaggacacggaagaaacaatcacctatacacagtgtacggacggctatgagtgggacccggtgaggcagcaatgtaaagatattgatgaatgcgacatcgtgccggatgcttgtaagggcggtatgaaatgcgtaaaccattatggaggctacctgtgcctgccaaaaacagctcagatcattgtcaacaatgaacagccacagcaggaaacacagcccgcagaagggacctccggcgcaacaaccggcgtggtcgccgcatcctcatag

SEQ ID NO: 31694 - DNA, 189 bp, Artificial Sequence
  derived and/or modified sequence
atgctgaaggccctgttcctgaccatgctgaccctggccctggtgaagtcccaggacactgaggagacaattacatacacacagtgcacagatggatacgaatgggaccctgttcgccaacagtgtaaagatatcgatgaatgcgatattgtgccagacgcctgcaaggggggtatgaaatgtgtgtag

SEQ ID NO: 31695 - DNA, 1482 bp, Artificial Sequence
  derived and/or modified sequence
atgttgaaagcactgtttttgaccatgctcactcttgccctggtgaagagtcaggacaccgaggagaccattacatacactcaatgtaccgatggttatgagtgggatcccgtgcgccaacagtgcaaagatattgacgaatgcgacattgtgccggacgcttgcaagggtgggatgaagtgtgtgaaccactatggcggttacttgtgcctaccaaaaacagctcaaattatcgtcaataacgagcagccccagcaggaaacacagccagcagagggaaccagtggggcaacaacgggcgttgtggccgctagttccatggccacgtcgggtgtcttgcccggtggaggctttgttgcttctgcagcagccgtggccggacctgaaatgcagactggacgcaacaattttgtgattagacgcaatcccgctgacccccagagaattccctcaaatccatcccatcgtattcaatgcgctgctggttacgagcagtccgagcacaacgtatgtcaggatatcgatgagtgcacggccggaacacataactgccgagcagaccaggtgtgcattaacctgcgtggcagttttgcctgtcagtgccccccaggctatcaaaagcggggtgaacagtgtgtggacatcgacgagtgcaccatcccgccttactgccaccagcgctgtgttaatactcctgggtctttctactgtcagtgctccccaggctttcagctagcggctaataactatacctgcgtggatatcaatgagtgcgatgccagtaaccagtgcgcgcagcagtgttacaatattctgggaagctttatatgtcagtgtaatcagggatacgaactcagttcagaccgtctgaattgcgaggacatagatgagtgcaggacatctagctacctgtgccaataccaatgcgtgaatgaacccggaaaattcagctgcatgtgtccacaaggctatcaggtagtacggagcagaacttgtcaggatattaatgaatgtgagaccaccaatgaatgcagagaagatgagatgtgctggaactaccacgggggttttcgctgttacccgcgaaacccgtgtcaggacccgtacattctgacacccgagaatcggtgcgtgtgtcccgtgtccaacgccatgtgtcgggaactcccacagtccatcgtgtataaatatatgtcaataagatcagatcgctccgttccctctgacattttccagatccaagccacaacaatctatgctaacacgatcaacacctttaggataaagagtgggaacgaaaacggtgaattctacctgcgccaaacgagtcccgtcagtgcgatgcttgtgctggtaaagagcttaagcgggcctcgggaacatatcgtagatctcgagatgctgactgtttccagtatcgggactttccgcaccagctctgtccttcgacttaccatcatagtcggcccttttagcttctag

SEQ ID NO: 31696 - DNA, 1482 bp, Artificial Sequence
  derived and/or modified sequence
atgctcaaggccctctttcttacaatgttaacgctcgccttggttaagagtcaggacacagaggaaacgatcacatatacccaatgcaccgacggatatgagtgggacccagtccgacagcagtgtaaggatatcgatgaatgcgatatagttccagatgcatgcaaagggggtatgaagtgcgtcaatcactatggcggatatctgtgtttacccaaaacagcccaaattatcgttaacaatgaacaacctcaacaggagactcagccagccgaaggtacttccggggctaccacgggcgtggtggcggcttccagtatggccacatcgggagttctaccaggcggtggattcgtggcaagcgccgcagccgtggccggaccagagatgcagacggggaggaataacttcgtgatcagacgtaatccagcagatcctcagagaatcccaagcaatccatcccaccgcattcaatgcgcagcgggatatgagcagagcgagcataatgtttgtcaggacatcgacgaatgcacagcgggtacccacaactgtcgagcggatcaagtgtgcattaatctacgagggtcttttgcctgccagtgtccaccgggatatcagaaacggggagaacagtgcgttgacatcgacgagtgtacaatcccaccttattgtcatcagcgttgcgtgaacaccccagggagtttctactgccagtgttcaccaggctttcagctcgctgctaacaattacacttgcgtggacatcaatgagtgcgacgcctccaaccaatgtgcccagcagtgctataatatcctcggatctttcatatgtcaatgtaatcaggggtatgagctctcgtccgaccggttgaactgcgaggacatcgacgagtgccgcacgtcatcttatctatgtcagtaccagtgtgtgaacgaacccggaaagttttcctgtatgtgtcctcaggggtaccaggtcgtgagatcccgtacctgtcaagatattaatgagtgcgagaccacaaacgaatgcagagaggatgaaatgtgttggaactatcatgggggatttcggtgttacccaagaaatccatgccaagacccttacattctcaccccggagaatcggtgcgtatgtccagtgagcaacgccatgtgcagggaactcccacagtcaattgtgtacaagtacatgagcataaggtcagaccgatccgtaccatccgacattttccagatccaggcaacaaccatctatgccaacactatcaatacctttcgtatcaagtccgggaatgagaacggtgagttttatctccgccagactagccctgtgtctgccatgctggtccttgtgaagagtctcagcgggcctagagagcatatcgtggacctggagatgctgaccgtttcttctattgggacatttcggacatcgtccgtcttgcggctgacaatcattgttggcccattttcgttttag

SEQ ID NO: 31697 - DNA, 1482 bp, Artificial Sequence
  derived and/or modified sequence
atgcttaaggctctgttcctcacaatgctcacccttgctctagttaaatctcaggacacggaggaaaccattacgtacacgcaatgcaccgatgggtacgagtgggatccggtgagacagcagtgtaaagatattgatgagtgtgacatcgtgcccgacgcctgcaagggcggaatgaagtgcgtcaatcattacgggggatatctgtgcctaccgaaaaccgcccagatcattgttaataatgagcagccacagcaggagacacagccagccgagggcacctctggggcaaccactggagtggtggctgccagctcgatggcaaccagcggcgtgttacctggcggaggctttgtagcctccgctgccgcagtagccggacctgagatgcagacgggacgcaataacttcgtgatccggagaaacccagccgatcctcagagaatcccttctaacccgtctcatcgtatccagtgcgccgcagggtacgaacagagcgagcataatgtgtgccaagatatagacgaatgtaccgcgggaacacacaactgccgcgctgaccaggtttgtatcaacttacggggaagtttcgcctgccagtgccctcccggttatcagaagagaggcgaacagtgtgtggacatagatgaatgcacaatcccaccttactgtcatcagcgctgcgtcaatactcccggatcattttactgtcagtgcagccctggatttcagcttgcagctaacaactatacttgcgtggacatcaacgagtgcgacgcctctaaccagtgcgctcagcagtgttacaatatacttgggagtttcatttgccaatgcaatcaaggctacgagcttagttctgaccggctgaattgcgaagacattgacgagtgtcgcacctcatcctacctgtgccagtaccaatgtgttaatgagccaggaaaattctcttgtatgtgcccacaggggtaccaggttgtacgctcaaggacttgccaggatataaatgaatgtgagacaacaaacgagtgccgggaagacgaaatgtgttggaactatcacggaggcttcaggtgttatccacgtaatccttgtcaggacccctatatcctcacaccagagaatcgttgcgtgtgtccagtttctaatgctatgtgccgcgagctccctcagtcaatagtctacaagtacatgtctatcaggtctgaccgaagtgtgcctagcgacattttccagattcaggccaccaccatatatgccaacaccatcaatacatttcgaataaaatcgggaaacgaaaacggagaattttacttacgccagacttcacccgtgtccgccatgcttgtccttgtaaaatctctgtccggtccccgtgagcacatagtagatctggagatgctgacggtgtccagcatagggacatttcggacctcctccgtacttcggctaacaattatagtcgggcctttttccttttag

SEQ ID NO: 31698 - DNA, 1050 bp, Artificial Sequence
  derived and/or modified sequence
atggaggataccagcgcctttcgcaagcagcccagattgttgtccatcatgaactccttgagtagcgaacataatgtttgtcaggacatcgacgagtgcacggccggaactcataactgtagggccgaccaggtgtgcataaatctgcggggttcatttgcttgccagtgtccacccggttaccaaaagagaggagagcagtgtgtcgacattgacgaatgcactattccaccctactgtcatcagcggtgtgttaatactccgggaagcttttattgccagtgtagccccggtttccaactagctgccaacaactacacctgcgtcgatatcaatgagtgcgacgcgagcaaccagtgcgctcaacagtgttacaacatcctcgggtccttcatttgtcagtgcaaccagggttacgaactgagcagtgacaggcttaattgcgaagatattgatgagtgccgcacttcttcctacttatgccagtaccagtgtgtcaatgagccgggaaagttctcttgcatgtgcccacagggctatcaggtggtgcggtcccggacatgccaggatattaacgaatgtgagaccacaaatgagtgtagagaagatgaaatgtgctggaattaccacgggggttttcgttgctatcctcgtaatccttgtcaagacccctacatactgacacccgagaataggtgtgtgtgccccgtgagcaatgcaatgtgcagggagctcccccagagcattgtgtacaaatatatgtcgatccggtcagatcggagtgtgccatcggacattttccaaatccaggcgaccaccatttacgctaataccataaatacttttcggattaagtcgggtaacgaaaatggagaattctacttgaggcaaacctcacctgtgagcgccatgcttgttttagtaaaaagtttgtctggtcccagagagcacatcgtggacctggaaatgctgacggtgtcatcaatcggcacgttccggaccagctccgttctgcgactgactataatagttggcccattctccttttag

SEQ ID NO: 31699 - DNA, 159 bp, Artificial Sequence
  derived and/or modified sequence
atgctgaaggcgctcttcctcacaatgttaactctcgcactggtgaagtcccaggatacagaggaaacgatcacctacacacagtgtaccgacggatatgagtgggaccccgtgcggcagcagtgcaaggacattgacgaatgtgacatcgtgccatag

SEQ ID NO: 31700 - DNA, 264 bp, Artificial Sequence
  derived and/or modified sequence
atgctcaaggccttatttctcacgatgctgacattagctttggtaaaatcacaggataccgaggagaccattacatatactcagtgcacggacgggtacgagtgggatcccgtccggcagcagtgtaaggacattgatgagtgcgatattgttcccgatgcctgtaaaggcggaatgaagtgtgttaatcactacggcggttatctctgcctccccaaaactgcccagatcatcgtcaacaacgaacagccacaacaggagtag

SEQ ID NO: 31701 - DNA, 519 bp, Artificial Sequence
  derived and/or modified sequence
atgttgaaagccttgtttctgacaatgctgaccctcgcactcgttaaatctcaggatactgaagagactataacatatactcagtgcacagacgggtacgagtgggatcccgtgcgccagcagtgcaaagatattgacgaatgcgacattgtacccgatgcctgtaaggggggaatgaagtgcgtgaatcattacggcggatatctgtgcctgccgaagacggcccaaataatcgtcaataacgaacagccccaacaggaaactcagccagcagaaggcacaagcggcgctacgaccggggtggttgcggcttctagtatggccacgtcaggcgtgttacccggtggcggttttgtggcatcggcagccgcagtcgcaggtcccgagatgcagactggacgtaacaactttgttatccgccgaaaccctgctgacccacagcggattccatctaatccatcccaccggatccagtgtgccgctgggtacgagcagagcgaacacaacgtctgccaatag

SEQ ID NO: 31702 - DNA, 360 bp, Artificial Sequence
  derived and/or modified sequence
atgctaaaagccttgtttttaacaatgttgacgttggcattggtgaagtcacaggacacagaggagaccattacttatacccagtgtactgacggctatgaatgggacccggttagacagcagtgcaaggacatcgacgaatgcgacattgtgcccgacgcctgcaaaggtgggatgaaatgcgttaaccactacgggggttacctgtgtctgccaaagaccgcccagataattgttaacaatgaacagcctcagcaggaaactcaacctgctgaaggaactagtggggctaccacgggcgtcgtggctgcatcgtctatggctacgagcggagtgctccctggaggaggctttgtctag

SEQ ID NO: 31703 - DNA, 321 bp, Artificial Sequence
  derived and/or modified sequence
atgttgaaggctctattcctgacgatgttgactctggccttagtaaagtctcaagacacggaagagactatcacctacacgcaatgcacagatggatacgaatgggaccccgtgcggcagcagtgcaaggacatagatgagtgtgacatcgtgcctgacgcctgtaagggaggaatgaagtgcgtgaaccattatgggggttacctgtgcctcccaaagacagcccagatcatagttaacaacgagcagcctcagcaagaaactcagcccgctgaggggactagcggagcaaccactggcgtggtggcagcgtcctcatag

SEQ ID NO: 31704 - DNA, 189 bp, Artificial Sequence
  derived and/or modified sequence
atgttaaaggcactgttcctcactatgctgactcttgcccttgtaaagtcacaggataccgaggaaactatcacgtacacacaatgtaccgatggatacgagtgggaccctgtccgccagcagtgtaaggatatcgacgagtgtgatattgtccctgatgcttgtaaagggggtatgaagtgtgtctag

SEQ ID NO: 31705 - DNA, 1482 bp, Artificial Sequence
  derived and/or modified sequence
atgctgaaggccctgttcctgaccatgctgaccctggccctggtgaagagccaggacaccgaggagaccatcacctacacccagtgcaccgacggctacgagtgggaccccgtgagacagcagtgcaaggacatcgacgagtgcgacatcgtgcccgacgcctgcaagggcggcatgaagtgcgtgaaccactacggcggctacctgtgcctgcccaagaccgcccagatcatcgtgaacaacgagcagccccagcaggagacccagcccgccgagggcaccagcggcgccaccaccggcgtggtggccgccagcagcatggccaccagcggcgtgctgcccggcggcggcttcgtggccagcgccgccgccgtggccggccccgagatgcagaccggcagaaacaacttcgtgatcagaagaaaccccgccgacccccagagaatccccagcaaccccagccacagaatccagtgcgccgccggctacgagcagagcgagcacaacgtgtgccaggacatcgacgagtgcaccgccggcacccacaactgcagagccgaccaggtgtgcatcaacctgagaggcagcttcgcctgccagtgcccccccggctaccagaagagaggcgagcagtgcgtggacatcgacgagtgcaccatccccccctactgccaccagagatgcgtgaacacccccggcagcttctactgccagtgcagccccggcttccagctggccgccaacaactacacctgcgtggacatcaacgagtgcgacgccagcaaccagtgcgcccagcagtgctacaacatcctgggcagcttcatctgccagtgcaaccagggctacgagctgagcagcgacagactgaactgcgaggacatcgacgagtgcagaaccagcagctacctgtgccagtaccagtgcgtgaacgagcccggcaagttcagctgcatgtgcccccagggctaccaggtggtgagaagcagaacctgccaggacatcaacgagtgcgagaccaccaacgagtgcagagaggacgagatgtgctggaactaccacggcggcttcagatgctaccccagaaacccctgccaggacccctacatcctgacccccgagaacagatgcgtgtgccccgtgagcaacgccatgtgcagagagctgccccagagcatcgtgtacaagtacatgagcatcagaagcgacagaagcgtgcccagcgacatcttccagatccaggccaccaccatctacgccaacaccatcaacaccttcagaatcaagagcggcaacgagaacggcgagttctacctgagacagaccagccccgtgagcgccatgctggtgctggtgaagagcctgagcggccccagagagcacatcgtggacctggagatgctgaccgtgagcagcatcggcaccttcagaaccagcagcgtgctgagactgaccatcatcgtgggccccttcagcttctag

SEQ ID NO: 31706 - DNA, 1050 bp, Artificial Sequence
  derived and/or modified sequence
atggaggacaccagcgccttcagaaagcagcccagactgctgagcatcatgaacagcctgagcagcgagcacaacgtgtgccaggacatcgacgagtgcaccgccggcacccacaactgcagagccgaccaggtgtgcatcaacctgagaggcagcttcgcctgccagtgcccccccggctaccagaagagaggcgagcagtgcgtggacatcgacgagtgcaccatccccccctactgccaccagagatgcgtgaacacccccggcagcttctactgccagtgcagccccggcttccagctggccgccaacaactacacctgcgtggacatcaacgagtgcgacgccagcaaccagtgcgcccagcagtgctacaacatcctgggcagcttcatctgccagtgcaaccagggctacgagctgagcagcgacagactgaactgcgaggacatcgacgagtgcagaaccagcagctacctgtgccagtaccagtgcgtgaacgagcccggcaagttcagctgcatgtgcccccagggctaccaggtggtgagaagcagaacctgccaggacatcaacgagtgcgagaccaccaacgagtgcagagaggacgagatgtgctggaactaccacggcggcttcagatgctaccccagaaacccctgccaggacccctacatcctgacccccgagaacagatgcgtgtgccccgtgagcaacgccatgtgcagagagctgccccagagcatcgtgtacaagtacatgagcatcagaagcgacagaagcgtgcccagcgacatcttccagatccaggccaccaccatctacgccaacaccatcaacaccttcagaatcaagagcggcaacgagaacggcgagttctacctgagacagaccagccccgtgagcgccatgctggtgctggtgaagagcctgagcggccccagagagcacatcgtggacctggagatgctgaccgtgagcagcatcggcaccttcagaaccagcagcgtgctgagactgaccatcatcgtgggccccttcagcttctag

SEQ ID NO: 31707 - DNA, 159 bp, Artificial Sequence
  derived and/or modified sequence
atgctgaaggccctgttcctgaccatgctgaccctggccctggtgaagagccaggacaccgaggagaccatcacctacacccagtgcaccgacggctacgagtgggaccccgtgagacagcagtgcaaggacatcgacgagtgcgacatcgtgccctag

SEQ ID NO: 31708 - DNA, 264 bp, Artificial Sequence
  derived and/or modified sequence
atgctgaaggccctgttcctgaccatgctgaccctggccctggtgaagagccaggacaccgaggagaccatcacctacacccagtgcaccgacggctacgagtgggaccccgtgagacagcagtgcaaggacatcgacgagtgcgacatcgtgcccgacgcctgcaagggcggcatgaagtgcgtgaaccactacggcggctacctgtgcctgcccaagaccgcccagatcatcgtgaacaacgagcagccccagcaggagtag

SEQ ID NO: 31709 - DNA, 519 bp, Artificial Sequence
  derived and/or modified sequence
atgctgaaggccctgttcctgaccatgctgaccctggccctggtgaagagccaggacaccgaggagaccatcacctacacccagtgcaccgacggctacgagtgggaccccgtgagacagcagtgcaaggacatcgacgagtgcgacatcgtgcccgacgcctgcaagggcggcatgaagtgcgtgaaccactacggcggctacctgtgcctgcccaagaccgcccagatcatcgtgaacaacgagcagccccagcaggagacccagcccgccgagggcaccagcggcgccaccaccggcgtggtggccgccagcagcatggccaccagcggcgtgctgcccggcggcggcttcgtggccagcgccgccgccgtggccggccccgagatgcagaccggcagaaacaacttcgtgatcagaagaaaccccgccgacccccagagaatccccagcaaccccagccacagaatccagtgcgccgccggctacgagcagagcgagcacaacgtgtgccagtag

SEQ ID NO: 31710 - DNA, 360 bp, Artificial Sequence
  derived and/or modified sequence
atgctgaaggccctgttcctgaccatgctgaccctggccctggtgaagagccaggacaccgaggagaccatcacctacacccagtgcaccgacggctacgagtgggaccccgtgagacagcagtgcaaggacatcgacgagtgcgacatcgtgcccgacgcctgcaagggcggcatgaagtgcgtgaaccactacggcggctacctgtgcctgcccaagaccgcccagatcatcgtgaacaacgagcagccccagcaggagacccagcccgccgagggcaccagcggcgccaccaccggcgtggtggccgccagcagcatggccaccagcggcgtgctgcccggcggcggcttcgtgtag

SEQ ID NO: 31711 - DNA, 321 bp, Artificial Sequence
  derived and/or modified sequence
atgctgaaggccctgttcctgaccatgctgaccctggccctggtgaagagccaggacaccgaggagaccatcacctacacccagtgcaccgacggctacgagtgggaccccgtgagacagcagtgcaaggacatcgacgagtgcgacatcgtgcccgacgcctgcaagggcggcatgaagtgcgtgaaccactacggcggctacctgtgcctgcccaagaccgcccagatcatcgtgaacaacgagcagccccagcaggagacccagcccgccgagggcaccagcggcgccaccaccggcgtggtggccgccagcagctag

SEQ ID NO: 31712 - DNA, 189 bp, Artificial Sequence
  derived and/or modified sequence
atgctgaaggccctgttcctgaccatgctgaccctggccctggtgaagagccaggacaccgaggagaccatcacctacacccagtgcaccgacggctacgagtgggaccccgtgagacagcagtgcaaggacatcgacgagtgcgacatcgtgcccgacgcctgcaagggcggcatgaagtgcgtgtag

SEQ ID NO: 31713 - DNA, 1820 bp, Artificial Sequence
  derived and/or modified sequence
agatcagacccacggggctgccctcccctgcgcactcccctcgctgcccgggcccggagcgcagcgcggccgcacaggtatttttgctgtgctgtgcaaggaactctgctagctcaagattcacaatgttgaaagcccttttcctaactatgctgactctggcgctggtcaagtcacaggacaccgaagaaaccatcacgtacacgcaatgcactgacggatatgagtgggatcctgtgagacagcaatgcaaagatattgatgaatgtgacattgtcccagacgcttgtaaaggtggaatgaagtgtgtcaaccactatggaggatacctctgccttccgaaaacagcccagattattgtcaataatgaacagcctcagcaggaaacacaaccagcagaaggaacctcaggggcaaccaccggggttgtagctgccagcagcatggcaaccagtggagtgttgcccgggggtggttttgtggccagtgctgctgcagtcgcaggccctgaaatgcagactggccgaaataactttgtcatccggcggaacccagctgaccctcagcgcattccctccaacccttcccaccgtatccagtgtgcagcaggctacgagcaaagtgaacacaacgtgtgccaagacatagacgagtgcactgcagggacgcacaactgtagagcagaccaagtgtgcatcaatttacggggatcctttgcatgtcagtgccctcctggatatcagaagcgaggggagcagtgcgtagacatagatgaatgtaccatccctccatattgccaccaaagatgcgtgaatacaccaggctcattttattgccagtgcagtcctgggtttcaattggcagcaaacaactatacctgcgtagatataaatgaatgtgatgccagcaatcaatgtgctcagcagtgctacaacattcttggttcattcatctgtcagtgcaatcaaggatatgagctaagcagtgacaggctcaactgtgaagacattgatgaatgcagaacctcaagctacctgtgtcaatatcaatgtgtcaatgaacctgggaaattctcatgtatgtgcccccagggataccaagtggtgagaagtagaacatgtcaagatataaatgagtgtgagaccacaaatgaatgccgggaggatgaaatgtgttggaattatcatggcggcttccgttgttatccacgaaatccttgtcaagatccctacattctaacaccagagaaccgatgtgtttgcccagtctcaaatgccatgtgccgagaactgccccagtcaatagtctacaaatacatgagcatccgatctgataggtctgtgccatcagacatcttccagatacaggccacaactatttatgccaacaccatcaatacttttcggattaaatctggaaatgaaaatggagagttctacctacgacaaacaagtcctgtaagtgcaatgcttgtgctcgtgaagtcattatcaggaccaagagaacatatcgtggacctggagatgctgacagtcagcagtatagggaccttccgcacaagctctgtgttaagattgacaataatagtggggccattttcattttagtcttttctaagagtcaaccacaggcatttaagtcagccaaagaatattgttaccttaaagcactattttatttatagatatatctagtgcatctacatctctatactgtacactcacccataattcaaacaattacaccatggtataaagtgggcatttaatatgtaaagattcaaagtttgtctttattactatatgtaaattagacattaa

SEQ ID NO: 31714 - DNA, 2917 bp, Artificial Sequence
  derived and/or modified sequence
cgaaggtagcgtgtcggggacccagactgataagacaaaagagaatcagtcgctttgggctgcccctccacacaacctgggacttttaaacaaagctgtgcgcagagaaaggcgtggaaatgccactttgagagtttgtgctgggggatgtgagaagctctgagacatgtgagaaggtctagtattctactagaactggaagattgctctccgagttttgttttgttattttgtttaaaaaataaaaagcttgaggccaaggcaattcatattggctcacaggtatttttgctgtgctgtgcaaggaactctgctagctcaagattcacaatgttgaaagcccttttcctaactatgctgactctggcgctggtcaagtcacaggacaccgaagaaaccatcacgtacacgcaatgcactgacggatatgagtgggatcctgtgagacagcaatgcaaagatattgatgaatgtgacattgtcccagacgcttgtaaaggtggaatgaagtgtgtcaaccactatggaggatacctctgccttccgaaaacagcccagattattgtcaataatgaacagcctcagcaggaaacacaaccagcagaaggaacctcaggggcaaccaccggggttgtagctgccagcagcatggcaaccagtggagtgttgcccgggggtggttttgtggccagtgctgctgcagtcgcaggccctgaaatgcagactggccgaaataactttgtcatccggcggaacccagctgaccctcagcgcattccctccaacccttcccaccgtatccagtgtgcagcaggctacgagcaaagtgaacacaacgtgtgccaagacatagacgagtgcactgcagggacgcacaactgtagagcagaccaagtgtgcatcaatttacggggatcctttgcatgtcagtgccctcctggatatcagaagcgaggggagcagtgcgtagacatagatgaatgtaccatccctccatattgccaccaaagatgcgtgaatacaccaggctcattttattgccagtgcagtcctgggtttcaattggcagcaaacaactatacctgcgtagatataaatgaatgtgatgccagcaatcaatgtgctcagcagtgctacaacattcttggttcattcatctgtcagtgcaatcaaggatatgagctaagcagtgacaggctcaactgtgaagacattgatgaatgcagaacctcaagctacctgtgtcaatatcaatgtgtcaatgaacctgggaaattctcatgtatgtgcccccagggataccaagtggtgagaagtagaacatgtcaagatataaatgagtgtgagaccacaaatgaatgccgggaggatgaaatgtgttggaattatcatggcggcttccgttgttatccacgaaatccttgtcaagatccctacattctaacaccagagaaccgatgtgtttgcccagtctcaaatgccatgtgccgagaactgccccagtcaatagtctacaaatacatgagcatccgatctgataggtctgtgccatcagacatcttccagatacaggccacaactatttatgccaacaccatcaatacttttcggattaaatctggaaatgaaaatggagagttctacctacgacaaacaagtcctgtaagtgcaatgcttgtgctcgtgaagtcattatcaggaccaagagaacatatcgtggacctggagatgctgacagtcagcagtatagggaccttccgcacaagctctgtgttaagattgacaataatagtggggccattttcattttagtcttttctaagagtcaaccacaggcatttaagtcagccaaagaatattgttaccttaaagcactattttatttatagatatatctagtgcatctacatctctatactgtacactcacccataattcaaacaattacaccatggtataaagtgggcatttaatatgtaaagattcaaagtttgtctttattactatatgtaaattagacattaatccactaaactggtcttcttcaagagagctaagtatacactatctggtgaaacttggattctttcctataaaagtgggaccaagcaatgatgatcttctgtggtgcttaaggaaacttactagagctccactaacagtctcataaggaggcagccatcataaccattgaatagcatgcaagggtaagaatgagtttttaactgctttgtaagaaaatggaaaaggtcaataaagatatatttctttagaaaatggggatctgccatatttgtgttggtttttattttcatatccagcctaaaggtggttgtttattatatagtaataaatcattgctgtacaatatgctggtttctgtagggtatttttaattttgtcagaaattttagattgtgaatattttgtaaaaaacagtaagcaaaattttccagaattcccaaaatgaaccagatatcccctagaaaattatactattgagaaatctatggggaggatatgagaaaataaattccttctaaaccacattggaactgacctgaagaagcaaactcggaaaatataataacatccctgaattcaggacttccacaagatgcagaacaaaatggataaaaggtatttcactggagaagttttaatttctaagtaaaatttaaatcctaacacttcactaatttataactaaaatttctcatcttcgtacttgatgctcacagaggaagaaaatgatgatggtttttattcctggcatccagagtgacagtgaacttaagcaaattaccctcctacccaattctatggaatattttatacgtctccttgtttaaaatgtcactgctttactttgatgtatcatatttttaaataaaaataaatattcctttagaagatc

SEQ ID NO: 31715 - DNA, 3024 bp, Artificial Sequence
  derived and/or modified sequence
agatgctgtgttcccctcctcagagaagaagaaaacgcactagagagtgggagcatccccaaggctgaagcgcatccaggacatcacatgtcaacgtgtcctctctggcgtggggtccccgcgagtctgggaaacgaggagctggcaagggagggcaagcgggggcggcaaagagggcccctggagcagggggcgcggacctcgctgcgctgcgcgctctaccgccgggctcgcaacgctgggctcagcgctcgcgcctccctcagctctctcctccgccccccttcgccctccccctttccctccctttctcctcctcctcctgccgccgcggccgctgccggacttcgccagatcagacccacggggctgccctcccctgcgcactcccctcgctgcccgggcccggagcgcagcgcggccgcacagattcacaatgttgaaagcccttttcctaactatgctgactctggcgctggtcaagtcacaggacaccgaagaaaccatcacgtacacgcaatgcactgacggatatgagtgggatcctgtgagacagcaatgcaaagatattgatgaatgtgacattgtcccagacgcttgtaaaggtggaatgaagtgtgtcaaccactatggaggatacctctgccttccgaaaacagcccagattattgtcaataatgaacagcctcagcaggaaacacaaccagcagaaggaacctcaggggcaaccaccggggttgtagctgccagcagcatggcaaccagtggagtgttgcccgggggtggttttgtggccagtgctgctgcagtcgcaggccctgaaatgcagactggccgaaataactttgtcatccggcggaacccagctgaccctcagcgcattccctccaacccttcccaccgtatccagtgtgcagcaggctacgagcaaagtgaacacaacgtgtgccaagacatagacgagtgcactgcagggacgcacaactgtagagcagaccaagtgtgcatcaatttacggggatcctttgcatgtcagtgccctcctggatatcagaagcgaggggagcagtgcgtagacatagatgaatgtaccatccctccatattgccaccaaagatgcgtgaatacaccaggctcattttattgccagtgcagtcctgggtttcaattggcagcaaacaactatacctgcgtagatataaatgaatgtgatgccagcaatcaatgtgctcagcagtgctacaacattcttggttcattcatctgtcagtgcaatcaaggatatgagctaagcagtgacaggctcaactgtgaagacattgatgaatgcagaacctcaagctacctgtgtcaatatcaatgtgtcaatgaacctgggaaattctcatgtatgtgcccccagggataccaagtggtgagaagtagaacatgtcaagatataaatgagtgtgagaccacaaatgaatgccgggaggatgaaatgtgttggaattatcatggcggcttccgttgttatccacgaaatccttgtcaagatccctacattctaacaccagagaaccgatgtgtttgcccagtctcaaatgccatgtgccgagaactgccccagtcaatagtctacaaatacatgagcatccgatctgataggtctgtgccatcagacatcttccagatacaggccacaactatttatgccaacaccatcaatacttttcggattaaatctggaaatgaaaatggagagttctacctacgacaaacaagtcctgtaagtgcaatgcttgtgctcgtgaagtcattatcaggaccaagagaacatatcgtggacctggagatgctgacagtcagcagtatagggaccttccgcacaagctctgtgttaagattgacaataatagtggggccattttcattttagtcttttctaagagtcaaccacaggcatttaagtcagccaaagaatattgttaccttaaagcactattttatttatagatatatctagtgcatctacatctctatactgtacactcacccataattcaaacaattacaccatggtataaagtgggcatttaatatgtaaagattcaaagtttgtctttattactatatgtaaattagacattaatccactaaactggtcttcttcaagagagctaagtatacactatctggtgaaacttggattctttcctataaaagtgggaccaagcaatgatgatcttctgtggtgcttaaggaaacttactagagctccactaacagtctcataaggaggcagccatcataaccattgaatagcatgcaagggtaagaatgagtttttaactgctttgtaagaaaatggaaaaggtcaataaagatatatttctttagaaaatggggatctgccatatttgtgttggtttttattttcatatccagcctaaaggtggttgtttattatatagtaataaatcattgctgtacaatatgctggtttctgtagggtatttttaattttgtcagaaattttagattgtgaatattttgtaaaaaacagtaagcaaaattttccagaattcccaaaatgaaccagatatcccctagaaaattatactattgagaaatctatggggaggatatgagaaaataaattccttctaaaccacattggaactgacctgaagaagcaaactcggaaaatataataacatccctgaattcaggacttccacaagatgcagaacaaaatggataaaaggtatttcactggagaagttttaatttctaagtaaaatttaaatcctaacacttcactaatttataactaaaatttctcatcttcgtacttgatgctcacagaggaagaaaatgatgatggtttttattcctggcatccagagtgacagtgaacttaagcaaattaccctcctacccaattctatggaatattttatacgtctccttgtttaaaatgtcactgctttactttgatgtatcatatttttaaataaaaataaatattcctttagaagatca

SEQ ID NO: 31716 - DNA, 1837 bp, Artificial Sequence
  derived and/or modified sequence
agatcagacccacggggctgccctcccctgcgcactcccctcgctgcccgggcccggagcgcagcgcggccgcacaggtatttttgctgtgctgtgcaaggaactctgctagctcaagattcacaatgttgaaagcccttttcctaactatgctgactctggcgctggtcaagtcacaggacaccgaagaaaccatcacgtacacgcaatgcactgacggatatgagtgggatcctgtgagacagcaatgcaaagatattgatgaatgtgacattgtcccagacgcttgtaaaggtggaatgaagtgtgtcaaccactatggaggatacctctgccttccgaaaacagcccagattattgtcaataatgaacagcctcagcagtgaacacaacgtgtgccaagacatagacgagtgcactgcagggacgcacaactgtagagcagaccaagtgtgcatcaatttacggggatcctttgcatgtcagtgccctcctggatatcagaagcgaggggagcagtgcgtagacatagatgaatgtaccatccctccatattgccaccaaagatgcgtgaatacaccaggctcattttattgccagtgcagtcctgggtttcaattggcagcaaacaactatacctgcgtagatataaatgaatgtgatgccagcaatcaatgtgctcagcagtgctacaacattcttggttcattcatctgtcagtgcaatcaaggatatgagctaagcagtgacaggctcaactgtgaagacattgatgaatgcagaacctcaagctacctgtgtcaatatcaatgtgtcaatgaacctgggaaattctcatgtatgtgcccccagggataccaagtggtgagaagtagaacatgtcaagatataaatgagtgtgagaccacaaatgaatgccgggaggatgaaatgtgttggaattatcatggcggcttccgttgttatccacgaaatccttgtcaagatccctacattctaacaccagagaaccgatgtgtttgcccagtctcaaatgccatgtgccgagaactgccccagtcaatagtctacaaatacatgagcatccgatctgataggtctgtgccatcagacatcttccagatacaggccacaactatttatgccaacaccatcaatacttttcggattaaatctggaaatgaaaatggagagttctacctacgacaaacaagtcctgtaagtgcaatgcttgtgctcgtgaagtcattatcaggaccaagagaacatatcgtggacctggagatgctgacagtcagcagtatagggaccttccgcacaagctctgtgttaagattgacaataatagtggggccattttcattttagtcttttctaagagtcaaccacaggcatttaagtcagccaaagaatattgttaccttaaagcactattttatttatagatatatctagtgcatctacatctctatactgtacactcacccataattcaaacaattacaccatggtataaagtgggcatttaatatgtaaagattcaaagtttgtctttattactatatgtaaattagacattaatccactaaactggtcttcttcaagagagctaagtatacactatctggtgaaacttggattctttcctataaaagtgggaccaagcaatgatgatcttctgtggtgcttaaggaaacttactagagctccactaacagtctcataaggaggcagccatcataaccattgaatagcatgcaagggtaagaatgagtttttaactgctttgtaagaaaatggaaaaggtcaataaagatatatttctttagaaaatggg

SEQ ID NO: 31717 - protein, 801 aa, Artificial Sequence
  derived and/or modified sequence
MKEKAMIKTAKMQGNVMELVGSNPPQRNWKGIAIALLVILVICSLIVTSVILLTPAEDNSLSQKKKVTVEDLFSEDFKIHDPEAKWISDTEFIYREQKGTVRLWNVETNTSTVLIEGKKIESLRAIRYEISPDREYALFSYNVEPIYQHSYTGYYVLSKIPHGDPQSLDPPEVSNAKLQYAGWGPKGQQLIFIFENNIYYCAHVGKQAIRVVSTGKEGVIYNGLSDWLYEEEILKTHIAHWWSPDGTRLAYAAINDSRVPIMELPTYTGSIYPTVKPYHYPKAGSENPSISLHVIGLNGPTHDLEMMPPDDPRMREYYITMVKWATSTKVAVTWLNRAQNVSILTLCDATTGVCTKKHEDESEAWLHRQNEEPVFSKDGRKFFFIRAIPQGGRGKFYHITVSSSQPNSSNDNIQSITSGDWDVTKILAYDEKGNKIYFLSTEDLPRRRQLYSANTVGNFNRQCLSCDLVENCTYFSASFSHSMDFFLLKCEGPGVPMVTVHNTTDKKKMFDLETNEHVKKAINDRQMPKVEYRDIEIDDYNLPMQILKPATFTDTTHYPLLLVVDGTPGSQSVAEKFEVSWETVMVSSHGAVVVKCDGRGSGFQGTKLLHEVRRRLGLLEEKDQMEAVRTMLKEQYIDRTRVAVFGKDYGGYLSTYILPAKGENQGQTFTCGSALSPITDFKLYASAFSERYLGLHGLDNRAYEMTKVAHRVSALEEQQFLIIHPTADEKIHFQHTAELITQLIRGKANYSLQIYPDESHYFTSSSLKQHLYRSIINFFVECFRIQDKLLTVTAKEDEEED

SEQ ID NO: 31718 - DNA, 2406 bp, Artificial Sequence
  derived and/or modified sequence
atgaaagaaaaggccatgattaagacggcaaagatgcaaggcaacgttatggaactcgttggttctaacccgccccaaaggaactggaagggcatcgcaattgccctgctcgttattctcgttatatgttctctgatcgttacctctgtgatcctcctgactcctgccgaggataacagcctgtctcagaagaaaaaagttacagtcgaggatcttttctctgaagacttcaaaattcatgacccagaagccaagtggatcagcgacaccgaattcatctacagggaacagaaagggactgtgcgcctgtggaatgtggaaactaatacctctaccgtcctgatcgaaggcaaaaaaatagagtctctacgggcaataagatatgagataagtccggatagggaatacgccttgtttagttacaatgtggagcctatttaccagcacagctacaccggttattatgtcctgagcaaaataccacacggcgaccctcagtcgctcgaccctcccgaggtgagtaatgcaaagctccaatatgctggctgggggccgaagggtcagcagcttatcttcatctttgaaaataacatctactattgcgcccacgtgggcaaacaagccatccgtgtcgtgagtacgggaaaggagggggttatctacaacggcttgagcgattggctctatgaagaggagatcctcaagacccacatagcccactggtggtccccagatggaacacgtttagcctatgccgctattaatgacagtcgtgtcccaatcatggagctcccaacatacaccgggtccatctatcctactgtgaaaccttaccactacccaaaagcaggcagtgagaatccttctatcagtctccatgtgattggcctcaacgggcccacacacgacctagaaatgatgcccccggacgatcctaggatgagagaatattatatcaccatggtcaagtgggccactagtacgaaggtggcagttacgtggctgaatagagcccagaatgtcagcattctgaccctgtgcgacgcaacgaccggggtgtgcaccaagaaacacgaggatgaaagtgaggcctggcttcaccgccagaatgaggaacctgtgttttcaaaagacggccgtaaatttttttttatccgggctatcccacagggcggaaggggtaaattctaccacattactgtgagctcttctcaaccaaattcgtccaatgataatattcagtctataactagcggggactgggatgtcacaaaaatcctggcctacgacgagaaagggaataaaatctattttctctcgacagaagatcttcccagaaggcggcaactgtacagcgcgaatacagtcggcaactttaacagacaatgcctatcttgcgacctggtggagaactgtacctacttctccgcttccttttcacattcgatggatttcttcctcctgaaatgcgaaggcccaggagtgcccatggtcactgtacacaatacaaccgataagaaaaagatgtttgatttggaaactaatgaacacgtcaaaaaagctatcaacgatcgacagatgccaaaagtcgagtacagggacatagaaatagacgattacaacttgccaatgcagatccttaagcccgctacttttacagacactactcactaccctttgttgttagtagtagatggaacccctggcagccagagcgttgcagagaagttcgaagttagctgggagaccgtcatggttagctcccacggtgccgtggtggtcaagtgcgatggaaggggcagcggattccagggaaccaagcttttgcatgaagtccgtcgccgcttggggctcttagaggaaaaagaccagatggaagcagtgcggaccatgctgaaggaacagtacatagacagaacaagggtcgccgtgtttgggaaagactatggaggatacctgtccacctacatcctgcctgctaagggagaaaatcaaggccagaccttcacatgtggatccgctttatccccgatcacagattttaagctgtacgcatctgcattcagtgagaggtatcttggcctgcacggtcttgacaatcgcgcctatgagatgacaaaggtggctcacagagtaagcgccctggaggagcagcagttcctcatcatccatccgactgcggatgagaagattcattttcagcatacggccgagcttattacacagctcatccgcggtaaagctaattactcgcttcaaatttatcccgatgagagtcattacttcaccagtagtagcttaaagcagcacttgtacagatctatcattaacttctttgtggagtgctttagaattcaagataaattgctgaccgtaactgccaaggaggacgaagaagaagactag

SEQ ID NO: 31719 - DNA, 2406 bp, Artificial Sequence
  derived and/or modified sequence
atgaaggagaaggccatgatcaagacagccaagatgcagggcaatgtgatggagctggtgggcagcaaccccccccagaggaactggaagggcatcgccatcgccctgctggtgatcctggtgatctgcagcctcatcgtgaccagcgtcatcctgctgaccccagctgaggacaacagcctgagccagaagaagaaggtgacagtggaggacctcttcagcgaggacttcaagatccatgaccctgaggccaagtggatcagtgacacagagttcatctaccgggagcagaagggcaccgtgcggctgtggaatgtggagaccaacaccagcacagtgctgattgagggcaagaagattgagagcctgcgggccatccgctatgagatcagcccagaccgggagtatgccctcttctcctacaacgtggagcccatctaccagcacagctacacaggctactacgtgctgagcaagatcccccacggggacccccagagcctggaccccccagaggtgtccaatgccaagctgcagtatgccggctggggccccaagggccagcagctgatcttcatctttgagaacaacatctactactgtgcccacgtgggcaagcaggccatccgggtggtgtccacaggcaaggagggcgtcatctacaacggcctgagtgactggctgtatgaggaggagatcctgaagacccacatcgcccactggtggagcccagatggcacccggctggcctatgctgccatcaatgacagccgggtgcccatcatggagctgcccacctacacaggcagcatctaccccaccgtgaagccctaccactaccccaaggccggcagcgagaaccccagcatcagcctgcacgtgattggcctgaatggccccacccatgacctggagatgatgcccccagatgaccccaggatgagggagtactacatcaccatggtgaagtgggccaccagcaccaaggtggccgtgacctggctgaacagagcccagaatgtgtccatcctgaccctgtgtgatgccaccactggagtgtgcaccaagaagcatgaagatgagagcgaggcctggctgcaccggcagaatgaggagcctgtgttcagcaaggatggcaggaagttcttcttcatccgggccatcccccagggcggccggggcaagttctaccacatcaccgtgagcagcagccagcccaacagcagcaatgacaacatccagagcatcaccagcggggactgggatgtgaccaagatcctggcctatgatgagaagggcaacaagatctacttcctgagcacagaggacctgccccggcggcggcagctgtacagcgccaacacagtgggcaacttcaaccggcagtgcctgagctgtgacctggtggagaactgcacctacttcagcgccagcttcagccacagcatggacttcttcctgctgaagtgtgagggccctggggtgcccatggtgacagtgcacaacaccacagacaagaagaagatgtttgacctggagaccaatgaacatgtgaagaaggccatcaatgaccggcagatgcccaaggtggagtacagagacattgaaattgatgactacaacctgcccatgcagatcctgaagccagccaccttcacagacaccacccactaccccctgctgctggtggtggatggcaccccaggcagccagagcgtggccgagaagtttgaggtgtcctgggagaccgtgatggtgagcagccatggagctgtggtggtgaagtgtgatggccggggcagcggcttccagggcaccaagctgctgcacgaggtgagaagaaggctgggcctgctggaggagaaggaccagatggaggccgtgaggaccatgctgaaggagcagtacatcgacaggaccagggtggccgtgtttgggaaggactatggaggctacctgagcacctacatcctgcctgccaagggggagaaccagggccagaccttcacctgtggcagcgccctgagccccatcacagacttcaagctgtatgccagcgccttcagcgagcgctacctgggcctgcacggcctggacaacagagcctatgagatgaccaaggtggcccaccgggtgtctgccctggaggagcagcagttcctgatcatccaccccacagcagatgagaagatccacttccagcacacagctgagctgatcacccagctgatccggggcaaggccaactacagcctgcagatctacccagatgagagccactacttcaccagcagcagcctgaagcagcacctgtaccgcagcatcatcaacttctttgtggagtgcttccgcatccaggacaagctgctgactgtgacagccaaggaggatgaggaggaggactag

SEQ ID NO: 31720 - DNA, 2406 bp, Artificial Sequence
  derived and/or modified sequence
atgaaggagaaggccatgatcaagaccgccaagatgcagggcaacgtgatggagttagtcggcagtaatcccccacagaggaactggaaaggcattgcaatcgccctcctcgtcatcctggtcatctgttcattgattgtgacatccgtaattttactgaccccggctgaagacaacagcttgagtcagaagaagaaagttacggtcgaggatctgtttagcgaggacttcaagatccacgaccctgaagcaaagtggatctccgacacagagttcatctatagagagcagaagggtacggttaggttatggaacgtagaaacaaacacgagtacagtcctgatagagggtaagaagatcgagtccctccgggctattcgatatgagatatctcccgatcgggaatacgcactgttctcctacaacgtcgagcctatttaccagcacagttatacaggctattacgtgctgtcaaagattcctcacggggacccacagtctcttgacccgccagaggtgtccaacgctaagctccaatatgctggctggggccccaagggccagcagctgatcttcattttcgagaacaatatttactactgcgcacatgtcggtaaacaagccattcgagttgtgtccacgggtaaggagggagtgatctacaacggactgagcgactggctctacgaagaagagatacttaaaacccacatcgcacattggtggtctcctgacggaacacgcctggcctatgcagctataaacgattcaagagtgcccataatggaactgccaacatacactggcagcatctacccaactgtaaagccttaccattaccccaaagccgggtctgagaaccccagtattagtttacacgtgattgggctgaacgggcccacacatgatctggagatgatgccaccagacgacccgcgcatgcgggagtactacatcacgatggtaaagtgggcgacatccacaaaagtcgccgtgacatggttaaacagggcacagaatgtgagcatcctgaccctctgtgacgccactactggcgtgtgcaccaagaagcatgaggacgagtctgaggcatggttgcatcgccaaaatgaagaaccagtgttctcaaaggacgggcgaaagtttttttttatccgggcaattcctcagggtggtcgtggaaaattctatcacatcaccgtgtcaagtagtcagcccaattcttctaatgacaatattcagtctatcaccagtggcgattgggacgtgaccaagatcctggcctacgacgagaaaggcaacaagatctacttccttagcacagaggacctgcctcgtagaagacaattgtatagtgcaaacaccgtcggaaacttcaacagacaatgtctttcttgcgacttggttgagaattgcacctactttagcgcctctttctctcactcaatggatttcttcttgctaaagtgcgaagggccgggtgtacctatggtcactgtccacaacactactgataagaagaagatgttcgatctcgaaacaaatgaacacgtcaagaaggcaatcaacgacagacagatgcccaaagttgagtacagagacatcgagatcgacgactacaacctcccgatgcagatccttaaaccagccacatttactgataccacacattatcccttgctcctggtagtggatggcacccccggaagccagagtgtcgccgaaaaatttgaggtttcatgggagacagtcatggtctcctctcatggggccgtcgtggtcaagtgtgatgggcggggcagcggcttccaagggaccaaactgttgcacgaggtcagaaggcgacttggcttactggaagagaaagatcagatggaagcggtgagaacaatgttaaaggaacagtatatcgaccgaacgagagttgcagtgtttgggaaggattatgggggttatttgtccacctacatccttccagccaagggagaaaaccaaggtcagacattcacctgcggatccgccctgagtccaatcaccgacttcaaactgtatgcgtcagcattttcagaacgctacttgggcttacacggcctggacaaccgggcttatgagatgacgaaagtggcccatcgggtctcggctctggaagaacagcagtttctgattatacatcctacagccgatgagaagatccacttccagcacacagctgagctgatcacacaacttattaggggcaaggcaaattactcgctgcagatataccctgacgagtcacactatttcacatcctcttctttgaaacaacatttatatcggtcaatcattaattttttcgtggaatgcttccggatccaggataaattactcacagtgaccgccaaggaggatgaggaggaggactag

SEQ ID NO: 31721 - DNA, 2406 bp, Artificial Sequence
  derived and/or modified sequence
atgaaggagaaggcaatgatcaagaccgctaaaatgcaggggaacgtgatggagctggtaggctccaaccctcctcaacgtaactggaagggtatcgctatagccttattagtcattctggttatttgtagcttaattgtcacttcagtcattcttctgacccccgctgaggataacagtctgagccagaaaaagaaggtgaccgtggaagatttattctcagaggactttaagatacacgaccctgaggccaagtggatatccgacaccgagttcatataccgagagcagaagggcacagtgcggctatggaacgtggaaacgaacacttctacagtgctcattgagggaaagaaaattgaatcgctccgggcaattcgctacgagatttctcccgatcgagagtatgccctcttctcttacaacgttgaaccaatctaccagcacagttacacaggctattacgtcttgagcaagataccccacggggacccacagtcactcgacccacctgaggtttctaatgccaagctgcagtatgcaggatggggccctaagggccagcagctgatattcatttttgagaataacatttactattgcgctcacgtcgggaaacaggccatcagagtggtcagcaccggtaaggagggcgtaatctataacggactgtctgactggctgtacgaagaggagatattgaagacccacattgctcactggtggagtccggatggaacacgtctagcctacgcagctatcaacgacagtagggtcccaattatggagctgcccacctatacaggctccatctacccgactgtaaagccataccactatcccaaggcaggctctgaaaatccctctatctcactccacgtgatcggcctcaacggcccaacgcatgatctggaaatgatgccccctgacgacccccgaatgagagagtattatataacaatggtaaaatgggccacctccacaaaagtagccgtgacctggcttaatcgtgcacagaacgtctcaatactgactctgtgtgacgctaccactggtgtctgtacaaagaagcacgaggacgaatctgaagcatggctgcataggcagaacgaggagccggtgttttcaaaagatggtaggaagttctttttcattcgcgctattccccagggagggaggggaaaattctatcacatcaccgtttcttccagtcagcctaactcaagcaacgacaacatacaatccatcacctccggagattgggatgtaaccaagattctcgcgtatgacgaaaagggtaacaagatctattttctttctaccgaagatctgccacgcaggcggcaactgtactccgctaacactgtaggtaattttaaccgccaatgcctgtcatgcgacctggttgaaaattgcacctattttagtgcttcttttagtcatagtatggatttctttctgcttaagtgtgaaggaccaggggtccccatggttacggtacataatactacggataagaaaaagatgttcgatctcgaaacgaacgagcacgtgaagaaggcaattaacgacagacagatgcctaaagtcgaatatagagatatcgagatagacgattacaatctgcctatgcaaattctgaagccagcaacatttactgataccacccattaccccctgcttctcgtggtagacggaactcccggttcacaatctgtagccgagaaatttgaagttagttgggaaaccgtaatggtgtcatcccatggagccgtcgtcgtcaagtgcgacggacggggtagtggattccaggggacaaagctgctgcatgaagtgcggagacggctaggcctcctggaagaaaaagatcaaatggaggccgtgcggacgatgctgaaagagcagtacatcgaccgcacccgtgtcgccgttttcggaaaagactatgggggttatctcagcacctatattctgcccgctaaaggggaaaaccaggggcagacatttacctgcggtagcgccctgtccccaattactgattttaagctgtacgccagcgcgttctctgagcgatatctgggtctccacgggctcgacaatagggcatacgagatgacgaaagtggcccatagagtgagcgctcttgaagagcagcagttcctcattatccaccccaccgcagacgaaaaaatccattttcagcacacggcagagcttatcactcaattgataagaggcaaggcaaactattcgctgcaaatctatccagatgagtcccactatttcaccagttcatcccttaagcagcacctgtaccgctccatcattaacttcttcgtcgagtgcttcagaattcaggacaagcttcttaccgtcacagcgaaagaggacgaagaggaggactag

SEQ ID NO: 31722 - DNA, 2406 bp, Artificial Sequence
  derived and/or modified sequence
atgaaggagaaggccatgatcaagaccgccaagatgcagggcaacgtgatggagctggtgggcagcaaccccccccagagaaactggaagggcatcgccatcgccctgctggtgatcctggtgatctgcagcctgatcgtgaccagcgtgatcctgctgacccccgccgaggacaacagcctgagccagaagaagaaggtgaccgtggaggacctgttcagcgaggacttcaagatccacgaccccgaggccaagtggatcagcgacaccgagttcatctacagagagcagaagggcaccgtgagactgtggaacgtggagaccaacaccagcaccgtgctgatcgagggcaagaagatcgagagcctgagagccatcagatacgagatcagccccgacagagagtacgccctgttcagctacaacgtggagcccatctaccagcacagctacaccggctactacgtgctgagcaagatcccccacggcgacccccagagcctggacccccccgaggtgagcaacgccaagctgcagtacgccggctggggccccaagggccagcagctgatcttcatcttcgagaacaacatctactactgcgcccacgtgggcaagcaggccatcagagtggtgagcaccggcaaggagggcgtgatctacaacggcctgagcgactggctgtacgaggaggagatcctgaagacccacatcgcccactggtggagccccgacggcaccagactggcctacgccgccatcaacgacagcagagtgcccatcatggagctgcccacctacaccggcagcatctaccccaccgtgaagccctaccactaccccaaggccggcagcgagaaccccagcatcagcctgcacgtgatcggcctgaacggccccacccacgacctggagatgatgccccccgacgaccccagaatgagagagtactacatcaccatggtgaagtgggccaccagcaccaaggtggccgtgacctggctgaacagagcccagaacgtgagcatcctgaccctgtgcgacgccaccaccggcgtgtgcaccaagaagcacgaggacgagagcgaggcctggctgcacagacagaacgaggagcccgtgttcagcaaggacggcagaaagttcttcttcatcagagccatcccccagggcggcagaggcaagttctaccacatcaccgtgagcagcagccagcccaacagcagcaacgacaacatccagagcatcaccagcggcgactgggacgtgaccaagatcctggcctacgacgagaagggcaacaagatctacttcctgagcaccgaggacctgcccagaagaagacagctgtacagcgccaacaccgtgggcaacttcaacagacagtgcctgagctgcgacctggtggagaactgcacctacttcagcgccagcttcagccacagcatggacttcttcctgctgaagtgcgagggccccggcgtgcccatggtgaccgtgcacaacaccaccgacaagaagaagatgttcgacctggagaccaacgagcacgtgaagaaggccatcaacgacagacagatgcccaaggtggagtacagagacatcgagatcgacgactacaacctgcccatgcagatcctgaagcccgccaccttcaccgacaccacccactaccccctgctgctggtggtggacggcacccccggcagccagagcgtggccgagaagttcgaggtgagctgggagaccgtgatggtgagcagccacggcgccgtggtggtgaagtgcgacggcagaggcagcggcttccagggcaccaagctgctgcacgaggtgagaagaagactgggcctgctggaggagaaggaccagatggaggccgtgagaaccatgctgaaggagcagtacatcgacagaaccagagtggccgtgttcggcaaggactacggcggctacctgagcacctacatcctgcccgccaagggcgagaaccagggccagaccttcacctgcggcagcgccctgagccccatcaccgacttcaagctgtacgccagcgccttcagcgagagatacctgggcctgcacggcctggacaacagagcctacgagatgaccaaggtggcccacagagtgagcgccctggaggagcagcagttcctgatcatccaccccaccgccgacgagaagatccacttccagcacaccgccgagctgatcacccagctgatcagaggcaaggccaactacagcctgcagatctaccccgacgagagccactacttcaccagcagcagcctgaagcagcacctgtacagaagcatcatcaacttcttcgtggagtgcttcagaatccaggacaagctgctgaccgtgaccgccaaggaggacgaggaggaggactag

SEQ ID NO: 31723 - DNA, 4798 bp, Artificial Sequence
  derived and/or modified sequence
agttcagacagaaaacctggcgcgcgcgcgcgcacacacacacgcctcccctggcgtcgccgcccggccgggtccctgcccttagggaccagagcggcgaccgctgcaccccgcaccgcctgctggaggagcccccggagccggggccgagccgccggcgtccccgagtgcgccccctgtgcgtgccgccgcgctgttgctcgcagtgtgctggcgccgagctcggtggacacgcgcgcagtcagagctgcctctcgccctcgctagctgggctcgcagcctcttcctccctccctggctcctggctttttgtttaaagcaacacccaccctccatccaggctttttttctttctttctttattggtagcggccaaaaagagttgattgctattgggatccgctgagtaaagacacgggcaggggtgcgcggaggtgagaaaactgaagacctggaagatttttttttccttcaaaaacccgtttccatccagtcttcagccagtccagtctactttaatcctcaccaggacaatggattaagtttctcttccctggaccagaagtcgggttcggacttggggcaaaatgaaggaaaaggccatgatcaagaccgctaagatgcaggggaacgtgatggagctggtggggagtaaccctccgcagaggaattggaaaggaatagcaattgcactgcttgtcattctggtcatctgctccttgatcgtcacctcggtcatacttctgacaccagcggaagataatagtctgtctcaaaagaagaaggtcactgtagaagatctcttcagtgaagacttcaaaattcatgaccccgaggctaagtggataagtgatacagaattcatctacagagaacagaaaggaacagtgagactgtggaatgttgaaacaaatacttctactgtcttaatagaaggcaaaaaaattgaatcattaagagccatcagatatgaaatatctccagatagagagtatgcacttttttcatacaatgtggaacccatatatcaacactcgtatactggatattacgtcctgagcaaaattcctcatggggatcctcaaagtctggacccaccagaagtcagcaatgcaaaacttcagtatgcaggatggggccctaaaggccaacagctgatatttatttttgaaaacaatatctactactgtgcacatgtcgggaaacaggccatccgtgtggtctccactggcaaggaaggtgtgatttacaatggcctcagtgactggctgtatgaagaggagattttgaagacacacatcgcacactggtggtctccggatggcacgagactcgcctacgccgccatcaatgattcccgtgtccccatcatggagctcccaacttacaccggctccatctaccccaccgtgaagccctaccactatcccaaggctggaagtgagaaccccagcatttccctacacgttattggcttaaatggacccacccatgatctggagatgatgccgcctgatgatccacggatgagggagtactacatcaccatggtgaagtgggccaccagcaccaaggtcgccgtgacctggctgaaccgggcgcagaacgtgtccatcctcaccctctgcgacgccaccacgggggtctgcacgaagaaacacgaggatgaaagtgaggcctggctccacagacagaatgaagaacctgtgttctccaaggatggccgaaagtttttcttcatcagagccatcccccagggaggacgagggaaattctatcacatcacggtgtcctcgtcccagcccaacagcagcaacgacaacatccagtccatcacctccggggactgggacgtgaccaagatcctagcctacgatgagaaggggaataagatctacttcctgagcacggaggacctgcctcggagacgacaactctacagtgccaacacggtgggcaacttcaacaggcagtgcctctcctgtgacctggttgagaactgcacctacttcagcgcttccttcagccatagcatggacttcttcctgctcaagtgcgaaggtcctggtgttcctatggtgacggtgcacaacacaacagataagaaaaaaatgtttgacctagaaacaaatgaacatgtcaagaaggccataaatgaccgacagatgcctaaagtggaatacagggacattgagattgatgattacaacctgcccatgcagatactgaagccagcaaccttcaccgacaccacccactaccctctgctcctggtggtggatggcaccccaggcagccagagtgtggctgagaagttcgaggtgagctgggagacggtgatggtgagcagccacggcgcggtggtggtaaagtgtgacggccgtggcagcggcttccaagggaccaagctcctgcacgaagtgaggcggcggctgggcttgctggaggagaaggaccagatggaggccgtgcggacgatgctgaaggagcagtacattgacaggacgcgcgtggccgtgtttgggaaggattacggtggctacctgagcacctacatcctcccagcaaagggagaaaatcaaggccagacattcacctgcggctctgctctctctccaataacagacttcaaactctatgcctctgcgttttccgagaggtacttgggcctccatggacttgacaacagagcatacgagatgaccaaggtagcccatcgagtctccgcgctggaagaacagcagttcctgatcattcatcccactgccgatgaaaaaattcatttccagcacacagcagaactcattacacaactaattaggggaaaggctaattacagcttacagatttacccggacgaaagccattactttaccagctccagcctcaaacagcatctgtaccggtccatcatcaacttcttcgtggaatgcttcaggatccaggacaaactgctgacagtcacagcgaaagaggacgaggaggaggactaagctcaggtcgctctaagcacaaacgtggctctttctacaaccagatgcaaccgagggatttccctgccctccctcttccctcggaggggcggggcggggcggggccgggtgttccatagcatgtgtgtctcggatgcggaaggcagttttgcttgggaaacaagctccttccccggggtcatcactcacggcctccatggcaccagggacaacgctgtccccgcagcagcgcctcctcccggcgcccgagagaccggcacgccacggcccctcccccaaggaacagagcaaaggatggtggccgcaggccccacgcgagcccacaggacaccggcccctagattccagccaccaagcggaagcatgagacccgcccacactagcctctgtgttcccgttagggacatcacaccctgtctcacgtcgcagtgccatggacgcagcagttacagcaccattgttttagcagtgcgtgttcatatatgggcttgctacttcctgtaatgaggacgttcaacatggtgaggggctacaagaaaacgcttttctgtacagagtcttactgtagctacgctaatggttaacctgatagaattaactcgtatttttctatggttttaacctgatgctccactgtctccgtcatggggttgttttgctgtttggggttgggccttgtttccctttcctttctccagtccacgtgtagactttgcgcttgatgaagaagcagatcggaagtaactgctccctcctcaaggttgtcttcagacgtcttggggacgttcctaaacactgagggggaagacagccaatagcacccattaaaagaaatacctaaataaaacctctctcccactcagctatgctagggcttggctgtaggtgtgcactgtctatttacatccgtccttacaaccatccttgtcctccttggtaccgtatcaagctctttcccatgacatttggtttaaaaaaaaaaaaaaaaaaaaaaaaaaaacagaaaaaagacaaagcgtcaactccacccacaggcccgctgtgtgtgctcgggccacgggagtcctgagggttctgtgggcctgcgcgcatccctctcccatcgtgggggtggctccgtgaccttcctgccacgagcaggaggttgatgatgtgctacgttagccttgtaagatacacccccaccaaatgtgcagccggtgttcccagtgtatatttcattctcttgtatataaaggaagcaatgtgtgtcaggcctctgtgcagtcaacccagcctcctcccgccagtgctaaccccgtgttgagcctgcatgctgacactgtggccgatctggactctagaagtgctagtttgaaatatatccattactgtcatttccttttgagcttgtggacaagctgaatgtcaggactgacttcgccagctcccagccctgcgggggtgtccttggcatcccatcagcagaggagatgcgtccctgttgcattttggcgtttggggctttgggtttatccacatgagctctgaacgtccgttatagttagggtgattggaaggtctccatcactgggtgttttaaaggtgattcaccaccatttgtgaaaggaccaacgtgctgataaacaggaccgatccgagtgctacatgactgtgcgtttgctatttcaatgggcctgaacgactacaaagccagctaggtctggaaggggaagccagctctggccacgacatctggtcggagggaagtggggatgtggcatggtagcgtctgttcatccatggaataaaacattattttacca

SEQ ID NO: 31724 - DNA, 1860 bp, Artificial Sequence
  derived and/or modified sequence
atggccaacgacatcgacgagctgatcggcatccccttccccaaccacagcagcgaggtgctgtgcagcctgaacgagcagagacacgacggcctgctgtgcgacgtgctgctggtggtgcaggagcaggagtacagaacccacagaagcgtgctggccgcctgcagcaagtacttcaagaagctgttcaccgccggcaccctggccagccagccctacgtgtacgagatcgacttcgtgcagcccgaggccctggccgccatcctggagttcgcctacaccagcaccctgaccatcaccgccggcaacgtgaagcacatcctgaacgccgccagaatgctggagatccagtgcatcgtgaacgtgtgcctggagatcatggagcccggcggcgacggcggcgaggaggacgacaaggaggacgacgacgacgacgaggacgacgacgacgaggaggacgaggaggaggaggaggaggaggaggaggacgacgacgacgacaccgaggacttcgccgaccaggagaacctgcccgacccccaggacatcagctgccaccagagccccagcaagaccgaccacctgaccgagaaggcctacagcgacacccccagagacttccccgacagcttccaggccggcagccccggccacctgggcgtgatcagagacttcagcatcgagagcctgctgagagagaacctgtaccccaaggccaacatccccgacagaagacccagcctgagccccttcgcccccgacttcttcccccacctgtggcccggcgacttcggcgccttcgcccagctgcccgagcagcccatggacagcggccccctggacctggtgatcaagaacagaaagatcaaggaggaggagaaggaggagctgcccccccccccccccccccccttccccaacgacttcttcaaggacatgttccccgacctgcccggcggccccctgggccccatcaaggccgagaacgactacggcgcctacctgaacttcctgagcgccacccacctgggcggcctgttccccccctggcccctggtggaggagagaaagctgaagcccaaggccagccagcagtgccccatctgccacaaggtgatcatgggcgccggcaagctgcccagacacatgagaacccacaccggcgagaagccctacatgtgcaccatctgcgaggtgagattcaccagacaggacaagctgaagatccacatgagaaagcacaccggcgagagaccctacctgtgcatccactgcaacgccaagttcgtgcacaactacgacctgaagaaccacatgagaatccacaccggcgtgagaccctaccagtgcgagttctgctacaagagcttcaccagaagcgaccacctgcacagacacatcaagagacagagctgcagaatggccagacccagaagaggcagaaagcccgccgcctggagagccgccagcctgctgttcggccccggcggccccgcccccgacaaggccgccttcgtgatgccccccgccctgggcgaggtgggcggccacctgggcggcgccgccgtgtgcctgcccggccccagccccgccaagcacttcctggccgcccccaagggcgccctgagcctgcaggagctggagagacagttcgaggagacccagatgaagctgttcggcagagcccagctggaggccgagagaaacgccggcggcctgctggccttcgccctggccgagaacgtggccgccgccagaccctacttccccctgcccgacccctgggccgccggcctggccggcctgcccggcctggccggcctgaaccacgtggccagcatgagcgaggccaacaactag

SEQ ID NO: 31725 - DNA, 1860 bp, Artificial Sequence
  derived and/or modified sequence
atggctaatgatatcgacgagctcatcggcattccattccctaaccactcatctgaggtgctgtgttcactaaacgagcaacgccacgatggactgctgtgtgacgtgcttctcgtggtgcaggaacaggaatacagaacccacaggtccgtgctcgccgcctgctctaaatatttcaagaaactttttacggctggcactctcgcgtcacagccatacgtgtacgagatcgattttgtgcagcccgaggctctcgcagctatcctcgaatttgcctacacatcaaccctgaccattacagccggaaatgttaaacacatccttaacgccgcccgcatgctggaaattcagtgtattgtaaatgtgtgcttggagattatggagccagggggagacggaggggaggaggatgataaggaggacgatgacgacgacgaggacgatgatgatgaagaagatgaagaagaagaagaagaggaagaggaagatgatgacgatgacactgaagactttgctgaccaggagaatctgcctgatcctcaggatatatcgtgccatcagtctccctcgaagactgaccacctcactgaaaaggcttactctgataccccccgggattttccagatagcttccaggccggaagtcctggccatttaggtgtcatacgagatttcagcatagagtccctcttaagggaaaatctctaccccaaagctaacataccggacaggaggccaagcctctcaccattcgctcctgatttttttccccatctgtggccaggcgacttcggggcgtttgctcagctgcccgaacagccaatggattcggggcccctcgaccttgttatcaagaaccgtaaaatcaaggaggaggaaaaggaggagcttcctccacctcccccccccccttttccgaacgatttcttcaaggacatgtttcctgacctgcccggaggccccctcgggccaataaaggccgaaaatgactatggcgcatatctgaattttttgagcgcaactcacctcggagggttgtttcctccctggcccctcgtcgaggaacgaaagttgaagccgaaagcgtcgcaacagtgccctatctgccacaaggtcattatgggcgcaggtaagctgcctcggcacatgcggacacacactggtgagaaaccctacatgtgtaccatctgcgaggtcagattcactcgacaggacaagcttaagattcacatgaggaaacacaccggggagagaccttacctgtgcatccactgtaacgctaaatttgtgcataactatgacctgaagaaccatatgcggatccacactggggtacgtccctaccaatgtgaattctgctacaagagcttcacaagatccgatcacctacaccgacatataaagcgacagagctgtcgaatggcccggccacgcagaggcaggaagccagctgcatggcgagctgctagtctgctttttggtcctggtggaccagcccccgacaaagcggcattcgtcatgccacccgcacttggtgaagtgggcggacacctaggtggcgcagccgtatgcctgccaggtcccagtccggcaaagcatttccttgcagcccctaaaggcgcactttctctccaggaactggaacggcagtttgaagagacgcagatgaagctgttcggccgcgcgcagctcgaagcagagagaaacgcgggtggtttgcttgcctttgcactggccgagaatgtggccgccgcccgcccttattttcccctccctgacccttgggcagctggcctagcaggattaccaggtctggccggactcaatcatgtggctagtatgagcgaggccaacaactag

SEQ ID NO: 31726 - DNA, 1860 bp, Artificial Sequence
  derived and/or modified sequence
atggcgaacgatatcgacgagctgattggcattccttttccgaatcattcttcagaagttctctgctctctcaatgaacagaggcacgacggacttttgtgtgatgtactgctggtcgtgcaggaacaggaatacaggacccaccggtcggtactggctgcttgcagtaagtattttaagaagttattcacggccggtacacttgccagccagccgtatgtgtacgaaatcgactttgtacagcccgaggcacttgcagccatcctcgagttcgcctataccagtactttgaccattaccgcgggcaacgtgaagcacatccttaatgccgctagaatgctggagatccagtgcatcgtgaacgtgtgtctcgaaattatggaaccaggcggggatgggggggaagaggacgacaaagaggatgacgacgacgatgaggacgatgatgacgaggaggatgaagaggaggaagaggaggaagaggaggacgatgacgacgacacagaggattttgctgaccaggaaaatttgccagatccacaggacatctcttgtcatcagtctccctccaagactgaccacctcactgagaaggcctatagcgacacccctcgcgactttccagacagctttcaggctggcagccccgggcatctcggagtgattagggatttttcaattgagtccctgttgagagaaaacttgtaccccaaggctaacatacccgacaggagacctagcctctcgcccttcgcccccgatttctttccacacctgtggccaggagacttcggggcatttgcccagctgccagaacaacccatggactctgggcccttggacctagtgatcaagaatcgcaagatcaaagaagaggagaaagaagagttgccccctccacccccacctccttttcctaatgacttcttcaaagatatgtttcctgatctgcccgggggacctttaggtcccatcaaagcagagaatgactatggggcttatctgaattttctctccgctacacacctgggagggctctttccaccttggccattagtggaggaacgcaagcttaagcctaaagcctcccagcagtgcccaatttgtcataaggtgattatgggtgccggtaagctaccgaggcatatgagaacacacacgggagaaaagccatatatgtgtactatttgcgaagtcagattcacccggcaagacaaattaaaaatccacatgaggaaacacactggtgagaggccctatctgtgcatccattgtaatgcaaaattcgttcataactatgatctgaagaaccatatgaggatccacacgggggtgagaccttaccagtgcgaattctgttacaagtcgttcacgcgatctgaccacctccataggcatatcaaacgacaatcatgtcgtatggctagacctaggcgtgggcgaaagcccgccgcatggcgtgccgcctccttgctgttcggacctggcgggcccgctcccgataaggccgcttttgtgatgcctccggcgctgggcgaggtgggcggccacctgggcggggcagctgtttgtctgcctggcccttcaccagccaagcatttcctcgccgcacctaaaggggcactatcgctgcaggaactggagcggcagttcgaggaaactcagatgaagctctttgggagggctcagctggaggccgagagaaacgccggtggattgctggccttcgccctagccgaaaacgttgctgccgccagaccatattttcctctgccggatccctgggctgcaggcctcgccggcctgccgggcctcgcaggccttaaccacgtggcctccatgagcgaggctaacaactag

SEQ ID NO: 31727 - DNA, 1860 bp, Artificial Sequence
  derived and/or modified sequence
atggccaatgacattgatgagctgattggcatccccttccccaaccacagcagcgaggtgctgtgcagcctgaatgagcagagacatgatggcctgctgtgtgatgtgctgctggtggtgcaggagcaggagtaccgcacccacaggtctgtgctggccgcctgcagcaagtacttcaagaagctgttcaccgctggcaccctggccagccagccctacgtgtatgaaattgactttgtgcagcctgaggccctggccgccatcctggagtttgcctacaccagcaccctgaccatcacagctggaaatgtgaagcacatcctgaatgctgccaggatgctggagatccagtgcatcgtgaatgtgtgcctggagatcatggagcctggaggagatggaggagaggaggatgacaaggaggatgatgatgatgatgaagatgatgatgatgaggaggatgaggaggaggaggaggaggaggaggaggatgatgatgatgacacagaagattttgctgaccaggagaacctgcctgacccccaggacatcagctgccaccagagccccagcaagacagaccacctgacagagaaggcctacagcgacaccccccgggacttcccagacagcttccaggccggcagccctggccacctgggcgtcatccgggacttcagcattgagagcctgctgagagaaaatctctaccccaaggccaacatcccagaccggcggcccagcctgagcccctttgccccagacttcttcccccacctgtggccaggggactttggagcctttgcccagctgcctgagcagcccatggattctggccccctggacctggtgatcaagaacaggaagatcaaggaggaggagaaggaggagctgcccccacctcctcctccacccttccccaatgacttcttcaaggacatgtttcctgacctgcccggcggccccctgggccccatcaaggccgagaatgactatggagcctacctgaacttcctgagcgccacccacctgggcggcctcttccccccctggcccctggtggaggagaggaagctgaagcccaaggccagccagcagtgccccatctgccacaaggtgatcatgggcgctgggaagctgcccaggcacatgaggacccacactggagagaagccctacatgtgcaccatctgtgaggtgcgcttcacccggcaggacaagctgaagatccacatgaggaagcacactggagagcggccctacctgtgcatccactgcaatgccaagtttgtgcacaactatgacctgaagaaccacatgaggatccacactggagtgcggccctaccagtgtgagttctgctacaagagcttcaccaggagtgaccacctgcaccgccacatcaagaggcagagctgcaggatggcccggccccggcggggcaggaagccagctgcctggagggctgccagcctgctgtttggacctgggggccctgccccagacaaggccgcctttgtgatgcccccagccctgggggaggtgggcggccacctgggcggcgctgctgtgtgcctgcccggccccagccctgccaagcacttcctggccgcccccaagggggccctgagcctgcaggagctggagcggcagtttgaggagacccagatgaagctgtttggccgggcccagctggaggccgagagaaatgctgggggcctgctggcctttgccctggccgagaatgtggccgccgcccggccctacttccccctgcctgacccctgggccgccggcctggccggcctgcccggcctggccggcctgaaccacgtggcctccatgtctgaggccaacaactag

SEQ ID NO: 31728 - DNA, 1860 bp, Artificial Sequence
  derived and/or modified sequence
atggccaacgacatcgacgagctgatcggcatccccttccccaaccattctagcgaagtgctgtgcagcctgaacgaacaacggcacgatggcctcttgtgcgatgtgctgcttgtcgtgcaggagcaggaataccgaacccacagatccgtgctggcagcctgctccaaatacttcaaaaagctatttacagccgggacactggcatctcaaccctacgtgtacgagatagacttcgtacagccagaagcacttgcggccatcctagagttcgcctatacatcgactctcactatcactgcaggtaacgtgaagcacattctaaacgcggcccgtatgttggagattcaatgcattgttaatgtctgcttggagatcatggagccaggcggggatggaggcgaggaggacgataaagaggacgatgatgatgacgaggacgatgacgatgaagaggacgaggaggaagaggaggaagaagaagaagatgacgatgatgacactgaagacttcgccgaccaggagaatctgccagacccccaggatattagctgtcaccagtccccatccaaaaccgatcaccttactgagaaggcatacagtgatacccctagagactttccagactcctttcaagcagggagccctgggcacctgggtgttatacgtgatttttcaatcgaaagtctgctgagagagaatctgtacccaaaagccaatattccggaccgcaggcctagcctgtcaccatttgctcctgatttctttccccatctgtggccaggcgatttcggagcatttgcccagctacctgagcagcctatggattcaggccccctggacctggtgataaaaaacagaaagattaaagaggaagagaaagaagaactccctcccccacctcctcctccctttcctaatgatttcttcaaggacatgttccctgatctgcccggggggcctttaggcccaattaaagcagaaaacgactacggtgcctacctaaacttcctgtctgcaactcacctgggggggctgtttcctccctggccactggttgaggagcggaaattaaagcctaaggccagccagcaatgccccatttgccacaaagttatcatgggtgcgggaaaactcccaaggcatatgaggacccacactggagagaagccctacatgtgcactatatgtgaggtgcgattcaccagacaggacaaactgaagattcacatgagaaaacataccggggagcgtccttatttgtgcattcactgcaatgcgaagtttgtacacaattacgacttgaagaatcacatgaggatccacaccggagtcaggccctatcaatgtgagttttgttataaatcgttcacccgttccgatcacctccatcgacatataaaacgacagtcttgcagaatggctcggccacgtaggggccggaagcccgccgcctggagggctgctagcctcctttttgggccagggggccctgcccctgacaaagctgcgtttgtaatgccccccgctctgggggaggtgggcggtcatttggggggagctgccgtatgcttgcccggccccagcccagcaaagcactttctggccgcccccaaaggcgccttgtctctccaggagctggaaaggcagttcgaagaaactcagatgaagcttttcggccgggcccagctggaagccgagagaaacgctgggggtctcctggcgtttgcactcgccgagaatgttgccgcagcacgaccctactttcctctaccagatccatgggcagcgggactcgccgggcttcccggcctggcaggcctgaaccacgtggcttcaatgtccgaagcaaacaactag

SEQ ID NO: 31729 - DNA, 1860 bp, Artificial Sequence
  derived and/or modified sequence
atggccaacgacatcgacgagctgatcggcatccccttccccaaccactcgagcgaggtgttgtgctccctgaatgaacagcgccacgatggtctcctgtgtgatgtactgctcgtcgtgcaggagcaggagtatcggacacacagatccgtattagccgcttgttctaaatacttcaaaaaactgttcacggccggtacccttgctagtcagccttacgtgtatgagattgacttcgttcagccagaggccctggctgctattctcgagttcgcctacacttccactctcacaatcaccgccggtaatgtgaagcatattctgaatgcagcacgtatgctggagatccagtgcattgttaacgtgtgcctggagattatggaacccggcggagatgggggggaagaggacgacaaggaagatgacgatgacgatgaggacgacgacgatgaagaagatgaggaggaggaagaggaagaggaggaggatgacgatgacgacaccgaggatttcgccgatcaagagaatcttccagacccccaggacatctcatgccatcagtcccccagcaagaccgaccacctgaccgaaaaggcctattctgataccccccgagacttccctgatagctttcaagcaggatctcccggccacttgggcgttattagggacttctctattgaatccctgctgcgagagaacctttatcctaaagccaatattcctgatcggcgcccttcgttatccccattcgcaccggactttttcccccacctatggccaggagattttggtgccttcgcccagctgccggaacagcctatggacagcgggccactcgacctcgtcattaaaaatcgcaaaataaaggaggaagaaaaagaggagctgccacccccaccaccccccccgttcccaaacgattttttcaaggacatgttccccgacctgccagggggacctctgggtcctattaaggcagaaaacgactacggggcgtatctcaactttctttcagccacccatctggggggattgttccctccatggccgctggtagaggagaggaagcttaaacctaaagcttctcaacagtgtccgatttgtcataaggtgatcatgggtgctggcaagttaccgcgccacatgcgtactcataccggcgaaaaaccatatatgtgcacgatctgtgaggttaggttcacgagacaggacaagttgaaaattcacatgaggaaacatactggagaacgaccatatctgtgtatccattgtaatgccaaattcgtgcataattacgacttaaagaatcatatgagaatacatacaggcgtccgaccttaccagtgtgaattctgttataagtcctttacacgatctgatcaccttcataggcacatcaaacgccagtcctgcagaatggcacgcccaaggagggggcgtaaacctgctgcatggcgtgccgcttccctgctattcggccctggagggccggcgccggacaaagcagcattcgtcatgcccccggccctgggggaagtgggcggccatttgggcggcgccgcagtgtgtttgcccgggccctcacccgccaagcactttttggcagcacctaaaggcgcgctttcgcttcaggaactggaacggcaatttgaggagacacagatgaaactcttcggccgggcacagctcgaggctgaacgcaacgcgggtggactgctggccttcgccctggccgagaacgtagccgccgctaggccatacttccccctacccgacccctgggctgctggcttggcaggtttacctggactggccggcctcaatcacgtggcgtctatgagcgaggcaaacaactag

SEQ ID NO: 31730 - DNA, 1860 bp, Artificial Sequence
  derived and/or modified sequence
atggctaatgatatcgatgagcttatcgggatcccattccctaatcatagcagcgaggtcctttgctccctgaacgagcagaggcatgatggcctgctgtgtgacgtgctgctggtggttcaggaacaggagtatcgtactcaccggagcgtgctggctgcctgtagcaagtacttcaagaaactttttactgccggaaccctggcctcccagccctatgtgtacgagatagacttcgtgcagccggaagcactagccgctattctagaattcgcgtacacatcgacactgactattaccgccggaaacgtgaagcacattctcaacgctgctaggatgcttgagatacagtgcatcgttaacgtatgccttgagataatggaacccggtggggacggtggggaggaggacgacaaggaggacgatgatgacgatgaggacgacgacgatgaggaggatgaagaagaggaagaggaggaagaggaggatgatgatgacgataccgaagattttgcggaccaggagaacctgccagacccccaggacatatcttgtcatcagagtccgtccaagacagaccacctcacagaaaaagcatactccgatactccacgggatttccctgactcctttcaggccggatctccagggcacttgggagtgatcagggacttctctattgagagcctactccgggaaaacctctatcctaaagctaacataccagatcgtaggccttcgctgagtcccttcgccccagatttcttcccgcatctctggcctggagatttcggtgctttcgcccagctgcctgagcaaccaatggatagcggcccattggatctcgttataaaaaatcgcaaaatcaaggaagaggaaaaagaggagctgccccctcctcctccccctccattccctaacgattttttcaaggacatgtttccagacttacccggagggccacttggccctattaaggcggagaatgactacggtgcttatttgaatttcttgtctgccacgcacctggggggattgtttcccccatggccactggtagaagagcggaagctgaaacccaaggcctcccaacagtgtcccatttgtcacaaggttatcatgggtgctgggaaactgccgcgacacatgcggacacacaccggcgagaagccatatatgtgcaccatttgtgaggtgaggttcacaaggcaggataaattaaaaatccatatgcgtaaacatacaggggagagaccatacctctgcattcattgtaacgccaagtttgtccataattatgacctgaaaaatcatatgagaatccataccggagtccggccataccagtgcgagttctgttacaaaagcttcactcgctcagatcacttgcaccggcatataaagcgacaatcctgtaggatggcccgacccaggcggggaaggaagcctgccgcttggcgcgctgctagccttctgtttgggcctgggggtcctgctccagataaggcagccttcgttatgccaccagcactgggagaggtggggggacacctcggcggagccgcagtgtgtctacccggaccgagtcctgccaagcacttcctggcggctcctaagggcgctctctccttgcaagagctggagcggcaatttgaggaaacccagatgaaattattcgggcgtgcccagctggaggccgagcggaacgccggtggtctcctggctttcgccctagcagagaacgtggcagctgcaaggccgtactttcctctaccagacccctgggccgctgggcttgccggtctgcctggactagcaggcctcaaccatgttgcttctatgtctgaagccaacaactag

SEQ ID NO: 31731 - DNA, 1860 bp, Artificial Sequence
  derived and/or modified sequence
atggccaacgatattgacgaactgattggtataccgtttcctaatcattcatccgaggtgttgtgtagcctcaatgagcaaagacacgacggcttgctgtgcgacgtccttttggttgtacaggaacaggaataccggacacaccgatccgtactggccgcatgttctaagtactttaagaaattgtttaccgcaggcactctggctagtcagccttacgtttacgagatcgatttcgtgcagccggaagccctggccgcaattctggaattcgcttacacctccacacttaccatcacagccggaaacgttaaacacatcctgaatgctgctcgaatgttggaaatccagtgcattgtgaatgtttgtctcgaaattatggagccaggcggagacggaggcgaagaagatgacaaggaagacgacgatgatgacgaggacgacgacgacgaggaagacgaggaagaggaagaagaagaggaagaagatgatgacgacgacactgaggactttgccgatcaggaaaatcttcccgacccccaggacatctcctgtcaccaatctcctagcaagaccgaccacttaactgaaaaggcctacagtgacacaccaagagattttcccgacagcttccaagctggctccccaggccacctcggtgtcatccgcgatttctccattgagtcattgttgcgcgaaaatctctatcctaaggcaaacatacctgacagacgcccatcactatccccgtttgcaccagacttcttcccccacctttggcccggagacttcggcgcatttgctcagttgcccgaacaacccatggattctggtcctctagatctggttatcaaaaaccggaagatcaaagaagaagaaaaggaggagctcccacccccaccacccccaccttttccaaacgatttctttaaagacatgttcccagatcttccaggcggtcccctcggccctattaaggcagaaaacgactatggtgcgtatctgaacttcctcagcgccacccacctcgggggtctgttccccccttggcccctggtcgaggagagaaagttgaaacccaaggccagtcagcagtgcccaatctgccataaggtcattatgggagcaggtaagttgccaaggcatatgcgcacccatactggcgagaaaccttacatgtgtaccatatgcgaagtcaggtttaccagacaggataagcttaaaatccatatgagaaaacacacaggggaaaggccttatttatgtatacactgcaatgctaaatttgttcacaactatgacctcaaaaaccacatgcggatccatactggcgttcgcccatatcagtgtgagttctgttacaagtctttcacgcgctccgaccacttgcataggcatatcaaaagacaatcttgtcgcatggccaggcccaggaggggcagaaaacctgccgcttggagagccgctagtttgctcttcggacctggaggcccagcgccagataaggcagctttcgtgatgccacccgcattgggggaggtgggaggtcatcttggaggagccgcagtctgtctccccggaccctcccccgctaaacatttcttggcagcaccaaagggagccctctcactgcaggagctggaaaggcagttcgaagagacacagatgaagctgttcggacgagcccagttagaggcggagaggaatgcagggggattgctggcctttgccctggcagaaaatgttgctgctgccagaccgtatttccccctgccagatccttgggctgctggcttggccggactaccaggactggctgggctgaatcacgtagccagtatgtcagaggccaacaattag

SEQ ID NO: 31732 - protein, 204 aa, Artificial Sequence
  derived and/or modified sequence
MALSDADVQKQAEEEFNIEKGRLVQTQRLKIMEYYEKKEKQIEQQKKIQMSNLMNQARLKVLRARDDLITDLLNEAKQRLSKVVKDTTRYQVLLDGLVLQGLYQLLEPRMIVRCRKQDFPLVKAAVQKAIPMYKIATKNDVDVQIDQESYLPEDIAGGVEIYNGDRKIKVSNTLESRLDLIAQQMMPEVRGALFGANANRKFLD

SEQ ID NO: 31733 - DNA, 615 bp, Artificial Sequence
  derived and/or modified sequence
atggctctgtctgacgccgacgtgcagaaacaagcggaggaagagtttaacatcgagaaaggaaggctcgtacagacacagaggcttaagattatggagtattacgagaagaaagagaaacagattgagcagcagaagaagatacagatgtcaaacctgatgaaccaggcgcgcctcaaggtgctcagggctcgcgatgatctgatcacagacctactgaatgaagcaaagcagaggctgtcaaaggtcgtgaaggacactactcgctaccaggtcctactagatggactcgtcctccagggtctctatcagctgctggaaccacgaatgatagtgagatgtagaaagcaagacttccccttggtgaaagccgccgtgcagaaagcaatcccaatgtacaagattgcgaccaaaaatgatgtggatgtacagatcgaccaggaaagttatctaccagaagatatagctggtggcgtcgaaatttacaacggtgaccgaaaaattaaggtatctaacactctggagagtcgactggacctgatagcacagcagatgatgccggaggtgcgcggtgctctgttcggggctaatgccaataggaagtttctcgattag

SEQ ID NO: 31734 - DNA, 615 bp, Artificial Sequence
  derived and/or modified sequence
atggccctgagtgatgctgatgtgcagaagcaggccgaggaggagttcaacatcgagaagggccgcctggtgcagacccagaggctgaagatcatggagtactatgagaagaaggagaagcagatcgagcagcagaagaagatccagatgagcaacctgatgaaccaggcccggctgaaggtgctgcgggccagagatgacctgatcacagacctgctgaatgaggccaagcagaggctgagcaaggtggtgaaggacaccacccgctaccaggtgctgctggatggcctggtgctgcagggcctgtaccagctgctggagcccaggatgattgtgcgctgcaggaagcaggacttccccctggtgaaggctgctgtgcagaaggccatccccatgtacaagatcgccaccaagaatgatgtggatgtgcagattgaccaggagagctacctgcctgaagatattgctgggggcgtggagatctacaatggagacaggaagatcaaggtgagcaacaccctggagagccggctggacctgattgcccagcagatgatgcctgaggtgcggggggccctgtttggagccaatgccaacaggaagttcctggactag

SEQ ID NO: 31735 - DNA, 615 bp, Artificial Sequence
  derived and/or modified sequence
atggccctgagcgacgccgacgtgcagaagcaggccgaggaggagttcaacatcgagaaagggagactcgttcaaacacaacgactgaaaattatggagtattacgagaaaaaggaaaagcaaatcgagcagcagaagaagattcagatgtctaatctgatgaatcaggcccgcctgaaggtgctaagggcgagggatgacttaatcacggacctgctgaacgaggccaaacagcgtctttccaaggtagtaaaggacacaacccgctaccaggtcctactggacggcctcgttctgcaggggctgtatcagctcctggagcctagaatgatagtgcggtgtagaaagcaggacttccccttggtcaaggctgcggtgcaaaaggcaatccccatgtataagatcgctactaagaatgatgtggacgtccagatcgaccaggagagctacttacctgaagatatcgccggcggcgtagagatatacaacggcgaccgcaagattaaggttagtaacaccctggaaagccggttagacttgattgcacaacagatgatgccagaggtgaggggagcactgttcggcgcaaatgccaataggaaatttcttgactag

SEQ ID NO: 31736 - DNA, 615 bp, Artificial Sequence
  derived and/or modified sequence
atggccttatcggacgcggatgtccagaagcaagccgaggaagagtttaacattgagaaggggaggctggtgcaaactcagagattaaagataatggaatactacgaaaagaaggagaagcagattgagcagcagaagaagatacaaatgtccaaccttatgaaccaggccagactgaaggtgctgcgcgcaagagatgatctgataacagacctgttgaatgaagccaagcagagactgtccaaggttgtgaaggacacaacaaggtaccaagtgctcttagatggactcgtgctgcagggtctctaccagctgcttgagccgaggatgatcgttcgttgccggaaacaggactttccgttagtcaaggctgctgtccagaaggcaatacctatgtacaagatagctactaaaaatgatgtggacgtccagatcgatcaggaatcctacttacccgaagacatcgcagggggagttgagatctataacggcgatagaaaaattaaggtgtcaaatactctcgagagccggctcgatctgattgcgcagcagatgatgcctgaggtccggggagctctgtttggggctaacgcaaatcggaagttcctcgactag

SEQ ID NO: 31737 - DNA, 994 bp, Artificial Sequence
  derived and/or modified sequence
ataaagtaaaggaacccgagatctgcgcaggggttccctttgccgatttctctcacctcacctttcaaacctaaactcgagcctactgttcaccggcctagcattgctctcgccatggctctcagcgatgctgacgtgcaaaagcaggcagaagaagagttcaacatagagaaaggtcggcttgtgcaaacccaaagactaaagattatggaatattatgagaagaaagagaaacagattgagcagcagaagaaaattcagatgtccaatttgatgaatcaagcgagactcaaagtcctcagagcaagagatgaccttatcacagacctactaaatgaagcaaaacagagactcagcaaggtggtaaaagatacaaccaggtaccaagtgctgctggatggactggttctccagggtttgtaccagttgctggagccccgaatgattgttcgttgcaggaaacaagatttccctctggtaaaggctgcagtgcagaaggcaattcctatgtacaaaattgccaccaaaaacgatgttgatgtccaaattgaccaggagtcctacctgcctgaagacatagctggtggagttgagatctataatggagatcgtaaaataaaggtttccaacaccctggaaagccggctggatctcatagcccagcagatgatgccagaagtccggggagccttgtttggtgcaaatgccaacaggaagtttttggactaagccttcaggaggtggagctcgtcgtcagctctcctgctgtgatgtggaagcttctgatatttgaagaaacacgaatgtctctgtagcttcctcttcactgccccagtattgctctgtatttatcagcgatgcccctctgtcactcatgccttgcctaattgttcacaatggtggaaagcttcatgtaatatgatcaggacccacctccagttcttctgaaagtgtgacagtgtccagccggttctgcagcactaggggagggggc

SEQ ID NO: 31738 - DNA, 615 bp, Artificial Sequence
  derived and/or modified sequence
atggccctgagcgacgccgacgtgcagaagcaggccgaggaggagttcaacatcgagaagggcagactggtgcagacccagagactgaagatcatggagtactacgagaagaaggagaagcagatcgagcagcagaagaagatccagatgagcaacctgatgaaccaggccagactgaaggtgctgagagccagagacgacctgatcaccgacctgctgaacgaggccaagcagagactgagcaaggtggtgaaggacaccaccagataccaggtgctgctggacggcctggtgctgcagggcctgtaccagctgctggagcccagaatgatcgtgagatgcagaaagcaggacttccccctggtgaaggccgccgtgcagaaggccatccccatgtacaagatcgccaccaagaacgacgtggacgtgcagatcgaccaggagagctacctgcccgaggacatcgccggcggcgtggagatctacaacggcgacagaaagatcaaggtgagcaacaccctggagagcagactggacctgatcgcccagcagatgatgcccgaggtgagaggcgccctgttcggcgccaacgccaacagaaagttcctggactag

SEQ ID NO: 31739 - protein, 196 aa, Artificial Sequence
  derived and/or modified sequence
MALSDADVQKQIKHMMAFIEQEANEKAEEIDAKAEEEFNIEKGRLVQTQRLKIMEYYEKKEKQIEQQKKIQMSNLMNQARLKVLRARDDLITGLYQLLEPRMIVRCRKQDFPLVKAAVQKAIPMYKIATKNDVDVQIDQESYLPEDIAGGVEIYNGDRKIKVSNTLESRLDLIAQQMMPEVRGALFGANANRKFLD

SEQ ID NO: 31740 - DNA, 591 bp, Artificial Sequence
  derived and/or modified sequence
atggctctgtcagacgccgacgttcagaagcagatcaagcatatgatggcatttatcgagcaagaggctaatgagaaagcagaggagattgatgcgaaggcggaggaagagtttaatattgaaaaaggtcgcctggttcagactcagcgtctgaagatcatggaatactacgaaaagaaagaaaagcagattgaacagcagaaaaagattcagatgagcaacctgatgaaccaggctcggttaaaggtgctccgggcgagggacgacctcattaccggcctgtaccagctgctagaacctagaatgattgtgcgctgtcggaagcaggactttccactcgtgaaggccgctgtgcagaaagcaattcccatgtacaaaatagcaaccaaaaatgacgtggacgttcagatagatcaggaatcttatctccctgaggatatagccgggggcgtggaaatttataacggcgatagaaaaataaaagtgtcaaacactctcgaatctcggctggacttaatcgcccagcagatgatgccagaggttagaggagccctgtttggggccaacgctaaccgcaagtttttggactag

SEQ ID NO: 31741 - DNA, 591 bp, Artificial Sequence
  derived and/or modified sequence
atggccctgagtgatgctgatgtgcagaagcagatcaagcacatgatggccttcatcgagcaggaggccaatgagaaggccgaggagattgatgccaaggccgaggaggagttcaacatcgagaagggccgcctggtgcagacccagaggctgaagatcatggagtactatgagaagaaggagaagcagatcgagcagcagaagaagatccagatgagcaacctgatgaaccaggcccggctgaaggtgctgcgggccagagatgacctgatcaccggcctgtaccagctgctggagcccaggatgattgtgcgctgcaggaagcaggacttccccctggtgaaggctgctgtgcagaaggccatccccatgtacaagatcgccaccaagaatgatgtggatgtgcagattgaccaggagagctacctgcctgaagatattgctgggggcgtggagatctacaatggagacaggaagatcaaggtgagcaacaccctggagagccggctggacctgattgcccagcagatgatgcctgaggtgcggggggccctgtttggagccaatgccaacaggaagttcctggactag

SEQ ID NO: 31742 - DNA, 591 bp, Artificial Sequence
  derived and/or modified sequence
atggccctgagcgacgccgacgtgcagaagcagatcaagcacatgatggctttcattgaacaggaagctaatgagaaggccgaagaaattgacgccaaagctgaggaggaatttaatattgaaaaggggagactggtgcagacccagcgtttgaaaataatggaatattatgagaagaaggagaaacagattgagcagcaaaagaagattcagatgtccaatttaatgaaccaagccaggcttaaagtactgagggcacgcgatgatctcataacaggcctgtaccagctcttggaacctcggatgatcgtgaggtgccgcaaacaggattttcctcttgtaaaggccgctgtacagaaggccatcccaatgtacaagatagccactaagaacgacgtcgatgtgcagattgaccaggaatcatatctccccgaagatatcgccgggggagttgagatctacaacggcgaccggaagattaaggtatcaaatactcttgagtctcggttggacctcatcgctcaacaaatgatgcccgaagtgcgcggagctctctttggcgctaacgccaaccgcaaatttctcgattag

SEQ ID NO: 31743 - DNA, 591 bp, Artificial Sequence
  derived and/or modified sequence
atggccctgtccgacgccgacgtgcagaaacagattaagcacatgatggcttttatcgaacaggaagccaatgaaaaggcagaggaaatcgatgcgaaagccgaagaggaatttaatatcgagaaaggcagactcgtacagacccagcgtctcaaaatcatggagtattatgaaaagaaggagaaacagatagaacagcagaaaaagattcagatgtccaatctgatgaaccaggcacgcctgaaagttttaagagccagagacgacctcataaccggcctgtatcaactgctggagcccagaatgattgtgaggtgccgtaagcaggattttcctcttgtgaaggctgcggtccagaaggccatccccatgtacaaaatcgctaccaaaaatgacgtcgacgtgcagatcgaccaggagagctatctgcccgaggatattgccggaggggttgaaatttacaacggagacagaaagataaaagtgagtaatacactggaatctcgtcttgacctgatcgctcaacagatgatgccagaggtaaggggggctctgtttggagccaacgccaatcgtaaatttctagactag

SEQ ID NO: 31744 - DNA, 1208 bp, Artificial Sequence
  derived and/or modified sequence
aaagtaaaggaacccgagatctgcgcaggggttccctttgccgatttctctcacctcacctttcaaacctaaactcgagcctactgttcaccggcctagcattgctctcgccatggctctcagcgatgctgacgtgcaaaagcagataaagcatatgatggctttcattgaacaagaagccaatgagaaagcagaagaaatagatgcaaaggcagaagaagagttcaacatagagaaaggtcggcttgtgcaaacccaaagactaaagattatggaatattatgagaagaaagagaaacagattgagcagcagaagaaaattcagatgtccaatttgatgaatcaagcgagactcaaagtcctcagagcaagagatgaccttatcacaggtttgtaccagttgctggagccccgaatgattgttcgttgcaggaaacaagatttccctctggtaaaggctgcagtgcagaaggcaattcctatgtacaaaattgccaccaaaaacgatgttgatgtccaaattgaccaggagtcctacctgcctgaagacatagctggtggagttgagatctataatggagatcgtaaaataaaggtttccaacaccctggaaagccggctggatctcatagcccagcagatgatgccagaagtccggggagccttgtttggtgcaaatgccaacaggaagtttttggactaagccttcaggaggtggagctcgtcgtcagctctcctgctgtgatgtggaagcttctgatatttgaagaaacacgaatgtctctgtagcttcctcttcactgccccagtattgctctgtatttatcagcgatgcccctctgtcactcatgccttgcctaattgttcacaatggtggaaagcttcatgtaatatgatcaggacccacctccagttcttctgaaagtgtgacagtgtccagccggttctgcagcactaggggagggggcagatggtggttgcatgggcttcctgggtctccactctccgtctggcctaaaggtgatgtatttggtgtttggccctgcagtccccactcttgaggcttaaggcgcatgtggcacaccactccttccagcagtagtcgctttactgttacctgtttaggcctagaagttttccctcatctgtaaatgtgatttaaaatctaagccatgaatatgctttatttattaaaagagttatgcgga

SEQ ID NO: 31745 - DNA, 591 bp, Artificial Sequence
  derived and/or modified sequence
atggccctgagcgacgccgacgtgcagaagcagatcaagcacatgatggccttcatcgagcaggaggccaacgagaaggccgaggagatcgacgccaaggccgaggaggagttcaacatcgagaagggcagactggtgcagacccagagactgaagatcatggagtactacgagaagaaggagaagcagatcgagcagcagaagaagatccagatgagcaacctgatgaaccaggccagactgaaggtgctgagagccagagacgacctgatcaccggcctgtaccagctgctggagcccagaatgatcgtgagatgcagaaagcaggacttccccctggtgaaggccgccgtgcagaaggccatccccatgtacaagatcgccaccaagaacgacgtggacgtgcagatcgaccaggagagctacctgcccgaggacatcgccggcggcgtggagatctacaacggcgacagaaagatcaaggtgagcaacaccctggagagcagactggacctgatcgcccagcagatgatgcccgaggtgagaggcgccctgttcggcgccaacgccaacagaaagttcctggactag

SEQ ID NO: 31746 - protein, 317 aa, Artificial Sequence
  derived and/or modified sequence
MLRPAGLWRLCRRPWAARVPAENLGRREVTSGVSPRGSTSPRTLNIFDRDLKRKQKNWAARQPEPTKFDYLKEEVGSRIADRVYDIPRNFPLALDLGCGRGYIAQYLNKLQLFHCRKLLESFSKLTLQKMLCLHWVNDLPRALEQIHYILKPDGVFIGAMFGGDTLYELRCSLQLAETEREGGFSPHISPFTAVNDLGHLLGRAGFNTLTVDTDEIQVNYPGMFELMEDLQGMGESNCAWNRKALLHRDTMLAAAAVYREMYRNEDGSVPATYQIYYMIGWKYHESQARPAERGSATVSFGELGKINNLMPPGKKSQ

SEQ ID NO: 31747 - DNA, 954 bp, Artificial Sequence
  derived and/or modified sequence
atgctgagacctgctgggttatggcgattatgcaggcggccttgggcagcccgggtcccggctgagaacctcgggcgtagagaggttacctctggcgtttccccccggggatccaccagtcctcggaccttgaacatcttcgacagagatttgaaacggaagcaaaagaattgggcggcaaggcagccagagcccacgaaattcgactacttgaaagaagaagtaggaagccggatcgccgatagggtatatgatatccctcggaacttcccactggccctcgacctcggttgcggtcgggggtacatagcgcagtacttgaataaactgcagttattccactgtcgaaaattactcgaatcctttagcaagcttacactacaaaagatgctatgtctgcactgggttaatgatttgcctcgcgctcttgaacagattcactatatactgaaaccagatggggtctttatcggagctatgttcggaggcgatacgctgtacgagctcaggtgctccttacaacttgccgaaactgaacgggagggcgggttttcacctcacatttctccatttacggcggttaacgacctcggccaccttctcggtagggctggttttaacaccctgaccgtagatacagatgaaattcaggtgaattaccccggcatgtttgaactgatggaggatctccagggtatgggcgagtccaattgcgcatggaacaggaaggcgcttttacatcgcgacaccatgctcgctgctgcagctgtctacagggaaatgtatcggaacgaagatggtagtgtccccgctacctaccagatatactatatgatcggctggaagtatcatgaaagccaagctaggccggctgaaagaggatctgcgactgtgtctttcggagagctcggcaaaatcaataatctcatgccaccgggcaagaaatcccagtag

SEQ ID NO: 31748 - DNA, 954 bp, Artificial Sequence
  derived and/or modified sequence
atgctgcggcctgctggcctgtggaggctgtgccggcggccctgggccgcccgggtgcctgctgagaacctgggccggcgggaggtgaccagcggcgtgagcccccggggcagcaccagccccaggaccctgaacatctttgaccgggacctgaagaggaagcagaagaactgggccgcccggcagcctgagcccaccaagtttgactacctgaaggaggaggtgggcagcagaattgctgacagagtgtatgacatccccaggaacttccccctggccctggacctgggctgcggccggggctacatcgcccagtacctgaacaagctgcagctgttccactgcaggaagctgctggagagcttcagcaagctgaccctgcagaagatgctgtgcctgcactgggtgaatgacctgccccgggccctggagcagatccactacatcctgaagccagatggagtcttcatcggggccatgtttggaggagacaccctgtatgagctgcgctgcagcctgcagctggccgagacagagcgggagggcggcttcagcccccacatcagccccttcaccgctgtgaatgacctgggccacctgctgggccgggccggcttcaacaccctgactgtggacacagatgagatccaggtgaactacccaggcatgtttgagctgatggaggacctgcagggcatgggagagagcaactgtgcctggaacaggaaggccctgctgcaccgggacaccatgctggccgctgctgctgtgtaccgggagatgtacagaaatgaagatggctctgtgcctgccacctaccagatctactacatgattggctggaagtaccacgagagccaggcccggcctgctgagcggggcagcgccaccgtgtcctttggagagctgggcaagatcaacaacctgatgcctcctgggaagaagagccagtag

SEQ ID NO: 31749 - DNA, 954 bp, Artificial Sequence
  derived and/or modified sequence
atgctgcggcccgccggcctgtggcggctgtgccggcggccctgggcagcccgggttcccgccgagaatcttggcaggcgggaggtgacaagtggcgtatcacctagaggaagcaccagccctaggactctcaatatttttgacagagatctgaagcggaaacagaagaattgggccgctaggcaaccagaaccgacgaaatttgactatttgaaagaagaggttggttcccgtatcgcagacagagtgtatgacattccccgcaactttccactcgcactggacctggggtgcggaaggggctacatagctcaatatctgaataagctgcaactgttccattgccggaagcttttggaatctttcagcaagctgacactccagaagatgttgtgcctgcactgggtgaatgatctgcctagggccctcgagcagatccattacatcctcaagccagacggagttttcatcggagcaatgtttggtggcgacactctgtacgagctccgttgcagtctgcagctcgccgaaaccgagcgcgagggaggattttctcctcacatatccccttttaccgccgtgaacgacttggggcaccttttggggcgagcgggttttaacacgttgactgtggatacagatgagattcaggtgaattaccccggaatgttcgagctcatggaggatctacagggcatgggcgagagtaattgtgcgtggaatcgaaaagcacttctgcatagggacacgatgctcgccgccgccgccgtttatcgtgaaatgtaccgaaatgaagatggctcagtaccagctacataccagatctactacatgatcggatggaagtaccatgaaagccaagcccggcccgccgagcggggatccgccaccgtcagcttcggcgagttagggaagatcaacaatctgatgccaccagggaagaaaagtcagtag

SEQ ID NO: 31750 - DNA, 954 bp, Artificial Sequence
  derived and/or modified sequence
atgttgcggccagcaggactatggcgactctgccggcgtccgtgggcagcccgagttccagctgagaatttaggaaggagagaagtgacctccggcgtttccccccgaggttcaactagcccacgcactctgaacattttcgacagggacctgaagcggaagcaaaaaaactgggccgcaaggcaaccagagcctaccaaattcgactaccttaaagaagaggtgggctctaggatagccgatagggtgtacgatattcccagaaattttccattggccctagatttgggatgtggtcggggatatatcgctcagtatctcaacaagctgcagctctttcactgtcgtaagttactagagagcttttcaaagctgacactccagaagatgctgtgcctgcactgggttaatgacctgccccgagccttggagcagatccactacatactgaagcccgatggggtctttattggggctatgttcggtggtgacactctgtacgagctcagatgctcactgcaactggcagagaccgaacgagagggaggattcagtccccatataagtccttttacggcagtgaatgacctgggccacctgctgggcagagcgggattcaatactctcacagtcgataccgatgagatccaggtcaactacccaggcatgttcgaactcatggaggacctgcaagggatgggagaaagtaactgcgcttggaaccgaaaggctctgctgcacagggacaccatgctggcagcggctgccgtgtatagggaaatgtatcggaacgaagatggaagtgtgccagcgacgtaccagatctattatatgatcgggtggaaataccatgagtcacaggcacggccagcagaaagaggcagcgccactgtttctttcggggagctcggcaagatcaataacctcatgccccctggcaaaaaaagccagtag

SEQ ID NO: 31751 - DNA, 991 bp, Artificial Sequence
  derived and/or modified sequence
attggggtcgcagctggagatgctgcggccggcagggctctggcgcttatgtcggcgaccttgggcggcgagggtcccagcggagaatcttggccgtagggaagtcacctctggtgtctctccccgcggtagcacctcgcccagaaccctgaatattttcgaccgggatttgaaaaggaaacagaagaactgggcagcccggcagcccgagccgaccaaatttgactacctgaaggaggaggttggaagtcggatcgcagaccgtgtatatgacatacccagaaatttcccccttgctttggatcttggttgtggaagaggttacattgcacaatatttgaataagcttcagttattccattgcaggaaactattggaaagtttttccaagctgacattgcagaaaatgctttgtttgcattgggtgaatgaccttcctagagcacttgagcagattcattatattttaaaaccagatggagtgtttatcggtgcaatgtttggaggcgacacactctatgaacttcggtgttccttacagttagcggaaacggaaagggaaggaggattttctccacacatttctcctttcactgctgtcaatgacctgggacatctgcttgggagagctggctttaatactctgactgtggacactgatgaaattcaagttaactatcctggaatgtttgaattgatggaagatttacaaggtatgggtgagagtaactgtgcttggaatagaaaagccctgctgcatcgagacacaatgctggcagctgcggcagtgtacagagaaatgtacagaaatgaagatggttcagtacctgctacataccagatctattacatgataggatggaaatatcatgagtcacaggcaagaccagctgaaagaggttccgcaactgtgtcatttggagagctaggaaaaataaacaaccttatgccaccggggaaaaaatcacaataaatatttattcagtgttaa

SEQ ID NO: 31752 - DNA, 954 bp, Artificial Sequence
  derived and/or modified sequence
atgctgagacccgccggcctgtggagactgtgcagaagaccctgggccgccagagtgcccgccgagaacctgggcagaagagaggtgaccagcggcgtgagccccagaggcagcaccagccccagaaccctgaacatcttcgacagagacctgaagagaaagcagaagaactgggccgccagacagcccgagcccaccaagttcgactacctgaaggaggaggtgggcagcagaatcgccgacagagtgtacgacatccccagaaacttccccctggccctggacctgggctgcggcagaggctacatcgcccagtacctgaacaagctgcagctgttccactgcagaaagctgctggagagcttcagcaagctgaccctgcagaagatgctgtgcctgcactgggtgaacgacctgcccagagccctggagcagatccactacatcctgaagcccgacggcgtgttcatcggcgccatgttcggcggcgacaccctgtacgagctgagatgcagcctgcagctggccgagaccgagagagagggcggcttcagcccccacatcagccccttcaccgccgtgaacgacctgggccacctgctgggcagagccggcttcaacaccctgaccgtggacaccgacgagatccaggtgaactaccccggcatgttcgagctgatggaggacctgcagggcatgggcgagagcaactgcgcctggaacagaaaggccctgctgcacagagacaccatgctggccgccgccgccgtgtacagagagatgtacagaaacgaggacggcagcgtgcccgccacctaccagatctactacatgatcggctggaagtaccacgagagccaggccagacccgccgagagaggcagcgccaccgtgagcttcggcgagctgggcaagatcaacaacctgatgccccccggcaagaagagccagtag

SEQ ID NO: 31753 - protein, 716 aa, Artificial Sequence
  derived and/or modified sequence
MNNFRATILFWAAAAWAKSGKPSGEMDEVGVQKCKNALKLPVLEVLPGGGWDNLRNVDMGRVMELTYSNCRTTEDGQYIIPDEIFTIPQKQSNLEMNSEILESWANYQSSTSYSINTELSLFSKVNGKFSTEFQRMKTLQVKDQAITTRVQVRNLVYTVKINPTLELSSGFRKELLDISDRLENNQTRMATYLAELLVLNYGTHVTTSVDAGAALIQEDHLRASFLQDSQSSRSAVTASAGLAFQNTVNFKFEENYTSQNVLTKSYLSNRTNSRVQSIGGVPFYPGITLQAWQQGITNHLVAIDRSGLPLHFFINPNMLPDLPGPLVKKVSKTVETAVKRYYTFNTYPGCTDLNSPNFNFQANTDDGSCEGKMTNFSFGGVYQECTQLSGNRDVLLCQKLEQKNPLTGDFSCPSGYSPVHLLSQIHEEGYNHLECHRKCTLLVFCKTVCEDVFQVAKAEFRAFWCVASSQVPENSGLLFGGLFSSKSINPMTNAQSCPAGYFPLRLFENLKVCVSQDYELGSRFAVPFGGFFSCTVGNPLVDPAISRDLGAPSLKKCPGGFSQHPALISDGCQVSYCVKSGLFTGGSLPPARLPPFTRPPLMSQAATNTVIVTNSENARSWIKDSQTHQWRLGEPIELRRAMNVIHGDGGGLSGGAAAGVTVGVTTILAVVITLAIYGTRKFKKKAYQAIEERQSLVPGTAATGDTTYQEQGQSPA

SEQ ID NO: 31754 - protein, 164 aa, Artificial Sequence
  derived and/or modified sequence
MNNFRATILFWAAAAWAKSGKPSGEMDEVGVQKCKNALKLPVLEVLPGGGWDNLRNVDMGRVMELTYSNCRTTEDGQYIIPDEIFTIPQKQSNLEMNSEILESWANYQSSTSYSINTELSLFSKVNGKFSTEFQRVPAPCQAPTFHPATPHESGCHQYCHSDQF

SEQ ID NO: 31755 - DNA, 2151 bp, Artificial Sequence
  derived and/or modified sequence
atgaacaacttcagagccaccatcctgttctgggccgccgccgcctgggccaagagcggcaagcccagcggcgagatggacgaggtgggcgtgcagaagtgcaagaacgccctgaagctgcccgtgctggaggtgctgcccggcggcggctgggacaacctgagaaacgtggacatgggcagagtgatggagctgacctacagcaactgcagaaccaccgaggacggccagtacatcatccccgacgagatcttcaccatcccccagaagcagagcaacctggagatgaacagcgagatcctggagagctgggccaactaccagagcagcaccagctacagcatcaacaccgagctgagcctgttcagcaaggtgaacggcaagttcagcaccgagttccagagaatgaagaccctgcaggtgaaggaccaggccatcaccaccagagtgcaggtgagaaacctggtgtacaccgtgaagatcaaccccaccctggagctgagcagcggcttcagaaaggagctgctggacatcagcgacagactggagaacaaccagaccagaatggccacctacctggccgagctgctggtgctgaactacggcacccacgtgaccaccagcgtggacgccggcgccgccctgatccaggaggaccacctgagagccagcttcctgcaggacagccagagcagcagaagcgccgtgaccgccagcgccggcctggccttccagaacaccgtgaacttcaagttcgaggagaactacaccagccagaacgtgctgaccaagagctacctgagcaacagaaccaacagcagagtgcagagcatcggcggcgtgcccttctaccccggcatcaccctgcaggcctggcagcagggcatcaccaaccacctggtggccatcgacagaagcggcctgcccctgcacttcttcatcaaccccaacatgctgcccgacctgcccggccccctggtgaagaaggtgagcaagaccgtggagaccgccgtgaagagatactacaccttcaacacctaccccggctgcaccgacctgaacagccccaacttcaacttccaggccaacaccgacgacggcagctgcgagggcaagatgaccaacttcagcttcggcggcgtgtaccaggagtgcacccagctgagcggcaacagagacgtgctgctgtgccagaagctggagcagaagaaccccctgaccggcgacttcagctgccccagcggctacagccccgtgcacctgctgagccagatccacgaggagggctacaaccacctggagtgccacagaaagtgcaccctgctggtgttctgcaagaccgtgtgcgaggacgtgttccaggtggccaaggccgagttcagagccttctggtgcgtggccagcagccaggtgcccgagaacagcggcctgctgttcggcggcctgttcagcagcaagagcatcaaccccatgaccaacgcccagagctgccccgccggctacttccccctgagactgttcgagaacctgaaggtgtgcgtgagccaggactacgagctgggcagcagattcgccgtgcccttcggcggcttcttcagctgcaccgtgggcaaccccctggtggaccccgccatcagcagagacctgggcgcccccagcctgaagaagtgccccggcggcttcagccagcaccccgccctgatcagcgacggctgccaggtgagctactgcgtgaagagcggcctgttcaccggcggcagcctgccccccgccagactgccccccttcaccagaccccccctgatgagccaggccgccaccaacaccgtgatcgtgaccaacagcgagaacgccagaagctggatcaaggacagccagacccaccagtggagactgggcgagcccatcgagctgagaagagccatgaacgtgatccacggcgacggcggcggcctgagcggcggcgccgccgccggcgtgaccgtgggcgtgaccaccatcctggccgtggtgatcaccctggccatctacggcaccagaaagttcaagaagaaggcctaccaggccatcgaggagagacagagcctggtgcccggcaccgccgccaccggcgacaccacctaccaggagcagggccagagccccgcctag

SEQ ID NO: 31756 - DNA, 495 bp, Artificial Sequence
  derived and/or modified sequence
atgaacaacttcagagccaccatcctgttctgggccgccgccgcctgggccaagagcggcaagcccagcggcgagatggacgaggtgggcgtgcagaagtgcaagaacgccctgaagctgcccgtgctggaggtgctgcccggcggcggctgggacaacctgagaaacgtggacatgggcagagtgatggagctgacctacagcaactgcagaaccaccgaggacggccagtacatcatccccgacgagatcttcaccatcccccagaagcagagcaacctggagatgaacagcgagatcctggagagctgggccaactaccagagcagcaccagctacagcatcaacaccgagctgagcctgttcagcaaggtgaacggcaagttcagcaccgagttccagagagtgcccgccccctgccaggcccccaccttccaccccgccaccccccacgagagcggctgccaccagtactgccacagcgaccagttctag

SEQ ID NO: 31757 - DNA, 2151 bp, Artificial Sequence
  derived and/or modified sequence
atgaacaatttcagggctacaattttgttctgggccgccgccgcctgggctaagagcggaaagccaagcggagaaatggatgaggttggtgtccagaaatgcaaaaatgcactcaagctgcctgtccttgaggtgctgccagggggcggatgggacaatttgcggaacgtggacatgggaagggtaatggagctaacatattcaaactgccgcactactgaggacggccagtatattattccagatgagatctttactattccccagaagcaaagtaacctggaaatgaatagcgagattctagagagttgggctaactaccagagtagcacgagctatagcatcaatacagagctgtcactcttttccaaagtcaatgggaagttttcgactgaattccagcggatgaagactttgcaagttaaggatcaagctattaccacaagagtccaggtgcgtaacttggtctacacagtgaagataaatcctacactcgaactgagcagtggtttccgtaaagaactcctggatattagtgataggttggagaacaatcagacacggatggcaacttacctggccgagctgctggtcctgaactatgggactcacgtgacaacctcagtggatgcaggggcagctctgatccaagaggatcatctgcgggcatccttcctccaagatagtcagtcctcaagaagtgccgtgactgcttcagccggactggcctttcagaatacagtaaattttaagttcgaggaaaattatacctctcaaaacgtgctaactaaatcttacctgtctaacagaactaattctcgagtccagagcatcggcggggtgcccttctaccccggcattaccctgcaagcctggcagcagggaattacgaatcacctcgtggccattgacaggtctggactgccactgcatttcttcatcaatcccaatatgttacccgacttgccaggacctctcgttaagaaggtctctaagactgtggagacagctgtgaaaagatactacacctttaacacctacccaggttgcactgacttaaattcccctaattttaactttcaagcaaataccgacgacggatcctgcgaaggtaagatgactaatttttcctttggaggcgtttaccaggagtgtacccagctgtctggaaacagagacgtgctcttgtgtcagaaactggagcagaaaaacccactcacgggtgatttctcgtgtccttctggctatagtcccgtgcatcttttaagtcagatccacgaggaaggatataaccatctagaatgtcacaggaagtgtactcttttggtattttgtaagaccgtgtgcgaggatgtgtttcaggtagctaaggccgagttccgggccttctggtgtgtggcctccagccaagtgcccgagaatagcggacttctgtttggcggccttttctcttccaagtccatcaaccctatgactaatgcccagagctgccctgctgggtacttccccttacgcttgtttgagaacctcaaggtttgcgtaagccaggactacgagcttggctctaggtttgctgtgccgtttggtgggttcttttcatgcaccgtggggaaccctctggtcgatccagcaatctctcgagacctaggcgctcctagtctaaagaagtgcccaggcgggtttagtcaacacccagctttaatatccgacggttgtcaggtcagctattgtgtcaaaagcgggctgtttacaggaggaagcctcccacctgcccggcttccgccatttacccggcctcccttaatgtctcaagcagccaccaacactgtcatagtgaccaactccgaaaatgcacggtcgtggattaaggactctcagacacaccagtggagactcggagaaccaattgaactaaggagggccatgaacgtgattcacggggacggaggcggactcagtgggggcgcagccgcaggcgtgactgtgggggtgactacaatcctggcagttgtgatcactctagctatctacggcacaaggaaattcaaaaagaaggcctatcaggccatcgaggaaaggcagagtctggtgcctggcacagcagccaccggcgacacaacataccaggagcagggtcaatcccccgcttag

SEQ ID NO: 31758 - DNA, 495 bp, Artificial Sequence
  derived and/or modified sequence
atgaacaatttccgcgcgacaattctgttttgggccgcggcggcctgggcgaagagcgggaaaccatccggagagatggacgaggtaggcgtgcagaagtgcaagaacgccctgaaactcccagtcctggaggtgctccccggtgggggctgggacaatcttcgcaatgtggatatgggacgcgttatggagctgacttactctaattgccgcacgaccgaggatgggcagtatattattcctgacgagattttcaccattcctcaaaagcagagtaatctcgaaatgaattctgagatcctggaatcctgggccaactaccagtcctccacaagctatagcatcaacacagagctttcattgttctccaaagtcaacggaaagttttccaccgagtttcagagggtgcctgccccttgtcaggctcccacatttcatccagctacccctcacgagagcggctgccaccagtattgccactcggaccagttctag

SEQ ID NO: 31759 - DNA, 4442 bp, Artificial Sequence
  derived and/or modified sequence
atctgcttctgttttctccatcttagtttgcccaaagcttgctggccgctgtgtagggctggtgagtggctggggctgtctgagccatgaacaacttcagggccaccatcctcttctgggcagcggcagcatgggctaaatcaggcaagccttcgggagagatggacgaagttggagttcaaaaatgcaagaatgccttgaaactacctgtcctggaagtcctacctggagggggctgggacaatctgcggaatgtggacatgggacgagttatggaattgacttactccaactgcaggacaacagaggatggacagtatatcatccctgatgaaatcttcaccattccccagaaacagagcaacctggagatgaactcagaaatcctggaatcctgggcaaattaccagagtagcacctcctactccatcaacacagaactctctcttttttccaaagtcaatggcaagttttccactgagttccagaggatgaagaccctccaagtgaaggaccaagctataactacccgagttcaggtaagaaacctcgtctacacagtcaaaatcaacccaactttagagctaagctcaggttttaggaaggaactccttgacatctctgaccgtctagagaacaaccagacgaggatggccacctacctggcagaactcctggtgctcaactatggcacccacgtcaccaccagtgtcgacgctggggctgctcttattcaggaggaccacctcagggcctccttcctccaagacagccagagcagtcgtagtgccgtgaccgcctctgctggacttgcctttcaaaacaccgtgaacttcaaatttgaggaaaactatacctcgcagaatgtcctcaccaagagctacctctcaaaccgaaccaactccagggtgcagagcattggaggggttcctttttacccaggcatcaccctccaggcctggcagcagggtatcaccaaccacctggtggccatcgaccgctctggcctgccgctgcatttcttcatcaaccccaacatgctacctgacttgccaggccccctggtgaagaaggtgtcaaagacagtggaaactgctgtgaagcgctattatacattcaacacctaccctggctgcacagatctcaattctcccaacttcaattttcaggccaacacggatgatggctcctgcgaggggaaaatgaccaacttctctttcggtggggtttatcaggaatgcactcagctctcagggaatagggatgtcctcctctgccaaaagttggagcagaagaatccactcactggtgatttctcctgcccctctggctactccccggtgcacctgttatcccagatccacgaggagggttacaaccacctggagtgtcatcgaaagtgcactctcctcgtcttctgcaagaccgtgtgtgaagatgtgttccaggtggcaaaagctgaatttagggctttttggtgtgtggccagcagccaagtacctgaaaactcaggactgctttttgggggcctcttcagcagcaagagcataaaccccatgacaaatgcacagtcatgcccagccggctactttccactgagactctttgaaaacctcaaggtatgtgtttctcaggactatgagttgggaagcaggtttgcggtcccctttggcgggttctttagctgcacagttgggaaccccctggtagatcctgctatatccagagatttaggggcaccgtctctgaaaaagtgccccgggggcttcagccagcacccagccctcatcagcgatggatgccaagtgtcctattgcgtcaaatccgggctcttcacaggagggtccctgccccctgccaggctcccacctttcacccggccacccctcatgagtcaggctgccaccaatactgtcatagtgaccaattctgagaatgcgagatcctggattaaagactcccagacccaccagtggaggctgggagaaccgatagagctgcggagggccatgaatgtcatccatggggatggtggtggtctgtcaggaggggctgcagctggggtcacagtgggggtcaccaccattctggctgttgttatcaccttggccatctacggcacccggaagttcaagaagaaagcatatcaggcaattgaggaaaggcagagtttggttccaggcactgcagcaactggagacaccacttaccaagagcaggggcagagtccagcttaaatctctccccgaaaatggtttctctcatctccagtgtggtcattgctgaccactctgttttcctaagcattgaaatggcaagtgcaaccaaaagtaggtatattcgtgacttcttgtttaggtctctgggccaggaaattcatactgttacatggataaggttgggattggggagagggaacagttgggactagaagcaaaagtgattctgggactaaaataggaagcagatgtcctttcccaatgtgtgttgctgtcttcacctgaatgcatttgtgtaaaaatagcggagggacaatgtgaacatttgtatttggaagctatgaatttactctgaagtttgcagttgtttccaatttgtgagctctaagagtttctgcctgtaagaactactctccttttattttgatttttaaaaacctgtctgaatttcacactcttagagcctggaagagccctgaaaagacacaagtcttgcctggctactgctttttaactttgagggctctatgttgacagactgttatctcctctgggtgacctcaaacatctgaaaagaaagatgttgcctgtgccaattccactttttccagctgccccttgatgaacactcccttataccagaccactcttggacttctgactggtgtcatcaagtcctcagaaaatattttaagttattttaagttattaaggaagggatgatttggagacaaggagtaatgaaagatgggtaaaaactggaaaagattctggtgctaagtactaccccttcatcttccatggatggtcattacctttcctgtcctcctgttatatgaacacacacacacacacacacacacacacacacacacacgcacacacataccacatttcaataagtcttcattgttctgggtccttacctttcctgtcctcctgttatatgaacacacacacacacacacacacacacacacacgcacaccacatttcaatgtctgcatggttctgggggtaacaaaggcaagaagttaaagtaagaccacatttgagtattacttactctgtagaatcaaaacagagtagttaacaccaattatgcaaactacttttttttccagcagaaagggagctgacatgatcaaatccatgttttcaaatgaactgaaaaaggcatccagcaccacttataacacatttatttcagttccaggctgacagccctggggcatctagcaggatgcataattgtcatctggtgagagttgggactttgctcaattttaataccaatctctcctgattgtaattacctccactactttcatgatccccctacaatatttttttaaatgatatatttattcactgaatcaaatgtcattaatgagttatcttctgtggaggatgactgttctctttgttaatgttcacaatcaagatcttgggctgagaagaggcccttcacccaaggagtttgaagtatcacagtgtgtgggaaggtgggaaccaggatacccattcatttccaaccgagacacagagaagtgagtcacagaatttgagcccgctctcttgactgcccagccagagacactgatttctgtaacctcttcacttgatcctgcctcttaagcattaaaacattctcctaaacctctgagtgttttgtgggttctgggtgttttgtacattttagccaagctaaccacttgtctgcaagtactgactttcctatgaattctttgaagattattgagtcagaaaggaaaaatatagccccaaattcccaggcttttaatgcattacattaactgcctattgaaatgagaagttcttcacaaacttgtatacccactaacaagattgcacataaacatgcattaaagtatatactaagaaaccctctgtccaacggctcatgcatatgaagtccgaacatgggagtttgccaattgcattcatcaagtcgttttgcggagtcagatccctgatggaagagctcacaggctctgccttccaagtcctgggttcctaactggtgaccttagcctggggtctgtggggagaccaaccctggcttccaagaaaaccacattccatggactatcagaaatagacacagatttgggtgacaaagctggctctgtatttgcattttatttttgtgttcttgtcagtttgggaatgattaatattaaacatttatttgagaaacaa

SEQ ID NO: 31760 - DNA, 1009 bp, Artificial Sequence
  derived and/or modified sequence
agagaactcatgagttttccgcttcatcatctgcttctgttttctccatcttagtttgcccaaagcttgctggccgctgtgtagggctggtgagtggctggggctgtctgagccatgaacaacttcagggccaccatcctcttctgggcagcggcagcatgggctaaatcaggcaagccttcgggagagatggacgaagttggagttcaaaaatgcaagaatgccttgaaactacctgtcctggaagtcctacctggagggggctgggacaatctgcggaatgtggacatgggacgagttatggaattgacttactccaactgcaggacaacagaggatggacagtatatcatccctgatgaaatcttcaccattccccagaaacagagcaacctggagatgaactcagaaatcctggaatcctgggcaaattaccagagtagcacctcctactccatcaacacagaactctctcttttttccaaagtcaatggcaagttttccactgagttccagagggtccctgccccctgccaggctcccacctttcacccggccacccctcatgagtcaggctgccaccaatactgtcatagtgaccaattctgagaatgcgagatcctggattaaagactcccagacccaccagtggaggctgggagaaccgatagagctgcggagggccatgaatgtcatccatggggatggtggtggtctgtcaggaggggctgcagctggggtcacagtgggggtcaccaccattctggctgttgttatcaccttggccatctacggcacccggaagttcaagaagaaagcatatcaggcaattgaggaaaggcagagtttggttccaggcactgcagcaactggagacaccacttaccaagagcaggggcagagtccagcttaaatctctccccgaaaatggtttctctcatctccagtgtggtcattgctgaccactctgttttcctaagcattgaaatggcaagtgcaaccaaaagta

SEQ ID NO: 31761 - DNA, 2151 bp, Artificial Sequence
  derived and/or modified sequence
atgaacaacttccgggccaccatcctcttctgggccgccgccgcctgggccaagagcggcaagcccagcggggagatggatgaggtgggcgtgcagaagtgcaagaatgccctgaagctgcctgtgctggaggtgctgcccggcggcggctgggacaacctgagaaatgtggacatgggccgggtgatggagctgacctacagcaactgcaggaccacagaagatggccagtacatcatcccagatgagatcttcaccatcccccagaagcagagcaacctggagatgaacagcgagatcctggagagctgggccaactaccagagcagcaccagctacagcatcaacacagagctgagcctcttcagcaaggtgaatggcaagttcagcacagagttccagaggatgaagaccctgcaggtgaaggaccaggccatcaccaccagggtgcaggtgaggaacctggtgtacacagtgaagatcaaccccaccctggagctgagcagcggcttcaggaaggagctgctggacatcagtgaccggctggagaacaaccagaccaggatggccacctacctggccgagctgctggtgctgaactacggcacccacgtgaccacctctgtggatgctggagctgccctgatccaggaggaccacctgcgggccagcttcctgcaggacagccagagcagccgctctgctgtgacagccagcgctggcctggccttccagaacacagtgaacttcaagtttgaggagaactacaccagccagaatgtgctgaccaagagctacctgagcaacagaaccaacagccgggtgcagagcatcggcggcgtgcccttctacccaggcatcaccctgcaggcctggcagcagggcatcaccaaccacctggtggccatcgacaggagcggcctgcccctgcacttcttcatcaaccccaacatgctgcctgacctgcccggccccctggtgaagaaggtgtccaagacagtggagacagctgtgaagcgctactacaccttcaacacctacccaggctgcacagacctgaacagccccaacttcaacttccaggccaacacagatgatggcagctgtgagggcaagatgaccaacttctcctttggaggagtgtaccaggagtgcacccagctgagcggcaacagagatgtgctgctgtgccagaagctggagcagaagaaccccctgactggagacttcagctgccccagcggctacagccctgtgcacctgctgagccagatccacgaggagggctacaaccacctggagtgccacaggaagtgcaccctgctggtgttctgcaagacagtgtgtgaagatgtgttccaggtggccaaggccgagttccgggccttctggtgtgtggccagcagccaggtgcctgaaaattctggcctgctgtttggaggcctcttcagcagcaagagcatcaaccccatgaccaatgcccagagctgcccagctggctacttccccctgcggctgtttgagaacctgaaggtgtgtgtgtcccaggactatgagctgggcagcagatttgctgtgccctttggaggcttcttcagctgcaccgtgggcaaccccctggtggaccctgccatcagccgggacctgggcgcccccagcctgaagaagtgccctgggggcttcagccagcacccagccctgatcagtgatggctgccaggtgtcctactgtgtgaagagcggcctcttcaccggcggcagcctgcccccagcccggctgccccccttcaccaggcctcccctgatgagccaggccgccaccaacacagtgattgtgaccaacagtgaaaatgcccgctcctggatcaaggacagccagacccaccagtggaggctgggggagcccatcgagctgcggcgggccatgaatgtcatccatggagatggcggcggcctgtctggaggagctgctgctggggtgacagtgggcgtgaccaccatcctggccgtggtgatcaccctggccatctacggcaccaggaagttcaagaagaaggcctaccaggccatcgaggagcggcagagcctggtgcccggcacagctgccactggagacaccacctaccaggagcagggccagagccctgcctag

SEQ ID NO: 31762 - DNA, 495 bp, Artificial Sequence
  derived and/or modified sequence
atgaacaacttccgggccaccatcctcttctgggccgccgccgcctgggccaagagcggcaagcccagcggggagatggatgaggtgggcgtgcagaagtgcaagaatgccctgaagctgcctgtgctggaggtgctgcccggcggcggctgggacaacctgagaaatgtggacatgggccgggtgatggagctgacctacagcaactgcaggaccacagaagatggccagtacatcatcccagatgagatcttcaccatcccccagaagcagagcaacctggagatgaacagcgagatcctggagagctgggccaactaccagagcagcaccagctacagcatcaacacagagctgagcctcttcagcaaggtgaatggcaagttcagcacagagttccagagggtgcctgccccctgccaggcccccaccttccacccagccacccctcatgaaagtggctgccaccagtactgccacagcgaccagttctag

SEQ ID NO: 31763 - DNA, 2151 bp, Artificial Sequence
  derived and/or modified sequence
atgaacaacttccgggccaccatcctgttctgggccgccgccgcctgggccaagagcgggaagccctcgggagagatggatgaggtgggggtgcagaagtgcaagaacgcactaaagttgccagtgctggaggtgctgcctggcggggggtgggataaccttagaaatgttgatatgggtcgagtgatggaactgacctactccaactgccgcactaccgaggacggccagtatataatccctgacgagatcttcacaattccacaaaaacagagcaatctggagatgaactccgagatattggagagttgggcaaactaccagagttcaacctcttactcgattaacaccgaattgagcctcttcagtaaagttaacgggaagttttctacggaattccagcggatgaagaccttacaagtcaaagaccaagccatcaccactcgcgtccaagtccggaatctcgtgtatacagtcaaaatcaatccaactctggaactgagctccggattccgtaaagagctactggacataagcgatagactcgagaacaatcagaccaggatggcaacataccttgcagaactgctcgttttgaactacggcacccacgtaactacaagcgtcgacgccggagccgccttgattcaggaagaccatctgcgcgcttcttttcttcaagactcgcagtcatctcgctccgccgtcacagcaagtgccgggctagcctttcaaaacactgtgaattttaaattcgaggagaattacacctcccaaaatgtactaacaaaatcctatttatcgaaccgtaccaactctagagtccagagcattgggggtgtgccattttatccaggcatcaccttgcaggcgtggcagcaagggattacaaaccatctggttgcaattgaccgtagcggtctcccattacacttttttattaacccaaacatgctgccagacctcccgggaccactagtcaagaaggtatctaagactgttgagactgcagtgaaacggtattacacattcaacacctatccaggctgcacagatttgaactctcccaatttcaatttccaggcaaacaccgatgatgggtcctgcgagggcaaaatgacaaatttctctttcgggggtgtctaccaggagtgcacacaactctctggcaaccgcgatgttttactatgtcaaaaattggaacaaaaaaatcctctgaccggcgacttctcatgtcctagtggatattcgcctgtgcatctccttagtcagatccacgaagaggggtacaatcatctcgagtgccacagaaaatgtactctcttggtgttctgtaaaaccgtgtgtgaggatgttttccaggtggccaaggctgagttcagggccttctggtgtgttgctagctctcaggtgccggagaatagcgggttgctgtttggcggacttttttcttccaagtctatcaatccaatgacgaacgcccaatcttgtcctgctggctattttccactccggctgtttgaaaatctgaaagtatgtgtctctcaggattacgagcttggatctagattcgctgtgccttttggagggttcttctcgtgcacggtgggaaaccccctggtcgacccagccatttcccgcgacctgggcgcccctagtcttaagaagtgccccggcggcttctcccaacaccccgcattgatctccgacgggtgccaggtcagttattgtgtcaaatcggggctgttcacaggcggcagcttaccccctgctagactccctcctttcacgcgaccccccttgatgagtcaggctgcgactaacaccgtgatcgtaactaattccgaaaacgccagaagctggatcaaggactcccagacccatcaatggcgcttgggtgaacctatcgagttgcggagagccatgaatgttatccacggcgacggtggtgggctgtcaggcggtgccgccgccggagtaacggttggagtcacaacaatcctggctgtggtgatcacgttggcgatatacggcacccggaagtttaaaaagaaagcctatcaagccatagaagaaaggcagtcacttgtgcccgggacagcagctacaggcgataccacataccaggaacaggggcagtctccagcgtag

SEQ ID NO: 31764 - DNA, 495 bp, Artificial Sequence
  derived and/or modified sequence
atgaacaacttccgggccaccatcctgttctgggccgccgccgcctgggccaagagcgggaagccaagcggagagatggatgaagtcggcgtgcagaaatgcaaaaatgccttgaagctccccgtgctggaggtcttaccagggggcgggtgggataatcttcggaatgttgacatgggtagagtgatggagctcacctatagcaactgcaggacaaccgaggacggtcagtacatcattcctgatgagatctttactatacctcaaaagcagtcgaacctcgagatgaattccgaaattttggagtcctgggctaattatcagagttcgacctcatattcaattaataccgagctcagcttgttctcaaaagttaatggcaaattctcgactgagttccaacgggttcccgctccttgccaggctcccacgttccaccctgctacccctcacgaatcaggttgccaccagtactgtcactccgatcaattctag

SEQ ID NO: 31765 - DNA, 2151 bp, Artificial Sequence
  derived and/or modified sequence
atgaacaacttccgtgctaccatcctgttttgggcagccgcagcctgggccaagagtggcaaacctagcggagaaatggatgaagttggcgtgcagaaatgtaaaaatgccctgaaactgcctgtgctagaggttttgcctggcggtggatgggataatctgaggaatgtcgacatggggagagtcatggaactgacttactcaaactgccgtacaacagaggacggacagtatatcatccctgacgagatctttacgatcccacaaaagcaatccaacctcgaaatgaattctgagatactggaatcctgggctaattatcagtctagcacatcatattcaattaacacggagcttagcttattcagtaaagtgaatggcaaattctcgaccgaatttcagcgcatgaagacactgcaggtcaaagaccaagctataacaacgcgggttcaagtgcggaacttggtgtatactgttaaaattaatcccacgcttgaactgagcagtggttttcgcaaggagctgctggacatcagtgaccggttagagaacaaccagaccaggatggcaacatatctggccgaacttttagtgctaaactacggtactcacgtgactacctccgtcgatgccggtgcagccttgatccaagaagaccatttgcgggctagctttcttcaagactcacagtccagtcgctctgcagtgaccgctagcgccggattggctttccaaaataccgtgaacttcaagtttgaggagaattacacgtctcagaacgtcctgaccaagtcctacttgtccaatcgtacaaactctagagtgcagagcattggcggagtacccttctatcccggaattacactccaagcgtggcagcaggggatcaccaatcacttggtggccattgaccggagcggcctgcctttgcatttctttataaaccctaatatgcttcctgatcttcctgggcctctggtcaaaaaagtaagtaaaaccgttgaaaccgccgtgaagcgctattatactttcaacacctacccaggctgcacagatctgaactcgcccaattttaattttcaggccaacacggacgacggctcatgtgaagggaaaatgactaatttctcgtttggtggggtctatcaagaatgtacccagctgtcaggtaatagagacgtactactttgtcagaagctagaacagaagaatccattgacaggtgacttcagctgtccctcggggtacagcccagttcacttgctttcccagatccatgaggaaggctacaaccacctggaatgccacaggaagtgtaccttactcgtgttctgtaaaaccgtttgtgaagacgtgtttcaggtggccaaggcagagttccgggctttttggtgtgtggcaagttcccaggttccagagaacagcggactgctatttgggggacttttctcaagtaaatccatcaacccgatgactaacgcacagagttgtcccgcaggatacttcccactacgcctgttcgaaaacctgaaagtctgcgtctctcaagactacgagcttgggtccagatttgcagtgccatttggaggatttttttcgtgcacagtagggaatccgcttgtggacccagccatctcccgcgatctgggagcccctagcctgaaaaaatgtcctggcggattctcacagcatcccgctctaatctctgatggctgtcaagttagttactgcgtgaagtcaggtttgtttacaggcggatccctgcccccagctcgccttcctcccttcaccaggcctccacttatgtcccaggctgcaacgaacaccgtgatagtcactaatagtgaaaatgccagatcctggattaaagattctcagacacatcagtggcgcctgggggaacctatcgagctgcgcagagccatgaacgtgattcacggcgacggagggggactcagtggcggtgcggctgccggtgtcactgtcggggttaccacaatcctggccgtggtgatcacacttgccatctacgggaccagaaagttcaagaagaaggcatatcaggcaatcgaagagcgtcagagcctggttccaggcaccgcggcaacaggggacacgacctaccaggaacaggggcagagccccgcatag

SEQ ID NO: 31766 - DNA, 495 bp, Artificial Sequence
  derived and/or modified sequence
atgaataatttccgggcaacaattctcttctgggccgctgcagcctgggctaagtctggtaaaccgtccggagagatggacgaggtaggcgttcagaaatgcaagaacgctctaaaacttcctgtcctcgaagttctacctggtgggggatgggataatctgcggaatgtagacatgggcagggtgatggagctcacatattcgaactgcagaaccacagaggatggtcagtacatcataccagatgagatctttaccattccccagaaacagagtaatctggagatgaatagcgaaatactcgagtcttgggccaactatcagtcatcgactagctacagcatcaataccgaactctccctcttctcaaaagtcaacggtaagttttcaacagagttccaacgcgtacccgctccctgtcaggccccaacctttcatcctgccacgccccacgaaagcggctgccaccagtattgccactcggatcagttttag

SEQ ID NO: 31767 - protein, 788 aa, Artificial Sequence
  derived and/or modified sequence
MSSARTPLPTLNERDTEQPTLGHLDSKPSSKSNMIRGRNSATSADEQPHIGNYRLLKTIGKGNFAKVKLARHILTGKEVAVKIIDKTQLNSSSLQKLFREVRIMKVLNHPNIVKLFEVIETEKTLYLVMEYASGGEVFDYLVAHGRMKEKEARAKFRQIVSAVQYCHQKFIVHRDLKAENLLLDADMNIKIADFGFSNEFTFGNKLDTFCGSPPYAAPELFQGKKYDGPEVDVWSLGVILYTLVSGSLPFDGQNLKELRERVLRGKYRIPFYMSTDCENLLKKFLILNPSKRGTLEQIMKDRWMNVGHEDDELKPYVEPLPDYKDPRRTELMVSMGYTREEIQDSLVGQRYNEVMATYLLLGYKSSELEGDTITLKPRPSADLTNSSAPSPSHKVQRSVSANPKQRRFSDQAAGPAIPTSNSYSKKTQSNNAENKRPEEDRESGRKASSTAKVPASPLPGLERKKTTPTPSTNSVLSTSTNRSRNSPLLERASLGQASIQNGKDSLTMPGSRASTASASAAVSAARPRQHQKSMSASVHPNKASGLPPTESNCEVPRPSTAPQRVPVASPSAHNISSSGGAPDRTNFPRGVSSRSTFHAGQLRQVRDQQNLPYGVTPASPSGHSQGRRGASGSIFSKFTSKFVRRNLSFRFARRNLNEPESKDRVETLRPHVVGSGGNDKEKEEFREAKPRSLRFTWSMKTTSSMEPNEMMREIRKVLDANSCQSELHEKYMLLCMHGTPGHEDFVQWEMEVCKLPRLSLNGVRFKRISGTSMAFKNIASKIANELKL

SEQ ID NO: 31768 - protein, 780 aa, Artificial Sequence
  derived and/or modified sequence
MSSARTPLPTLNERDTEQPTLGHLDSKPSSKSNMIRGRNSATSADEQPHIGNYRLLKTIGKGNFAKVKLARHILTGKEVAVKIIDKTQLNSSSLQKLFREVRIMKVLNHPNIVKLFEVIETEKTLYLVMEYASGGEVFDYLVAHGRMKEKEARAKFRQIVSAVQYCHQKFIVHRDLKAENLLLDADMNIKIADFGFSNEFTFGNKLDTFCGSPPYAAPELFQGKKYDGPEVDVWSLGVILYTLVSGSLPFDGQNLKELRERVLRGKYRIPFYMSTDCENLLKKFLILNPSKRGTLEQIMKDRWMNVGHEDDELKPYVEPLPDYKDPRRTELMVSMGYTREEIQDSLVGQRYNEVMATYLLLGYKSSELEGDTITLKPRPSADLTNSSAPSPSHKVQRSVSANPKQRRFSDQAGPAIPTSNSYSKKTQSNNAENKRPEEDRESGRKASSTAKVPASPLPGLERKKTTPTPSTNSVLSTSTNRSRNSPLLERASLGQASIQNGKDSLTMPGSRASTASASAAVSAARPRQHQKSMSASVHPNKASGLPPTESNCEVPRPRQVTAPQRVPVASPSAHNISSSGGAPDRTNFPRGVSSRSTFHAGQLRQVRDQQNLPYGVTPASPSGHSQGRRGASGSIFSKFTSKFVRRNLNEPESKDRVETLRPHVVGSGGNDKEKEEFREAKPRSLRFTWSMKTTSSMEPNEMMREIRKVLDANSCQSELHEKYMLLCMHGTPGHEDFVQWEMEVCKLPRLSLNGVRFKRISGTSMAFKNIASKIANELKL

SEQ ID NO: 31769 - DNA, 2340 bp, Artificial Sequence
  derived and/or modified sequence
atgagctctgcacgcactccactgcctaccttgaacgagcgcgacacggagcaaccgacgctggggcatcttgattcaaaaccgagctccaagtctaacatgataagaggtcggaactctgctactagcgcagatgagcaaccccacatcggaaactatcggctcttgaaaacgatcggaaagggaaattttgcgaaagtgaagctggcaaggcacatccttaccgggaaggaagtggccgtgaagatcatcgacaagacacagctcaactcatcatcactacagaaactatttcgcgaggtgcgcatcatgaaagttctgaaccatccgaatattgttaagctctttgaggtaatagagactgagaaaacactctacctggtgatggaatatgcctcggggggcgaagtctttgactatctcgttgcacatggcaggatgaaagagaaagaagcacgcgccaagtttaggcaaattgtcagcgcagttcaatattgtcaccagaagttcatagtgcaccgcgatctcaaagccgagaatcttttgcttgacgccgacatgaacattaagatcgctgatttcgggttctctaacgaatttacattcgggaataaacttgatacgttttgtggctccccgccatatgctgctccagaactgttccaggggaagaagtacgatggacccgaagttgacgtgtggtccctaggggttatcctgtacacattagtctcagggtccctccctttcgacggccagaaccttaaagaactcagggaacgggttttgagaggaaaatatcggatccctttttacatgtcaaccgattgcgagaatctgctgaaaaaattcttaattcttaaccctagcaagcgtggaacacttgagcaaattatgaaggatcgctggatgaatgttggacatgaagatgacgagctgaaaccatatgttgagcccctccccgattacaaggatccacgacggactgagctcatggtctcaatgggttatactcgcgaagagatccaagattccctggtggggcagcgttataatgaagtgatggcgacttacctgcttctgggctacaagtcctctgagctcgagggcgataccattaccctcaagccacgcccttcggctgaccttactaattccagtgccccttctccctcccataaggtccagaggtcggtgtcagctaatcccaagcagcgacgcttcagcgatcaggccgctggcccagctattcctacttccaattcttattctaaaaaaacacagagtaacaatgccgagaataagagacctgaggaagacagagaatccggccgtaaggcttctagcacagctaaagtgcctgctagccccctgccgggactggagcgcaagaagacaaccccaactccgtctaccaactcggtcctctctacctccacaaatcgctcgcgaaactctccattgctggagagggccagtcttggccaggccagcatacagaatggtaaagactccctgactatgccaggctctcgggcgagcacagccagcgccagtgccgctgtgtctgctgcccggcctaggcagcatcagaaatccatgtcggcttccgttcatccaaataaagcctcggggctgccaccaaccgaatctaattgcgaggtgccacgaccgtccactgctccccagagggttccagtagcctcaccaagcgcccataatatttcctcatccgggggggccccagatcgtacaaacttcccaaggggcgtgtcctcacggtctactttccacgccggacagttgcggcaggttcgggatcagcagaacctgccctatggcgtgactccggccagcccatccggccactcacaagggcgccggggagcatcggggtcgattttctcaaagttcaccagcaaattcgtgcgtcgaaacttgaatgagcccgaatccaaagatagggtggagactctccggccccacgtagtgggttctggcggaaacgacaaagaaaaagaagaattcagagaagcaaagccgcggagcctgcggttcacctggtccatgaagactaccagcagtatggaacccaacgagatgatgcgcgaaattaggaaggtgcttgacgcaaatagttgccagagtgaactgcacgagaaatatatgctgttatgcatgcatgggacccctggccacgaagacttcgtccagtgggagatggaagtgtgcaaactcccacgcctctccctgaacggcgtcaggtttaagcggatttcaggcacctctatggcctttaagaatatcgccagtaagatcgctaatgaactgaagctgtag

SEQ ID NO: 31770 - DNA, 2322 bp, Artificial Sequence
  derived and/or modified sequence
atgtcaagcgcaaggacaccactgccaactctgaacgagagagatactgaacagcccactctcggtcacctggactccaaaccatcctctaaaagcaatatgataagaggtcgtaactcggctacatcagccgacgagcagcctcatataggaaactaccgcctactcaagacaataggaaaggggaacttcgcaaaagtcaagctagccaggcatattctgactgggaaggaggtggcggtcaaaataattgacaaaacacagctcaattccagtagtctgcagaagctgttccgagaggtccgtatcatgaaagttctaaatcacccgaatatagtgaagctcttcgaggtgatcgaaactgaaaagacgctgtacttggttatggagtatgcctctggcggggaagtgtttgactaccttgttgctcatggacgaatgaaggagaaggaagctagggcaaagttcagacagatcgtgtccgccgtccagtactgccaccagaagtttatcgtccacagggatttaaaggcagaaaacctgcttctggacgcagatatgaatatcaaaatcgccgattttggattctccaatgagtttacgttcggaaataaactggacaccttctgtggaagtcctccgtatgcagcccctgaactctttcaaggtaagaaatatgacggtcccgaggtcgacgtctggtcacttggtgtgatcctctacacgctggtttcgggttcactccctttcgacggccagaatttaaaggagctgagagagcgagtcctccgaggaaaatatcgtatcccgttttatatgtccacggactgcgagaacttgctgaagaagtttcttatcctcaacccgtcaaaacggggcactctggagcagatcatgaaagataggtggatgaatgtgggccacgaagatgatgagctcaagccatacgtggagccgctccccgactacaaagatcccagacggaccgaactcatggtgtccatgggctataccagagaggaaatacaggactccctcgttgggcagagatacaatgaggtgatggcgacctacctgctcctggggtataagtcctccgagctcgaaggggacacaatcaccctcaaaccaagaccaagtgcagacctgaccaactcgtcagccccgtcgccatcccacaaagtccagcggtctgtgagcgcgaaccccaaacagcggcggtttagcgaccaggccgctggtcctgcaattcccacttctaatagctattccaagaaaacgcagtcgaacaatgcagaaaataagcggccagaagaggaccgagagtctggccgcaaggcctccagcacagcgaaagtacccgcctctcccctgcccggactggagcgtaaaaaaacaacaccgacaccatccactaactctgtgctgagtacctctaccaacaggagccggaattctccgctgctggagcgagccagcctcggacaagcttctatccagaatgggaaagatagtttgactatgccggggagtagagctagcacagcctccgcgtctgctgctgtgtcagctgcacgaccaagacagcatcagaaaagcatgtcagcttcagtccaccctaacaaggccagcgggctgccaccaaccgagtctaattgcgaggtgccgcgccctagtaccgcccctcaaagagtgcctgtggccagtccaagcgctcacaacataagctcatccggaggggcacctgaccgcaccaacttcccaaggggtgtttcaagtcgcagtacctttcacgcgggtcagctcagacaggtgcgcgaccaacaaaatctcccttacggggttacgcccgctagtccttctggacatagccagggccgtcgaggcgcctccgggtcaatttttagtaaattcactagcaaattcgttcgacgaaaccttagctttcggttcgctcggagacctcacgtggtggggagcgggggaaacgataaggaaaaagaggagtttcgcgaggcaaagcctcggtccctgcgttttacttggtccatgaagacgacctcgtcaatggaacccaacgagatgatgcgcgaaatccggaaggtactggacgctaatagctgtcagagcgaactccatgaaaaatatatgctcctatgcatgcacggcacccccgggcacgaagatttcgtgcaatgggagatggaggtctgcaagttgcctaggctgagtctgaacggagtgagattcaaaaggatctcggggacttctatggccttcaagaacatcgcgagtaaaattgctaacgagctgaaactttag

SEQ ID NO: 31771 - DNA, 2367 bp, Artificial Sequence
  derived and/or modified sequence
atgagttcggcccggacaccactgcctacgttaaatgagcgcgataccgagcagcctactctgggacatctcgactccaagccaagcagtaaatccaatatgatccgcggcaggaactccgcaaccagcgcagacgagcagccacatataggcaattaccggctgttaaaaaccattggcaagggaaactttgcaaaggtgaaattggcccgccatatcctgaccgggaaggaagtagccgtgaagatcatagataagactcaactgaacagttcctcccttcagaagctttttcgggaggtgcgcattatgaaggttctgaatcatcctaacattgtgaagttgttcgaggtcatcgagaccgagaagacactgtatctcgtcatggagtacgcttcaggaggtgaggtgtttgactatttagtggctcacgggagaatgaaggagaaagaggcacgagctaagtttaggcagatagtctctgctgtgcagtattgtcatcagaaatttatcgtccatcgtgatcttaaagctgaaaacttgctcctggacgctgacatgaacatcaagatagctgattttggcttttccaatgagttcacctttggaaataaactggacacattctgcggctctcctccctatgcagcacccgaactttttcaaggcaagaaatatgacggacctgaagtcgacgtgtggtctctgggggtcatactctacaccctagtgtcggggagtctgccatttgatgggcagaacctaaaggagctcagggaacgcgtactaagaggaaagtaccgcattccattctacatgtctaccgattgtgagaaccttctcaagaaatttctaattctcaatccttctaagagaggcacactggaacagataatgaaggaccggtggatgaacgtgggacacgaagatgacgagctgaaaccttacgttgagcctctgccagactataaggacccacgccggacagagctgatggtttctatgggctacacaagagaggagatacaggatagcctggttggccagagatacaatgaggtaatggcaacttacctgcttctaggctacaagtcctcagaattagaaggcgatacgattacactaaaaccacggccttctgccgacctgactaatagttctgccccatcgccttcccacaaagtacagagatccgtaagtgctaatccaaagcaaagacgattttctgatcaggccgctggaccggctatccctacatccaactcttactcaaaaaagacccagtccaacaacgccgagaataagcggcctgaggaggaccgcgagagtggacggaaagcttcatcaactgctaaagtcccggcgagtcctttacctggtctggaacgcaagaagaccacacctactcccagcactaacagtgtcctctcaacgagcaccaatcggagccggaacagccccctcttggagcgggcctcattaggccaggccagcattcaaaatgggaaggattccttgaccatgccaggaagccgcgcatctacagcctccgcaagtgccgcagtgagcgctgcgaggccgcgccagcatcagaaatccatgtcagctagtgtgcatccaaacaaagcatctggcctgccccctacagaatccaactgtgaggtgcctcggcctagcactgctcctcagagagtgccagtcgcttcacccagtgcacacaacatcagctcatccggcggcgcacccgatagaacaaactttcctagaggggtgtcgtcacgtagcactttccatgccgggcagctacgccaggtgagagaccagcaaaacctgccatatggggtcaccccagcctccccctctggccatagtcaaggacggcggggagccagtggttctatattctctaagttcacatccaaatttgtacggcgcaacctatcattcagattcgctcgcagaaatctcaatgaacctgaatccaaggaccgtgtggaaactctcaggccccatgtggttggaagtggtggtaacgataaggagaaggaggagttccgcgaagctaaacctcgctcactgcgtttcacatggtctatgaaaaccacgtcatctatggagccaaatgagatgatgagggagatccgcaaagtgctcgacgccaattcctgccagtccgaattacacgagaaatacatgctcctatgcatgcacggtaccccggggcacgaggacttcgtgcagtgggagatggaggtatgtaagctgcctaggctctccctcaatggggtaaggtttaagcggatctcggggacatctatggccttcaaaaacatcgccagtaagatcgcaaacgagctgaaattgtag

SEQ ID NO: 31772 - DNA, 2343 bp, Artificial Sequence
  derived and/or modified sequence
atgtcttctgcgagaaccccactgccgacactaaatgagagggataccgagcagcccacattgggacacctcgactctaaaccctcaagtaaatctaatatgattcgaggtaggaatagtgctactagtgccgatgaacagcctcacataggaaattatcgtcttctgaaaacgatcggcaagggcaactttgccaaggtcaaacttgcaagacacatcctgaccggcaaggaagtcgccgtgaaaatcatagataagacccagctcaacagtagttctttacagaagttgttcagggaagtgaggattatgaaggtgctgaatcaccccaatatcgtgaagctcttcgaggtcatcgagactgaaaagactttgtacttagttatggagtacgcctctgggggcgaggtttttgattacctggtggctcatgggcgaatgaaggaaaaagaagccagagcaaaattcagacagatcgtgtctgccgtgcagtattgccaccagaagtttattgtgcaccgcgatttgaaggccgaaaacctgcttctggacgccgacatgaacattaaaattgcagattttggctttagcaatgaatttacctttggaaataagctcgatactttctgcggttctcctccctacgcggcgccggaactgttccagggtaaaaaatatgatggtccggaagtggatgtgtggagtcttggagtgattctgtataccctggtatccgggtctctgcctttcgacggacaaaacctgaaggaactgcgggagagagtgctccggggtaaataccgcattcccttttacatgagcacggactgtgaaaatctgctgaagaaatttctgatattaaacccttctaaacgcggcacactggaacagataatgaaagacaggtggatgaacgtgggacacgaagatgatgagctgaaaccctacgtggagcctttgccagattacaaagatcctcgccgtaccgagcttatggtgtcaatgggttatacacgagaggagatccaagatagtctggttggccagagatacaatgaagtgatggcaacatatcttctgttaggctacaagtcaagcgaactcgagggagacacaattactctcaagcctcgaccatcagctgacctaacaaattcttccgccccaagcccaagccataaggtgcagaggtccgtgtcggccaacccaaagcagaggaggtttagcgatcaggcagggccagcgatacccacaagtaactcttattccaagaagacgcagtccaacaacgcagagaacaagcgtcccgaggaagatcgcgaatccggccgaaaagccagtagtacagctaaagttcctgcttctcctcttccaggactcgagcgcaaaaaaactacaccaacaccctctaccaactccgttctatcaacctccacaaatcgctccaggaactcgcccctgctcgagagggcaagcctgggacaggcatccatccagaacggcaaggattccctgaccatgcctgggtctagagcctcaactgccagcgcatctgccgcagtcagcgctgcgagaccccgccagcaccagaagtccatgtctgcttccgtgcatccgaacaaagcttcgggcctgccgccgacagagtccaactgcgaagtgcccagaccccgccaggtcaccgctccacagagagtaccagtggcctctccatcggctcataacatttcttcctccggaggcgctcctgacaggaccaacttcccccgcggagtcagtagccgatcaacgtttcacgccggacagctccggcaggttcgtgaccaacagaacctgccgtacggggtgacacccgcaagcccatcaggccacagtcaaggcagaaggggcgccagcggttctatcttcagcaaatttacttcgaaatttgtgcgccgtaatctgaacgaaccggagagcaaagatcgagttgaaaccctccgacctcacgtcgtgggatccggtggaaatgacaaagaaaaggaagaattcagggaggcaaaaccccgctctctgaggtttacatggtctatgaagactactagtagcatggaaccaaatgaaatgatgcgtgagatcaggaaggtgctggatgccaatagctgccagtctgagttacacgaaaagtacatgctgttatgcatgcacgggacaccggggcacgaggatttcgtgcaatgggaaatggaagtgtgcaaattgcccagactgtcactgaatggggtgagattcaaaagaattagcggcacctcaatggcattcaagaacattgcgtctaagattgctaatgagctgaaactgtag

SEQ ID NO: 31773 - DNA, 126 bp, Artificial Sequence
  derived and/or modified sequence
atgagctcagcgcggacaccgctgccaacattgaacgagcgcgatacggagcagcccactctgggacatcttgattctaagccgtcaagcaaaagcaacatgataagaggccgcaactccgcctag

SEQ ID NO: 31774 - DNA, 2340 bp, Artificial Sequence
  derived and/or modified sequence
atgagcagcgcccggacccccctgcccaccctgaatgaaagagacacagagcagcccaccctgggccacctggacagcaagcccagcagcaagagcaacatgatccggggcaggaacagcgccaccagcgcagatgagcagccccacatcggcaactaccgcctgctgaagaccatcggcaaaggaaactttgccaaggtgaagctggcccggcacatcctgaccgggaaggaggtggccgtgaagatcatcgacaagacccagctgaacagcagcagcctgcagaagctgttccgggaggtgcgcatcatgaaggtgctgaaccaccccaacatcgtgaagctgtttgaggtgattgaaacagagaagaccctgtacctggtgatggagtatgccagcggcggggaggtgtttgactacctggtggcccacggccgcatgaaggagaaggaggcccgggccaagttccggcagatcgtgtctgctgtgcagtactgccaccagaagttcatcgtgcaccgggacctgaaggccgagaacctgctgctggatgctgacatgaacatcaagattgctgactttggcttcagcaatgagttcaccttcggcaacaagctggacaccttctgtggcagccccccctatgctgcccctgagctgttccagggcaagaagtatgatggccctgaggtggatgtgtggagcctgggcgtcatcctgtacaccctggtgtctggcagcctgccctttgatggccagaacctgaaggagctgcgggagcgggtgctgcggggcaagtaccgcatccccttctacatgagcacagactgtgagaacctgctgaagaagttcctgatcctgaaccccagcaagaggggcaccctggagcagatcatgaaggaccgctggatgaatgtgggccatgaagatgatgagctgaagccctacgtggagcccctgcctgactacaaggaccccaggagaacagagctgatggtgtccatgggctacacccgggaggagatccaggacagcctggtgggccagcgctacaatgaggtgatggccacctacctgctgctgggctacaagagcagcgagctggagggggacaccatcaccctgaagccccggcccagcgctgacctgaccaacagcagcgcccccagccccagccacaaggtgcagaggtctgtgtctgccaaccccaagcagaggcgcttcagtgaccaggccgccggccctgccatccccaccagcaacagctacagcaagaagacccagagcaacaatgctgagaacaagaggccagaagaagatcgggagagcggcaggaaggccagcagcacagccaaggtgcctgccagccccctgcccggcctggagaggaagaagaccacccccacccccagcaccaacagcgtgctgagcaccagcaccaacagaagcaggaacagccccctgctggagcgggccagcctgggccaggccagcatccagaatggcaaggacagcctgaccatgcctggcagccgggccagcacagccagcgccagcgctgctgtgtctgctgcccggccccggcagcaccagaagtccatgtctgcctctgtgcaccccaacaaggccagcggcctgcccccaacagagagcaactgtgaggtgccccggcccagcacagccccccagagggtgcctgtggccagccccagcgcccacaacatcagcagcagcggcggggccccagacaggaccaacttcccccggggcgtgagcagccgcagcaccttccacgccggccagctgcggcaggtgcgggaccagcagaacctgccctatggagtgaccccagccagccccagcggccacagccagggcagaagaggagccagcggcagcatcttcagcaagttcaccagcaagtttgtgagaagaaacctgaatgaacctgagagcaaggacagagtggagaccctgcggccccacgtggtgggcagcggcggcaatgacaaggagaaggaggagttccgggaggccaagcccaggagcctgcgcttcacctggagcatgaagaccaccagctccatggagcccaatgagatgatgagggagatcaggaaggtgctggatgccaacagctgccagagcgagctgcacgagaagtacatgctgctgtgcatgcacggcaccccaggccacgaggactttgtgcagtgggagatggaggtgtgcaagctgccccggctgagcctgaatggagtgcgcttcaagaggatcagcggcacctccatggccttcaagaacatcgccagcaagatcgccaatgagctgaagctgtag

SEQ ID NO: 31775 - DNA, 2322 bp, Artificial Sequence
  derived and/or modified sequence
atgagcagcgcccggacccccctgcccaccctgaatgaaagagacacagagcagcccaccctgggccacctggacagcaagcccagcagcaagagcaacatgatccggggcaggaacagcgccaccagcgcagatgagcagccccacatcggcaactaccgcctgctgaagaccatcggcaaaggaaactttgccaaggtgaagctggcccggcacatcctgaccgggaaggaggtggccgtgaagatcatcgacaagacccagctgaacagcagcagcctgcagaagctgttccgggaggtgcgcatcatgaaggtgctgaaccaccccaacatcgtgaagctgtttgaggtgattgaaacagagaagaccctgtacctggtgatggagtatgccagcggcggggaggtgtttgactacctggtggcccacggccgcatgaaggagaaggaggcccgggccaagttccggcagatcgtgtctgctgtgcagtactgccaccagaagttcatcgtgcaccgggacctgaaggccgagaacctgctgctggatgctgacatgaacatcaagattgctgactttggcttcagcaatgagttcaccttcggcaacaagctggacaccttctgtggcagccccccctatgctgcccctgagctgttccagggcaagaagtatgatggccctgaggtggatgtgtggagcctgggcgtcatcctgtacaccctggtgtctggcagcctgccctttgatggccagaacctgaaggagctgcgggagcgggtgctgcggggcaagtaccgcatccccttctacatgagcacagactgtgagaacctgctgaagaagttcctgatcctgaaccccagcaagaggggcaccctggagcagatcatgaaggaccgctggatgaatgtgggccatgaagatgatgagctgaagccctacgtggagcccctgcctgactacaaggaccccaggagaacagagctgatggtgtccatgggctacacccgggaggagatccaggacagcctggtgggccagcgctacaatgaggtgatggccacctacctgctgctgggctacaagagcagcgagctggagggggacaccatcaccctgaagccccggcccagcgctgacctgaccaacagcagcgcccccagccccagccacaaggtgcagaggtctgtgtctgccaaccccaagcagaggcgcttcagtgaccaggccgccggccctgccatccccaccagcaacagctacagcaagaagacccagagcaacaatgctgagaacaagaggccagaagaagatcgggagagcggcaggaaggccagcagcacagccaaggtgcctgccagccccctgcccggcctggagaggaagaagaccacccccacccccagcaccaacagcgtgctgagcaccagcaccaacagaagcaggaacagccccctgctggagcgggccagcctgggccaggccagcatccagaatggcaaggacagcctgaccatgcctggcagccgggccagcacagccagcgccagcgctgctgtgtctgctgcccggccccggcagcaccagaagtccatgtctgcctctgtgcaccccaacaaggccagcggcctgcccccaacagagagcaactgtgaggtgccccggcccagcacagccccccagagggtgcctgtggccagccccagcgcccacaacatcagcagcagcggcggggccccagacaggaccaacttcccccggggcgtgagcagccgcagcaccttccacgccggccagctgcggcaggtgcgggaccagcagaacctgccctatggagtgaccccagccagccccagcggccacagccagggcagaagaggagccagcggcagcatcttcagcaagttcaccagcaagtttgtgagaagaaacctgtccttccgctttgcccggcggccccacgtggtgggcagcggcggcaatgacaaggagaaggaggagttccgggaggccaagcccaggagcctgcgcttcacctggagcatgaagaccaccagctccatggagcccaatgagatgatgagggagatcaggaaggtgctggatgccaacagctgccagagcgagctgcacgagaagtacatgctgctgtgcatgcacggcaccccaggccacgaggactttgtgcagtgggagatggaggtgtgcaagctgccccggctgagcctgaatggagtgcgcttcaagaggatcagcggcacctccatggccttcaagaacatcgccagcaagatcgccaatgagctgaagctgtag

SEQ ID NO: 31776 - DNA, 2367 bp, Artificial Sequence
  derived and/or modified sequence
atgagcagcgcccggacccccctgcccaccctgaatgaaagagacacagagcagcccaccctgggccacctggacagcaagcccagcagcaagagcaacatgatccggggcaggaacagcgccaccagcgcagatgagcagccccacatcggcaactaccgcctgctgaagaccatcggcaaaggaaactttgccaaggtgaagctggcccggcacatcctgaccgggaaggaggtggccgtgaagatcatcgacaagacccagctgaacagcagcagcctgcagaagctgttccgggaggtgcgcatcatgaaggtgctgaaccaccccaacatcgtgaagctgtttgaggtgattgaaacagagaagaccctgtacctggtgatggagtatgccagcggcggggaggtgtttgactacctggtggcccacggccgcatgaaggagaaggaggcccgggccaagttccggcagatcgtgtctgctgtgcagtactgccaccagaagttcatcgtgcaccgggacctgaaggccgagaacctgctgctggatgctgacatgaacatcaagattgctgactttggcttcagcaatgagttcaccttcggcaacaagctggacaccttctgtggcagccccccctatgctgcccctgagctgttccagggcaagaagtatgatggccctgaggtggatgtgtggagcctgggcgtcatcctgtacaccctggtgtctggcagcctgccctttgatggccagaacctgaaggagctgcgggagcgggtgctgcggggcaagtaccgcatccccttctacatgagcacagactgtgagaacctgctgaagaagttcctgatcctgaaccccagcaagaggggcaccctggagcagatcatgaaggaccgctggatgaatgtgggccatgaagatgatgagctgaagccctacgtggagcccctgcctgactacaaggaccccaggagaacagagctgatggtgtccatgggctacacccgggaggagatccaggacagcctggtgggccagcgctacaatgaggtgatggccacctacctgctgctgggctacaagagcagcgagctggagggggacaccatcaccctgaagccccggcccagcgctgacctgaccaacagcagcgcccccagccccagccacaaggtgcagaggtctgtgtctgccaaccccaagcagaggcgcttcagtgaccaggccgccggccctgccatccccaccagcaacagctacagcaagaagacccagagcaacaatgctgagaacaagaggccagaagaagatcgggagagcggcaggaaggccagcagcacagccaaggtgcctgccagccccctgcccggcctggagaggaagaagaccacccccacccccagcaccaacagcgtgctgagcaccagcaccaacagaagcaggaacagccccctgctggagcgggccagcctgggccaggccagcatccagaatggcaaggacagcctgaccatgcctggcagccgggccagcacagccagcgccagcgctgctgtgtctgctgcccggccccggcagcaccagaagtccatgtctgcctctgtgcaccccaacaaggccagcggcctgcccccaacagagagcaactgtgaggtgccccggcccagcacagccccccagagggtgcctgtggccagccccagcgcccacaacatcagcagcagcggcggggccccagacaggaccaacttcccccggggcgtgagcagccgcagcaccttccacgccggccagctgcggcaggtgcgggaccagcagaacctgccctatggagtgaccccagccagccccagcggccacagccagggcagaagaggagccagcggcagcatcttcagcaagttcaccagcaagtttgtgagaagaaacctgtccttccgctttgcccggaggaacctgaatgaacctgagagcaaggacagagtggagaccctgcggccccacgtggtgggcagcggcggcaatgacaaggagaaggaggagttccgggaggccaagcccaggagcctgcgcttcacctggagcatgaagaccaccagctccatggagcccaatgagatgatgagggagatcaggaaggtgctggatgccaacagctgccagagcgagctgcacgagaagtacatgctgctgtgcatgcacggcaccccaggccatgaagattttgtgcagtgggagatggaggtgtgcaagctgccccggctgagcctgaatggagtgcgcttcaagaggatcagcggcacctccatggccttcaagaacatcgccagcaagatcgccaatgagctgaagctgtag

SEQ ID NO: 31777 - DNA, 2343 bp, Artificial Sequence
  derived and/or modified sequence
atgagcagcgcccggacccccctgcccaccctgaatgaaagagacacagagcagcccaccctgggccacctggacagcaagcccagcagcaagagcaacatgatccggggcaggaacagcgccaccagcgcagatgagcagccccacatcggcaactaccgcctgctgaagaccatcggcaaaggaaactttgccaaggtgaagctggcccggcacatcctgaccgggaaggaggtggccgtgaagatcatcgacaagacccagctgaacagcagcagcctgcagaagctgttccgggaggtgcgcatcatgaaggtgctgaaccaccccaacatcgtgaagctgtttgaggtgattgaaacagagaagaccctgtacctggtgatggagtatgccagcggcggggaggtgtttgactacctggtggcccacggccgcatgaaggagaaggaggcccgggccaagttccggcagatcgtgtctgctgtgcagtactgccaccagaagttcatcgtgcaccgggacctgaaggccgagaacctgctgctggatgctgacatgaacatcaagattgctgactttggcttcagcaatgagttcaccttcggcaacaagctggacaccttctgtggcagccccccctatgctgcccctgagctgttccagggcaagaagtatgatggccctgaggtggatgtgtggagcctgggcgtcatcctgtacaccctggtgtctggcagcctgccctttgatggccagaacctgaaggagctgcgggagcgggtgctgcggggcaagtaccgcatccccttctacatgagcacagactgtgagaacctgctgaagaagttcctgatcctgaaccccagcaagaggggcaccctggagcagatcatgaaggaccgctggatgaatgtgggccatgaagatgatgagctgaagccctacgtggagcccctgcctgactacaaggaccccaggagaacagagctgatggtgtccatgggctacacccgggaggagatccaggacagcctggtgggccagcgctacaatgaggtgatggccacctacctgctgctgggctacaagagcagcgagctggagggggacaccatcaccctgaagccccggcccagcgctgacctgaccaacagcagcgcccccagccccagccacaaggtgcagaggtctgtgtctgccaaccccaagcagaggcgcttcagtgaccaggccggccctgccatccccaccagcaacagctacagcaagaagacccagagcaacaatgctgagaacaagaggcctgaggaggaccgggagagcggcaggaaggccagcagcacagccaaggtgcctgccagccccctgcccggcctggagaggaagaagaccacccccacccccagcaccaacagcgtgctgagcaccagcaccaacagaagcaggaacagccccctgctggagcgggccagcctgggccaggccagcatccagaatggcaaggacagcctgaccatgcctggcagccgggccagcacagccagcgccagcgctgctgtgtctgctgcccggccccggcagcaccagaagtccatgtctgcctctgtgcaccccaacaaggccagcggcctgcccccaacagagagcaactgtgaggtgccccggccccggcaggtgacagccccccagagggtgcctgtggccagccccagcgcccacaacatcagcagcagtggaggagccccagacaggaccaacttcccccggggcgtgagcagccgcagcaccttccacgccggccagctgcggcaggtgcgggaccagcagaacctgccctacggcgtgaccccagccagccccagcggccacagccagggccggcggggggccagcggcagcatcttcagcaagttcaccagcaagtttgtgagaagaaacctgaatgaacctgagagcaaggacagagtggagaccctgcggccccacgtggtgggcagcggcggcaatgacaaggagaaggaggagttccgggaggccaagcccaggagcctgcgcttcacctggagcatgaagaccaccagctccatggagcccaatgagatgatgagggagatcaggaaggtgctggatgccaacagctgccagagcgagctgcacgagaagtacatgctgctgtgcatgcacggcaccccaggccatgaagattttgtgcagtgggagatggaggtgtgcaagctgccccggctgagcctgaatggagtgcgcttcaagaggatcagcggcacctccatggccttcaagaacatcgccagcaagatcgccaatgagctgaagctgtag

SEQ ID NO: 31778 - DNA, 126 bp, Artificial Sequence
  derived and/or modified sequence
atgagcagcgcccggacccccctgcccaccctgaatgaaagagacacagagcagcccaccctgggccacctggacagcaagcccagcagcaagagcaacatgatccggggcaggaacagcgcctag

SEQ ID NO: 31779 - DNA, 4701 bp, Artificial Sequence
  derived and/or modified sequence
aaacagagccgaagcttcgtcttcggaatcgaggaggagagcgcgtccccggggtttaccttcttcggctgtttccggaattcacccgtagtctgtggccgggaggagaaggcgcgccccacctcccgtttctagccgcttcggatgtttccggctgctgccggcgaaaagagccgagggccggcggtggtggcggccatgttgggagcagcaggtccggcggcggctgcctgtgtgccgggcgcggagcagtgccgctgagggcaggggaggagcgaggcaggcggccggctgcggcggcagagagtaggcggagcggcgcggcccggccgaaaggcggcacagcccagccgggggtcgggggggtgcggtccggagccgctcggagccggcgcggcctagcccgagcggcgcatccccgggctggcgtgagcggctgcccggcctccccgcacccccggccggggcccatgcggcgggtgctcctgctgtgagaagccccgcccggccgggctccgcgccttcccttccctcccttcctccaagcttctcggttccctcccccgagataccggcgccatgtccagcgctcggacccccctacccacgctgaacgagagggacacggagcagcccaccttgggacaccttgactccaagcccagcagtaagtccaacatgattcggggccgcaactcagccacctctgctgatgagcagccccacattggaaactaccggctcctcaagaccattggcaagggtaattttgccaaggtgaagttggcccgacacatcctgactgggaaagaggtagctgtgaagatcattgacaagactcaactgaactcctccagcctccagaaactattccgcgaagtaagaataatgaaggttttgaatcatcccaacatagttaaattatttgaagtgattgagactgagaaaacgctctaccttgtcatggagtacgctagtggcggagaggtatttgattacctagtggctcatggcaggatgaaagaaaaagaggctcgagccaaattccgccagatagtgtctgctgtgcagtactgtcaccagaagtttattgtccatagagacttaaaggcagaaaacctgctcttggatgctgatatgaacatcaagattgcagactttggcttcagcaatgaattcacctttgggaacaagctggacaccttctgtggcagtcccccttatgctgccccagaactcttccagggcaaaaaatatgatggacccgaggtggatgtgtggagcctaggagttatcctctatacactggtcagcggatccctgccttttgatggacagaacctcaaggagctgcgggaacgggtactgaggggaaaataccgtattccattctacatgtccacggactgtgaaaacctgcttaagaaatttctcattcttaatcccagcaagagaggcactttagagcaaatcatgaaagatcgatggatgaatgtgggtcacgaagatgatgaactaaagccttacgtggagccactccctgactacaaggacccccggcggacagagctgatggtgtccatgggttatacacgggaagagatccaggactcgctggtgggccagagatacaacgaggtgatggccacctatctgctcctgggctacaagagctccgagctggaaggcgacaccatcaccctgaaaccccggccttcagctgatctgaccaatagcagcgccccatccccatcccacaaggtacagcgcagcgtgtcggccaatcccaagcagcggcgcttcagcgaccaggcagctggtcctgccattcccacctctaattcttactctaagaagactcagagtaacaacgcagaaaataagcggcctgaggaggaccgggagtcagggcggaaagccagcagcacagccaaggtgcctgccagccccctgcccggtctggagaggaagaagaccaccccaaccccctccacgaacagcgtcctctccaccagcacaaatcgaagcaggaattccccacttttggagcgggccagcctcggccaggcctccatccagaatggcaaagacagcctaaccatgccagggtcccgggcctccacggcttctgcttctgccgcagtctctgcggcccggccccgccagcaccagaaatccatgtcggcctccgtgcaccccaacaaggcctctgggctgccccccacggagagtaactgtgaggtgccgcggcccagcacagccccccagcgtgtccctgttgcctccccatccgcccacaacatcagcagcagtggtggagccccagaccgaactaacttcccccggggtgtgtccagccgaagcaccttccatgctgggcagctccgacaggtgcgggaccagcagaatttgccctacggtgtgaccccagcctctccctctggccacagccagggccggcggggggcctctgggagcatcttcagcaagttcacctccaagtttgtacgcaggaacctgaatgaacctgaaagcaaagaccgagtggagacgctcagacctcacgtggtgggcagtggcggcaacgacaaagaaaaggaagaatttcgggaggccaagccccgctccctccgcttcacgtggagtatgaagaccacgagctccatggagcccaacgagatgatgcgggagatccgcaaggtgctggacgcgaacagctgccagagcgagctgcatgagaagtacatgctgctgtgcatgcacggcacgccgggccacgaggacttcgtgcagtgggagatggaggtgtgcaaactgccgcggctctctctcaacggggttcgatttaagcggatatcgggcacctccatggccttcaaaaacattgcctccaaaatagccaacgagctgaagctttaacaggctgccaggagcgggggcggcgggggcgggccagctggacgggctgccggccgctgcgccgccccacctgggcgagactgcagcgatggattggtgtgtctcccctgctggcacttctcccctccctggcccttctcagttttctcttacatgtttgtggggggtgggagattgttctccagcaccccacattcacccctgcccagagattcccccttctcctctcccctactggaggcaaaggaaggggagggtggatgggggggcagggctccccctcggtactgcggttgcacagagtatttcgcctaaaccaagaaattttttattaccaaaaagaaaaaagaaaaaaaaaatcccagcggccacctttcctccctgccccattgggacagtcgagactggatctgtggggtttcccgggagggtggctcagggctggaacactctcaggcaagagtggtggagctcccgtcaggccctccgccaggcccactgtgggcttctcccctctcctccctccttcccctccaagcaaaccaccagaggtggccttcccctgacctcaggcccctgggctggaggcctgggcggtggggcagggggcgggggtgctgcgcagccctgcagtgggtggggctgggggctgctccggggctgctgaggctggagggccggcacaaggctccgcctccctccacactgtaccctctgcccctcctccccagagctgggcatttccttccacaagctgctgtggggacgtgtgttccctcaaagtctgtgccatcttctcccacccctcccgggtagaaggaggggctgaccccagggctgggagaggggaggggactggagggcagactggcttctcggtccccagggggccgcttgggctgttggtctccagagcagggccactgggcactctgtgatgggggagcctttgtctgaaagcacagccccctcgcccttcctctccccatggcttccccttcattggcattaatctgggcaccagctctctccatagcagtgacttccctcaccactctcatctctcagccttgccttttcttcctgacactgtcgccccctcctctcaggagacactgccgagggccacctggcagaaggctgagttaggcagcagggccgggagcgtctgccctccacagggtgggggacagataggctaagcgactcccagcttgctaccctcagtggccagtgtgggcgtgggcggtttggggcgcttggctggtggtggccactgcatcccttaatttatttctctgctgtttctgttcttgagaaattgggggtgggagtcctacacagaggctgcccctaccctcacctgagttgtacatttttttgtgatgggttttattttttattattttattttattttttttttttttgatttatgatgactccacccctcttcatcacccccgctcccaggccaggctcagcgattaagccgagcccttgcgtcctaggaaggggccttgccaacctcagccctcctgccccacactcctactgcggctcagaccaagggctccccctccctcccttcccccctcctgccctatggaacagcccgggtgctctgagggggctgggagggcatggcttggctcccaaagggggtaggggcccggggcacccaggcaaggtggcccctccccgtctagccccctcctccccaaccctgcacttagtttctcctctggatcaaacacgtaataaagagaatgtttggaatctg

SEQ ID NO: 31780 - DNA, 4683 bp, Artificial Sequence
  derived and/or modified sequence
aaacagagccgaagcttcgtcttcggaatcgaggaggagagcgcgtccccggggtttaccttcttcggctgtttccggaattcacccgtagtctgtggccgggaggagaaggcgcgccccacctcccgtttctagccgcttcggatgtttccggctgctgccggcgaaaagagccgagggccggcggtggtggcggccatgttgggagcagcaggtccggcggcggctgcctgtgtgccgggcgcggagcagtgccgctgagggcaggggaggagcgaggcaggcggccggctgcggcggcagagagtaggcggagcggcgcggcccggccgaaaggcggcacagcccagccgggggtcgggggggtgcggtccggagccgctcggagccggcgcggcctagcccgagcggcgcatccccgggctggcgtgagcggctgcccggcctccccgcacccccggccggggcccatgcggcgggtgctcctgctgtgagaagccccgcccggccgggctccgcgccttcccttccctcccttcctccaagcttctcggttccctcccccgagataccggcgccatgtccagcgctcggacccccctacccacgctgaacgagagggacacggagcagcccaccttgggacaccttgactccaagcccagcagtaagtccaacatgattcggggccgcaactcagccacctctgctgatgagcagccccacattggaaactaccggctcctcaagaccattggcaagggtaattttgccaaggtgaagttggcccgacacatcctgactgggaaagaggtagctgtgaagatcattgacaagactcaactgaactcctccagcctccagaaactattccgcgaagtaagaataatgaaggttttgaatcatcccaacatagttaaattatttgaagtgattgagactgagaaaacgctctaccttgtcatggagtacgctagtggcggagaggtatttgattacctagtggctcatggcaggatgaaagaaaaagaggctcgagccaaattccgccagatagtgtctgctgtgcagtactgtcaccagaagtttattgtccatagagacttaaaggcagaaaacctgctcttggatgctgatatgaacatcaagattgcagactttggcttcagcaatgaattcacctttgggaacaagctggacaccttctgtggcagtcccccttatgctgccccagaactcttccagggcaaaaaatatgatggacccgaggtggatgtgtggagcctaggagttatcctctatacactggtcagcggatccctgccttttgatggacagaacctcaaggagctgcgggaacgggtactgaggggaaaataccgtattccattctacatgtccacggactgtgaaaacctgcttaagaaatttctcattcttaatcccagcaagagaggcactttagagcaaatcatgaaagatcgatggatgaatgtgggtcacgaagatgatgaactaaagccttacgtggagccactccctgactacaaggacccccggcggacagagctgatggtgtccatgggttatacacgggaagagatccaggactcgctggtgggccagagatacaacgaggtgatggccacctatctgctcctgggctacaagagctccgagctggaaggcgacaccatcaccctgaaaccccggccttcagctgatctgaccaatagcagcgccccatccccatcccacaaggtacagcgcagcgtgtcggccaatcccaagcagcggcgcttcagcgaccaggcagctggtcctgccattcccacctctaattcttactctaagaagactcagagtaacaacgcagaaaataagcggcctgaggaggaccgggagtcagggcggaaagccagcagcacagccaaggtgcctgccagccccctgcccggtctggagaggaagaagaccaccccaaccccctccacgaacagcgtcctctccaccagcacaaatcgaagcaggaattccccacttttggagcgggccagcctcggccaggcctccatccagaatggcaaagacagcctaaccatgccagggtcccgggcctccacggcttctgcttctgccgcagtctctgcggcccggccccgccagcaccagaaatccatgtcggcctccgtgcaccccaacaaggcctctgggctgccccccacggagagtaactgtgaggtgccgcggcccagcacagccccccagcgtgtccctgttgcctccccatccgcccacaacatcagcagcagtggtggagccccagaccgaactaacttcccccggggtgtgtccagccgaagcaccttccatgctgggcagctccgacaggtgcgggaccagcagaatttgccctacggtgtgaccccagcctctccctctggccacagccagggccggcggggggcctctgggagcatcttcagcaagttcacctccaagtttgtacgcagaaatctgtctttcaggtttgccagaagacctcacgtggtgggcagtggcggcaacgacaaagaaaaggaagaatttcgggaggccaagccccgctccctccgcttcacgtggagtatgaagaccacgagctccatggagcccaacgagatgatgcgggagatccgcaaggtgctggacgcgaacagctgccagagcgagctgcatgagaagtacatgctgctgtgcatgcacggcacgccgggccacgaggacttcgtgcagtgggagatggaggtgtgcaaactgccgcggctctctctcaacggggttcgatttaagcggatatcgggcacctccatggccttcaaaaacattgcctccaaaatagccaacgagctgaagctttaacaggctgccaggagcgggggcggcgggggcgggccagctggacgggctgccggccgctgcgccgccccacctgggcgagactgcagcgatggattggtgtgtctcccctgctggcacttctcccctccctggcccttctcagttttctcttacatgtttgtggggggtgggagattgttctccagcaccccacattcacccctgcccagagattcccccttctcctctcccctactggaggcaaaggaaggggagggtggatgggggggcagggctccccctcggtactgcggttgcacagagtatttcgcctaaaccaagaaattttttattaccaaaaagaaaaaagaaaaaaaaaatcccagcggccacctttcctccctgccccattgggacagtcgagactggatctgtggggtttcccgggagggtggctcagggctggaacactctcaggcaagagtggtggagctcccgtcaggccctccgccaggcccactgtgggcttctcccctctcctccctccttcccctccaagcaaaccaccagaggtggccttcccctgacctcaggcccctgggctggaggcctgggcggtggggcagggggcgggggtgctgcgcagccctgcagtgggtggggctgggggctgctccggggctgctgaggctggagggccggcacaaggctccgcctccctccacactgtaccctctgcccctcctccccagagctgggcatttccttccacaagctgctgtggggacgtgtgttccctcaaagtctgtgccatcttctcccacccctcccgggtagaaggaggggctgaccccagggctgggagaggggaggggactggagggcagactggcttctcggtccccagggggccgcttgggctgttggtctccagagcagggccactgggcactctgtgatgggggagcctttgtctgaaagcacagccccctcgcccttcctctccccatggcttccccttcattggcattaatctgggcaccagctctctccatagcagtgacttccctcaccactctcatctctcagccttgccttttcttcctgacactgtcgccccctcctctcaggagacactgccgagggccacctggcagaaggctgagttaggcagcagggccgggagcgtctgccctccacagggtgggggacagataggctaagcgactcccagcttgctaccctcagtggccagtgtgggcgtgggcggtttggggcgcttggctggtggtggccactgcatcccttaatttatttctctgctgtttctgttcttgagaaattgggggtgggagtcctacacagaggctgcccctaccctcacctgagttgtacatttttttgtgatgggttttattttttattattttattttattttttttttttttgatttatgatgactccacccctcttcatcacccccgctcccaggccaggctcagcgattaagccgagcccttgcgtcctaggaaggggccttgccaacctcagccctcctgccccacactcctactgcggctcagaccaagggctccccctccctcccttcccccctcctgccctatggaacagcccgggtgctctgagggggctgggagggcatggcttggctcccaaagggggtaggggcccggggcacccaggcaaggtggcccctccccgtctagccccctcctccccaaccctgcacttagtttctcctctggatcaaacacgtaataaagagaatgtttggaatctg

SEQ ID NO: 31781 - DNA, 4728 bp, Artificial Sequence
  derived and/or modified sequence
aaacagagccgaagcttcgtcttcggaatcgaggaggagagcgcgtccccggggtttaccttcttcggctgtttccggaattcacccgtagtctgtggccgggaggagaaggcgcgccccacctcccgtttctagccgcttcggatgtttccggctgctgccggcgaaaagagccgagggccggcggtggtggcggccatgttgggagcagcaggtccggcggcggctgcctgtgtgccgggcgcggagcagtgccgctgagggcaggggaggagcgaggcaggcggccggctgcggcggcagagagtaggcggagcggcgcggcccggccgaaaggcggcacagcccagccgggggtcgggggggtgcggtccggagccgctcggagccggcgcggcctagcccgagcggcgcatccccgggctggcgtgagcggctgcccggcctccccgcacccccggccggggcccatgcggcgggtgctcctgctgtgagaagccccgcccggccgggctccgcgccttcccttccctcccttcctccaagcttctcggttccctcccccgagataccggcgccatgtccagcgctcggacccccctacccacgctgaacgagagggacacggagcagcccaccttgggacaccttgactccaagcccagcagtaagtccaacatgattcggggccgcaactcagccacctctgctgatgagcagccccacattggaaactaccggctcctcaagaccattggcaagggtaattttgccaaggtgaagttggcccgacacatcctgactgggaaagaggtagctgtgaagatcattgacaagactcaactgaactcctccagcctccagaaactattccgcgaagtaagaataatgaaggttttgaatcatcccaacatagttaaattatttgaagtgattgagactgagaaaacgctctaccttgtcatggagtacgctagtggcggagaggtatttgattacctagtggctcatggcaggatgaaagaaaaagaggctcgagccaaattccgccagatagtgtctgctgtgcagtactgtcaccagaagtttattgtccatagagacttaaaggcagaaaacctgctcttggatgctgatatgaacatcaagattgcagactttggcttcagcaatgaattcacctttgggaacaagctggacaccttctgtggcagtcccccttatgctgccccagaactcttccagggcaaaaaatatgatggacccgaggtggatgtgtggagcctaggagttatcctctatacactggtcagcggatccctgccttttgatggacagaacctcaaggagctgcgggaacgggtactgaggggaaaataccgtattccattctacatgtccacggactgtgaaaacctgcttaagaaatttctcattcttaatcccagcaagagaggcactttagagcaaatcatgaaagatcgatggatgaatgtgggtcacgaagatgatgaactaaagccttacgtggagccactccctgactacaaggacccccggcggacagagctgatggtgtccatgggttatacacgggaagagatccaggactcgctggtgggccagagatacaacgaggtgatggccacctatctgctcctgggctacaagagctccgagctggaaggcgacaccatcaccctgaaaccccggccttcagctgatctgaccaatagcagcgccccatccccatcccacaaggtacagcgcagcgtgtcggccaatcccaagcagcggcgcttcagcgaccaggcagctggtcctgccattcccacctctaattcttactctaagaagactcagagtaacaacgcagaaaataagcggcctgaggaggaccgggagtcagggcggaaagccagcagcacagccaaggtgcctgccagccccctgcccggtctggagaggaagaagaccaccccaaccccctccacgaacagcgtcctctccaccagcacaaatcgaagcaggaattccccacttttggagcgggccagcctcggccaggcctccatccagaatggcaaagacagcctaaccatgccagggtcccgggcctccacggcttctgcttctgccgcagtctctgcggcccggccccgccagcaccagaaatccatgtcggcctccgtgcaccccaacaaggcctctgggctgccccccacggagagtaactgtgaggtgccgcggcccagcacagccccccagcgtgtccctgttgcctccccatccgcccacaacatcagcagcagtggtggagccccagaccgaactaacttcccccggggtgtgtccagccgaagcaccttccatgctgggcagctccgacaggtgcgggaccagcagaatttgccctacggtgtgaccccagcctctccctctggccacagccagggccggcggggggcctctgggagcatcttcagcaagttcacctccaagtttgtacgcagaaatctgtctttcaggtttgccagaaggaacctgaatgaacctgaaagcaaagaccgagtggagacgctcagacctcacgtggtgggcagtggcggcaacgacaaagaaaaggaagaatttcgggaggccaagccccgctccctccgcttcacgtggagtatgaagaccacgagctccatggagcccaacgagatgatgcgggagatccgcaaggtgctggacgcgaacagctgccagagcgagctgcatgagaagtacatgctgctgtgcatgcacggcacgccgggccacgaggacttcgtgcagtgggagatggaggtgtgcaaactgccgcggctctctctcaacggggttcgatttaagcggatatcgggcacctccatggccttcaaaaacattgcctccaaaatagccaacgagctgaagctttaacaggctgccaggagcgggggcggcgggggcgggccagctggacgggctgccggccgctgcgccgccccacctgggcgagactgcagcgatggattggtgtgtctcccctgctggcacttctcccctccctggcccttctcagttttctcttacatgtttgtggggggtgggagattgttctccagcaccccacattcacccctgcccagagattcccccttctcctctcccctactggaggcaaaggaaggggagggtggatgggggggcagggctccccctcggtactgcggttgcacagagtatttcgcctaaaccaagaaattttttattaccaaaaagaaaaaagaaaaaaaaaatcccagcggccacctttcctccctgccccattgggacagtcgagactggatctgtggggtttcccgggagggtggctcagggctggaacactctcaggcaagagtggtggagctcccgtcaggccctccgccaggcccactgtgggcttctcccctctcctccctccttcccctccaagcaaaccaccagaggtggccttcccctgacctcaggcccctgggctggaggcctgggcggtggggcagggggcgggggtgctgcgcagccctgcagtgggtggggctgggggctgctccggggctgctgaggctggagggccggcacaaggctccgcctccctccacactgtaccctctgcccctcctccccagagctgggcatttccttccacaagctgctgtggggacgtgtgttccctcaaagtctgtgccatcttctcccacccctcccgggtagaaggaggggctgaccccagggctgggagaggggaggggactggagggcagactggcttctcggtccccagggggccgcttgggctgttggtctccagagcagggccactgggcactctgtgatgggggagcctttgtctgaaagcacagccccctcgcccttcctctccccatggcttccccttcattggcattaatctgggcaccagctctctccatagcagtgacttccctcaccactctcatctctcagccttgccttttcttcctgacactgtcgccccctcctctcaggagacactgccgagggccacctggcagaaggctgagttaggcagcagggccgggagcgtctgccctccacagggtgggggacagataggctaagcgactcccagcttgctaccctcagtggccagtgtgggcgtgggcggtttggggcgcttggctggtggtggccactgcatcccttaatttatttctctgctgtttctgttcttgagaaattgggggtgggagtcctacacagaggctgcccctaccctcacctgagttgtacatttttttgtgatgggttttattttttattattttattttattttttttttttttgatttatgatgactccacccctcttcatcacccccgctcccaggccaggctcagcgattaagccgagcccttgcgtcctaggaaggggccttgccaacctcagccctcctgccccacactcctactgcggctcagaccaagggctccccctccctcccttcccccctcctgccctatggaacagcccgggtgctctgagggggctgggagggcatggcttggctcccaaagggggtaggggcccggggcacccaggcaaggtggcccctccccgtctagccccctcctccccaaccctgcacttagtttctcctctggatcaaacacgtaataaagagaatgtttggaatctg

SEQ ID NO: 31782 - DNA, 2891 bp, Artificial Sequence
  derived and/or modified sequence
gcggtccggagccgctcggagccggcgcggcctagcccgagcggcgcatccccgggctggcgtgagcggctgcccggcctccccgcacccccggccggggcccatgcggcgggtgctcctgctgtgagaagccccgcccggccgggctccgcgccttcccttccctcccttcctccaagcttctcggttccctcccccgagataccggcgccatgtccagcgctcggacccccctacccacgctgaacgagagggacacggagcagcccaccttgggacaccttgactccaagcccagcagtaagtccaacatgattcggggccgcaactcagccacctctgctgatgagcagccccacattggaaactaccggctcctcaagaccattggcaagggtaattttgccaaggtgaagttggcccgacacatcctgactgggaaagaggtagctgtgaagatcattgacaagactcaactgaactcctccagcctccagaaactattccgcgaagtaagaataatgaaggttttgaatcatcccaacatagttaaattatttgaagtgattgagactgagaaaacgctctaccttgtcatggagtacgctagtggcggagaggtatttgattacctagtggctcatggcaggatgaaagaaaaagaggctcgagccaaattccgccagatagtgtctgctgtgcagtactgtcaccagaagtttattgtccatagagacttaaaggcagaaaacctgctcttggatgctgatatgaacatcaagattgcagactttggcttcagcaatgaattcacctttgggaacaagctggacaccttctgtggcagtcccccttatgctgccccagaactcttccagggcaaaaaatatgatggacccgaggtggatgtgtggagcctaggagttatcctctatacactggtcagcggatccctgccttttgatggacagaacctcaaggagctgcgggaacgggtactgaggggaaaataccgtattccattctacatgtccacggactgtgaaaacctgcttaagaaatttctcattcttaatcccagcaagagaggcactttagagcaaatcatgaaagatcgatggatgaatgtgggtcacgaagatgatgaactaaagccttacgtggagccactccctgactacaaggacccccggcggacagagctgatggtgtccatgggttatacacgggaagagatccaggactcgctggtgggccagagatacaacgaggtgatggccacctatctgctcctgggctacaagagctccgagctggaaggcgacaccatcaccctgaaaccccggccttcagctgatctgaccaatagcagcgccccatccccatcccacaaggtacagcgcagcgtgtcggccaatcccaagcagcggcgcttcagcgaccaggctggtcctgccattcccacctctaattcttactctaagaagactcagagtaacaacgcagaaaataagcggcctgaggaggaccgggagtcagggcggaaagccagcagcacagccaaggtgcctgccagccccctgcccggtctggagaggaagaagaccaccccaaccccctccacgaacagcgtcctctccaccagcacaaatcgaagcaggaattccccacttttggagcgggccagcctcggccaggcctccatccagaatggcaaagacagcctaaccatgccagggtcccgggcctccacggcttctgcttctgccgcagtctctgcggcccggccccgccagcaccagaaatccatgtcggcctccgtgcaccccaacaaggcctctgggctgccccccacggagagtaactgtgaggtgccgcggcccaggcaagtcacagccccccagcgtgtccctgttgcctccccatccgcccacaacatcagcagcagtggtggagccccagaccgaactaacttcccccggggtgtgtccagccgaagcaccttccatgctgggcagctccgacaggtgcgggaccagcagaatttgccctacggtgtgaccccagcctctccctctggccacagccagggccggcggggggcctctgggagcatcttcagcaagttcacctccaagtttgtacgcaggaacctgaatgaacctgaaagcaaagaccgagtggagacgctcagacctcacgtggtgggcagtggcggcaacgacaaagaaaaggaagaatttcgggaggccaagccccgctccctccgcttcacgtggagtatgaagaccacgagctccatggagcccaacgagatgatgcgggagatccgcaaggtgctggacgcgaacagctgccagagcgagctgcatgagaagtacatgctgctgtgcatgcacggcacgccgggccacgaggacttcgtgcagtgggagatggaggtgtgcaaactgccgcggctctctctcaacggggttcgatttaagcggatatcgggcacctccatggccttcaaaaacattgcctccaaaatagccaacgagctgaagctttaacaggctgccaggagcgggggcggcgggggcgggccagctggacgggctgccggccgctgcgccgccccacctgggcgagactgcagcgatggattggtgtgtctcccctgctggcacttctcccctccctggcccttctcagttttctcttacatgtttgtggggggtgggagattgttctccagcaccccacattcacccctgcccagagattcccccttctcctctcccctactggaggcaaaggaaggggagggtggatgggggggcagggctccccctcggtactgcggttgcacagagtatttcgcctaaaccaagaaattttttattacc

SEQ ID NO: 31783 - DNA, 2340 bp, Artificial Sequence
  derived and/or modified sequence
atgagcagcgcccggacccccctgcccaccctgaacgagcgggacaccgaacagcccactttgggtcatctggactcgaaaccctcatctaaatcaaatatgatcagaggacggaattccgccaccagcgctgatgaacaaccccatattggtaattacaggttgctaaagaccattggtaagggaaactttgccaaagttaagttggcaaggcatatactaaccgggaaagaggtggccgtgaaaatcatagataaaacccagttgaacagctcttctcttcagaagctgttcagagaagttcggatcatgaaggtgctcaaccatcccaatattgtgaaactgttcgaagtgatcgagaccgaaaaaaccctttacctggttatggagtacgccagcggtggcgaagtctttgactatctggtcgcccatggacgaatgaaggagaaggaggctcgagccaagtttcggcagattgtgagcgcagtgcagtactgtcaccaaaagttcatagtgcatcgggatctgaaggctgagaacctgcttctggacgctgacatgaatataaagatagcggactttggcttttccaacgaattcacatttggaaataaactggacactttctgtgggagtccgccatatgcggcccccgaactgtttcagggcaagaagtatgatggtcccgaagttgacgtgtggtctctcggcgtgatcctgtacaccctggtaagtggctcgctgcctttcgacggtcaaaacctgaaggagcttcgagaacgcgtcctccgcgggaagtacaggatccctttctacatgtccacggattgcgaaaacttactgaaaaaattcctgatcctcaatccaagtaagagagggactcttgagcagatcatgaaagaccggtggatgaatgtgggacatgaagacgacgaattgaagccttatgtggaacccctcccagactataaagaccctcgtcgaacagagctgatggtgtcaatgggctatactcgcgaagagatccaagactcattggtgggacagcgctacaatgaagtgatggccacatacctgctcctgggctacaaatctagtgaactggagggagataccatcactctcaaaccaaggccaagcgctgatttgaccaatagttccgctccttcccctagccacaaagtacagaggtcagtgtccgcaaatccaaagcaacggagattcagcgaccaggctgcgggtccagctatccccactagcaacagctatagtaagaagacccagagcaacaatgccgagaataaacggcccgaagaagaccgcgagtccggaaggaaagctagttctactgccaaagtgcccgcaagccccctgccaggcttggagcggaaaaagactacacctactccctcaactaactctgttctatctacttcaactaatcggtcccggaacagcccactgctagaaagagcctctctaggccaagctagtattcagaatgggaaggactcactgaccatgccagggtcccgggcttccaccgcaagcgcctctgccgctgtgtctgctgcaaggcccaggcagcaccagaagtctatgtcggcttctgtgcatcccaataaagcgtcaggcctcccgccaacggaatcaaactgcgaggtacctcgaccatccaccgccccgcagcgggtgcccgtggcttctcctagcgctcataacattagtagctcaggcggagccccagaccgcactaacttccccaggggcgtcagcagccggtccacctttcacgctggccagctgcgccaagtccgcgatcagcaaaacctaccttacggggtgaccccagcgagccccagcggtcacagccagggtcgccggggcgccagtgggtcgatcttctccaagttcacttcaaaatttgtgcgaagaaatttaaatgaacctgagtctaaagatagagtggagacactgagacctcatgtggtcggatcaggcgggaacgataaggagaaagaggagtttagggaggccaaaccacgcagtctccggttcacatggagtatgaagaccacatcctcaatggagcccaacgagatgatgcgcgaaattcgcaaggtgctggatgcaaatagttgtcaatctgagctccatgagaagtatatgctgctctgtatgcacggtacccccggacacgaagatttcgtgcagtgggaaatggaagtgtgcaaactgccccggctcagcctaaacggcgtgcgctttaagagaatttccgggacttccatggctttcaaaaatatcgcgagcaagattgccaacgaacttaaattgtag

SEQ ID NO: 31784 - DNA, 2322 bp, Artificial Sequence
  derived and/or modified sequence
atgagcagcgcccggacccccctgcccaccctgaacgagcgggacaccgagcagccaacccttggccacctggactctaagccgtcatcaaaaagtaacatgatccgtgggagaaacagcgccacctctgcggacgaacagcctcatatcggaaattatcgcctgttgaaaactataggcaaaggcaattttgccaaggttaaactggcccgccacattctcactggcaaggaggtggccgtgaagatcatcgacaaaacccagctgaattcaagctccctccaaaaactgtttagagaggttagaatcatgaaggtgctcaatcaccctaacattgtgaagctgtttgaagttatcgaaaccgaaaaaactctgtacctggtcatggaatacgcctcagggggggaagttttcgactacctggttgcccatgggagaatgaaggagaaggaggccagagcaaagttccgccaaattgtgagcgccgttcagtattgccaccaaaaatttatcgtgcatcgcgacctgaaagccgagaacttgcttttggatgcagatatgaacatcaaaattgctgatttcggcttttccaacgaatttaccttcgggaataaactcgataccttctgcgggagccctccatatgccgcaccagagctgttccaggggaaaaaatacgacggaccggaagtggatgtgtggtcgcttggagtgatcctttacacccttgtcagcggaagtctcccttttgatggacagaacttgaaggaactgagagaaagagtcctgcggggcaagtaccggatccccttttacatgagtaccgattgtgagaaccttctaaagaagtttctgatcctcaatccatctaagcgaggaacactcgaacagattatgaaggaccggtggatgaacgtgggccatgaagatgatgaactgaaaccatacgtcgagcctctgcctgactacaaagatccaagaaggacggagttgatggtcagcatgggatacactcgcgaggagattcaggattctctggtcgggcagaggtacaacgaagtgatggcgacctatctgctgctcggttacaaatctagcgaactagaaggcgacactatcaccctgaagcctcgcccgtcggctgatctgaccaacagctctgccccctcgccctcacataaagtccagcgctccgttagtgccaaccccaagcagcggcgtttctccgaccaggccgccgggcccgccatccccactagcaattcttactcaaagaagacccaaagtaacaatgccgagaataaaagacccgaggaggatcgggaatccgggcgcaaagcctcctccactgctaaagttccggccagccctctgcccgggcttgaaaggaagaagaccacccccactccgtccaccaactcggtgctgagcacttccactaacaggagtaggaactcccccctgctggaaagagccagtctgggtcaagcatcaattcagaatgggaaggattcgctcaccatgccaggttcacgagccagtactgcatctgccagtgctgccgtcagcgctgcccgtccacggcagcatcagaagtctatgagcgcaagcgttcatccaaataaagcttccggtttacctccgacagagagcaactgtgaggtcccacgcccaagcacggcaccccagagagtgcccgtagcatcgccaagcgcccataatatctcatcctctgggggtgcccccgaccggactaattttcctcggggagtatcctcccggagcacctttcatgcagggcagttacgacaggtgcgggatcagcaaaatctgccgtacggggtgacccccgccagcccatctggacacagccaggggcggcgcggtgccagcggttccatcttttcaaagtttacgtcaaagttcgttcgcaggaacctgagttttcggtttgcaagacgcccacacgttgtgggctcaggaggcaatgacaaggaaaaggaggagttccgagaagccaagccgcgttccctgcgctttacatggtccatgaaaacaacctcgagcatggagcctaacgagatgatgagagagatccggaaggtactggacgccaactcctgccagtctgagttacacgaaaagtacatgctgttgtgcatgcacggaacaccaggtcacgaggacttcgtccagtgggagatggaagtctgtaagctgcctcgcctgtccctgaatggcgtgagatttaaacgcatctctggaacctctatggccttcaagaacattgcctccaaaattgcaaacgagctgaaattgtag

SEQ ID NO: 31785 - DNA, 2367 bp, Artificial Sequence
  derived and/or modified sequence
atgagcagcgcccggacccccctgcccaccctgaacgagcgggacacagagcaacctacactgggtcaccttgattccaaaccgtcttccaaaagcaacatgatccgcggcaggaacagcgctactagcgccgacgaacagccacatatcgggaactacaggctcttaaagactattgggaaaggtaactttgccaaagtgaagcttgctcggcacatcttgacaggcaaggaggtggcagtgaagattattgacaagacccagctaaattcttcgagcttacagaagctgtttcgggaagttagaataatgaaggtgctgaaccacccaaacatagtaaagctttttgaggtgatagaaacagaaaagacactttatctcgtcatggaatacgctagcggcggcgaggtgttcgattacttggtggctcatggccggatgaaggagaaggaggcgagagcgaagtttcgacagattgtcagcgccgtccagtattgtcaccaaaagttcatagtccacagggatcttaaggccgaaaatctgctgctggacgctgatatgaacatcaaaatagcagactttggctttagcaacgagttcacatttgggaacaaacttgataccttttgcggttcccccccatacgctgctcccgaattgttccaggggaagaaatatgacggccccgaggtggatgtctggtcgctcggcgtcattctgtacaccctggtatctgggtctcttcctttcgacggccagaacttaaaagaactgagggaaagagtgctccgtggcaaatataggatccccttctacatgagtactgactgcgagaatctacttaagaagttcctgatactcaaccccagcaaacgaggtacactggagcaaattatgaaagaccgctggatgaatgttgggcacgaggatgacgaactgaagccctatgtcgaacccttgcccgattacaaggaccctcggagaactgaactgatggtttccatgggatatacgagagaggagatccaggattctctcgtcggacagagatataatgaggtgatggctacctacctgctgctgggctacaaatctagtgagctcgagggggacaccattactctgaagcctaggcccagtgcggatcttaccaattcgtcagcacccagcccttcacacaaggttcagaggtctgtgtccgcaaatcctaaacagagacggttctcagaccaggccgcgggacctgctataccgacgagtaactcttacagcaagaagacacagtctaataatgccgagaacaaaaggcccgaagaggaccgcgagtctggacggaaggctagctcaactgcaaaggtcccagcaagtcccctccccggactggaacggaagaaaacaactccaacccctagcaccaactcagttttgtctacgtctacaaacagaagccgcaactcccccttactggaacgggcatccctgggacaggcatccattcagaacggaaaagattccctgaccatgcccggttccagagcgtctactgcaagcgcttcagctgccgtgtctgcggcccgcccccgtcaacatcaaaagagcatgtctgccagtgtgcatcccaacaaggcctccgggctgcctcccaccgaatccaattgcgaagtccctaggccatcgactgctccccaacgggtccccgtggcaagcccaagtgcacacaatatcagtagctctggcggtgcgccagaccgtaccaactttccccgcggggtgtcctcgaggtcaacattccacgccggacagttgcggcaggtgcgtgaccagcagaatctcccctatggagtgacacccgccagccccagcggccatagccaaggccggcgtggtgcctccggctcaattttcagcaaatttacaagcaaattcgtgcggcgcaatctgtcttttagattcgcccgacgcaacttgaacgagcctgaatcaaaagaccgggtagagacgcttaggccccacgttgttggctcaggtggtaatgacaaagaaaaagaggagtttcgagaagcaaagcctaggtcactacgattcacctggtccatgaagactaccagtagtatggagccaaacgagatgatgcgcgaaatccgcaaggttctggacgccaactcttgccagtcggagcttcatgaaaaatatatgctcctatgcatgcacgggacaccggggcacgaggacttcgtccagtgggagatggaggtctgtaaattgcctcggctctctcttaatggggtacgcttcaagcgaatcagtggcacaagtatggcattcaaaaatatcgcaagtaaaatagcgaatgaactgaagctttag

SEQ ID NO: 31786 - DNA, 2343 bp, Artificial Sequence
  derived and/or modified sequence
atgagcagcgcccggacccccctgcccaccctgaacgagcgggacacagagcagccaacactcggacacctcgattctaaaccctcatctaagtccaatatgattcgcgggcgcaactccgccaccagtgccgacgagcagcctcatatcggcaactataggttgctcaagacgattggcaaggggaactttgcaaaggtgaagcttgcacgacacatcttaactggtaaagaggtggccgtgaagattattgacaagacacagctcaattcatcatcgttgcagaaactgtttcgggaagttaggatcatgaaggttctgaaccacccaaatatcgtcaagcttttcgaagtgattgagacagaaaaaacactttacctggtgatggaatatgcctcaggaggcgaagtgtttgattacttggttgcacacggcagaatgaaggagaaggaggcacgtgccaaatttaggcaaattgtaagcgccgtgcaatattgtcaccaaaagtttatcgtccatagagatctcaaagccgagaatctgctcctggatgccgatatgaatatcaagatcgccgactttggcttctccaatgaatttacctttggcaataagcttgacaccttctgtgggtccccaccatatgccgccccagaactgtttcagggaaaaaagtatgacggccccgaagtggatgtttggtcgcttggggtgatcctgtacaccctcgtgtctggcagccttcccttcgacggccagaatcttaaggagctgagagagcgcgtgctcagggggaagtatcgcatcccgttctatatgagcacagattgcgagaacctacttaagaaatttctgattctgaatcccagcaagagaggaaccctggaacagatcatgaaggatagatggatgaatgtcggtcatgaggacgatgaactgaaaccttatgtggagcccctgcctgattacaaagacccacgccgcactgaattgatggttagcatgggatacacacgcgaggagatccaggactcactggtcggccagagatataatgaagttatggcaacatatctgctattgggctacaagagctctgaactggaaggggatacaataacactaaagccacgcccatccgccgacctgaccaacagttccgctccctcaccaagccataaagttcaaaggtcagtgtctgccaatcccaagcagagacgctttagcgaccaggccggtcctgccatccccacctcaaacagctattctaaaaaaacacaatctaacaacgccgagaataaaagacctgaggaggatcgcgagtctggtcgaaaagcttcctccacagccaaggtgcctgcgagccccctgcctggccttgagcgcaagaagacgactcccacacctagtacgaactctgtcctgtccactagcacaaacaggagtcggaattctcccctgctcgaacgagcctccctggggcaagccagcattcagaatgggaaagattcactgactatgcctgggtcaagagcctccaccgcgtcagcctccgccgcagtatcggccgccaggcctcgtcagcatcagaagtctatgtcagcaagcgtgcacccgaacaaggccagtggcctgccaccaacagagagcaattgtgaggtcccacggcctcgtcaggtgacagctcctcagcgggtgcctgttgcctctccttcggcgcacaacatctcttccagcggtggggcgcccgacaggaccaacttcccaagaggcgtctcaagtagatcgaccttccatgctgggcagctgagacaggttcgcgatcaacagaatctgccatatggcgttacaccggcctctccaagtgggcattcccagggtaggaggggggctagcggcagcatcttttctaagtttacaagcaaatttgtgaggcgcaacctcaacgaaccagaatccaaagatcgggtggagaccttgcggcctcatgtcgtgggttctggaggcaacgataaggaaaaggaagaatttagagaggccaaaccacgtagcttgcggtttacttggagtatgaagacaacctcctcgatggagcccaacgaaatgatgcgcgaaatcagaaaggtgctcgatgctaattcatgtcaaagcgagctgcacgagaaatatatgcttctctgtatgcatggaactcctggccacgaggactttgtgcaatgggagatggaggtctgcaaactgccgagactgtctttgaacggggtacggtttaaacgcattagtggcacgtcaatggcctttaagaacatagcttccaagattgctaacgaactaaaattatag

SEQ ID NO: 31787 - DNA, 126 bp, Artificial Sequence
  derived and/or modified sequence
atgagcagcgcccggacccccctgcccaccctgaacgagcgggacactgaacagccaactttgggtcatctggactccaaaccctccagcaaatctaacatgatacggggacggaatagtgcttag

SEQ ID NO: 31788 - DNA, 2340 bp, Artificial Sequence
  derived and/or modified sequence
atgagctccgcccgaacaccactgccaaccctgaacgaaagggacactgaacaacctacactcggccacctggacagtaaacccagctccaagtcaaatatgatcagggggaggaactctgctacgagcgcggacgaacagcctcacattggcaattatagactacttaagaccatcggtaagggaaatttcgcaaaggtgaagttggcccgtcatattctgacaggcaaggaagtggctgtcaagattatcgacaaaactcagttaaattcttcttccctccaaaaactgttccgcgaggtgcgcattatgaaagttctcaaccaccccaatatagtgaaactgttcgaagtcatcgaaactgaaaagactctctacctggttatggaatacgcttcaggcggtgaggttttcgattatctggtggctcatgggagaatgaaggaaaaagaggcaagggccaagttccggcagatagtcagtgccgtgcaatactgccaccagaagtttattgtgcaccgggatctgaaagctgagaatctgctcctggacgccgatatgaatatcaaaatcgctgatttcggattttctaatgaattcaccttcgggaataagctcgacactttttgtggatcccctccgtatgcagcacctgagcttttccagggaaaaaaatacgatggccctgaggtggacgtatggagcctcggggtgatcctttacaccttggtctccggatcgcttccctttgacggccagaatctgaaggaattgcgcgagagagtgcttcggggaaagtaccggattcctttctacatgagtaccgattgtgagaacctgttaaagaaattcctgatactgaatccctcaaagagaggcaccctcgagcagatcatgaaagaccgatggatgaacgtcggacacgaagacgacgagctgaaaccttacgtggagccactgcccgactataaggacccaaggcgcaccgaactgatggtgagcatgggttacacccgagaggagattcaggactccctggtggggcagaggtataacgaggtgatggcaacataccttttactaggttacaaaagctcagagctggagggagataccatcacactcaagccgagaccctccgctgacctgacgaacagtagcgccccatctccctctcacaaggtgcaacggagcgtatcagctaaccccaaacaaagacgattttcagatcaggctgctggtccggctatcccaacgtcaaacagttacagcaagaagactcagtcaaataatgccgaaaacaagcggccagaggaggatcgtgaaagcggccgaaaagccagtagcacagccaaagtgccggcttctcccctgccaggtttggagcgtaaaaaaaccaccccgacaccatctaccaattccgtgctatcaacaagtaccaataggtcacggaactccccacttctggaacgggcatcactgggccaggcgtctattcagaacggcaaggatagtctgaccatgccgggatcacgggctagtacggcctcagcttccgccgctgtttccgccgcacggcctcgccagcaccagaagtccatgtccgccagcgtgcaccccaataaggctagcggactgcctcctaccgaaagtaactgcgaagtcccgagaccatccacagccccacagcgcgtgcccgtggcttctccctccgctcataacatttctagctctggcggagcccctgacagaactaacttccccaggggtgtgagttcccggagcacattccatgcaggtcagctaagacaggtgcgggatcagcaaaatcttccttacggcgttacgccagcttccccatctgggcatagtcaaggacggagaggtgctagtggtagtatcttcagtaaattcacaagcaaatttgttcgacgcaatctgaatgaacctgaatcaaaagatcgggtagaaacactaaggcctcatgtagtaggttctggcggaaatgacaaagagaaggaagagttccgggaagccaagccgcgtagtctgaggttcacctggtccatgaaaacgacatcatcaatggaacccaacgagatgatgcgagagatacgtaaagtcctggatgccaactcatgtcagtccgaacttcacgagaagtacatgctgctgtgcatgcatggaacacctggacacgaggactttgtccagtgggaaatggaagtgtgcaagcttcctcgactatcactaaacggtgttcggttcaagcgtatctctggcacaagcatggccttcaaaaacattgcttctaagatcgcaaacgaactcaaactttag

SEQ ID NO: 31789 - DNA, 2322 bp, Artificial Sequence
  derived and/or modified sequence
atgagctctgcaaggacaccgctcccaactttgaatgaacgagacacagaacagcccactttaggacacctggactcaaagccctctagtaaaagcaatatgattaggggcagaaacagcgccactagtgccgatgaacaaccacatatcgggaactatagactcctgaaaacaatcgggaagggaaatttcgcaaaagttaagctggccaggcacatcctcactgggaaggaagtggccgttaagatcattgataagacacagcttaactccagtagcctacagaaactttttagggaggtgcggataatgaaggtgctgaaccatcccaacatcgtgaaactcttcgaagtgatcgaaaccgagaagaccctctatctggtgatggagtacgcctcaggaggagaagtcttcgactacttggttgcacatggcagaatgaaagaaaaagaggctagggccaagttccggcagatcgtgtccgctgttcagtactgtcatcagaagttcattgtgcaccgagatttgaaggccgagaatctgcttctcgatgccgatatgaacataaagatagcagacttcgggttcagtaatgaatttactttcgggaacaagttagatactttctgtggcagccccccatacgctgcgcctgaactatttcagggtaagaagtatgatgggccagaagtagacgtgtggagcctgggagtgatcttgtatacgctcgtgagcggctccctccccttcgacgggcaaaatctgaaagagctgcgcgagcgtgtactccgaggcaaatatcgaatccccttctatatgagcacggactgtgagaacctgctgaagaagttccttattttgaatccctcaaagcggggtaccttggagcagatcatgaaggaccgttggatgaatgtgggccacgaagacgatgagctgaaaccctatgtagaacctctgccagattacaaggacccacgcaggactgagctgatggtgagcatgggctacaccagagaagagatccaagattcactcgtggggcagcggtacaacgaagtaatggcgacttacctgctcctcgggtataagtcgtctgaactggagggagatacgatcacgctcaaaccccgtcccagtgccgatctcaccaactccagtgccccaagcccttcgcacaaggtgcagcgctcagtgtctgcaaacccaaaacagcgcaggttctctgatcaggccgcaggcccagccatccccactagtaactcatactcaaagaaaacacaatcgaataacgctgaaaataagcgacccgaggaggatcgggagagcggacgaaaagcctcttcaacagccaaagtcccagcatctccattgcccggactggaacgaaaaaaaactacgcccactccatctaccaacagtgtgctgagcacgtcaaccaataggtccaggaacagcccactccttgagagagcctccctgggccaggccagcatccaaaatggaaaagattcactcaccatgcctgggagcagagcttctaccgcaagcgcctcggccgctgttagtgccgctcggcctcgccagcaccagaagtccatgtcagcaagtgttcacccaaataaggcgtcaggcctccccccaaccgaaagtaactgtgaggtgccgagacctagtaccgctcctcaacgcgttccagtcgcttccccatccgcacataatatttccagttcgggtggcgctcctgatagaacgaattttccccgtggtgtgtcttcccggtcaactttccatgccggacaattgaggcaggtgcgtgaccagcagaacctgccgtacggcgtgacgcccgcatcccccagcgggcattcccaggggaggcggggagccagtggtagcatttttagtaagtttacctctaagttcgtgcggcgaaacctgtcctttagattcgcacggagaccccatgttgtgggcagtggcggaaatgataaagagaaagaggagtttcgcgaggcgaagccccgttcgctgaggtttacctggtcgatgaaaactacatctagtatggagccaaatgaaatgatgcgggagatcaggaaagtgttggacgctaactcttgccaatcagagttgcatgagaaatatatgctgctctgcatgcacgggaccccgggacacgaagactttgtacagtgggagatggaagtctgcaaactacctagactctccttgaatggtgtacgcttcaagaggatctctggcaccagcatggcttttaaaaatatcgccagtaaaatcgcgaacgaactcaaactctag

SEQ ID NO: 31790 - DNA, 2367 bp, Artificial Sequence
  derived and/or modified sequence
atgtcctccgcgagaacgcctctccccactcttaatgagagagatacagaacaaccaactctcggccacctggattcaaaaccatcttcaaaatctaatatgatccgcggtcgcaactccgccaccagcgctgacgagcagccccacatcggtaactaccgcctcctcaagactatcggaaaggggaactttgccaaggtaaagttagcccgacacatcctcaccgggaaagaagttgcggtgaaaatcatcgacaagacccagctgaacagctccagcctccaaaaactgtttagggaggtgcgcattatgaaggtcctgaatcacccaaacattgtcaaactgtttgaagtgatcgaaactgaaaagactctgtaccttgttatggagtatgcgtcaggaggggaggtttttgactacttagtcgcccacggcagaatgaaagagaaagaagcaagagccaaatttaggcaaatcgttagcgcagtgcagtattgccaccagaaattcatcgtccacagggacctgaaagctgagaacttgctgctggacgccgacatgaatatcaaaatcgccgatttcgggttttcaaacgaatttacgttcggcaacaagctggatactttttgcgggtcccctccctacgctgcgccagaattgttccaaggcaagaaatatgacgggccagaagtggatgtttggagtctcggcgtgatactgtacactttagtttccgggtccctgcccttcgatggacagaatctcaaagaacttagagagcgggtgctcaggggaaaatacaggattcctttttacatgtcaaccgattgcgagaatctcctcaagaagtttctgattctgaacccgtctaagagaggcacattggagcagatcatgaaggatagatggatgaacgtaggacatgaagatgatgagctaaaaccctacgtggagcctttgcccgactacaaggaccctcgcaggacggaattaatggtgtccatggggtacacccgggaggagattcaggattccctggtaggccagcgctataacgaggttatggcgacatatctgctgcttggatataaatccagtgagctggagggagatacgatcaccctgaagcccagaccaagcgccgacctgactaactcatccgcaccttcaccctctcataaggtgcagaggtcggtgtctgctaaccccaagcaaaggcggttctcagatcaagccgcaggtcccgcaattccaacatcaaactcctatagcaagaagacccaatccaacaatgccgagaataagcggccagaggaggatagagagagtgggagaaaggccagttccaccgcaaaagtgcccgcaagcccccttcccggattggaacgcaaaaaaacaacaccaaccccttccaccaattccgtcctttcaacaagcacgaatcgctccagaaattcccctcttctggaaagggcctccctgggccaagcatccatacagaacggcaaggacagcctaaccatgccaggcagtagagcatcgactgcatctgcctcagctgcagtatccgctgctcgcccaagacaacatcagaaatccatgagtgcttctgtccaccccaacaaggcctccggactaccacccactgaatccaactgcgaagtcccacgaccatcgacagcgccacagcgggttcccgtcgcgtcccccagcgcacacaacatctcctcctcaggcggagcccctgacagaacaaacttcccgcgaggcgtgagttccaggtcaacgtttcatgcaggccagctgcgtcaggtccgggaccagcagaacctgccttacggtgtaacccctgctagcccttcaggacactcccagggaagacgtggggcaagcggttctatcttttcaaaatttacatctaaattcgtgcgccgtaacctctcttttcggttcgcgcgaagaaatttaaatgaaccagaatccaaagatagagtggagactctccgcccacacgtagtcgggtccggaggcaacgacaaggagaaagaggagtttcgggaagccaaacctaggagcctgcggttcacatggtccatgaagaccaccagctccatggagccaaatgagatgatgcgcgaaattaggaaagtccttgacgctaattcttgccagagcgagcttcacgaaaagtacatgctgctttgcatgcacggcacccccggacatgaggattttgtacagtgggagatggaagtctgtaagcttcccaggctgtctctgaacggagtcaggttcaagagaatttcgggaacttccatggcctttaagaacatagccagtaaaatcgcgaacgagctgaaactgtag

SEQ ID NO: 31791 - DNA, 2343 bp, Artificial Sequence
  derived and/or modified sequence
atgtcttctgccaggacaccattaccgacactgaatgaacgcgacactgagcagccaacactggggcatttagattccaagccctcttctaagtcaaatatgatcaggggcagaaactcggccacctccgcagacgagcaacctcacattggtaattacagactcctcaagaccatcgggaagggaaattttgccaaggtcaagctggcgagacacatccttacaggaaaggaagtcgcagttaaaattatcgacaaaacccagctgaatagcagctccctgcagaagctgttcagggaggtccgcatcatgaaggtgctgaatcatccgaatatcgtgaaactcttcgaggtcatcgaaaccgaaaagaccctgtacctcgttatggaatacgcttcaggcggtgaagttttcgactaccttgtagctcatggaaggatgaaggaaaaagaagccagagccaaatttcggcaaattgtgtccgctgttcaatattgccaccaaaaatttattgtgcaccgcgacttgaaagccgaaaatcttctcctggatgccgacatgaacattaagatcgccgatttcggcttctctaatgagttcaccttcggtaataagctggacacgttctgtggctctcctccgtatgcggctccggaattattccaaggaaaaaaatatgatggccctgaagttgatgtgtggtccttgggtgttattttgtacacccttgtgagcggatctttgcccttcgatggtcagaatcttaaggagcttcgagaacgcgtcctccggggaaaatatcgcataccattctatatgtccaccgattgcgagaatcttctcaaaaagtttctgatactcaatccatccaagcgaggcacattggaacaaattatgaaagaccgctggatgaatgtggggcacgaggacgacgaattaaaaccctacgtcgagcccctcccagattacaaagaccccagacggaccgagctgatggtctcgatgggatatacccgggaggagatccaggactctttggtaggccaacggtacaacgaagtcatggccacatatttactgctgggttacaaaagcagtgagctggagggagataccataacactgaagccacgtcccagtgccgacttgactaacagtagcgccccaagtccttcccataaagtgcagcgctccgtatcagccaacccgaaacagaggaggttttcagaccaggccggtcccgctatccccacaagtaacagttattccaaaaaaacgcagtcgaacaatgccgagaacaaaaggcctgaagaggatcgagagtcaggaaggaaggcaagcagtaccgccaaggttcctgcaagtcccctccctggcctcgagcgcaaaaaaacaaccccgacgccaagcaccaacagcgtgctttcgacgagcactaataggagcaggaactccccgctgctggaacgtgcttcactgggacaggcaagcatccagaatggcaaggactctctcacaatgcccggttcacgagcaagcaccgctagcgcctccgccgctgtgtccgcagctaggccacgccaacatcagaaatcgatgtcagcatccgtacacccgaataaagcctctggcctccccccaaccgaatctaactgcgaagtccctcgacctagacaggttaccgcccctcagagagtgcctgtcgcttctcccagtgcacataacattagcagctctggaggtgcgccagatcgcaccaactttcctaggggcgtatcgagccggtccacttttcacgcaggccagttgcggcaggtgcgcgaccagcaaaacctgccttacggcgtgacccccgcttctccttcaggccattcgcagggacggaggggggcaagtggctctatttttagtaagttcacctcgaaattcgtgaggcgcaatctgaacgagcccgagtccaaggatcgcgtggaaacactcagaccacatgtggttgggtccgggggaaacgacaaggaaaaggaagagttccgggaggccaaaccccgatctcttagattcacctggagcatgaaaacgacatcttccatggagccaaatgagatgatgcgagaaataagaaaagtactcgatgctaacagttgccagagcgaactgcatgaaaaatatatgttgctgtgcatgcacggtacaccaggtcacgaagattttgttcaatgggagatggaagtatgcaaacttccacgtctgtctctcaacggagttcgcttcaaaagaataagtggcacatccatggctttcaaaaatatcgcctccaaaatcgcgaatgagttaaagctgtag

SEQ ID NO: 31792 - DNA, 126 bp, Artificial Sequence
  derived and/or modified sequence
atgtccagcgcacgaactccactgcccactcttaacgagcgggacacagagcagcctaccctgggacacctggactcgaagcccagttctaagtccaatatgatccgagggaggaatagcgcatag

SEQ ID NO: 31793 - DNA, 2340 bp, Artificial Sequence
  derived and/or modified sequence
atgagcagcgccagaacccccctgcccaccctgaacgagagagacaccgagcagcccaccctgggccacctggacagcaagcccagcagcaagagcaacatgatcagaggcagaaacagcgccaccagcgccgacgagcagccccacatcggcaactacagactgctgaagaccatcggcaagggcaacttcgccaaggtgaagctggccagacacatcctgaccggcaaggaggtggccgtgaagatcatcgacaagacccagctgaacagcagcagcctgcagaagctgttcagagaggtgagaatcatgaaggtgctgaaccaccccaacatcgtgaagctgttcgaggtgatcgagaccgagaagaccctgtacctggtgatggagtacgccagcggcggcgaggtgttcgactacctggtggcccacggcagaatgaaggagaaggaggccagagccaagttcagacagatcgtgagcgccgtgcagtactgccaccagaagttcatcgtgcacagagacctgaaggccgagaacctgctgctggacgccgacatgaacatcaagatcgccgacttcggcttcagcaacgagttcaccttcggcaacaagctggacaccttctgcggcagccccccctacgccgcccccgagctgttccagggcaagaagtacgacggccccgaggtggacgtgtggagcctgggcgtgatcctgtacaccctggtgagcggcagcctgcccttcgacggccagaacctgaaggagctgagagagagagtgctgagaggcaagtacagaatccccttctacatgagcaccgactgcgagaacctgctgaagaagttcctgatcctgaaccccagcaagagaggcaccctggagcagatcatgaaggacagatggatgaacgtgggccacgaggacgacgagctgaagccctacgtggagcccctgcccgactacaaggaccccagaagaaccgagctgatggtgagcatgggctacaccagagaggagatccaggacagcctggtgggccagagatacaacgaggtgatggccacctacctgctgctgggctacaagagcagcgagctggagggcgacaccatcaccctgaagcccagacccagcgccgacctgaccaacagcagcgcccccagccccagccacaaggtgcagagaagcgtgagcgccaaccccaagcagagaagattcagcgaccaggccgccggccccgccatccccaccagcaacagctacagcaagaagacccagagcaacaacgccgagaacaagagacccgaggaggacagagagagcggcagaaaggccagcagcaccgccaaggtgcccgccagccccctgcccggcctggagagaaagaagaccacccccacccccagcaccaacagcgtgctgagcaccagcaccaacagaagcagaaacagccccctgctggagagagccagcctgggccaggccagcatccagaacggcaaggacagcctgaccatgcccggcagcagagccagcaccgccagcgccagcgccgccgtgagcgccgccagacccagacagcaccagaagagcatgagcgccagcgtgcaccccaacaaggccagcggcctgccccccaccgagagcaactgcgaggtgcccagacccagcaccgccccccagagagtgcccgtggccagccccagcgcccacaacatcagcagcagcggcggcgcccccgacagaaccaacttccccagaggcgtgagcagcagaagcaccttccacgccggccagctgagacaggtgagagaccagcagaacctgccctacggcgtgacccccgccagccccagcggccacagccagggcagaagaggcgccagcggcagcatcttcagcaagttcaccagcaagttcgtgagaagaaacctgaacgagcccgagagcaaggacagagtggagaccctgagaccccacgtggtgggcagcggcggcaacgacaaggagaaggaggagttcagagaggccaagcccagaagcctgagattcacctggagcatgaagaccaccagcagcatggagcccaacgagatgatgagagagatcagaaaggtgctggacgccaacagctgccagagcgagctgcacgagaagtacatgctgctgtgcatgcacggcacccccggccacgaggacttcgtgcagtgggagatggaggtgtgcaagctgcccagactgagcctgaacggcgtgagattcaagagaatcagcggcaccagcatggccttcaagaacatcgccagcaagatcgccaacgagctgaagctgtag

SEQ ID NO: 31794 - DNA, 2322 bp, Artificial Sequence
  derived and/or modified sequence
atgagcagcgccagaacccccctgcccaccctgaacgagagagacaccgagcagcccaccctgggccacctggacagcaagcccagcagcaagagcaacatgatcagaggcagaaacagcgccaccagcgccgacgagcagccccacatcggcaactacagactgctgaagaccatcggcaagggcaacttcgccaaggtgaagctggccagacacatcctgaccggcaaggaggtggccgtgaagatcatcgacaagacccagctgaacagcagcagcctgcagaagctgttcagagaggtgagaatcatgaaggtgctgaaccaccccaacatcgtgaagctgttcgaggtgatcgagaccgagaagaccctgtacctggtgatggagtacgccagcggcggcgaggtgttcgactacctggtggcccacggcagaatgaaggagaaggaggccagagccaagttcagacagatcgtgagcgccgtgcagtactgccaccagaagttcatcgtgcacagagacctgaaggccgagaacctgctgctggacgccgacatgaacatcaagatcgccgacttcggcttcagcaacgagttcaccttcggcaacaagctggacaccttctgcggcagccccccctacgccgcccccgagctgttccagggcaagaagtacgacggccccgaggtggacgtgtggagcctgggcgtgatcctgtacaccctggtgagcggcagcctgcccttcgacggccagaacctgaaggagctgagagagagagtgctgagaggcaagtacagaatccccttctacatgagcaccgactgcgagaacctgctgaagaagttcctgatcctgaaccccagcaagagaggcaccctggagcagatcatgaaggacagatggatgaacgtgggccacgaggacgacgagctgaagccctacgtggagcccctgcccgactacaaggaccccagaagaaccgagctgatggtgagcatgggctacaccagagaggagatccaggacagcctggtgggccagagatacaacgaggtgatggccacctacctgctgctgggctacaagagcagcgagctggagggcgacaccatcaccctgaagcccagacccagcgccgacctgaccaacagcagcgcccccagccccagccacaaggtgcagagaagcgtgagcgccaaccccaagcagagaagattcagcgaccaggccgccggccccgccatccccaccagcaacagctacagcaagaagacccagagcaacaacgccgagaacaagagacccgaggaggacagagagagcggcagaaaggccagcagcaccgccaaggtgcccgccagccccctgcccggcctggagagaaagaagaccacccccacccccagcaccaacagcgtgctgagcaccagcaccaacagaagcagaaacagccccctgctggagagagccagcctgggccaggccagcatccagaacggcaaggacagcctgaccatgcccggcagcagagccagcaccgccagcgccagcgccgccgtgagcgccgccagacccagacagcaccagaagagcatgagcgccagcgtgcaccccaacaaggccagcggcctgccccccaccgagagcaactgcgaggtgcccagacccagcaccgccccccagagagtgcccgtggccagccccagcgcccacaacatcagcagcagcggcggcgcccccgacagaaccaacttccccagaggcgtgagcagcagaagcaccttccacgccggccagctgagacaggtgagagaccagcagaacctgccctacggcgtgacccccgccagccccagcggccacagccagggcagaagaggcgccagcggcagcatcttcagcaagttcaccagcaagttcgtgagaagaaacctgagcttcagattcgccagaagaccccacgtggtgggcagcggcggcaacgacaaggagaaggaggagttcagagaggccaagcccagaagcctgagattcacctggagcatgaagaccaccagcagcatggagcccaacgagatgatgagagagatcagaaaggtgctggacgccaacagctgccagagcgagctgcacgagaagtacatgctgctgtgcatgcacggcacccccggccacgaggacttcgtgcagtgggagatggaggtgtgcaagctgcccagactgagcctgaacggcgtgagattcaagagaatcagcggcaccagcatggccttcaagaacatcgccagcaagatcgccaacgagctgaagctgtag

SEQ ID NO: 31795 - DNA, 2367 bp, Artificial Sequence
  derived and/or modified sequence
atgagcagcgccagaacccccctgcccaccctgaacgagagagacaccgagcagcccaccctgggccacctggacagcaagcccagcagcaagagcaacatgatcagaggcagaaacagcgccaccagcgccgacgagcagccccacatcggcaactacagactgctgaagaccatcggcaagggcaacttcgccaaggtgaagctggccagacacatcctgaccggcaaggaggtggccgtgaagatcatcgacaagacccagctgaacagcagcagcctgcagaagctgttcagagaggtgagaatcatgaaggtgctgaaccaccccaacatcgtgaagctgttcgaggtgatcgagaccgagaagaccctgtacctggtgatggagtacgccagcggcggcgaggtgttcgactacctggtggcccacggcagaatgaaggagaaggaggccagagccaagttcagacagatcgtgagcgccgtgcagtactgccaccagaagttcatcgtgcacagagacctgaaggccgagaacctgctgctggacgccgacatgaacatcaagatcgccgacttcggcttcagcaacgagttcaccttcggcaacaagctggacaccttctgcggcagccccccctacgccgcccccgagctgttccagggcaagaagtacgacggccccgaggtggacgtgtggagcctgggcgtgatcctgtacaccctggtgagcggcagcctgcccttcgacggccagaacctgaaggagctgagagagagagtgctgagaggcaagtacagaatccccttctacatgagcaccgactgcgagaacctgctgaagaagttcctgatcctgaaccccagcaagagaggcaccctggagcagatcatgaaggacagatggatgaacgtgggccacgaggacgacgagctgaagccctacgtggagcccctgcccgactacaaggaccccagaagaaccgagctgatggtgagcatgggctacaccagagaggagatccaggacagcctggtgggccagagatacaacgaggtgatggccacctacctgctgctgggctacaagagcagcgagctggagggcgacaccatcaccctgaagcccagacccagcgccgacctgaccaacagcagcgcccccagccccagccacaaggtgcagagaagcgtgagcgccaaccccaagcagagaagattcagcgaccaggccgccggccccgccatccccaccagcaacagctacagcaagaagacccagagcaacaacgccgagaacaagagacccgaggaggacagagagagcggcagaaaggccagcagcaccgccaaggtgcccgccagccccctgcccggcctggagagaaagaagaccacccccacccccagcaccaacagcgtgctgagcaccagcaccaacagaagcagaaacagccccctgctggagagagccagcctgggccaggccagcatccagaacggcaaggacagcctgaccatgcccggcagcagagccagcaccgccagcgccagcgccgccgtgagcgccgccagacccagacagcaccagaagagcatgagcgccagcgtgcaccccaacaaggccagcggcctgccccccaccgagagcaactgcgaggtgcccagacccagcaccgccccccagagagtgcccgtggccagccccagcgcccacaacatcagcagcagcggcggcgcccccgacagaaccaacttccccagaggcgtgagcagcagaagcaccttccacgccggccagctgagacaggtgagagaccagcagaacctgccctacggcgtgacccccgccagccccagcggccacagccagggcagaagaggcgccagcggcagcatcttcagcaagttcaccagcaagttcgtgagaagaaacctgagcttcagattcgccagaagaaacctgaacgagcccgagagcaaggacagagtggagaccctgagaccccacgtggtgggcagcggcggcaacgacaaggagaaggaggagttcagagaggccaagcccagaagcctgagattcacctggagcatgaagaccaccagcagcatggagcccaacgagatgatgagagagatcagaaaggtgctggacgccaacagctgccagagcgagctgcacgagaagtacatgctgctgtgcatgcacggcacccccggccacgaggacttcgtgcagtgggagatggaggtgtgcaagctgcccagactgagcctgaacggcgtgagattcaagagaatcagcggcaccagcatggccttcaagaacatcgccagcaagatcgccaacgagctgaagctgtag

SEQ ID NO: 31796 - DNA, 2343 bp, Artificial Sequence
  derived and/or modified sequence
atgagcagcgccagaacccccctgcccaccctgaacgagagagacaccgagcagcccaccctgggccacctggacagcaagcccagcagcaagagcaacatgatcagaggcagaaacagcgccaccagcgccgacgagcagccccacatcggcaactacagactgctgaagaccatcggcaagggcaacttcgccaaggtgaagctggccagacacatcctgaccggcaaggaggtggccgtgaagatcatcgacaagacccagctgaacagcagcagcctgcagaagctgttcagagaggtgagaatcatgaaggtgctgaaccaccccaacatcgtgaagctgttcgaggtgatcgagaccgagaagaccctgtacctggtgatggagtacgccagcggcggcgaggtgttcgactacctggtggcccacggcagaatgaaggagaaggaggccagagccaagttcagacagatcgtgagcgccgtgcagtactgccaccagaagttcatcgtgcacagagacctgaaggccgagaacctgctgctggacgccgacatgaacatcaagatcgccgacttcggcttcagcaacgagttcaccttcggcaacaagctggacaccttctgcggcagccccccctacgccgcccccgagctgttccagggcaagaagtacgacggccccgaggtggacgtgtggagcctgggcgtgatcctgtacaccctggtgagcggcagcctgcccttcgacggccagaacctgaaggagctgagagagagagtgctgagaggcaagtacagaatccccttctacatgagcaccgactgcgagaacctgctgaagaagttcctgatcctgaaccccagcaagagaggcaccctggagcagatcatgaaggacagatggatgaacgtgggccacgaggacgacgagctgaagccctacgtggagcccctgcccgactacaaggaccccagaagaaccgagctgatggtgagcatgggctacaccagagaggagatccaggacagcctggtgggccagagatacaacgaggtgatggccacctacctgctgctgggctacaagagcagcgagctggagggcgacaccatcaccctgaagcccagacccagcgccgacctgaccaacagcagcgcccccagccccagccacaaggtgcagagaagcgtgagcgccaaccccaagcagagaagattcagcgaccaggccggccccgccatccccaccagcaacagctacagcaagaagacccagagcaacaacgccgagaacaagagacccgaggaggacagagagagcggcagaaaggccagcagcaccgccaaggtgcccgccagccccctgcccggcctggagagaaagaagaccacccccacccccagcaccaacagcgtgctgagcaccagcaccaacagaagcagaaacagccccctgctggagagagccagcctgggccaggccagcatccagaacggcaaggacagcctgaccatgcccggcagcagagccagcaccgccagcgccagcgccgccgtgagcgccgccagacccagacagcaccagaagagcatgagcgccagcgtgcaccccaacaaggccagcggcctgccccccaccgagagcaactgcgaggtgcccagacccagacaggtgaccgccccccagagagtgcccgtggccagccccagcgcccacaacatcagcagcagcggcggcgcccccgacagaaccaacttccccagaggcgtgagcagcagaagcaccttccacgccggccagctgagacaggtgagagaccagcagaacctgccctacggcgtgacccccgccagccccagcggccacagccagggcagaagaggcgccagcggcagcatcttcagcaagttcaccagcaagttcgtgagaagaaacctgaacgagcccgagagcaaggacagagtggagaccctgagaccccacgtggtgggcagcggcggcaacgacaaggagaaggaggagttcagagaggccaagcccagaagcctgagattcacctggagcatgaagaccaccagcagcatggagcccaacgagatgatgagagagatcagaaaggtgctggacgccaacagctgccagagcgagctgcacgagaagtacatgctgctgtgcatgcacggcacccccggccacgaggacttcgtgcagtgggagatggaggtgtgcaagctgcccagactgagcctgaacggcgtgagattcaagagaatcagcggcaccagcatggccttcaagaacatcgccagcaagatcgccaacgagctgaagctgtag

SEQ ID NO: 31797 - DNA, 126 bp, Artificial Sequence
  derived and/or modified sequence
atgagcagcgccagaacccccctgcccaccctgaacgagagagacaccgagcagcccaccctgggccacctggacagcaagcccagcagcaagagcaacatgatcagaggcagaaacagcgcctag

SEQ ID NO: 31798 - DNA, 1170 bp, Artificial Sequence
  derived and/or modified sequence
atggccgacggcaacgagggcccccagagccccttccaccacatcctgcccaagtgcaagctggccagagacctgaaggaggcctacgacagcctgtgcaccagcggcgtggtgagactgcacatcaacagctggctggaggtgagcttctgcctgccccacaagatccactacgccgccagcagcctgatcccccccgaggccatcgagagaagcctgaaggccatcagaccctaccacgccctgctgctgctgagcgacgagaagagcctgctgggcgagctgcccatcgactgcagccccgccctggtgagagtgatcaagaccaccagcgccgtgaagaacctgcagcagctggcccaggacgccgacctggccctgctgcaggtgttccagctggccgcccacctggtgtactggggcaaggccatcatcatctaccccctgtgcgagaacaacgtgtacatgctgagccccaacgccagcgtgtgcctgtacagccccctggccgagcagttcagccaccagttccccagccacgacctgcccagcgtgctggccaagttcagcctgcccgtgagcctgagcgagttcagaaaccccctggcccccgccgtgcaggagacccagctgatccagatggtggtgtggatgctgcagagaagactgctgatccagctgcacacctacgtgtgcctgatggccagccccagcgaggaggagcccagacccagagaggacgacgtgcccttcaccgccagagtgggcggcagaagcctgagcacccccaacgccctgagcttcggcagccccaccagcagcgacgacatgaccctgaccagccccagcatggacaacagcagcgccgagctgctgcccagcggcgacagccccctgaaccagagaatgaccgagaacctgggccagctgagcgagcacgagagagccgccatcctgagcgtgcccgccgcccagaaccccgaggacctgagaatgttcgccagactgctgcactacttcagaggcagacaccacctggaggagatcatgtacaacgagaacaccagaagaagccagctgctgatgctgttcgacaagttcagaagcgtgctggtggtgaccacccacgaggaccccgtgatcgccgtgttccaggccctgctgccctag

SEQ ID NO: 31799 - DNA, 1170 bp, Artificial Sequence
  derived and/or modified sequence
atggccgacgggaacgaagggccccagtctccattccaccacattctccccaaatgtaaactcgctcgcgacctcaaagaagcatatgactccctctgcacctcaggagtcgtgagattacatatcaatagttggctggaggtctctttttgcctgccacataagattcattacgccgccagctccctaatccctcccgaagccatcgagaggtctttaaaagccattcgcccctaccatgccctgctgctccttagtgatgagaaatctctgctgggcgaactacctattgactgctcacccgccctggtcagagtgatcaagaccacatcagctgtgaagaacctccaacagctcgcccaggatgccgacctcgcactgctgcaggtctttcagttggctgcacaccttgtgtactggggaaaagcaattataatctatcctctgtgcgagaacaacgtctatatgctttctcctaacgccagtgtctgcctgtatagtcccttggccgagcaattttcacatcaattccccagtcatgacctcccttctgtcctggccaaatttagcttgccagtttcattgagcgagttccgtaaccccctcgctcctgccgtgcaagaaactcaactgatccagatggtcgtttggatgcttcaacgccggctgctaatccagctgcatacttacgtatgtcttatggctagtccatccgaggaagaacctagaccccgggaggatgatgtaccatttacggcccgggtaggcgggcggagtctgtctactcccaacgcattgtcctttggaagtcccaccagttcggatgacatgacccttacaagcccctctatggataattcctcggccgagcttctccctagtggggattcccctctgaaccaaaggatgacagagaatctcggacagctgtctgagcatgagagggcagccattctgagcgttccggccgcccaaaatccagaggatctgcgaatgttcgccaggctgttacactattttcggggtagacatcacctcgaagaaattatgtataacgaaaatactcgacgctcacaactcctcatgctgttcgataagttccggagtgtgctggtggtgaccacgcacgaggaccccgtaattgccgtgttccaggccctgttaccatag

SEQ ID NO: 31800 - DNA, 1170 bp, Artificial Sequence
  derived and/or modified sequence
atggctgatggaaatgaaggcccccagagccccttccaccacatcctgcccaagtgcaagctggcccgggacctgaaggaggcctatgacagcctgtgcaccagcggcgtggtgcggctgcacatcaacagctggctggaggtgtccttctgcctgccccacaagatccactatgctgccagcagcctcatccccccagaggccatcgagaggagcctgaaggccatccggccctaccacgccctgctgctgctgagtgatgagaagagcctgctgggggagctgcccatcgactgcagccctgccctggtgcgggtcatcaagaccaccagcgctgtgaagaacctgcagcagctggcccaggatgctgacctggccctgctgcaggtgttccagctggccgcccacctggtgtactggggcaaggccatcatcatctaccccctgtgtgaaaataatgtgtacatgctgagccccaatgcctctgtgtgcctgtacagccccctggccgagcagttcagccaccagttccccagccatgacctgcccagcgtgctggccaagttcagcctgcctgtgtccctgtctgagttcaggaaccccctggccccagctgtgcaggagacccagctgatccagatggtggtgtggatgctgcagaggcggctgctgatccagctgcacacctacgtgtgcctgatggccagccccagcgaggaggagccccggccccgggaggatgatgtgcccttcaccgcccgggtgggcggccgcagcctgagcaccccaaatgccctgagctttggcagccccaccagcagtgatgacatgaccctgaccagccccagcatggacaacagcagcgctgagctgctgcccagcggggacagccccctgaaccagaggatgacagagaacctgggccagctgtctgaacatgagcgggccgccatcctgtctgtgcctgctgcccagaaccctgaggacctgaggatgtttgcccggctgctgcactacttccggggccgccaccacctggaggagatcatgtacaatgaaaacacccggcgcagccagctgctgatgctgtttgacaagttccgctctgtgctggtggtgaccacccatgaagatcctgtgattgctgtgttccaggccctgctgccctag

SEQ ID NO: 31801 - DNA, 1170 bp, Artificial Sequence
  derived and/or modified sequence
atggccgacggcaacgagggcccccagagccccttccaccacatcctgcccaaatgcaaactcgcgagagatctcaaggaggcatacgacagcctgtgtaccagtggagtggtgcggctgcacatcaatagttggttagaagttagtttttgtctgccccacaagattcattacgccgcctcatccttgatccctccggaagctatcgagagaagcctcaaggccatcaggccttaccacgcactactcctgctgtctgacgagaaatcactcctgggcgaactgccaatcgattgcagtcccgccttagtgcgcgtaattaagacaaccagcgctgtgaaaaatctccaacagctagctcaagacgctgacctggccctcctccaggtgttccagcttgctgcacacctggtctactgggggaaggctatcataatctatcctctgtgtgagaacaacgtctacatgctgtcaccaaacgctagcgtatgcctgtactccccacttgcagagcaattttctcatcaattcccatcccacgacctgccttctgtcctggccaaattcagtctccctgtgtccctctccgaattcagaaatccactggctcctgcagttcaggagacacaacttatccagatggtcgtgtggatgcttcagaggagacttctgatacaactgcacacatacgtttgcttgatggcgtccccttccgaggaagagccccgacctcgcgaagacgacgtcccgttcacggctcgcgttggtggacggtccctgagcactcctaatgccctgtcgtttggatcccccacatcttcagacgatatgaccttgacttctccaagcatggataattcatctgctgaacttcttccatctggtgattccccactcaatcagaggatgactgagaatctgggacagctgagcgagcatgaaagggctgccatcctctcggtcccagctgcccagaaccccgaggatcttaggatgtttgcacggctcttacactactttcgcggcaggcatcacttagaagagattatgtataatgaaaatacaaggcgcagccagctgctcatgctgttcgacaaattccgttcagtactcgtcgtgacaactcatgaagatcctgtgatagccgtgtttcaggccctgctgccctag

SEQ ID NO: 31802 - DNA, 1170 bp, Artificial Sequence
  derived and/or modified sequence
atggcagatggaaacgaaggcccacaatcaccttttcaccacatcctcccaaaatgcaagctggccagggatctgaaagaagcctatgacagtttgtgtacctctggagtagtccgcctgcatattaactcctggctggaagtaagcttctgtctgccccataagatccattacgcagcctcctctctcatacctccagaggctatcgaaagatccctgaaggcaatcaggccctatcatgctctcctgcttctgtcagacgagaagtctctactcggcgaactgcctattgactgctcacccgcactcgttcgggttatcaagaccacctccgcagtgaaaaacttacagcagctggcccaggatgccgacttggccctgctccaggtgttccagctggccgcacacctggtctactggggtaaggcgatcatcatttaccccctctgcgaaaataacgtgtatatgttaagccccaatgcctctgtctgtctctactccccattagcagagcaatttagccaccaattcccaagccacgacctgccaagcgtactggcgaaattctccctacctgtctccctctccgagtttaggaatccactggcccctgcggtgcaggaaacacagctgatccagatggtagtctggatgttgcagcgccgtctgctgatacagctccacacttacgtgtgcttgatggcatcaccctccgaggaggaacctcgacccagagaagacgacgtgccttttactgcaagagtggggggtaggtccctttccacaccaaatgccctgagttttgggtctccgacctcaagtgatgatatgaccttgacatccccttccatggataactcgtctgccgaactcctgccctcaggagattcccccctgaaccaaagaatgaccgaaaacctaggccaactatcagaacacgagagagccgctatccttagtgtgcccgctgcccagaacccagaagaccttcgcatgttcgccagactcctccattacttccgcggtaggcatcaccttgaagaaataatgtacaacgagaatactagacggagccagctgctcatgttgttcgacaaatttagaagtgtactggtagtcaccactcatgaagatccagttatcgcagtgttccaagccctgctgccttag

SEQ ID NO: 31803 - protein, 258 aa, Artificial Sequence
  derived and/or modified sequence
MLCGRPRSSSDNRNFLRERAGLSSAAVQTRIGNSAASRRSPAARPPVPAPPALPRGRPGTEGSTSLSAPAVLVVAVAVVVVVVSAVAWAMANYIHVPPGSPEVPKLNVTVQDQEEHRCREGALSLLQHLRPHWDPQEVTLQLFTDGITNKLIGCYVGNTMEDVVLVRIYGNKTELLVDRDEEVKSFRVLQAHGCAPQLYCTFNNGLCYEFIQGEALDPKHVCNPAIFSLSSLTLCKGKTTRCFGLTGCRGSRLLLSFF

SEQ ID NO: 31804 - DNA, 777 bp, Artificial Sequence
  derived and/or modified sequence
atgctctgtggacggcctagatcctcatctgataaccgcaatttcctgcgtgaacgcgccggtttgtccagcgccgccgtgcagacccgtatcggaaacagcgcagcttcccgaagaagccccgccgctagaccacccgtgcccgctcctcccgctcttccacggggaaggccgggaacggagggcagtacgagtttgtccgcccccgccgttcttgtggttgcagtcgctgtcgtcgtggtggttgtctcagccgtcgcttgggccatggccaattacatccatgttccacctggatcaccggaagtgccaaagcttaatgttacggtgcaggaccaggaggagcacaggtgcagagagggtgctctgagcctcttgcaacacctgagaccacactgggacccacaggaagtaaccttgcagctgttcacagatggaatcactaataagctgattggttgttacgtggggaacaccatggaggatgtagtcctcgtgcgtatctatggtaacaagacggaactattggtggacagagatgaagaggtcaaatctttccgggtgctgcaggcacacggatgcgcccctcagctgtactgcacttttaacaatgggctatgctacgagtttatccagggagaagctctggatccaaagcacgtgtgcaacccggccattttcagtcttagcagcttgacactgtgcaaaggcaagacaactcggtgcttcggtctgactggttgccggggctcacggttactcctctccttcttctag

SEQ ID NO: 31805 - DNA, 777 bp, Artificial Sequence
  derived and/or modified sequence
atgctgtgtggccggcccaggagcagcagtgacaacagaaacttcctgcgggagcgggccggcctgagcagcgctgctgtgcagaccagaattggcaacagcgctgccagccgccgcagccctgctgcccggccccctgtgcctgcccccccagccctgccccggggccggcccggcacagagggcagcaccagcctgagcgccccagctgtgctggtggtggccgtggccgtggtggtggtggtggtgtctgctgtggcctgggccatggccaactacatccacgtgcccccaggcagccctgaggtgcccaagctgaatgtgacagtgcaggaccaggaggagcaccgctgccgggagggcgccctgagcctgctgcagcacctgcggccccactgggacccccaggaggtgaccctgcagctgttcacagatggcatcaccaacaagctgattggctgctacgtgggcaacaccatggaggatgtggtgctggtgcgcatctacggcaacaagacagagctgctggtggacagagatgaggaggtgaagagcttccgggtgctgcaggcccacggctgtgccccccagctgtactgcaccttcaacaacggcctgtgctatgagttcatccagggcgaggccctggaccccaagcacgtgtgcaacccagccatcttcagcctgagcagcctgaccctgtgcaagggcaagaccacccgctgcttcggcctgaccggctgccggggcagccggctgctgctgtccttcttctag

SEQ ID NO: 31806 - DNA, 777 bp, Artificial Sequence
  derived and/or modified sequence
atgctgtgcggccggccccggagcagcagcgacaaccggaacttcttgagggaacgagcaggtctgtcatccgccgccgtgcagacacgaatcggtaactcagccgcctcccggcgtagccctgcggcccgccccccagtgccggccccccccgcgctgccgagaggccggcctggaacagaaggatccaccagtctttcggcgccagccgttttggtcgtggctgtggccgtcgtcgtggtagttgtgtcagccgtcgcctgggctatggccaactatatccatgtgccccccgggtcgcctgaagttccgaagctcaatgtcaccgtccaggaccaggaggagcaccggtgccgcgagggagctttgtcactattgcagcacctgaggccgcactgggatccacaggaggtcaccctccagctgttcaccgacggaattaccaataaactgataggttgttatgtggggaacactatggaggatgtggtgctggtccgtatctacggaaataaaacagaattgctggtcgacagggacgaggaggtcaaatcgttccgagtgcttcaagcacatggctgtgcacctcagctctattgcacatttaacaatggattatgctatgagtttatacagggggaggcattggaccctaaacacgtgtgcaaccctgcaatattctcactgagttccctgacactgtgtaagggcaagactaccaggtgctttggcctcacagggtgcagaggtagtcgtctgcttttgagcttcttctag

SEQ ID NO: 31807 - DNA, 777 bp, Artificial Sequence
  derived and/or modified sequence
atgctctgtgggaggcctaggagttcgtccgacaacagaaattttctgagagagagggctggcctgagctctgccgctgttcagactcgaatcggaaacagcgccgcaagcaggaggtcacctgcagccagaccaccagtccctgccccacccgctctccctagaggacgacctggaactgaaggatcaacttctctgagcgctccagcagtgctggtggtcgctgtcgccgtggtagtagttgtggtcagcgctgtagcatgggcaatggctaactatattcacgtaccacctggatctccagaagtgccaaagctcaatgtgaccgtacaagaccaagaggagcaccggtgcagggaaggcgctcttagcctcctccaacacctgaggccccattgggacccacaggaggtcacactccagctgttcactgatggaattacaaataaactcatcggctgttacgtcgggaacaccatggaggacgtggtcctcgtgcgcatctacggaaataagactgagctgttggttgacagggatgaggaggtcaagagcttcagggtgctacaggcgcacggctgtgctcctcagctttactgcacttttaacaacggcctatgctacgaatttatacagggagaagccctggaccccaaacacgtatgcaacccagccatcttcagtttgtcttcactcactctgtgcaaaggaaagactacaaggtgttttggtctgacaggctgtagaggatctcggttacttctgtcctttttttag

SEQ ID NO: 31808 - DNA, 777 bp, Artificial Sequence
  derived and/or modified sequence
atgctgtgcggcagacccagaagcagcagcgacaacagaaacttcctgagagagagagccggcctgagcagcgccgccgtgcagaccagaatcggcaacagcgccgccagcagaagaagccccgccgccagaccccccgtgcccgccccccccgccctgcccagaggcagacccggcaccgagggcagcaccagcctgagcgcccccgccgtgctggtggtggccgtggccgtggtggtggtggtggtgagcgccgtggcctgggccatggccaactacatccacgtgccccccggcagccccgaggtgcccaagctgaacgtgaccgtgcaggaccaggaggagcacagatgcagagagggcgccctgagcctgctgcagcacctgagaccccactgggacccccaggaggtgaccctgcagctgttcaccgacggcatcaccaacaagctgatcggctgctacgtgggcaacaccatggaggacgtggtgctggtgagaatctacggcaacaagaccgagctgctggtggacagagacgaggaggtgaagagcttcagagtgctgcaggcccacggctgcgccccccagctgtactgcaccttcaacaacggcctgtgctacgagttcatccagggcgaggccctggaccccaagcacgtgtgcaaccccgccatcttcagcctgagcagcctgaccctgtgcaagggcaagaccaccagatgcttcggcctgaccggctgcagaggcagcagactgctgctgagcttcttctag

SEQ ID NO: 31809 - DNA, 1083 bp, Artificial Sequence
  derived and/or modified sequence
gccagcgtcaggccagccccggcatgctctgcggccgcccgcggtccagctccgacaacaggaattttctccgagagcgggccgggctcagttcagctgctgtccagacccggatcggcaacagtgccgcctccagacgttctcctgccgctcgcccgcccgtcccagcgcccccagccctcccgcgagggcgccccgggacggaaggatccaccagtctgtcggcgcccgccgttctcgtggtcgccgtcgccgtcgtcgtggtggtagtctccgccgtcgcctgggccatggccaattacatccacgtccctcccggctccccggaggtgcccaagctgaacgtcaccgttcaggatcaggaggagcatcgctgccgggagggggccctgagcctcctgcaacacctgcggcctcactgggacccccaggaggtgaccctgcagctcttcacagatggaatcacaaataaacttattggctgttacgtgggaaacaccatggaggatgtagtcctggtgagaatttatggcaataagactgagttattagtcgatcgagatgaggaagtaaagagttttcgagtgttgcaggctcatgggtgtgcaccacaactctactgtaccttcaataatggactatgctatgaatttatacaaggagaagcactggatccaaagcatgtctgcaacccagccattttcagtttatcatcgttgactctttgcaaaggaaaaactacaagatgttttggattaaccggctgcagagggtcaaggcttctgcttagttttttctagttagtgtttgagttgaagtgttatacatttcttactgccgattgcttattacttaattgttcatgttttcagagttcttgcctattaaaattttattaatttggttaacaattctttgttctttacgttgttcattatttaatttaatatattatgttttctataaagaataatgtcatatatgcttgatcatttttccaaaattgccagctttaaaaattctctttctgctcttgaaaactctagaaaatggtctggatttgaaaacagcattcataggtta

SEQ ID NO: 31810 - protein, 253 aa, Artificial Sequence
  derived and/or modified sequence
MGEFNEKKTTCGTVCLKYLLFTYNCCFWLAGLAVMAVGIWTLALKSDYISLLASGTYLATAYILVVAGTVVMVTGVLGCCATFKERRNLLRLYFILLLIIFLLEIIAGILAYAYYQQLNTELKENLKDTMTKRYHQPGHEAVTSAVDQLQQEFHCCGSNNSQDWRDSEWIRSQEAGGRVVPDSCCKTVVALCGQRDHASNIYKVEGGCITKLETFIQEHLRVIGAVGIGIACVQVFGMIFTCCLYRSLKLEHY

SEQ ID NO: 31811 - protein, 180 aa, Artificial Sequence
  derived and/or modified sequence
MGEFNEKKTTCGTVCLKYLLFTYNCCFWLAGLAVMAVGIWTLALKSDYISLLASGTYLATAYILVVAGTVVMVTGVLGCCATFKERRNLLRLYFILLLIIFLLEIIAGILAYAYYQQLNTELKENLKDTMTKRYHQPGHEAVTSAVDQLQQEFHCCGSNNSQDWRDSEWIRSQEAGGRVV

SEQ ID NO: 31812 - protein, 79 aa, Artificial Sequence
  derived and/or modified sequence
MGEFNEKKTTCGTVCLKYLLFTYNCCFWLAGLAVMAVGIWTLALKSDYISLLASGTYLATAYILVVAGTVVMVTGVLGC

SEQ ID NO: 31813 - protein, 92 aa, Artificial Sequence
  derived and/or modified sequence
MGEFNEKKTTCGTVCLKYLLFTYNCCFWLAGLAVMAVGIWTLALKSDYISLLASGTYLATAYILVVAGTVVMVTGVLGCCATFKERRNLLRL

SEQ ID NO: 31814 - protein, 65 aa, Artificial Sequence
  derived and/or modified sequence
MGEFNEKKTTCGTVCLKYLLFTYNCCFWLAGLAVMAVGIWTLALKSDYISLLASGTYLATAYILV

SEQ ID NO: 31815 - protein, 176 aa, Artificial Sequence
  derived and/or modified sequence
MGEFNEKKTTCGTVCLKYLLFTYNCCFWLAGLAVMAVGIWTLALKSDYISLLASGTYLATAYILVVAGTVVMVTGVLGCCATFKERRNLLRLYFILLLIIFLLEIIAGILAYAYYQQLNTELKENLKDTMTKRYHQPGHEAVTSAVDQLQQEFHCCGSNNSQDWRDSEWIRSQEAG

SEQ ID NO: 31816 - protein, 90 aa, Artificial Sequence
  derived and/or modified sequence
MGEFNEKKTTCGTVCLKYLLFTYNCCFWLAGLAVMAVGIWTLALKSDYISLLASGTYLATAYILVVAGTVVMVTGVLGCCATFKERRNLL

SEQ ID NO: 31817 - protein, 170 aa, Artificial Sequence
  derived and/or modified sequence
MGEFNEKKTTCGTVCLKYLLFTYNCCFWLAGLAVMAVGIWTLALKSDYISLLASGTYLATAYILVVAGTVVMVTGVLGCCATFKERRNLLRLYFILLLIIFLLEIIAGILAYAYYQQLNTELKENLKDTMTKRYHQPGHEAVTSAVDQLQQEFHCCGSNNSQDWRDSEWI

SEQ ID NO: 31818 - DNA, 762 bp, Artificial Sequence
  derived and/or modified sequence
atgggagagtttaacgaaaaaaagaccacatgcggtacggtgtgtttgaaatatctgctgtttacgtacaactgctgcttctggctggccggactcgctgttatggctgtgggaatctggaccctcgccctgaagtctgattacatcagcctcctggcaagcggtacttatctcgccacagcttatatcctggtcgtagctggaactgtcgtgatggttacaggcgtcctggggtgctgtgcgaccttcaaagagcgccggaacctactccgactgtatttcatcctcctgttaattatcttcttacttgagatcattgctgggattttagcttacgcttattatcagcaactaaacacggaattgaaagaaaacctgaaggacaccatgactaagagatatcatcagccaggtcacgaagccgtgacttccgccgtggatcagttgcaacaagagtttcattgctgtggaagcaacaactctcaagattggcgggacagcgagtggatccgttcacaggaggcgggtgggagggtggttcctgattcatgttgtaagactgttgtcgcactttgcgggcagcgggatcacgcgtcaaatatctataaggtggaaggaggttgcattactaagcttgagactttcatccaggaacacctgcgtgtgatcggcgcagtcggcatcggaattgcttgcgttcaggtattcggaatgatattcacctgttgtctatatcgatctctgaagcttgaacactactag

SEQ ID NO: 31819 - DNA, 762 bp, Artificial Sequence
  derived and/or modified sequence
atgggagaattcaatgagaagaagacgacctgcggaacagtatgtctcaagtatctgttatttacctacaactgttgtttctggcttgccgggctcgctgtaatggcagtgggtatatggactctggcgctcaaatctgattatatttccctgctggccagtggaacctatctcgcaaccgcgtatattcttgtggtggctggtactgttgtcatggtgacaggagttctcgggtgttgcgccacattcaaagaaagacggaatctgctgcgcctgtatttcattctgctgcttataatctttctcttagaaattattgcaggtattctcgcctacgcgtactaccaacaacttaacacagagctgaaagaaaacctgaaagatacgatgaccaaaagataccaccagcctggtcatgaagcagttactagtgccgtcgatcagctccagcaggaattccactgttgtggctcgaataacagccaggactggcgtgattcagaatggatcagatctcaagaggctggcggacgagtggtgccagactcctgttgcaagaccgtggtggctctctgtggccagcgggatcacgcttctaacatttataaagttgagggcgggtgcatcacaaagctagagacgttcatccaggagcatctgcgcgtaattggtgctgtgggaataggcatcgcttgtgtacaggtgttcgggatgatttttacctgttgcttgtatagatctttgaagcttgagcactattag

SEQ ID NO: 31820 - DNA, 762 bp, Artificial Sequence
  derived and/or modified sequence
atgggggagttcaacgagaaaaagaccacttgtggcacagtgtgtctgaagtaccttctattcacgtacaattgttgtttctggctggctggactggccgttatggctgtggggatatggactttggcattaaaaagcgactatatatcgctgctcgcctccggtacctacctcgctacggcatacatcctggtggttgcaggcacagttgttatggtgaccggggttctcgggtgttgtgctacttttaaagagcggagaaatcttctccgcctgtactttattttgctgctaatcatctttctgctcgagatcattgctggaatactggcatacgcttactaccagcaactgaacacagagctcaaagaaaatctaaaggataccatgacaaagaggtatcaccagcctgggcatgaagcagtgacctccgcagtcgaccagctccaacaagaatttcactgctgtggtagtaataattcacaggattggcgcgactcggagtggatccggtcccaggaggcaggtggccgggtggtgccagattcttgttgtaaaacagtggtcgctctatgcgggcagcgagatcacgcatcaaacatctataaagttgagggcggatgcatcacaaaattagagacatttattcaggagcatctgcgggtgataggagcagttggcataggaattgcttgtgtgcaggtgtttggcatgatttttacatgctgtctgtatcgctcactgaagttggagcactactag

SEQ ID NO: 31821 - DNA, 543 bp, Artificial Sequence
  derived and/or modified sequence
atgggtgagttcaatgagaaaaagactacttgtggcaccgtgtgcttgaagtatctcctgtttacttacaattgttgcttttggttagcaggcctcgctgtgatggctgtgggtatctggacccttgccctgaagagcgattatataagccttctcgctagcgggacgtatttagcaaccgcttacatactggtggtggcagggacagtcgtgatggtaaccggagtgttgggctgctgcgccaccttcaaagagagacggaaccttttgcgactatactttatactgttactcattatcttccttctcgagattatcgccgggattctagcctatgcttactaccagcagcttaacacggagctcaaggaaaacctgaaagataccatgactaagcgttatcatcagcccggccacgaggccgtcacaagtgcggttgatcagctccagcaggaattccattgctgcggatctaataatagccaggactggagggatagcgagtggattaggagccaagaggctggggggagggtggtgtag

SEQ ID NO: 31822 - DNA, 240 bp, Artificial Sequence
  derived and/or modified sequence
atgggtgaattcaacgagaagaagaccacttgcggcacagtatgtcttaaataccttctgtttacatacaactgctgtttctggctggccgggctggccgtgatggccgtggggatatggaccctggcactcaagagcgactacattagcttgttggcctcagggacctatctagccacagcgtacatactggtcgttgcgggaactgtggtaatggtgaccggtgtactgggctgttag

SEQ ID NO: 31823 - DNA, 279 bp, Artificial Sequence
  derived and/or modified sequence
atgggagagtttaacgagaaaaaaacaacatgtggaactgtgtgtctgaaatatctgctgttcacctacaattgctgcttctggctcgcaggactcgctgtcatggcagtggggatctggactctcgcacttaagtcagactacatctccctgctagccagcggtacatacctggccactgcttatatccttgtggtagcaggtaccgtcgtaatggtgactggggtcttggggtgctgcgcgacattcaaagaaagaaggaacctcctgcgcctgtag

SEQ ID NO: 31824 - DNA, 198 bp, Artificial Sequence
  derived and/or modified sequence
atgggtgaatttaacgaaaaaaagaccacctgtggcacagtgtgtcttaagtatcttttattcacatataattgttgcttttggctggctggactggcagtcatggctgtcgggatctggacgcttgcactcaaatccgattatatctctctactggcttccggcacttatttagcaaccgcctacattctggtttag

SEQ ID NO: 31825 - DNA, 531 bp, Artificial Sequence
  derived and/or modified sequence
atgggcgaattcaacgagaagaagacgacttgcggcactgtttgtctcaaatatctgttgtttacatacaactgctgtttttggttggcgggcctggcagtgatggccgtgggtatctggacgctggccctcaaaagcgactacatatccctgcttgcgtcgggtacataccttgctactgcttatatactggtggttgcaggaactgtggtgatggtgacgggtgttctcggctgctgcgccaccttcaaagagcgcaggaacctcttgaggctctattttatcctattgctgataatcttcctcctggagatcatagccgggatcttggcctatgcatactaccagcaactcaatactgaactgaaggagaacttaaaggataccatgaccaagcggtatcaccagcccggtcatgaggccgtaacatcagcagtggaccagctccagcaagaatttcactgctgtggctccaacaattcccaggattggcgggatagtgagtggattcgctcacaggaagctggctag

SEQ ID NO: 31826 - DNA, 543 bp, Artificial Sequence
  derived and/or modified sequence
atgggagaatttaacgagaaaaagaccacctgcgggaccgtgtgcctgaaatacctcctttttacgtacaattgttgtttttggctcgctggactggctgttatggctgtggggatttggacactagctctgaaaagcgactatatctccctgctcgcttcaggcacctatcttgcaactgcttatatactggtcgtggctggcaccgtggttatggtcactggagtactcggctgttgtgccacatttaaagagcgtaggaacttattacgtttgtattttatcctcctgctgataattttcctcctggaaatcattgcaggcatcctggcttacgcatattatcagcagctgaacacagagttgaaggaaaacctgaaggatactatgacgaagcgctaccatcagcctggacatgaggcagttacctccgctgtggaccaactccagcaggaatttcactgttgtggctcaaacaattcgcaggactggcgggattccgagtggattaggtctcaagaggccgggggcagagttgtgtag

SEQ ID NO: 31827 - DNA, 273 bp, Artificial Sequence
  derived and/or modified sequence
atgggggaattcaatgaaaaaaagacgacatgcggaaccgtgtgtttgaaatatttgctgttcacttacaattgctgcttttggctggccggcctggccgtcatggctgtgggcatctggacgttggctcttaagtctgattacatcagcctgctggcatcaggaacctacctggccacagcttacattctagtggttgctgggaccgtggtgatggttaccggggtcctagggtgctgcgccaccttcaaagaacgcaggaacctactatag

SEQ ID NO: 31828 - DNA, 513 bp, Artificial Sequence
  derived and/or modified sequence
atgggagaattcaacgaaaaaaagaccacctgtggtacggtatgcctcaagtatctcttgttcacttataactgctgcttttggctggccgggctggcggtaatggctgtgggtatctggaccctggcactcaaatctgattatatatctctcctggccagcggcacatatctggctaccgcatacatcctggtggtggctggtacggtggtgatggtgactggggtgctgggctgttgcgccacttttaaggagagacggaatctgctgagactgtactttattctgcttctcatcatttttctactggagatcatcgccggcatcctggcttatgcttattatcagcagcttaatacagaacttaaggagaacctgaaggacacaatgacaaaacgctaccatcagcccgggcacgaggcagtcacaagtgcagtagaccagctgcaacaggagttccactgctgcggcagcaacaattctcaggattggcgggatagtgagtggatttag

SEQ ID NO: 31829 - DNA, 762 bp, Artificial Sequence
  derived and/or modified sequence
atgggcgaatttaacgaaaaaaagacgacctgcggaacagtttgcctgaagtatttattgttcacatataactgttgtttctggctggcaggactggccgtgatggccgtagggatctggaccctggccctcaaatcagattacattagcttgttggcatcaggaacctacctggcaacagcatacatcctggtggttgcagggaccgtggtgatggtcacgggagtactcggatgttgtgccacattcaaggagaggaggaacctgctgagactctactttatcctcttgctcataatattcctccttgagataatagccggaatcctcgcctatgcatattatcagcaactgaataccgaactgaaagagaacttgaaggacacgatgacaaagcggtaccaccagcctggtcatgaagctgtcaccagtgccgtcgatcagttgcagcaggagtttcattgttgcggcagcaacaattctcaggactggagagattcagagtggatcaggtcccaggaagccgggggtcgcgttgtgccagactcctgttgtaagactgtggtggccctgtgtggacagcgcgaccatgccagcaatatttacaaggtggagggaggatgtatcactaaattggagacgttcatccaggagcaccttagagtgatcggagctgtgggaatcgggatcgcttgcgtccaagtcttcggtatgatttttacgtgttgcttgtaccgcagcctgaagctcgagcattactag

SEQ ID NO: 31830 - DNA, 762 bp, Artificial Sequence
  derived and/or modified sequence
atgggagagttcaatgagaagaagaccacctgtggcaccgtgtgcctgaagtacctgctcttcacctacaactgctgcttctggctggccggcctggccgtgatggctgtgggcatctggaccctggccctgaagagtgactacatcagcctgctggccagcggcacctacctggccacagcctacatcctggtggtggccggcaccgtggtgatggtgactggagtgctgggctgctgtgccaccttcaaggagaggaggaacctgctgcggctgtacttcatcctgctgctgatcatcttcctgctggagatcatcgccggcatcctggcctatgcctactaccagcagctgaacacagagctgaaggagaacctgaaggacaccatgaccaagcgctaccaccagcccggccatgaagctgtgaccagcgctgtggaccagctgcagcaggagttccactgctgcggcagcaacaacagccaggactggagggacagcgagtggatccgcagccaggaggccggcggccgggtggtgcctgacagctgctgcaagacagtggtggccctgtgtggccagagggaccacgccagcaacatctacaaggtggagggcggctgcatcaccaagctggagaccttcatccaggagcacctgcgggtgattggagctgtgggcatcggcatcgcctgtgtgcaggtgtttggcatgatcttcacctgctgcctgtaccgcagcctgaagctggagcactactag

SEQ ID NO: 31831 - DNA, 543 bp, Artificial Sequence
  derived and/or modified sequence
atgggagagttcaatgagaagaagaccacctgtggcaccgtgtgcctgaagtacctgctcttcacctacaactgctgcttctggctggccggcctggccgtgatggctgtgggcatctggaccctggccctgaagagtgactacatcagcctgctggccagcggcacctacctggccacagcctacatcctggtggtggccggcaccgtggtgatggtgactggagtgctgggctgctgtgccaccttcaaggagaggaggaacctgctgcggctgtacttcatcctgctgctgatcatcttcctgctggagatcatcgccggcatcctggcctatgcctactaccagcagctgaacacagagctgaaggagaacctgaaggacaccatgaccaagcgctaccaccagcccggccatgaagctgtgaccagcgctgtggaccagctgcagcaggagttccactgctgcggcagcaacaacagccaggactggagggacagcgagtggatccgcagccaggaggccggcggccgggtggtgtag

SEQ ID NO: 31832 - DNA, 240 bp, Artificial Sequence
  derived and/or modified sequence
atgggagagttcaatgagaagaagaccacctgtggcaccgtgtgcctgaagtacctgctcttcacctacaactgctgcttctggctggccggcctggccgtgatggctgtgggcatctggaccctggccctgaagagtgactacatcagcctgctggccagcggcacctacctggccacagcctacatcctggtggtggccggcaccgtggtgatggtgactggagtgctgggctgctag

SEQ ID NO: 31833 - DNA, 279 bp, Artificial Sequence
  derived and/or modified sequence
atgggagagttcaatgagaagaagaccacctgtggcaccgtgtgcctgaagtacctgctcttcacctacaactgctgcttctggctggccggcctggccgtgatggctgtgggcatctggaccctggccctgaagagtgactacatcagcctgctggccagcggcacctacctggccacagcctacatcctggtggtggccggcaccgtggtgatggtgactggagtgctgggctgctgtgccaccttcaaggagaggaggaacctgctgcggctgtag

SEQ ID NO: 31834 - DNA, 198 bp, Artificial Sequence
  derived and/or modified sequence
atgggagagttcaatgagaagaagaccacctgtggcaccgtgtgcctgaagtacctgctcttcacctacaactgctgcttctggctggccggcctggccgtgatggctgtgggcatctggaccctggccctgaagagtgactacatcagcctgctggccagcggcacctacctggccacagcctacatcctggtgtag

SEQ ID NO: 31835 - DNA, 531 bp, Artificial Sequence
  derived and/or modified sequence
atgggagagttcaatgagaagaagaccacctgtggcaccgtgtgcctgaagtacctgctcttcacctacaactgctgcttctggctggccggcctggccgtgatggctgtgggcatctggaccctggccctgaagagtgactacatcagcctgctggccagcggcacctacctggccacagcctacatcctggtggtggccggcaccgtggtgatggtgactggagtgctgggctgctgtgccaccttcaaggagaggaggaacctgctgcggctgtacttcatcctgctgctgatcatcttcctgctggagatcatcgccggcatcctggcctatgcctactaccagcagctgaacacagagctgaaggagaacctgaaggacaccatgaccaagcgctaccaccagcccggccatgaagctgtgaccagcgctgtggaccagctgcagcaggagttccactgctgcggcagcaacaacagccaggactggagggacagcgagtggatccgcagccaggaggccggctag

SEQ ID NO: 31836 - DNA, 273 bp, Artificial Sequence
  derived and/or modified sequence
atgggagagttcaatgagaagaagaccacctgtggcaccgtgtgcctgaagtacctgctcttcacctacaactgctgcttctggctggccggcctggccgtgatggctgtgggcatctggaccctggccctgaagagtgactacatcagcctgctggccagcggcacctacctggccacagcctacatcctggtggtggccggcaccgtggtgatggtgactggagtgctgggctgctgtgccaccttcaaggagaggaggaacctgctgtag

SEQ ID NO: 31837 - DNA, 513 bp, Artificial Sequence
  derived and/or modified sequence
atgggagagttcaatgagaagaagaccacctgtggcaccgtgtgcctgaagtacctgctcttcacctacaactgctgcttctggctggccggcctggccgtgatggctgtgggcatctggaccctggccctgaagagtgactacatcagcctgctggccagcggcacctacctggccacagcctacatcctggtggtggccggcaccgtggtgatggtgactggagtgctgggctgctgtgccaccttcaaggagaggaggaacctgctgcggctgtacttcatcctgctgctgatcatcttcctgctggagatcatcgccggcatcctggcctatgcctactaccagcagctgaacacagagctgaaggagaacctgaaggacaccatgaccaagcgctaccaccagcccggccatgaagctgtgaccagcgctgtggaccagctgcagcaggagttccactgctgcggcagcaacaacagccaggactggagggacagcgagtggatctag

SEQ ID NO: 31838 - DNA, 762 bp, Artificial Sequence
  derived and/or modified sequence
atgggcgagttcaacgagaagaagaccacctgcggcaccgtgtgcctcaagtatttactcttcacctacaactgttgcttctggctcgcaggtctagctgttatggctgtgggaatctggacacttgctctcaaatcagattacatctccctactcgcctccgggacttaccttgcgactgcttatatcctggttgtggcagggacggtggttatggtcactggcgtgttgggatgttgcgcaacattcaaagaaagacgcaatttgctgagactttatttcatcttattgctcatcattttcctgcttgagattatcgcaggtattttggcctatgcctactatcagcagttaaacacagaactgaaggagaacctcaaagatactatgactaagagatatcatcagccagggcacgaggctgtcacttccgccgtggatcaactgcagcaggaattccactgctgcggctctaacaacagtcaggattggcgcgacagtgaatggatccggtcacaggaggccggtgggcgtgtcgtcccagatagctgttgtaaaacggttgtcgccctgtgtggtcagcgagaccatgcatctaatatttacaaagtggaaggtggctgcatcacgaagcttgaaacctttatccaggagcatctgagggttataggcgccgtcggaattggaatagcttgtgtgcaggtgttcgggatgatctttacttgttgtctgtacagatcgctaaagcttgagcattactag

SEQ ID NO: 31839 - DNA, 762 bp, Artificial Sequence
  derived and/or modified sequence
atgggcgagttcaacgagaagaagaccacctgcggcaccgtgtgcctaaagtatctactattcacttacaattgctgcttttggctggctgggctggctgttatggccgtggggatttggacattagcacttaaatctgactacatcagtctgctagcatccggcacctatttggcgaccgcctacattcttgtggtcgccggtactgtcgtgatggtcacaggggtgcttggctgttgcgctaccttcaaggaacgccgcaatctattgaggctgtactttattctgctcctcatcatctttttgttagagattattgccgggatccttgcttacgcctattaccaacagctgaacaccgaacttaaagaaaatcttaaagacactatgactaagcgctatcaccaacctggccacgaggcagtcaccagtgctgtcgaccagctgcagcaagaatttcattgctgtggaagtaataacagccaggactggagagacagcgagtggatacgctcccaggaggcagggggtagggttgtcccagatagctgctgtaaaaccgttgtggcgctgtgcggtcagagagaccatgcttccaatatatataaggtcgaaggcggctgtataacaaaacttgagacttttatccaagagcatctgcgcgtaattggcgccgtgggaattggtatcgcttgcgtgcaggtttttggcatgatttttacttgctgcctttataggagcctgaaactggagcactactag

SEQ ID NO: 31840 - DNA, 762 bp, Artificial Sequence
  derived and/or modified sequence
atgggcgagttcaacgagaagaagaccacctgcggcaccgtgtgcctgaaataccttcttttcacatacaactgctgtttttggctggccggcctggccgtgatggctgtcggcatctggacactcgcgcttaaatcggattatatttccctattggcctccgggacttacctggctacggcatacatcctggtagtagccggaacggtggtaatggtgacaggagtcctcggttgctgcgccactttcaaggagcggcgtaacctgctgaggttatacttcattctgcttctcatcatcttcctgttggaaatcatagcaggtatccttgcgtacgcttattaccaacaactgaataccgagctaaaagagaatcttaaggataccatgaccaaaaggtatcatcagcccggccatgaagcagttacaagtgccgtggaccaattgcagcaggaatttcattgctgtgggtctaacaactcacaggactggcgcgatagcgagtggatccggagccaggaggctgggggcagggtagtcccagatagctgctgcaaaactgtggtcgctctgtgtggtcaaagagaccacgcctccaatatctataaagtagaggggggatgcatcacaaagctggagacctttattcaagaacatctgagggtgattggcgccgtgggaatcggaattgcttgtgttcaggtctttggaatgatatttacgtgctgcctgtacaggagccttaagctcgaacattactag

SEQ ID NO: 31841 - DNA, 543 bp, Artificial Sequence
  derived and/or modified sequence
atgggcgagttcaacgagaagaagaccacctgcggcaccgtgtgccttaagtacctgctcttcacatacaactgctgcttctggcttgcgggacttgctgtgatggccgtcgggatctggacattggcactgaagagtgattacatatccctcctcgcctcagggacatatctggctaccgcgtatattctggtcgtggcggggaccgtggtcatggtaactggtgttctaggatgctgcgcgacattcaaggagcgtcgcaacttgctcagactgtattttatactcttgctgatcatcttcttgcttgagatcatcgccggcatcctagcatacgcctactaccagcagctcaacactgaactcaaagagaacctgaaggacaccatgaccaaacggtatcaccagcctgggcacgaagccgtgaccagcgccgtcgaccagcttcaacaagagttccactgttgcgggtccaacaactcgcaggactggagagattcggagtggatccgatcacaggaggccgggggcagagtcgtgtag

SEQ ID NO: 31842 - DNA, 240 bp, Artificial Sequence
  derived and/or modified sequence
atgggcgagttcaacgagaagaagaccacctgcggcaccgtgtgcctgaagtacctgctttttacatacaattgttgtttctggctggcaggactcgcggtgatggcagtgggcatatggacccttgccttaaaaagtgattatatctcccttttggctagcggcacatatctggctaccgcctatattctggtggttgctggcactgtggttatggtaactggtgtgctgggctgttag

SEQ ID NO: 31843 - DNA, 279 bp, Artificial Sequence
  derived and/or modified sequence
atgggcgagttcaacgagaagaagaccacctgcggcaccgtgtgcctcaaatacctcttgttcacatataactgttgcttttggctggccggactagctgtgatggccgttgggatctggaccctggcactgaagtctgattatatcagcctactcgcctccggaacatatcttgccactgcatacatcctggtagtagccggaacggtggtcatggttactggagtcctgggatgttgcgcaacctttaaagagcgaaggaaccttctcaggctgtag

SEQ ID NO: 31844 - DNA, 198 bp, Artificial Sequence
  derived and/or modified sequence
atgggcgagttcaacgagaagaagaccacctgcggcaccgtgtgcctcaagtatcttctgtttacctataattgctgcttctggctagcaggactggccgtgatggctgtggggatatggacgctggccctgaagagtgactacatcagcctcttggctagcggaacatatctggctacggcctatatcctggtttag

SEQ ID NO: 31845 - DNA, 531 bp, Artificial Sequence
  derived and/or modified sequence
atgggcgagttcaacgagaagaagaccacctgcggcaccgtgtgcttgaagtacctgttgttcacatacaattgctgcttttggctggccggcctggcagtcatggccgtgggtatctggacactcgcactcaagtcggactacatctcgctgctggcgtctggtacttacctggccaccgcctatatcctagtggtggctggtaccgtggttatggtcactggcgtactcggctgttgtgccactttcaaggaacggagaaaccttcttcgattgtactttatcctgctactaatcatattcctgctagagattattgccggaatcctggcttacgcgtattaccaacagttaaacaccgagcttaaggagaacctgaaggacaccatgactaaacgttaccaccaacccggtcatgaagccgtgaccagtgctgtggaccaactgcagcaggagttccattgctgcggttccaataacagccaggactggcgggacagcgagtggattcggtcccaagaggcagggtag

SEQ ID NO: 31846 - DNA, 543 bp, Artificial Sequence
  derived and/or modified sequence
atgggcgagttcaacgagaagaagaccacctgcggcaccgtgtgcctcaagtatctgctattcacatacaattgctgcttttggctggctggtctggctgtgatggcagtagggatttggacccttgcccttaaaagcgactacatttctctgctagcgtctggcacttatcttgccacagcatacatcctggtcgtagcaggcacagtggttatggttacgggagtgcttgggtgctgcgcaaccttcaaggagagaagaaatctgctgagactgtacttcatcctgctgctcataatcttccttctggaaattatcgctggcattcttgcctatgcatactaccagcagctcaataccgaactgaaggagaacctgaaagatacaatgaccaaaaggtatcaccagcccggccacgaggcagtgacctctgccgttgatcagctgcaacaagaattccactgctgtggatccaacaattctcaggactggcgggactccgaatggatcaggtcacaggaagccggggggcgagtggtgtag

SEQ ID NO: 31847 - DNA, 273 bp, Artificial Sequence
  derived and/or modified sequence
atgggcgagttcaacgagaagaagaccacctgcggcaccgtgtgcctcaagtacctgttgttcacgtacaattgctgcttttggttggcaggcttagctgtgatggccgtgggtatttggaccctggcgttgaaaagcgactacatcagtttgctcgcttcgggtacctacctcgccacagcctatatcttagttgttgccggcacagtggtgatggtgaccggggtactcggttgctgtgcaacattcaaggagcgaagaaatttgctttag

SEQ ID NO: 31848 - DNA, 513 bp, Artificial Sequence
  derived and/or modified sequence
atgggcgagttcaacgagaagaagaccacctgcggcaccgtgtgcttgaagtatctgttatttacctacaattgctgcttttggctggccggtcttgctgtcatggccgtgggcatttggactctggccctcaaaagtgattatatttctctcttggccagcgggacatatctcgccacagcctacatccttgttgtcgcggggaccgtggtgatggtgaccggtgtattgggctgctgtgctaccttcaaggaaagaagaaacctcttacgcctatattttattttactgttgattatcttcctgttagagatcattgccgggatcttggcctatgcctattaccaacagctgaatacagagctgaaagagaatctcaaggacaccatgacaaaacgttatcaccagcccggccatgaggccgtgacctcagccgttgaccaactgcagcaggaattccactgctgcggtagtaacaactcacaagactggagagactctgaatggatttag

SEQ ID NO: 31849 - DNA, 762 bp, Artificial Sequence
  derived and/or modified sequence
atgggcgagttcaacgagaagaagaccacctgcggcaccgtgtgcctaaagtaccttctgtttacttacaattgctgcttctggttggccgggctggcagtaatggcggtggggatctggacactcgcacttaaatccgactacattagccttcttgcctccggaacatacctggccaccgcgtacattctcgtcgtagctggtacagttgttatggtaactggtgtgctgggttgctgcgcgaccttcaaggagcgtaggaacctcctacggctgtacttcattttgctactcatcatttttctcctcgagatcattgcaggaatcctggcatatgcttactaccaacaactgaacactgaactaaaagagaatctgaaggatacgatgacgaagcggtatcaccagccagggcatgaagctgtcaccagtgctgttgaccaactgcaacaggagttccactgttgcggcagtaacaattcacaggattggcgggatagcgagtggatccggtcccaagaagccggtgggcgggtcgtgccagactcttgttgcaagaccgtagtagcactgtgtgggcagagagaccatgcaagcaatatttataaggtagaggggggatgtatcacaaaactggagactttcatacaagaacacctgcgggttataggcgccgtgggtatcgggatcgcctgtgtgcaggtgttcggtatgatcttcacatgttgtctgtacagaagtcttaaactcgagcattattag

SEQ ID NO: 31850 - DNA, 762 bp, Artificial Sequence
  derived and/or modified sequence
atgggggaattcaacgagaagaaaacaacttgtggcaccgtctgtctgaaatacctgctcttcacatataattgttgtttctggctggcaggcttagcagtcatggcagtcggcatttggacgctggcactgaagtcagactacatctcactgttagcgagcggcacttatcttgcaaccgcctatatcctggtagtggccggaacagtggtgatggtcacgggggtcctggggtgctgtgctacattcaaggagcgcagaaatttactgagactgtacttcatccttctgctaatcatatttctcttggaaatcatcgccggtattctggcgtacgcgtattatcagcagcttaacaccgagctaaaggaaaacctcaaggatacgatgactaagcgctaccatcagcctggccatgaggccgtgaccagcgccgtggaccagctccagcaggagttccactgctgtgggtccaacaattcccaggattggcgggattctgaatggatacgctcccaggaggcgggtgggagagtcgttcctgactcatgctgcaagacagtcgtggccctctgcggtcagcgtgaccatgcaagtaacatttacaaggtggagggcggatgcattaccaaattagaaacttttatccaggagcatttgcgggttataggggctgttggaatcgggatcgcctgcgtgcaggtgttcgggatgatttttacctgctgtctgtatcggtcgttaaaattggaacattattag

SEQ ID NO: 31851 - DNA, 762 bp, Artificial Sequence
  derived and/or modified sequence
atgggagagttcaatgaaaagaagaccacctgtggtaccgtctgcctgaagtatctgctatttacatataattgttgtttctggctggcagggcttgctgttatggctgtggggatctggaccctagcgctgaaatctgactacatttcactgctggcctcgggtacatatctggccacggcatacatcctggtcgtagccggaacagtcgtcatggtgactggggtgttaggctgctgtgccacatttaaagagaggcggaatctcctccgtctgtatttcatcctcctgctgatcattttcttattagaaatcatcgccggtatcttggcatacgcctactaccaacagttaaacactgaactgaaagagaatctgaaggatacaatgacaaaacgctaccatcagcccggacacgaagccgtgacgagcgccgtggatcagctgcagcaggagttccactgctgcgggtcaaataattcgcaggactggagggattccgaatggatccgcagtcaggaggcaggaggcagagtggtgccggacagctgctgcaagactgtcgtggccctgtgcgggcagagggatcacgcttcgaacatttacaaagtggagggagggtgcatcacgaaactggaaacctttattcaggaacacctgcgagtcattggtgcagtgggaattggcattgcttgcgtgcaagtgtttgggatgattttcacctgctgcctataccgatcgctaaagctagaacactactag

SEQ ID NO: 31852 - DNA, 762 bp, Artificial Sequence
  derived and/or modified sequence
atgggggaattcaacgaaaagaagacaacatgtggtactgtgtgcctgaagtaccttttgttcacttacaactgctgcttttggctggcagggctcgccgtgatggcagttggcatctggaccctggctcttaagtctgactacatcagcttgttagccagtgggacatacttagcaactgcatacatcctggtggttgcaggcactgtggtaatggtcactggagtcctggggtgttgcgccacatttaaggagaggcgcaatctgctgcggctgtactttatccttctgctcattatatttctgttggagatcattgctgggatcctggcttatgcctactatcagcagttgaatactgagctgaaagaaaacctaaaggacaccatgaccaagcgatatcatcagccgggtcacgaagccgtgacgtcagcagttgaccaactgcagcaggagttccactgttgtggatcaaataatagtcaggactggagagactctgagtggatcaggagccaggaagccggtggacgtgtcgttcctgactcttgttgcaaaacagtggtggcactgtgcggccagagagaccacgcgtcgaatatatataaggtggaaggaggatgtattacgaaactggaaacttttatccaggaacacctcagggtgattggagccgtcggaattggtattgcctgcgtccaggttttcggaatgatattcacttgctgtctctacagaagcctcaaactggaacattattag

SEQ ID NO: 31853 - DNA, 543 bp, Artificial Sequence
  derived and/or modified sequence
atgggcgagtttaatgagaagaagaccacttgtggcacagtgtgcttgaaatatctgctgttcacatataattgctgcttctggctcgctggcttagccgtgatggcggtgggcatttggactttagccttgaagtctgattacatttccctcctggcgtctgggacttaccttgccactgcctatatcctcgtggtagccggtacagtcgttatggtgactggtgtgctgggctgttgcgcaacgttcaaggagcgcaggaacctgctgcggttatatttcattctccttctaatcattttcctgctggagataatcgcagggattttagcttacgcttattaccaacagctgaacactgagctgaaggaaaatctcaaagacacgatgaccaagagataccaccagcctggccatgaagccgttaccagcgctgtggatcagctgcagcaggaatttcactgctgtggaagcaacaattctcaagactggcgcgacagtgagtggatacggtcccaagaggctggcggaagagtagtgtag

SEQ ID NO: 31854 - DNA, 240 bp, Artificial Sequence
  derived and/or modified sequence
atgggtgaatttaacgagaaaaagactacctgcggtactgtgtgtttgaagtatttgctattcacctataactgctgcttttggttggcaggccttgctgtgatggcggtgggaatctggaccctcgcgctcaaaagtgactatatcagtctattagccagcggtacatacctggctactgcatacattctagtggttgccggaactgtggttatggtcactggagtcttaggatgttag

SEQ ID NO: 31855 - DNA, 279 bp, Artificial Sequence
  derived and/or modified sequence
atgggggaatttaatgaaaaaaagacaacatgtgggaccgtgtgcctgaaatatctgctgttcacatataactgttgtttttggctggccggactggccgttatggccgtgggtatttggaccctggctctgaaatccgactacatttctctgttggcttccggcacctacctggccactgcctatattttggtggtagccggaaccgtcgtgatggtcactggcgtgctgggatgctgcgcaaccttcaaggaacgtcgaaacctgctaaggctgtag

SEQ ID NO: 31856 - DNA, 198 bp, Artificial Sequence
  derived and/or modified sequence
atgggggagtttaacgagaagaagacgacctgcggtaccgtctgcctcaagtatcttctctttacatacaattgctgtttttggcttgctggcctcgctgtcatggccgtaggtatctggacgctggctctgaagtctgattatattagtctactcgcgagtggaacctacctggccactgcctacattctggtgtag

SEQ ID NO: 31857 - DNA, 531 bp, Artificial Sequence
  derived and/or modified sequence
atgggagagttcaatgaaaaaaagacaacatgtggcaccgtgtgtctgaagtacctgttatttacgtataattgttgtttctggctggcaggcttggccgtcatggcggtgggaatatggaccttggcactcaagtcagattatatctccctgcttgcctcaggcacctatttggctacagcgtatatattagtggtggctgggacagtcgtgatggtgactggcgttctgggctgttgtgcaacatttaaggagcgacgcaacctgctccgcctctattttattctcctgctcatcattttcctgctagaaatcatcgcaggcatcctggcctatgcatactatcaacagctgaatacagagcttaaagaaaacctgaaagacaccatgacgaaacggtaccatcagcccggacacgaggctgttaccagcgctgtcgaccaattacagcaggagttccactgttgtggaagtaacaatagccaggactggcgagacagtgagtggatcagatcgcaggaggctggttag

SEQ ID NO: 31858 - DNA, 543 bp, Artificial Sequence
  derived and/or modified sequence
atgggagagttcaacgagaaaaaaaccacttgcgggaccgtatgtctaaaataccttctgttcacctacaactgttgcttctggctggccggactggcggttatggccgtgggcatctggacactagccctgaagtcagattacatatcattactggcttctggcacctatctcgctaccgcatatatcctcgtcgtggccggaacggtggttatggtgactggagtgctggggtgctgtgccacatttaaggagcggaggaacctgcttcgactgtacttcattctgcttctgataatttttctccttgagatcatagcaggcatcttggcctatgcctactaccagcagctgaatactgaattgaaggaaaatctgaaagataccatgacaaagaggtatcaccagcccggacatgaagccgtgacctccgcggtagatcagctgcagcaggagttccactgttgcgggtcaaataacagccaggattggagagacagcgagtggatcagatctcaggaagcagggggaagggtcgtctag

SEQ ID NO: 31859 - DNA, 273 bp, Artificial Sequence
  derived and/or modified sequence
atgggcgagtttaatgaaaaaaagactacctgtggtaccgtgtgcctcaagtaccttctgtttacgtacaactgctgtttttggctggcgggtctggccgtaatggctgtcgggatctggaccctggcccttaaaagcgactatattagcctgctggcatccgggacctacctggccaccgcctacatcctagtagttgccggtacggtggtcatggtgacaggtgtgctcggatgctgcgcgacatttaaagagaggaggaatctgctgtag

SEQ ID NO: 31860 - DNA, 513 bp, Artificial Sequence
  derived and/or modified sequence
atgggggagttcaatgagaaaaaaaccacctgtgggacggtgtgtttaaagtatctgctgttcacttacaattgctgtttctggctcgcgggtctggccgttatggctgtcggcatctggactttggccctgaaatccgactatatcagccttcttgcatctgggacttaccttgccactgcatacattctggttgttgccggaaccgtggttatggttaccggggtgttagggtgttgcgcgacattcaaggagcgccgaaacctgctgcggctatacttcattctgctactcattatttttctcctcgaaattatcgccggtatcctcgcctatgcctactaccaacagctgaataccgaacttaaagagaacctcaaagatactatgacaaaacggtatcaccagccaggccatgaggccgttacctccgccgtggaccaactgcagcaggagttccactgctgtgggtccaacaactcccaagactggcgggacagcgagtggatttag

SEQ ID NO: 31861 - DNA, 762 bp, Artificial Sequence
  derived and/or modified sequence
atgggggaattcaatgagaagaaaaccacatgcggcacagtgtgcctcaaatacctgctgttcacatataactgctgcttctggttggcagggctcgccgtgatggccgtgggcatctggacactggctctcaaatcggactacatctcgctgttggcatctggcacttacttagctacagcgtacatactcgtggtcgccggaaccgtggtgatggtgacaggcgtgctgggctgttgcgctacgttcaaggaacgccgtaaccttttacggctatatttcattctcctactcatcatctttctattagaaattatcgctggcattcttgcgtatgcgtattatcagcagctaaacaccgagttaaaggagaatctgaaagatacaatgactaaaaggtatcaccagccaggacacgaggccgtgacatccgccgtggatcagctgcagcaggaattccactgttgtggctccaataatagtcaggactggagggattccgaatggatccggtcgcaggaggcaggtggcagagtagtgcccgacagctgctgcaaaaccgtagttgccttgtgtggccaaagggatcatgcttccaatatttacaaagtggaaggtgggtgcattaccaaactggagactttcatacaagagcaccttcgagtcatcggagctgtgggaattggtatcgcctgtgtccaggtgtttggtatgattttcacatgctgtttgtaccggtctctgaaattggaacattactag

SEQ ID NO: 31862 - DNA, 1548 bp, Artificial Sequence
  derived and/or modified sequence
attctcagcgctgggagccgccgcccccgcagctgctgccgccgccgccagggcccggactcggacgcgtggtagcctagagtcctggggagcttctgtccacctgtcctgcagaggagtcgtttccagcccggctgccccaggatgggtgagttcaacgagaagaagacaacatgtggcaccgtttgcctcaagtacctgctgtttacctacaattgctgcttctggctggctggcctggctgtcatggcagtgggcatctggacgctggccctcaagagtgactacatcagcctgctggcctcaggcacctacctggccacagcctacatcctggtggtggcgggcactgtcgtcatggtgactggggtcttgggctgctgcgccaccttcaaggagcgtcggaacctgctgcgcctgtacttcatcctgctcctcatcatctttctgctggagatcatcgctggtatcctcgcctacgcctactaccagcagctgaacacggagctcaaggagaacctgaaggacaccatgaccaagcgctaccaccagccgggccatgaggctgtgaccagcgctgtggaccagctgcagcaggagttccactgctgtggcagcaacaactcacaggactggcgagacagtgagtggatccgctcacaggaggccggtggccgtgtggtcccagacagctgctgcaagacggtggtggctctttgtgggcagcgagaccatgcctccaacatctacaaggtggagggcggctgcatcaccaagttggagaccttcatccaggagcacctgagggtcattggggctgtggggatcggcattgcctgtgtgcaggtctttggcatgatcttcacgtgctgcctgtacaggagtctcaagctggagcactactgaccctgccttgggccttgctgctgctgcacccaactactgagctgagaccactgagtaccaggggctgggctccctgatgacacccaccctgtgccatcaccataacctctggggaccccaacctcagaggcagcttcaagtgccttttgctgcgcaccaatgcccagcaggggaggtgaggggggctggcggggcgaagtttggggggtgttttgtggggctccccagacacactctctgcctggtggtcagatgcaggttggaaggggccttgctgagtggcgcaaggccgagcgttcccagcagggggagaaacccttcacaccccaggcccttcaggaactggggccttgccttgcagccacatggccccatcccagttggggaagccaggtgagctctgacccttgggcctgggcctctgcccctcccaacccagccctcgtctccctcgacagcgcccctgctgtcttccccaccgcagtcaccaccacccgaaatgccacgtggtcactgtgcactgccctgttcatgtgcctctgcggggcagggccttcctggttttgttcactgctgtacccagatgcctacaaccatccctgccacatacaggtgctcaataaacacttgtagagcagatgg

SEQ ID NO: 31863 - DNA, 1648 bp, Artificial Sequence
  derived and/or modified sequence
cgcgggttcagacctgccgagcgcccgccgccgcgggaggggcttgaggccggggcggggccggggcggggcggggcggggcgtccccctcgtaggctccgggccgcgcattctcagcgctgggagccgccgcccccgcagctgctgccgccgccgccagggcccggactcggacgcgtgcctagagtcctggggagcttctgtccacctgtcctgcagaggagtcgtttccagcccggctgccccaggatgggtgagttcaacgagaagaagacaacatgtggcaccgtttgcctcaagtacctgctgtttacctacaattgctgcttctggctggctggcctggctgtcatggcagtgggcatctggacgctggccctcaagagtgactacatcagcctgctggcctcaggcacctacctggccacagcctacatcctggtggtggcgggcactgtcgtcatggtgactggggtcttgggctgctgcgccaccttcaaggagcgtcggaacctgctgcgcctgtacttcatcctgctcctcatcatctttctgctggagatcatcgctggtatcctcgcctacgcctactaccagcagctgaacacggagctcaaggagaacctgaaggacaccatgaccaagcgctaccaccagccgggccatgaggctgtgaccagcgctgtggaccagctgcagcaggagttccactgctgtggcagcaacaactcacaggactggcgagacagtgagtggatccgctcacaggaggccggtggccgtgtggtcccagacagctgctgcaagacggtggtggctctttgtgggcagcgagaccatgcctccaacatctacaaggtggagggcggctgcatcaccaagttggagaccttcatccaggagcacctgagggtcattggggctgtggggatcggcattgcctgtgtgcaggtctttggcatgatcttcacgtgctgcctgtacaggagtctcaagctggagcactactgaccctgccttgggccttgctgctgctgcacccaactactgagctgagaccactgagtaccaggggctgggctccctgatgacacccaccctgtgccatcaccataacctctggggaccccaacctcagaggcagcttcaagtgccttttgctgcgcaccaatgcccagcaggggaggtgaggggggctggcggggcgaagtttggggggtgttttgtggggctccccagacacactctctgcctggtggtcagatgcaggttggaaggggccttgctgagtggcgcaaggccgagcgttcccagcagggggagaaacccttcacaccccaggcccttcaggaactggggccttgccttgcagccacatggccccatcccagttggggaagccaggtgagctctgacccttgggcctgggcctctgcccctcccaacccagccctcgtctccctcgacagcgcccctgctgtcttccccaccgcagtcaccaccacccgaaatgccacgtggtcactgtgcactgccctgttcatgtgcctctgcggggcagggccttcctggttttgttcactgctgtacccagatgcctacaaccatccctgccacatacaggtgctcaataaacacttgtagagca

SEQ ID NO: 31864 - DNA, 1486 bp, Artificial Sequence
  derived and/or modified sequence
attctcagcgctgggagccgccgcccccgcagctgctgccgccgccgccagggcccggactcggacgcgtggtagccccaggatgggtgagttcaacgagaagaagacaacatgtggcaccgtttgcctcaagtacctgctgtttacctacaattgctgcttctggctggctggcctggctgtcatggcagtgggcatctggacgctggccctcaagagtgactacatcagcctgctggcctcaggcacctacctggccacagcctacatcctggtggtggcgggcactgtcgtcatggtgactggggtcttgggctgctgcgccaccttcaaggagcgtcggaacctgctgcgcctgtacttcatcctgctcctcatcatctttctgctggagatcatcgctggtatcctcgcctacgcctactaccagcagctgaacacggagctcaaggagaacctgaaggacaccatgaccaagcgctaccaccagccgggccatgaggctgtgaccagcgctgtggaccagctgcagcaggagttccactgctgtggcagcaacaactcacaggactggcgagacagtgagtggatccgctcacaggaggccggtggccgtgtggtcccagacagctgctgcaagacggtggtggctctttgtgggcagcgagaccatgcctccaacatctacaaggtggagggcggctgcatcaccaagttggagaccttcatccaggagcacctgagggtcattggggctgtggggatcggcattgcctgtgtgcaggtctttggcatgatcttcacgtgctgcctgtacaggagtctcaagctggagcactactgaccctgccttgggccttgctgctgctgcacccaactactgagctgagaccactgagtaccaggggctgggctccctgatgacacccaccctgtgccatcaccataacctctggggaccccaacctcagaggcagcttcaagtgccttttgctgcgcaccaatgcccagcaggggaggtgaggggggctggcggggcgaagtttggggggtgttttgtggggctccccagacacactctctgcctggtggtcagatgcaggttggaaggggccttgctgagtggcgcaaggccgagcgttcccagcagggggagaaacccttcacaccccaggcccttcaggaactggggccttgccttgcagccacatggccccatcccagttggggaagccaggtgagctctgacccttgggcctgggcctctgcccctcccaacccagccctcgtctccctcgacagcgcccctgctgtcttccccaccgcagtcaccaccacccgaaatgccacgtggtcactgtgcactgccctgttcatgtgcctctgcggggcagggccttcctggttttgttcactgctgtacccagatgcctacaaccatccctgccacatacaggtgctcaataaacacttgtagagcagatgg

SEQ ID NO: 31865 - DNA, 793 bp, Artificial Sequence
  derived and/or modified sequence
cgccgccagggcccggactcggacgcgtgcctagagtcctggggagcttctgtccacctgtcctgcagaggagtcgtttccagcccggctggtgagtgctggccagggtggggcagagcaggcggggcggcgaaagtccagacctggctgtgctgtctggaaacgtggcccagggcgctcagctgctgtctgcaccccacgccctccctggcttccccatgctcacagcttgcccactgctgcagccccaggatgggtgagttcaacgagaagaagacaacatgtggcaccgtttgcctcaagtacctgctgtttacctacaattgctgcttctggctggctggcctggctgtcatggcagtgggcatctggacgctggccctcaagagtgactacatcagcctgctggcctcaggcacctacctggccacagcctacatcctggtggtggcgggcactgtcgtcatggtgactggggtcttgggctgctgcgccaccttcaaggagcgtcggaacctgctgcgcctgtacttcatcctgctcctcatcatctttctgctggagatcatcgctggtatcctcgcctacgcctactaccagcagctgaacacggagctcaaggagaacctgaaggacaccatgaccaagcgctaccaccagccgggccatgaggctgtgaccagcgctgtggaccagctgcagcaggagttccactgctgtggcagcaacaactcacaggactggcgagacagtgagtggatccgctcacaggaggccggtggccgtgtggtcc

SEQ ID NO: 31866 - DNA, 561 bp, Artificial Sequence
  derived and/or modified sequence
gctgccgccgccgccagggcccggactcggacgcgtggtagcctagagtcctggggagcttctgtccacctgtcctgcagaggagtcgtttccagcccggctggtgagtgctggccagggtggggcagagcaggcggggcggcgaaagtccagacctggctgtgctgtctggaaacgtggcccagggcgctcagctgctgtctgcaccccacgccctccctggcttccccatgctcacagcttgcccactgctgcaggtcgggcgggcacggggcatctggggaggggcatagcctgtctgtgctgccccctcagccccaggatgggtgagttcaacgagaagaagacaacatgtggcaccgtttgcctcaagtacctgctgtttacctacaattgctgcttctggctggctggcctggctgtcatggcagtgggcatctggacgctggccctcaagagtgactacatcagcctgctggcctcaggcacctacctggccacagcctacatcctggtggtggcgggcactgtcgtcatggtgactggggtcttgggctgctg

SEQ ID NO: 31867 - DNA, 565 bp, Artificial Sequence
  derived and/or modified sequence
tgaggccggggcggggccggggcggggcggggcggggcgtccccctcgtaggctccgggccgcgcattctcagcgctgggagccgccgcccccgcagctgctgccgccgccgccagggcccggactcggacgcgtggtaggctgtagctgccgctgtttgtgggggaagggccagtgatgggtctggagcgaaggccaagagtggggcacctgggggaagcctagagtcctggggagcttctgtccacctgtcctgcagaggagtcgtttccagcccggctgccccaggatgggtgagttcaacgagaagaagacaacatgtggcaccgtttgcctcaagtacctgctgtttacctacaattgctgcttctggctggctggcctggctgtcatggcagtgggcatctggacgctggccctcaagagtgactacatcagcctgctggcctcaggcacctacctggccacagcctacatcctggtggtggcgggcactgtcgtcatggtgactggggtcttgggctgctgcgccaccttcaaggagcgtcggaacctgctgcgcctg

SEQ ID NO: 31868 - DNA, 713 bp, Artificial Sequence
  derived and/or modified sequence
ggctggttgtgaactcccgacctcaagtgattgcacctgccttggcctcccaaagtgctggcattataggcatgagacaccgcacctggactcctttcctctactttctttgggttaatttgctagtctctttttattatttatttatttattttgagatggagtctcactctgtcgcccaggctggagtgcagtggcaccatctcggctcactgcaagcttcgcctcccgggttcacgccattctcctgcctcagcctcccaagtagctgggactacaggcgcccgccaccacgcccggctaattttttgtatttctagtacagacggggtttcaccgtgttagccaggatggtcttgatctcctgaccttgtgatctgcctgccttggccccccaaagtgctgggattacaggcgtgagccaccgcgcctggccctgtgtcccctcctatccgtctcccagtcaggggcccggtgctgtggccccgctgacccctcccctgcctcctcagccccaggatgggtgagttcaacgagaagaagacaacatgtggcaccgtttgcctcaagtacctgctgtttacctacaattgctgcttctggctggctggcctggctgtcatggcagtgggcatctggacgctggccctcaagagtgactacatcagcctgctggcctcaggcacctacctggccacagcctacatcctggt

SEQ ID NO: 31869 - DNA, 771 bp, Artificial Sequence
  derived and/or modified sequence
ccgccgcccccgcagctgctgccgccgccgccagggcccggactcggacgcgtgcctagagtcctggggagcttctgtccacctgtcctgcagaggagtcgtttccagcccggctggcccataggctcctgccagcctgtgacgtgcggccccgggaatgccgtggggagcgggcaggctggcatgagctcaccggaggtacccgctagggcttcctcccccggccgctagcagggccccaggatgggtgagttcaacgagaagaagacaacatgtggcaccgtttgcctcaagtacctgctgtttacctacaattgctgcttctggctggctggcctggctgtcatggcagtgggcatctggacgctggccctcaagagtgactacatcagcctgctggcctcaggcacctacctggccacagcctacatcctggtggtggcgggcactgtcgtcatggtgactggggtcttgggctgctgcgccaccttcaaggagcgtcggaacctgctgcgcctgtacttcatcctgctcctcatcatctttctgctggagatcatcgctggtatcctcgcctacgcctactaccagcagctgaacacggagctcaaggagaacctgaaggacaccatgaccaagcgctaccaccagccgggccatgaggctgtgaccagcgctgtggaccagctgcagcaggagttccactgctgtggcagcaacaactcacaggactggcgagacagtgagtggatccgctcacaggaggccggt

SEQ ID NO: 31870 - DNA, 797 bp, Artificial Sequence
  derived and/or modified sequence
cgccgccagggcccggactcggacgcgtggtagcctagagtcctggggagcttctgtccacctgtcctgcagaggagtcgtttccagcccggctggtgagtgctggccagggtggggcagagcaggcggggcggcgaaagtccagacctggctgtgctgtctggaaacgtggcccagggcgctcagctgctgtctgcaccccacgccctccctggcttccccatgctcacagcttgcccactgctgcagccccaggatgggtgagttcaacgagaagaagacaacatgtggcaccgtttgcctcaagtacctgctgtttacctacaattgctgcttctggctggctggcctggctgtcatggcagtgggcatctggacgctggccctcaagagtgactacatcagcctgctggcctcaggcacctacctggccacagcctacatcctggtggtggcgggcactgtcgtcatggtgactggggtcttgggctgctgcgccaccttcaaggagcgtcggaacctgctgcgcctgtacttcatcctgctcctcatcatctttctgctggagatcatcgctggtatcctcgcctacgcctactaccagcagctgaacacggagctcaaggagaacctgaaggacaccatgaccaagcgctaccaccagccgggccatgaggctgtgaccagcgctgtggaccagctgcagcaggagttccactgctgtggcagcaacaactcacaggactggcgagacagtgagtggatccgctcacaggaggccggtggccgtgtggtcc

SEQ ID NO: 31871 - DNA, 545 bp, Artificial Sequence
  derived and/or modified sequence
attctccccaccccggccaggatgaaggaagggctgccctttaacagaccgtaaacaggcctggagagcttaggaaggggctgagctggggcctgtctgagcccctacccctctgctgtctgagtggcctcctccgcccttactgcaggcccataggctcctgccagcctgtgacgtgcggccccgggaatgccgtggggagcgggcaggctggcatgagctcaccggaggtacccgctagggcttcctcccccggccgctagcagggccccaggatgggtgagttcaacgagaagaagacaacatgtggcaccgtttgcctcaagtacctgctgtttacctacaattgctgcttctggctggctggcctggctgtcatggcagtgggcatctggacgctggccctcaagagtgactacatcagcctgctggcctcaggcacctacctggccacagcctacatcctggtggtggcgggcactgtcgtcatggtgactggggtcttgggctgctgcgccaccttcaaggagcgtcggaacctgctg

SEQ ID NO: 31872 - DNA, 648 bp, Artificial Sequence
  derived and/or modified sequence
caccaggggtctgtcctggctgtcagggctcctgagtcgctaggaagtgacacgtcctgttcccacaggggctcattcacaggcctcccaggacagtggctggctctgccccgacttctgggctggcttggccccaggatgggtgagttcaacgagaagaagacaacatgtggcaccgtttgcctcaagtacctgctgtttacctacaattgctgcttctggctggctggcctggctgtcatggcagtgggcatctggacgctggccctcaagagtgactacatcagcctgctggcctcaggcacctacctggccacagcctacatcctggtggtggcgggcactgtcgtcatggtgactggggtcttgggctgctgcgccaccttcaaggagcgtcggaacctgctgcgcctgtacttcatcctgctcctcatcatctttctgctggagatcatcgctggtatcctcgcctacgcctactaccagcagctgaacacggagctcaaggagaacctgaaggacaccatgaccaagcgctaccaccagccgggccatgaggctgtgaccagcgctgtggaccagctgcagcaggagttccactgctgtggcagcaacaactcacaggactggcgagacagtgagtggatc

SEQ ID NO: 31873 - DNA, 1407 bp, Artificial Sequence
  derived and/or modified sequence
gactcggacgcgtgcctagagtcctggggagcttctgtccacctgtcctgcagaggagtcgtttccagcccggctgccccaggatgggtgagttcaacgagaagaagacaacatgtggcaccgtttgcctcaagtacctgctgtttacctacaattgctgcttctggctggctggcctggctgtcatggcagtgggcatctggacgctggccctcaagagtgactacatcagcctgctggcctcaggcacctacctggccacagcctacatcctggtggtggcgggcactgtcgtcatggtgactggggtcttgggctgctgcgccaccttcaaggagcgtcggaacctgctgcgcctgtacttcatcctgctcctcatcatctttctgctggagatcatcgctggtatcctcgcctacgcctactaccagcagctgaacacggagctcaaggagaacctgaaggacaccatgaccaagcgctaccaccagccgggccatgaggctgtgaccagcgctgtggaccagctgcagcaggagttccactgctgtggcagcaacaactcacaggactggcgagacagtgagtggatccgctcacaggaggccggtggccgtgtggtcccagacagctgctgcaagacggtggtggctctttgtgggcagcgagaccatgcctccaacatctacaaggtggagggcggctgcatcaccaagttggagaccttcatccaggagcacctgagggtcattggggctgtggggatcggcattgcctgtgtgcaggtctttggcatgatcttcacgtgctgcctgtacaggagtctcaagctggagcactactgaccctgccttgggccttgctgctgctgcacccaactactgagctgagaccactgagtaccaggggctgggctccctgatgacacccaccctgtgccatcaccataacctctggggaccccaacctcagaggcagcttcaagtgccttttgctgcgcaccaatgcccagcaggggagatgcaggttggaaggggccttgctgagtggcgcaaggccgagcgttcccagcagggggagaaacccttcacaccccaggcccttcaggaactggggccttgccttgcagccacatggccccatcccagttggggaagccaggtgagctctgacccttgggcctgggcctctgcccctcccaacccagccctcgtctccctcgacagcgcccctgctgtcttccccaccgcagtcaccaccacccgaaatgccacgtggtcactgtgcactgccctgttcatgtgcctctgcggggcagggccttcctggttttgttcactgctgtacccagatgcctacaaccatccctgccacatacaggtgctcaataaacacttgtagagcaga

SEQ ID NO: 31874 - DNA, 762 bp, Artificial Sequence
  derived and/or modified sequence
atgggcgagttcaacgagaagaagaccacctgcggcaccgtgtgcctgaagtacctgctgttcacctacaactgctgcttctggctggccggcctggccgtgatggccgtgggcatctggaccctggccctgaagagcgactacatcagcctgctggccagcggcacctacctggccaccgcctacatcctggtggtggccggcaccgtggtgatggtgaccggcgtgctgggctgctgcgccaccttcaaggagagaagaaacctgctgagactgtacttcatcctgctgctgatcatcttcctgctggagatcatcgccggcatcctggcctacgcctactaccagcagctgaacaccgagctgaaggagaacctgaaggacaccatgaccaagagataccaccagcccggccacgaggccgtgaccagcgccgtggaccagctgcagcaggagttccactgctgcggcagcaacaacagccaggactggagagacagcgagtggatcagaagccaggaggccggcggcagagtggtgcccgacagctgctgcaagaccgtggtggccctgtgcggccagagagaccacgccagcaacatctacaaggtggagggcggctgcatcaccaagctggagaccttcatccaggagcacctgagagtgatcggcgccgtgggcatcggcatcgcctgcgtgcaggtgttcggcatgatcttcacctgctgcctgtacagaagcctgaagctggagcactactag

SEQ ID NO: 31875 - DNA, 543 bp, Artificial Sequence
  derived and/or modified sequence
atgggcgagttcaacgagaagaagaccacctgcggcaccgtgtgcctgaagtacctgctgttcacctacaactgctgcttctggctggccggcctggccgtgatggccgtgggcatctggaccctggccctgaagagcgactacatcagcctgctggccagcggcacctacctggccaccgcctacatcctggtggtggccggcaccgtggtgatggtgaccggcgtgctgggctgctgcgccaccttcaaggagagaagaaacctgctgagactgtacttcatcctgctgctgatcatcttcctgctggagatcatcgccggcatcctggcctacgcctactaccagcagctgaacaccgagctgaaggagaacctgaaggacaccatgaccaagagataccaccagcccggccacgaggccgtgaccagcgccgtggaccagctgcagcaggagttccactgctgcggcagcaacaacagccaggactggagagacagcgagtggatcagaagccaggaggccggcggcagagtggtgtag

SEQ ID NO: 31876 - DNA, 240 bp, Artificial Sequence
  derived and/or modified sequence
atgggcgagttcaacgagaagaagaccacctgcggcaccgtgtgcctgaagtacctgctgttcacctacaactgctgcttctggctggccggcctggccgtgatggccgtgggcatctggaccctggccctgaagagcgactacatcagcctgctggccagcggcacctacctggccaccgcctacatcctggtggtggccggcaccgtggtgatggtgaccggcgtgctgggctgctag

SEQ ID NO: 31877 - DNA, 279 bp, Artificial Sequence
  derived and/or modified sequence
atgggcgagttcaacgagaagaagaccacctgcggcaccgtgtgcctgaagtacctgctgttcacctacaactgctgcttctggctggccggcctggccgtgatggccgtgggcatctggaccctggccctgaagagcgactacatcagcctgctggccagcggcacctacctggccaccgcctacatcctggtggtggccggcaccgtggtgatggtgaccggcgtgctgggctgctgcgccaccttcaaggagagaagaaacctgctgagactgtag

SEQ ID NO: 31878 - DNA, 198 bp, Artificial Sequence
  derived and/or modified sequence
atgggcgagttcaacgagaagaagaccacctgcggcaccgtgtgcctgaagtacctgctgttcacctacaactgctgcttctggctggccggcctggccgtgatggccgtgggcatctggaccctggccctgaagagcgactacatcagcctgctggccagcggcacctacctggccaccgcctacatcctggtgtag

SEQ ID NO: 31879 - DNA, 531 bp, Artificial Sequence
  derived and/or modified sequence
atgggcgagttcaacgagaagaagaccacctgcggcaccgtgtgcctgaagtacctgctgttcacctacaactgctgcttctggctggccggcctggccgtgatggccgtgggcatctggaccctggccctgaagagcgactacatcagcctgctggccagcggcacctacctggccaccgcctacatcctggtggtggccggcaccgtggtgatggtgaccggcgtgctgggctgctgcgccaccttcaaggagagaagaaacctgctgagactgtacttcatcctgctgctgatcatcttcctgctggagatcatcgccggcatcctggcctacgcctactaccagcagctgaacaccgagctgaaggagaacctgaaggacaccatgaccaagagataccaccagcccggccacgaggccgtgaccagcgccgtggaccagctgcagcaggagttccactgctgcggcagcaacaacagccaggactggagagacagcgagtggatcagaagccaggaggccggctag

SEQ ID NO: 31880 - DNA, 273 bp, Artificial Sequence
  derived and/or modified sequence
atgggcgagttcaacgagaagaagaccacctgcggcaccgtgtgcctgaagtacctgctgttcacctacaactgctgcttctggctggccggcctggccgtgatggccgtgggcatctggaccctggccctgaagagcgactacatcagcctgctggccagcggcacctacctggccaccgcctacatcctggtggtggccggcaccgtggtgatggtgaccggcgtgctgggctgctgcgccaccttcaaggagagaagaaacctgctgtag

SEQ ID NO: 31881 - DNA, 513 bp, Artificial Sequence
  derived and/or modified sequence
atgggcgagttcaacgagaagaagaccacctgcggcaccgtgtgcctgaagtacctgctgttcacctacaactgctgcttctggctggccggcctggccgtgatggccgtgggcatctggaccctggccctgaagagcgactacatcagcctgctggccagcggcacctacctggccaccgcctacatcctggtggtggccggcaccgtggtgatggtgaccggcgtgctgggctgctgcgccaccttcaaggagagaagaaacctgctgagactgtacttcatcctgctgctgatcatcttcctgctggagatcatcgccggcatcctggcctacgcctactaccagcagctgaacaccgagctgaaggagaacctgaaggacaccatgaccaagagataccaccagcccggccacgaggccgtgaccagcgccgtggaccagctgcagcaggagttccactgctgcggcagcaacaacagccaggactggagagacagcgagtggatctag

SEQ ID NO: 31882 - protein, 200 aa, Artificial Sequence
  derived and/or modified sequence
MEEKPSKVSLKSSDRQGSDEESVHSDTRDLWTTTTLSQAQLNMPLSEVCEGFDEEGRNISKTRGWHSPGRGSLDEGYKASHKPEELDEHALVELELHRGSSMEINLGEKDTASQIEAEKSSSMSSLNIAKHMPHRAYWAEQQSRLPLPLMELMENEALEILTKALRSYQLGIGRDHFLTKELQRYIEGLKKRRSKRLYVN

SEQ ID NO: 31883 - DNA, 743 bp, Artificial Sequence
  derived and/or modified sequence
gggtccgttggggcagaaccatggaggaaaagccttcgaaagtgtcgctcaagtcttccgaccgccaaggctcggacgaggagagcgtgcatagcgacactcgggacctgtggaccacgaccacgctgtcccaggcacagctgaacatgccgctgtccgaggtctgcgagggcttcgacgaggagggccgcaacattagcaagacccgcgggtggcacagcccggggcggggctcgttggacgaggggtacaaggccagccacaagccggaggaactggacgagcacgcgctggtggagctggagttgcaccgcggcagctccatggaaatcaatctgggggagaaggacactgcatcccagatcgaggccgaaaagtcttcctcaatgtcatcactcaatattgcgaagcacatgccccatcgagcctactgggcagagcagcagagcaggctgccactgcccctgatggaactcatggagaatgaagctctggaaatcctcaccaaagccctccggagctaccagttagggatcggcagggaccacttcctgactaaggagctgcagcgatacatcgaagggctcaagaagcgccggagcaagaggctgtacgtgaattaaaaacgccaccttgggctcgagcagcgacccgaaccagccccgtgccagcccggtccccagacccaagcctgaccccatccgagtggaatttgagtcctaaagaaataaaagagtcgatgc

SEQ ID NO: 31884 - DNA, 603 bp, Artificial Sequence
  derived and/or modified sequence
atggaggagaagcccagcaaggtgagcctgaagagcagcgacagacagggcagcgacgaggagagcgtgcacagcgacaccagagacctgtggaccaccaccaccctgagccaggcccagctgaacatgcccctgagcgaggtgtgcgagggcttcgacgaggagggcagaaacatcagcaagaccagaggctggcacagccccggcagaggcagcctggacgagggctacaaggccagccacaagcccgaggagctggacgagcacgccctggtggagctggagctgcacagaggcagcagcatggagatcaacctgggcgagaaggacaccgccagccagatcgaggccgagaagagcagcagcatgagcagcctgaacatcgccaagcacatgccccacagagcctactgggccgagcagcagagcagactgcccctgcccctgatggagctgatggagaacgaggccctggagatcctgaccaaggccctgagaagctaccagctgggcatcggcagagaccacttcctgaccaaggagctgcagagatacatcgagggcctgaagaagagaagaagcaagagactgtacgtgaactag

SEQ ID NO: 31885 - DNA, 603 bp, Artificial Sequence
  derived and/or modified sequence
atggaggaaaagccttcgaaggtatcccttaagtcatccgataggcagggcagtgatgaagagagcgtgcactctgacactcgcgacctatggaccacgactaccctgagccaggcccaactcaatatgcctttatcagaggtgtgcgaaggatttgacgaagaggggcgcaatatctccaagactcggggctggcacagccccgggcgcggatcactggacgagggatataaagcaagtcacaagcctgaagagctcgatgagcacgccctggttgaactggagctgcatcgcgggtccagcatggagatcaacctgggggagaaggacaccgcctctcaaatagaggcagagaagtcgagttctatgagcagcttgaacattgccaaacacatgcctcacagagcttactgggctgaacagcagtcacgcctccccctgcccctgatggagctaatggagaatgaggctctggagattctcacgaaagcactcagaagctaccagctcggcatcggtcgagaccacttcctcactaaggagcttcagagatatattgagggtttaaagaaaagacgatcgaaaagactctacgtgaactag

SEQ ID NO: 31886 - DNA, 603 bp, Artificial Sequence
  derived and/or modified sequence
atggaggagaagcccagcaaggtgtccctgaagagcagtgaccggcagggcagtgatgaggagagcgtgcacagcgacacccgggacctgtggaccaccaccaccctgagccaggcccagctgaacatgcccctgtctgaggtgtgtgagggctttgatgaggagggcaggaacatcagcaagacccggggctggcacagccctggccggggcagcctggatgagggctacaaggccagccacaagccagaggagctggatgaacatgccctggtggagctggagctgcaccggggcagctccatggagatcaacctgggggagaaggacacagccagccagattgaagctgagaagagcagctccatgagcagcctgaacatcgccaagcacatgccccaccgggcctactgggccgagcagcagagccggctgcccctgcccctgatggagctgatggagaatgaggccctggagatcctgaccaaggccctgcggagctaccagctgggcatcggccgggaccacttcctgaccaaggagctgcagcgctacatcgagggcctgaagaagaggaggagcaagaggctgtatgtgaactag

SEQ ID NO: 31887 - DNA, 603 bp, Artificial Sequence
  derived and/or modified sequence
atggaggagaagcccagcaaggtgagcctgaagagcagcgaccggcaggggtctgatgaggagtcagtccacagcgatactagggacctttggacgacaaccaccctgagtcaggcacaactgaacatgcctctcagtgaagtctgtgaagggttcgacgaggaagggagaaatatttctaagacccgaggctggcattcacctggccgcgggagcctagacgaaggttataaggctagccataaaccagaagaactcgatgagcacgctctcgttgagcttgaactgcatcgtgggtcgtcaatggaaatcaatctgggagaaaaggacactgctagtcagatcgaggccgaaaaatcaagctctatgagctccttaaacatcgccaaacatatgccacacagggcctactgggcggagcagcaaagtcgtctcccactgcccctaatggaactgatggaaaacgaggctctggagatactgaccaaggccctgcgatcttatcagctgggaatcggtcgagatcactttctaaccaaagaattgcagagatacatagagggactgaagaagcggaggagcaagcgtctgtacgtgaattag

SEQ ID NO: 31888 - DNA, 603 bp, Artificial Sequence
  derived and/or modified sequence
atggaagagaagccctcgaaagtatctttaaaaagtagcgatagacaagggtccgatgaggaaagcgttcatagtgacactcgggatttgtggacaactactactctgtcgcaggctcagctcaatatgcccctttccgaggtctgtgaggggttcgacgaggaaggcaggaatatctcaaaaacacgaggatggcacagcccagggagaggaagtcttgatgaggggtataaggcatcccacaagcctgaggaactcgacgaacacgcactcgtagaactggagctccatagaggctcttctatggagatcaacctgggtgaaaaagataccgcgtctcagattgaggccgaaaagtccagttctatgtctagtctgaacatcgccaaacacatgccacatagagcctattgggctgaacaacaatctagactgccattgcccttaatggagttaatggagaatgaggctttagaaattctcacgaaggccctcaggagttaccagctgggtattggtcgggaccacttcctgactaaggagttacagagatacatagaaggcctgaagaaaaggagatctaagaggttatacgttaattag

SEQ ID NO: 31889 - protein, 553 aa, Artificial Sequence
  derived and/or modified sequence
MKWCWGPVLLIAGATVLMEGLQAAQRACGQRGPGPPKPQEGNTVPGEWPWQASVRRQGAHICSGSLVADTWVLTAAHCFEKAAATELNSWSVVLGSLQREGLSPGAEEVGVAALQLPRAYNHYSQGSDLALLQLAHPTTHTPLCLPQPAHRFPFGASCWATGWDQDTSDAPGTLRNLRLRLISRPTCNCIYNQLHQRHLSNPARPGMLCGGPQPGVQGPCQGDSGGPVLCLEPDGHWVQAGIISFASSCAQEDAPVLLTNTAAHSSWLQARVQGAAFLAQSPETPEMSDEDSCVACGSLRTAGPQAGAPSPWPWEARLMHQGQLACGGALVSEEAVLTAAHCFIGRQAPEEWSVGLGTRPEEWGLKQLILHGAYTHPEGGYDMALLLLAQPVTLGASLRPLCLPYPDHHLPDGERGWVLGRARPGAGISSLQTVPVTLLGPRACSRLHAAPGGDGSPILPGMVCTSAVGELPSCEGLSGAPLVHEVRGTWFLAGLHSFGDACQGPARPAVFTALPAYEDWVSSLDWQVYFAEEPEPEAEPGSCLANISQPTSC

SEQ ID NO: 31890 - DNA, 1662 bp, Artificial Sequence
  derived and/or modified sequence
atgaagtggtgctgggggccagtcctgcttattgccggtgcaacagtcctcatggaaggcctccaagcggctcagagagcatgcggacagaggggcccaggaccgcctaagcctcaggagggcaacaccgtacccggagagtggccttggcaggccagcgttcggaggcagggggctcacatctgctctgggtccctggtggccgacacctgggtgttgactgccgcacattgtttcgagaaggcggcagccacagagttgaatagttggtccgtagtacttggctccctgcagcgggagggactgtccccgggagcggaagaagtgggagttgccgcacttcagctgcctagggcctacaatcactactcccaggggagcgacttggccttgttacagcttgcgcacccaaccacgcatactcccttatgtttgccacagccagcacatcggttcccattcggcgcttcctgctgggccacgggatgggatcaggacacgtcggatgctcctggcacattgcggaacctcagactgcggctgatctctagaccaacgtgcaattgcatctataatcaactccatcagcgtcacttgtctaatccggcacgaccaggtatgctgtgcgggggtccacaaccaggggtccaaggaccctgccagggggactcagggggtcctgtgctatgcctggagccggatggccactgggtacaagcgggaataataagtttcgctagtagttgtgctcaggaggatgcccctgtgctgctgacaaatacagcagctcatagttcttggctacaggcccgagtccaaggtgcagccttcctcgcgcagagcccagaaacaccagagatgagtgatgaggactcttgtgtggcatgcgggtctttgcgaaccgcgggaccgcaggctggcgctccgtcaccatggccctgggaggctcgcctgatgcaccagggacaattagcctgcggcggagcactggtctccgaagaagctgtgctgactgctgctcactgtttcattgggcgtcaggccccagaggagtggtctgttgggttaggaacacgtccagaggaatgggggttgaagcagctgattctgcacggcgcttacacacatccagagggaggctacgatatggcccttctgcttctcgcgcagcctgtcacgctgggggcaagtttgcgccctctctgtctgccctatccagaccatcacctgcccgatggagagcgcggatgggtgctcggcagagcacgcccaggcgcagggatatcctccttgcagaccgtcccagttaccctgctgggaccacgtgcctgcagccgcctgcacgccgctccagggggagatggtagtcccattctcccgggtatggtgtgtacttccgccgtgggcgagctaccctcttgcgaggggctaagtggggctcccctggttcacgaggtcaggggcacttggttcctggcaggccttcacagttttggagacgcatgtcaaggtccggcacgacctgcagttttcaccgccctccctgcatacgaagactgggtctcaagcctggactggcaagtgtattttgctgaggagcctgagcctgaggcagaaccagggtcctgcttagctaacatcagccagccaacctcgtgctag

SEQ ID NO: 31891 - DNA, 1662 bp, Artificial Sequence
  derived and/or modified sequence
atgaaatggtgttggggccctgtgctcctcattgccggtgccaccgtcctgatggagggcctacaggccgcccaacgggcctgcggtcaacggggccctggcccaccgaaaccacaggagggaaacaccgtgcctggagagtggccatggcaggcatccgtcaggcgccaaggtgcgcacatatgcagtggttccttagtggcagatacttgggtgctgaccgctgcccattgtttcgagaaggccgccgcaactgagctcaactcttggtctgttgtgctgggcagcttgcagagagaaggtcttagtccaggcgccgaggaagttggagtggccgctctgcagttaccacgggcctacaaccactattcacaaggctctgatttagctttactgcagctcgctcaccccaccacgcacacacctctctgcctgcctcaaccggcgcaccgctttccattcggtgcatcttgttgggctaccggttgggatcaggatactagtgacgcacccggaaccctgaggaacctgaggttaagactcatctcgcggcctacctgtaattgtatctataatcagctccaccagcggcacttgagtaatccagcccgtcccggtatgctttgcggcggaccccagccaggggttcagggcccgtgccagggcgatagcgggggacctgtattatgcctcgagcccgacggacattgggtacaggccggcatcatctcatttgcctcctcctgcgcacaagaggatgctcctgtactgctgaccaacacagccgctcattctagctggcttcaggcccgtgtgcaaggcgcagcctttctggctcagtcgcccgagacgccagagatgtcggatgaggactcatgtgtcgcctgtggttccctgaggactgctggccctcaggccggcgctccaagcccatggccatgggaggccaggctcatgcaccagggccagctcgcttgcggcggagccttagtctccgaggaggcagttttgacggctgctcactgcttcatcggtcgacaggccccagaggaatggtccgtcggattggggacaagaccagaggagtggggactgaaacagctcatactgcacggggcgtacacccaccctgaaggtggttacgatatggccctgcttttgctggcacaaccagtcacactgggagcttccctgaggccactgtgcctgccctaccccgaccaccacctgcccgatggcgagcgaggatgggtgttaggcagagctaggccgggcgctggcatatcgtctctccagacagtcccagtcacactgttgggtccccgcgcctgttcccggctccatgccgcacccggtggcgatgggtcacctatactacccggcatggtttgcacatccgctgtcggagagttgccatcctgcgaaggcctctctggcgccccactagttcacgaggtgcgaggtacctggttcctcgctggactacattcatttggagatgcatgccagggaccagccagaccagctgtgtttactgcgttaccagcttatgaagactgggttagctccctcgactggcaggtttattttgccgaggaaccagaaccagaagcagaacccggctcatgcctggccaacatatctcagcctacgtcgtgttag

SEQ ID NO: 31892 - DNA, 1662 bp, Artificial Sequence
  derived and/or modified sequence
atgaagtggtgttggggccctgtgctgttaatcgcgggggccaccgtgttaatggagggtttgcaggctgcacagagagcgtgtggccagagaggtcctgggcctccaaagcctcaagaaggtaatactgttcctggggaatggccctggcaagcttctgtgaggagacagggtgcacacatatgcagcggcagcctggtagctgacacttgggtgctaaccgcggcccattgtttcgagaaggctgcagccactgaactcaattcttggtccgtagtactgggaagcctccagagggaagggttatccccgggagccgaagaagttggggtggcagccctgcaattgccccgagcctataatcactatagccagggttcagacctcgccctgctgcagctagcacacccaaccacgcacacccctctttgcctacctcaacctgcacatcgatttccctttggcgcctcgtgttgggctaccgggtgggaccaggatacaagcgacgcgcccggtacacttagaaatctgagactcaggctgatttctagaccgacttgcaactgcatctacaatcaacttcaccaacggcatctgtcgaacccagcccggcctggaatgctgtgcggaggcccccagcccggagttcagggcccttgtcagggagactccggcggtccagtactttgcctcgagcctgacgggcactgggttcaagcaggaataatctcttttgcctccagttgcgcacaagaggacgctcccgtacttcttactaatactgcggcccactcatcgtggctacaggcacgagtccaaggtgctgcattcctagctcaatcacccgaaactccagagatgtctgatgaagactcctgcgttgcttgcggaagcctcaggaccgccggaccgcaggcaggggctccatcgccttggccatgggaggctagactgatgcaccaagggcagttggcatgcggaggtgccctggtatccgaagaagctgtactgactgctgcacattgtttcataggacgtcaggcccctgaggaatggtctgttggtttaggaacaagacccgaggagtggggcctgaaacaactgatattacacggcgcttatacacaccccgaaggcgggtatgatatggctttactgctgttagcccagccagtcactctgggagcttctctgagaccgctgtgtctcccctatccagaccaccacctgcccgatggcgagcgcggctgggttctaggtcgagctcgacctggtgcgggtattagttcactacaaactgtaccagtcacactgctgggcccaagggcatgtagtagactccatgcggcacctgggggcgacggaagtccgattctgcctggcatggtatgcacatctgcagtcggcgaactcccctcatgcgaaggactgtcaggagctccactggtgcacgaagtgaggggaacttggttcctagccggtctgcactccttcggcgacgcatgccagggaccagcccgtcccgccgtattcacagcattacctgcatacgaagattgggtctcgagcctggactggcaagtttacttcgcagaggaacccgaacccgaggccgaaccgggaagttgtcttgcaaacatttctcaaccaacttcatgttag

SEQ ID NO: 31893 - DNA, 2169 bp, Artificial Sequence
  derived and/or modified sequence
tcacacagccacagccccagagctaggaactgctggctagggcaagcagacagctgaatcctagccaactggaggtggagcagaggtggagccagggagacccaggtggcctctctcagagtggagcacaggtggcagagtggcccggggcagcatgaagtggtgctggggcccagtgctgctcatcgcgggtgccacagtcctcatggagggtcttcaagccgctcagcgtgcctgtggacagcgtggccccggcccccccaagcctcaggagggcaacacagtccctggcgagtggccctggcaggccagtgtgaggaggcaaggagcccacatctgcagcggctccctggtggcagacacctgggtcctcactgctgcccactgctttgaaaaggcagcagcaacagaactgaattcctggtcagtggtcctgggttctctgcagcgtgagggactcagccctggggccgaagaggtgggggtggctgccctgcagttgcccagggcctataaccactacagccagggctcagacctggccctgctgcagctcgcccaccccacgacccacacacccctctgcctgccccagcccgcccatcgcttcccctttggagcctcctgctgggccactggctgggatcaggacaccagtgatgctcctgggaccctacgcaatctgcgcctgcgtctcatcagtcgccccacatgtaactgtatctacaaccagctgcaccagcgacacctgtccaacccggcccggcctgggatgctatgtgggggcccccagcctggggtgcagggcccctgtcagggagattccgggggccctgtgctgtgcctcgagcctgacggacactgggttcaggctggcatcatcagctttgcatcaagctgtgcccaggaggacgctcctgtgctgctgaccaacacagctgctcacagttcctggctgcaggctcgagttcagggggcagctttcctggcccagagcccagagaccccggagatgagtgatgaggacagctgtgtagcctgtggatccttgaggacagcaggtccccaggcaggagcaccctccccatggccctgggaggccaggctgatgcaccagggacagctggcctgtggcggagccctggtgtcagaggaggcggtgctaactgctgcccactgcttcattgggcgccaggccccagaggaatggagcgtagggctggggaccagaccggaggagtggggcctgaagcagctcatcctgcatggagcctacacccaccctgaggggggctacgacatggccctcctgctgctggcccagcctgtgacactgggagccagcctgcggcccctctgcctgccctatcctgaccaccacctgcctgatggggagcgtggctgggttctgggacgggcccgcccaggagcaggcatcagctccctccagacagtgcccgtgaccctcctggggcctagggcctgcagccggctgcatgcagctcctgggggtgatggcagccctattctgccggggatggtgtgtaccagtgctgtgggtgagctgcccagctgtgagggcctgtctggggcaccactggtgcatgaggtgaggggcacatggttcctggccgggctgcacagcttcggagatgcttgccaaggccccgccaggccggcggtcttcaccgcgctccctgcctatgaggactgggtcagcagtttggactggcaggtctacttcgccgaggaaccagagcccgaggctgagcctggaagctgcctggccaacataagccaaccaaccagctgctgacaggggacctggccattctcaggacaagagaatgcaggcaggcaaatggcattactgcccctgtcctccccaccctgtcatgtgtgattccaggcaccagggcaggcccagaagcccagcagctgtgggaaggaacctgcctggggccacaggtgcccactccccaccctgcaggacaggggtgtctgtggacactcccacacccaactctgctaccaagcaggcgtctcagctttcctcctcctttaccctttcagatacaatcacgccagccacgttgttttgaaaatttctttttttggggggcagcagttttcctttttttaaacttaaataaattgttacaaaataga

SEQ ID NO: 31894 - DNA, 1662 bp, Artificial Sequence
  derived and/or modified sequence
atgaagtggtgctggggccccgtgctgctgatcgccggcgccaccgtgctgatggagggcctgcaggccgcccagagagcctgcggccagagaggccccggcccccccaagccccaggagggcaacaccgtgcccggcgagtggccctggcaggccagcgtgagaagacagggcgcccacatctgcagcggcagcctggtggccgacacctgggtgctgaccgccgcccactgcttcgagaaggccgccgccaccgagctgaacagctggagcgtggtgctgggcagcctgcagagagagggcctgagccccggcgccgaggaggtgggcgtggccgccctgcagctgcccagagcctacaaccactacagccagggcagcgacctggccctgctgcagctggcccaccccaccacccacacccccctgtgcctgccccagcccgcccacagattccccttcggcgccagctgctgggccaccggctgggaccaggacaccagcgacgcccccggcaccctgagaaacctgagactgagactgatcagcagacccacctgcaactgcatctacaaccagctgcaccagagacacctgagcaaccccgccagacccggcatgctgtgcggcggcccccagcccggcgtgcagggcccctgccagggcgacagcggcggccccgtgctgtgcctggagcccgacggccactgggtgcaggccggcatcatcagcttcgccagcagctgcgcccaggaggacgcccccgtgctgctgaccaacaccgccgcccacagcagctggctgcaggccagagtgcagggcgccgccttcctggcccagagccccgagacccccgagatgagcgacgaggacagctgcgtggcctgcggcagcctgagaaccgccggcccccaggccggcgcccccagcccctggccctgggaggccagactgatgcaccagggccagctggcctgcggcggcgccctggtgagcgaggaggccgtgctgaccgccgcccactgcttcatcggcagacaggcccccgaggagtggagcgtgggcctgggcaccagacccgaggagtggggcctgaagcagctgatcctgcacggcgcctacacccaccccgagggcggctacgacatggccctgctgctgctggcccagcccgtgaccctgggcgccagcctgagacccctgtgcctgccctaccccgaccaccacctgcccgacggcgagagaggctgggtgctgggcagagccagacccggcgccggcatcagcagcctgcagaccgtgcccgtgaccctgctgggccccagagcctgcagcagactgcacgccgcccccggcggcgacggcagccccatcctgcccggcatggtgtgcaccagcgccgtgggcgagctgcccagctgcgagggcctgagcggcgcccccctggtgcacgaggtgagaggcacctggttcctggccggcctgcacagcttcggcgacgcctgccagggccccgccagacccgccgtgttcaccgccctgcccgcctacgaggactgggtgagcagcctggactggcaggtgtacttcgccgaggagcccgagcccgaggccgagcccggcagctgcctggccaacatcagccagcccaccagctgctag

SEQ ID NO: 31895 - DNA, 1662 bp, Artificial Sequence
  derived and/or modified sequence
atgaagtggtgttggggtccggttcttcttattgcaggcgccacagtactgatggagggcttgcaggcagcccagagagcctgtggacagaggggacccggaccccctaaaccccaagaaggcaatacagttcctggcgaatggccttggcaggcctcagtacggcgccagggggctcacatctgcagtggtagtctggtcgcagacacctgggtattaacagctgcccactgttttgagaaggcagctgccacggagctaaactcctggtctgttgtgcttggatctctccaaagagagggactgagcccgggggctgaagaagtgggggtggctgccctgcagcttccaagagcctacaatcattactcccaaggatctgatcttgctctgcttcagttagcccacccaaccacccacacaccgctctgcttaccacagcctgctcacaggtttccgttcggggcctcttgctgggcaaccggctgggaccaggatacctccgacgcaccaggaaccttgcggaatctcaggttgaggctgatcagcagaccaacctgcaactgtatctataatcagctgcatcaacggcaccttagtaatcccgctaggcctgggatgctttgcggtggtccacaacccggagtccaaggaccctgtcaaggcgatagtggcggaccggtgctgtgcctcgaaccagatgggcactgggtgcaggccggcattatcagcttcgccagtagttgtgcccaggaggatgcgccagttttgctcacaaatacagctgcgcattcgtcttggttgcaagccagagtccagggcgccgcattcctggcacagtcccctgagactcccgaaatgtccgatgaggatagctgtgtagcgtgtggcagcctgagaactgctgggccgcaggcaggagccccaagcccctggccctgggaggcgaggctgatgcaccagggacagctcgcctgtgggggggccttggtctcagaggaggccgtactgactgcagcacactgtttcattggtcgtcaggcaccagaagaatggtccgtcgggctgggaacccggccggaagagtggggcttgaagcagttaatcttgcatggggcctacacccacccagagggtgggtatgatatggcgcttctgctattggctcagcctgttacactaggcgcatctttaaggcccctttgccttccgtatcctgatcatcacctgcctgatggcgagagaggttgggttctgggaagagcacggccaggcgcaggtatctccagcctgcaaacagtccctgtgacactgctgggtcccagagcctgctcaaggctgcacgctgcccccggaggggacggctctcccatcctgcccgggatggtgtgcaccagtgcagtgggcgagctgccgtcttgtgaaggcctgagcggcgccccattggtgcacgaagttcggggaacttggttcctagcaggcttgcattcttttggcgatgcttgccagggcccggcacgtccagcagtgtttacagccctgcctgcctacgaagactgggtctcctctctcgattggcaggtgtacttcgccgaggaacccgaacccgaagccgagcccggatcgtgcttagcaaatatcagccagcccacctcatgttag

SEQ ID NO: 31896 - DNA, 1662 bp, Artificial Sequence
  derived and/or modified sequence
atgaagtggtgctggggccctgtgctgctgattgctggggccaccgtgctgatggagggcctgcaggccgcccagagggcctgtggccagaggggccctggcccccccaagccccaggagggcaacacagtgcctggagagtggccctggcaggcctctgtgcggcggcagggcgcccacatctgcagcggcagcctggtggccgacacctgggtgctgacagctgcccactgctttgagaaggctgctgccacagagctgaacagctggagcgtggtgctgggcagcctgcagcgggagggcctgagccctggagctgaggaggtgggcgtggccgccctgcagctgccccgggcctacaaccactacagccagggcagtgacctggccctgctgcagctggcccaccccaccacccacacccccctgtgcctgccccagcctgcccaccgcttcccctttggagccagctgctgggccaccggctgggaccaggacaccagtgatgcccctggcaccctgaggaacctgcggctgcggctcatcagccggcccacctgcaactgcatctacaaccagctgcaccagaggcacctgagcaacccagcccggcccggcatgctgtgtggcggcccccagcccggggtgcagggcccctgccagggcgacagcggcggccctgtgctgtgcctggagccagatggccactgggtgcaggccggcatcatcagctttgccagcagctgtgcccaggaggatgcccctgtgctgctgaccaacacagctgcccacagctcctggctgcaggcccgggtgcagggcgccgccttcctggcccagagccctgagaccccagagatgtctgatgaggacagctgtgtggcctgtggcagcctgaggacagctggcccccaggccggggcccccagcccctggccctgggaggcccggctgatgcaccagggccagctggcctgtggcggggccctggtgtctgaggaggccgtgctgacagctgcccactgcttcatcggccggcaggcccctgaggagtggagcgtgggcctgggcaccaggcctgaggagtggggcctgaagcagctgatcctgcatggagcctacacccaccctgagggcggctatgacatggccctgctgctgctggcccagcctgtgaccctgggcgccagcctgcggcccctgtgcctgccctacccagaccaccacctgcctgatggagagcggggctgggtgctgggccgggcccggcctggggccggcatcagcagcctgcagacagtgcctgtgaccctgctgggcccccgggcctgcagccggctgcatgctgcccctggaggagatggcagccccatcctgcccggcatggtgtgcaccagcgctgtgggggagctgcccagctgtgagggcctgagcggggcccccctggtgcatgaggtgcggggcacctggttcctggccggcctgcacagctttggagatgcctgccagggccctgcccggcctgctgtgttcaccgccctgcctgcctatgaggactgggtgagcagcctggactggcaggtgtactttgctgaggagcctgagcctgaggccgagcccggcagctgcctggccaacatcagccagcccaccagctgctag

SEQ ID NO: 31897 - DNA, 1662 bp, Artificial Sequence
  derived and/or modified sequence
atgaagtggtgctggggccccgtgctgctgatcgccggcgccaccgtcctaatggagggcctgcaagctgcccagagggcatgtggccagcgaggccccggaccacccaagcctcaggaaggcaacaccgtcccaggggagtggccttggcaggcctctgtgcggcggcagggagcacatatttgctccggctccctcgtagccgacacttgggtgttaacagccgctcactgcttcgagaaggccgcggcaaccgagttaaactcatggtctgtcgtgctgggttccctccaaagggagggactgtccccaggtgccgaggaggtgggtgtcgccgcccttcaattgccacgagcatacaatcattactcccagggaagtgatcttgccctcttgcagctggcccatcccacgacccacacccctctatgtttgccccagcccgcacaccggttcccttttggggcgtcctgctgggccactggctgggaccaggatacttccgacgcaccaggaacgctccgcaatttgcgtttgcgcctaatttctaggccgacctgtaattgtatttacaatcagctgcaccagcggcacttgtccaaccctgcccgtcccggtatgctctgcggtggcccacagcccggcgtccaggggccctgccagggtgattcggggggccctgtgctttgtcttgagccagacgggcactgggttcaggcgggtattatttcatttgctagttcatgcgctcaagaggacgcccccgtattgctgaccaataccgctgcacattcctcttggctgcaggctcgtgtgcagggcgcagcattcctggcccagtctccggagactcccgaaatgtcagatgaagatagctgtgtcgcatgcgggagtctgcggacggctggaccccaggccggagccccttccccttggccctgggaggctcgtttaatgcatcaggggcagctcgcgtgcggcggcgctttggtgtcggaggaagctgttctgacagcagcacactgctttatcggacgccaggcacctgaggagtggtctgttggtctcggaacccggcccgaggaatggggtctgaagcagctcatcctgcacggggcttacacacatcccgaagggggttatgatatggctcttctgctgcttgcccagccagtgactcttggagcgtcactgcgtcccctctgtttgccctatcccgaccaccatctacccgacggagaacggggatgggttctgggtagggcacgcccaggcgctggcatttcctccctccagacagtaccagtcacactgctgggacctcgtgcatgttccaggctgcacgcagcccccggaggagatggcagccccatcctcccaggaatggtgtgcacttccgccgtcggcgagctgccatcttgcgagggactgtctggcgcccctcttgttcatgaggttcgcggaacctggtttctggccggtctccacagcttcggcgacgcatgccaaggtccagcccggcccgcagtattcacggccctcccagcttatgaggactgggtgagcagtcttgactggcaagtctactttgccgaggagcccgagcccgaagcagaaccagggagttgcctcgccaatattagtcaacccacttcctgctag

SEQ ID NO: 31898 - RNA, 1662 nt, Artificial Sequence
  derived and/or modified sequence
augaaaugguguuggggcccugugcuccucauugccggugccaccguccugauggagggccuacaggccgcccaacgggccugcggucaacggggcccuggcccaccgaaaccacaggagggaaacaccgugccuggagaguggccauggcaggcauccgucaggcgccaaggugcgcacauaugcagugguuccuuaguggcagauacuugggugcugaccgcugcccauuguuucgagaaggccgccgcaacugagcucaacucuuggucuguugugcugggcagcuugcagagagaaggucuuaguccaggcgccgaggaaguuggaguggccgcucugcaguuaccacgggccuacaaccacuauucacaaggcucugauuuagcuuuacugcagcucgcucaccccaccacgcacacaccucucugccugccucaaccggcgcaccgcuuuccauucggugcaucuuguugggcuaccgguugggaucaggauacuagugacgcacccggaacccugaggaaccugagguuaagacucaucucgcggccuaccuguaauuguaucuauaaucagcuccaccagcggcacuugaguaauccagcccgucccgguaugcuuugcggcggaccccagccagggguucagggcccgugccagggcgauagcgggggaccuguauuaugccucgagcccgacggacauuggguacaggccggcaucaucucauuugccuccuccugcgcacaagaggaugcuccuguacugcugaccaacacagccgcucauucuagcuggcuucaggcccgugugcaaggcgcagccuuucuggcucagucgcccgagacgccagagaugucggaugaggacucaugugucgccugugguucccugaggacugcuggcccucaggccggcgcuccaagcccauggccaugggaggccaggcucaugcaccagggccagcucgcuugcggcggagccuuagucuccgaggaggcaguuuugacggcugcucacugcuucaucggucgacaggccccagaggaaugguccgucggauuggggacaagaccagaggaguggggacugaaacagcucauacugcacggggcguacacccacccugaaggugguuacgauauggcccugcuuuugcuggcacaaccagucacacugggagcuucccugaggccacugugccugcccuaccccgaccaccaccugcccgauggcgagcgaggauggguguuaggcagagcuaggccgggcgcuggcauaucgucucuccagacagucccagucacacuguuggguccccgcgccuguucccggcuccaugccgcacccgguggcgaugggucaccuauacuacccggcaugguuugcacauccgcugucggagaguugccauccugcgaaggccucucuggcgccccacuaguucacgaggugcgagguaccugguuccucgcuggacuacauucauuuggagaugcaugccagggaccagccagaccagcuguguuuacugcguuaccagcuuaugaagacuggguuagcucccucgacuggcagguuuauuuugccgaggaaccagaaccagaagcagaacccggcucaugccuggccaacauaucucagccuacgucguguuag

SEQ ID NO: 31899 - RNA, 1662 nt, Artificial Sequence
  derived and/or modified sequence
augaagugguguuggggcccugugcuguuaaucgcgggggccaccguguuaauggaggguuugcaggcugcacagagagcguguggccagagagguccugggccuccaaagccucaagaagguaauacuguuccuggggaauggcccuggcaagcuucugugaggagacagggugcacacauaugcagcggcagccugguagcugacacuugggugcuaaccgcggcccauuguuucgagaaggcugcagccacugaacucaauucuugguccguaguacugggaagccuccagagggaaggguuauccccgggagccgaagaaguugggguggcagcccugcaauugccccgagccuauaaucacuauagccaggguucagaccucgcccugcugcagcuagcacacccaaccacgcacaccccucuuugccuaccucaaccugcacaucgauuucccuuuggcgccucguguugggcuaccgggugggaccaggauacaagcgacgcgcccgguacacuuagaaaucugagacucaggcugauuucuagaccgacuugcaacugcaucuacaaucaacuucaccaacggcaucugucgaacccagcccggccuggaaugcugugcggaggcccccagcccggaguucagggcccuugucagggagacuccggcgguccaguacuuugccucgagccugacgggcacuggguucaagcaggaauaaucucuuuugccuccaguugcgcacaagaggacgcucccguacuucuuacuaauacugcggcccacucaucguggcuacaggcacgaguccaaggugcugcauuccuagcucaaucacccgaaacuccagagaugucugaugaagacuccugcguugcuugcggaagccucaggaccgccggaccgcaggcaggggcuccaucgccuuggccaugggaggcuagacugaugcaccaagggcaguuggcaugcggaggugcccugguauccgaagaagcuguacugacugcugcacauuguuucauaggacgucaggccccugaggaauggucuguugguuuaggaacaagacccgaggaguggggccugaaacaacugauauuacacggcgcuuauacacaccccgaaggcggguaugauauggcuuuacugcuguuagcccagccagucacucugggagcuucucugagaccgcugugucuccccuauccagaccaccaccugcccgauggcgagcgcggcuggguucuaggucgagcucgaccuggugcggguauuaguucacuacaaacuguaccagucacacugcugggcccaagggcauguaguagacuccaugcggcaccugggggcgacggaaguccgauucugccuggcaugguaugcacaucugcagucggcgaacuccccucaugcgaaggacugucaggagcuccacuggugcacgaagugaggggaacuugguuccuagccggucugcacuccuucggcgacgcaugccagggaccagcccgucccgccguauucacagcauuaccugcauacgaagauugggucucgagccuggacuggcaaguuuacuucgcagaggaacccgaacccgaggccgaaccgggaaguugucuugcaaacauuucucaaccaacuucauguuag

SEQ ID NO: 31900 - protein, 276 aa, Artificial Sequence
  derived and/or modified sequence
MPVPASWPHPPGPFLLLTLLLGLTEVAGEEELQMIQPEKLLLVTVGKTATLHCTVTSLLPVGPVLWFRGVGPGRELIYNQKEGHFPRVTTVSDLTKRNNMDFSIRISSITPADVGTYYCVKFRKGSPENVEFKSGPGTEMALGAKPSAPVVLGPAARTTPEHTVSFTCESHGFSPRDITLKWFKNGNELSDFQTNVDPTGQSVAYSIRSTARVVLDPWDVRSQVICEVAHVTLQGDPLRGTANLSEAIRGPASSLTALLLIAVLLGPIYVPWKQKT

SEQ ID NO: 31901 - DNA, 831 bp, Artificial Sequence
  derived and/or modified sequence
atgcccgtgcctgcctcatggccacaccctcccggccctttcctgctccttaccctgctcctgggcttaaccgaagtcgctggcgaagaggagctacagatgatccagcctgagaagctgcttttggtgaccgtgggaaaaaccgccacactgcactgtacagtgacctccctgttgccagtagggcccgtcttgtggttcagaggcgtcggaccggggagagagctcatctacaaccagaaagaaggtcacttccctagagtgactaccgtctcagacctcaccaagaggaataacatggactttagcatacggatcagcagtatcaccccagctgacgtcggaacctattattgcgtgaaattcaggaagggctctcctgaaaatgtggagttcaagtctggtcctggcacggaaatggctctcggcgctaagcccagtgcccccgtcgtcttagggccagcggcccggacaacaccggaacacacagtgagctttacttgcgagagccatggttttagtcccagggacatcactctgaagtggttcaaaaatggaaacgagctatccgactttcagaccaacgtggatcctaccggccagagcgtcgcctatagcatccgatctaccgctagggttgtgctagacccttgggacgtccggtctcaggtgatctgcgaggttgcacacgtgacactgcagggtgatcctttacgaggaacggcaaatctgtcagaggccatccgcggccctgcctcttccttgacagctctgctgctcattgccgtcctcctgggcccaatttacgttccctggaagcagaaaacctag

SEQ ID NO: 31902 - DNA, 831 bp, Artificial Sequence
  derived and/or modified sequence
atgcctgtgcctgccagctggccccatccccctggacctttcctcctcctgaccctcctgttgggtctcactgaggtggccggagaagaggaattgcaaatgatccagccagagaaattactgctggttactgtcggaaagactgcaacactgcattgtactgtgacatctttgctccccgtagggcctgtgctctggtttaggggcgttgggcctgggcgggagctgatatataaccagaaggaaggccactttcctagggtgaccactgtgagcgatctcactaagaggaataatatggacttcagtatccgaatatcatccatcaccccggcagatgtgggcacctattactgtgtcaaattcaggaagggcagtcccgagaatgtggagtttaaaagcggccctggtaccgaaatggccctaggcgctaaaccatcagctcctgttgtacttgggcctgcagcacggacgacgcctgaacacacagtctcttttacctgtgagagtcacggattctctcccagagacatcacgctgaaatggttcaagaacggcaatgaactgtcagattttcagaccaatgtggaccctaccggccaatcagtggcttatagtatccggagcacggctcgggtggtgctggatccttgggacgtaagatcccaggtcatatgtgaagttgcccacgttacactccaaggggaccctctgcggggtaccgctaacttgagcgaggcgatacgggggcccgcgagttccctgactgctctgctgctgatcgcagtgttgctgggccccatttatgtcccctggaagcaaaagacgtag

SEQ ID NO: 31903 - DNA, 831 bp, Artificial Sequence
  derived and/or modified sequence
atgcctgtgcctgcctcctggccccaccccccaggccccttcctgctgctgaccctgctgctgggcctgacagaggtggccggggaggaggagctgcagatgatccagcctgagaagctgctgctggtgacagtgggcaagacagccaccctgcactgcaccgtgaccagcctgctgcctgtgggccctgtgctgtggttccggggcgtgggccctggccgggagctgatctacaaccagaaggagggccacttcccccgggtgaccaccgtgtctgacctgaccaagaggaacaacatggacttcagcatccgcatcagcagcatcaccccagcagatgtgggcacctactactgtgtgaagttcaggaagggcagcccagaaaatgtggagttcaagagcggccctggaacagagatggccctgggcgccaagcccagcgcccctgtggtgctgggccctgctgcccggaccaccccagagcacacagtgtccttcacctgtgagagccacggcttcagcccccgggacatcaccctgaagtggttcaagaatggaaatgagctgagtgacttccagaccaacgtggaccccaccggccagagcgtggcctacagcatccgcagcacagcccgggtggtgctggacccctgggatgtgcgcagccaggtgatctgtgaggtggcccacgtgaccctgcagggcgaccccctgcggggcacagccaacctgtctgaggccatccggggccctgccagcagcctgacagccctgctgctgattgctgtgctgctgggccccatctacgtgccctggaagcagaagacctag

SEQ ID NO: 31904 - DNA, 831 bp, Artificial Sequence
  derived and/or modified sequence
atgcccgtgcccgccagctggccccacccccccggccccttcctgctcctgaccttgctgctgggtttaactgaggtagcaggagaggaggagcttcagatgatccagcctgagaagcttctgcttgtaactgtcggaaagaccgctacactgcattgcactgtgacatccctgttacccgttggtccggtgctttggtttcgcggggtgggccccgggagggagctgatttacaaccaaaaagagggacacttcccccgcgtgaccaccgtgtcagatctcaccaaacgcaacaatatggatttttcaatacgcatctcgtcaattacccccgcagatgtcggaacctactactgcgttaaattccgtaaaggttcaccggagaacgttgagttcaagtccggcccaggcacagaaatggcactgggcgctaaaccctctgcccctgtggtcctcgggccagctgcaagaaccacgcccgagcatactgttagtttcacatgcgaatcacacggattctcgcctcgcgacatcacgctcaagtggtttaagaatggcaacgagctcagcgactttcagacaaacgtggaccccaccggacagtccgtggcttattccattcgttccacagctagggtggtactggacccctgggatgtccgctctcaagtgatttgtgaggtagctcatgtgacgctacagggcgacccactgcgcgggaccgccaacctcagtgaggctattagagggcctgcctctagcctgaccgccctcctgcttattgcagtcctgctggggccaatttatgttccatggaagcagaagacctag

SEQ ID NO: 31905 - DNA, 831 bp, Artificial Sequence
  derived and/or modified sequence
atgcccgtgcccgccagctggccccacccccccggccccttcctgttgctcacacttcttctggggctgacagaagttgccggggaggaggagctgcaaatgattcagcccgaaaagctgctgctagtgactgtcgggaaaacagccactctccactgcaccgtgaccagcctgctaccagtgggacctgtgctgtggttcaggggagtgggtcccggtcgtgagctcatttataaccaaaaggaaggtcatttccctagggtgacaacagtgtcagacctgacaaagcggaacaacatggatttctcaattcggatatcaagcattaccccagcagatgtaggcacttactattgtgtgaagtttcgtaaggggtcacctgaaaacgtggaatttaaatcgggacccggcactgagatggctctcggcgcaaaaccctctgcgcccgtcgtcttaggccctgctgccaggaccaccccagagcacactgtgagcttcacctgcgaaagccatgggttttctccgcgagatatcacactgaaatggtttaaaaacggcaacgagctgtccgattttcagaccaacgtggatccaacaggtcagtctgtcgcctacagcatccgcagcaccgccagagtggtgctggacccatgggatgttcgaagtcaggtgatctgcgaagtggctcacgtaactttacaaggcgacccattacgggggactgcgaatctatcagaggccataaggggccccgcaagctccctgacagccttactccttatcgccgtactcctggggccaatctacgtgccttggaaacagaagacatag

SEQ ID NO: 31906 - DNA, 831 bp, Artificial Sequence
  derived and/or modified sequence
atgcctgtgccagcctcatggcctcatcccccaggccctttcctgcttctaacgctcctacttggcctgaccgaagtggccggtgaggaggagctccagatgatccagcctgagaaactcctcttggtgacagtcggcaagaccgccacattgcattgcaccgtaaccagtcttttacctgtcggacccgtcctgtggtttagaggcgtgggccctggcagagagctaatctacaaccagaaggagggccacttccccagggtgactaccgtaagtgacctaacaaaacggaacaatatggacttttctattagaatcagtagcatcacccccgcagatgtgggcacctactattgtgtgaagttccgaaaaggctctcctgagaacgtggaattcaaatccggacctggtacggagatggcactcggagccaagcctagcgctcctgtagtcttgggtccggctgccaggacgacaccggagcacactgtgagttttacctgcgagagccacgggttcagcccaagggacatcacgctaaagtggttcaagaacgggaacgagttgagtgatttccagacaaatgtggatcctacaggtcagtctgtggcctacagcattcggtcgaccgcccgtgtggtgctggatccatgggacgtgagaagccaggtcatctgtgaggttgcccacgtcacattgcaaggggatccactgaggggcactgccaatctttcagaggctatcagaggcccagctagctccttgacagcattgctcttaatagcagtactcctcgggccaatttatgtcccttggaagcagaagacatag

SEQ ID NO: 31907 - DNA, 831 bp, Artificial Sequence
  derived and/or modified sequence
atgccagtccccgcatcttggccccatcctcctggcccatttctgctgcttactctcttgctgggcctgaccgaggtagcgggagaggaagagctccagatgatccagcccgaaaaactgctcctcgtgactgtcgggaagaccgccacacttcattgcacagtgacctcattactgcccgttggtcctgtgctttggtttagaggcgtggggcctggccgagagcttatatataatcaaaaagagggccacttcccgcgagtaacaaccgtttctgatctaaccaagagaaataacatggatttcagcataagaattagcagcatcacccccgcagacgtgggtacgtattactgcgtgaagttccgaaagggctccccggagaatgttgaatttaagtctggccctggtacagaaatggcactaggcgctaagccctcagccccagtggtgctgggacctgccgctagaactacccccgagcacacagtgagctttacttgtgagtctcacggtttttctccgagggacataacacttaaatggtttaaaaacgggaacgaactgtcagactttcaaacaaacgtcgatcctaccggacagagcgtcgcttattcgattcgatctacggccagggtcgttctggacccatgggacgtgcgctcacaagtgatttgcgaagtcgcccatgtgactctccaaggggaccccctgagaggcacagcgaatttgtccgaggcgatccgaggcccagcatcctcccttaccgcactgctgctgatcgccgtgttgctaggcccaatttacgtcccatggaagcagaaaacttag

SEQ ID NO: 31908 - DNA, 831 bp, Artificial Sequence
  derived and/or modified sequence
atgcctgtcccagcctcctggccccatcctcctggtcctttcctgcttctgactctactgctgggacttacagaagtggcaggtgaggaggagctacagatgattcagcctgagaagctcctgttggtcacagttggaaagacagccactctgcactgcactgtgacctccctgcttcccgtgggacccgtcctgtggttcagaggagttggaccaggccgggaattaatctacaatcaaaaagaaggccacttccccagggtaacaacagtttcagacctcacaaagagaaacaacatggacttttccatccgcatcagtagcatcaccccagcagatgtcggcacatactactgtgtgaagtttcgaaaagggagccctgagaacgtggagtttaagtctggaccaggcactgagatggctttgggtgccaaaccctctgcccccgtggtattgggccctgcggcgaggaccacacctgagcatacagtgagtttcacctgtgagtcccatggcttctctcccagagacatcaccctgaaatggttcaaaaatgggaatgagctctcagacttccagaccaacgtggaccccacaggacagagtgtggcctacagcatccgcagcacagccagggtggtactggacccctgggacgttcgctctcaggtcatctgcgaggtggcccatgtcaccttgcagggggaccctcttcgtgggactgccaacttgtctgaggccatccgaggcccggcatcatcccttactgcgctgctcctcatagctgtcctcctgggccccatctacgtcccctggaagcagaagacctga

SEQ ID NO: 31909 - DNA, 1383 bp, Artificial Sequence
  derived and/or modified sequence
agagcagggcctgacatctccccagaacagacgtttgaacagagcaggcttctgaggtctccaaaatgcctgtcccagcctcctggccccatcctcctggtcctttcctgcttctgactctactgctgggacttacagaagtggcaggtgaggaggagctacagatgattcagcctgagaagctcctgttggtcacagttggaaagacagccactctgcactgcactgtgacctccctgcttcccgtgggacccgtcctgtggttcagaggagttggaccaggccgggaattaatctacaatcaaaaagaaggccacttccccagggtaacaacagtttcagacctcacaaagagaaacaacatggacttttccatccgcatcagtagcatcaccccagcagatgtcggcacatactactgtgtgaagtttcgaaaagggagccctgagaacgtggagtttaagtctggaccaggcactgagatggctttgggtgccaaaccctctgcccccgtggtattgggccctgcggcgaggaccacacctgagcatacagtgagtttcacctgtgagtcccatggcttctctcccagagacatcaccctgaaatggttcaaaaatgggaatgagctctcagacttccagaccaacgtggaccccacaggacagagtgtggcctacagcatccgcagcacagccagggtggtactggacccctgggacgttcgctctcaggtcatctgcgaggtggcccatgtcaccttgcagggggaccctcttcgtgggactgccaacttgtctgaggccatccgaggcccggcatcatcccttactgcgctgctcctcatagctgtcctcctgggccccatctacgtcccctggaagcagaagacctgactctccttccttcctcccctgccacgtgggaccctcatctctgctgcctccttcctttcctgagaggctcagcttgagagaatgagccagtgagaagcttctctagacttggctccaaacatctcccctcccaagacatctgcctgcccacaggctcctgttgctccttcacacagacctggatgccccagagcaaggtcttcattcatggtcctgagcaggtgccatgggattgggctctgggcactgacttaacggcacctccctagaaggcgagaaacatgccaaatctaaacacaccaggactcccatccatcgccttgagactgaccgtaaaccacagacgctctccaggttctcaagagttatcctgccttccagattcctgcctatcccaactccccagccttgttgaggttctctattgcctcttgaatacaaatgcactcccaaagtggttttaagaaaataaaaagattatccttcc

SEQ ID NO: 31910 - DNA, 831 bp, Artificial Sequence
  derived and/or modified sequence
atgcccgtgcccgccagctggccccacccccccggccccttcctgctgctgaccctgctgctgggcctgaccgaggtggccggcgaggaggagctgcagatgatccagcccgagaagctgctgctggtgaccgtgggcaagaccgccaccctgcactgcaccgtgaccagcctgctgcccgtgggccccgtgctgtggttcagaggcgtgggccccggcagagagctgatctacaaccagaaggagggccacttccccagagtgaccaccgtgagcgacctgaccaagagaaacaacatggacttcagcatcagaatcagcagcatcacccccgccgacgtgggcacctactactgcgtgaagttcagaaagggcagccccgagaacgtggagttcaagagcggccccggcaccgagatggccctgggcgccaagcccagcgcccccgtggtgctgggccccgccgccagaaccacccccgagcacaccgtgagcttcacctgcgagagccacggcttcagccccagagacatcaccctgaagtggttcaagaacggcaacgagctgagcgacttccagaccaacgtggaccccaccggccagagcgtggcctacagcatcagaagcaccgccagagtggtgctggacccctgggacgtgagaagccaggtgatctgcgaggtggcccacgtgaccctgcagggcgaccccctgagaggcaccgccaacctgagcgaggccatcagaggccccgccagcagcctgaccgccctgctgctgatcgccgtgctgctgggccccatctacgtgccctggaagcagaagacctag

SEQ ID NO: 31911 - protein, 482 aa, Artificial Sequence
  derived and/or modified sequence
MEPWPLLLLFSLCSAGLVLGSEHETRLVAKLFKDYSSVVRPVEDHRQVVEVTVGLQLIQLINVDEVNQIVTTNVRLKQGDMVDLPRPSCVTLGVPLFSHLQNEQWVDYNLKWNPDDYGGVKKIHIPSEKIWRPDLVLYNNADGDFAIVKFTKVLLQYTGHITWTPPAIFKSYCEIIVTHFPFDEQNCSMKLGTWTYDGSVVAINPESDQPDLSNFMESGEWVIKESRGWKHSVTYSCCPDTPYLDITYHFVMQRLPLYFIVNVIIPCLLFSFLTGLVFYLPTDSGEKMTLSISVLLSLTVFLLVIVELIPSTSSAVPLIGKYMLFTMVFVIASIIITVIVINTHHRSPSTHVMPNWVRKVFIDTIPNIMFFSTMKRPSREKQDKKIFTEDIDISDISGKPGPPPMGFHSPLIKHPEVKSAIEGIKYIAETMKSDQESNNAAAEWKYVAMVMDHILLGVFMLVCIIGTLAVFAGRLIELNQQG

SEQ ID NO: 31912 - DNA, 1449 bp, Artificial Sequence
  derived and/or modified sequence
atggaaccatggccacttctcttactgttctcgctctgttcggcaggcctcgttcttggaagcgaacatgagactaggctcgttgctaagttgttcaaagattactcttccgtggtgcggcccgtggaggaccatcgccaagtggttgaggtgactgttggtttgcagctgatccagttgattaacgtggacgaggtcaatcagatcgtgaccacaaatgtccgactgaagcaaggagacatggtggatctccccaggcccagctgtgtcacgctgggcgtgcccttgttctcacacttacagaacgagcagtgggtcgactacaacttgaagtggaatccagacgactatggaggcgttaaaaagatccatatacccagcgaaaaaatctggaggcctgatcttgtgctgtataacaacgctgatggggactttgcaatcgtaaagtttacaaaagtgctgctacagtacactggacacatcacctggactcctccagctattttcaaatcatattgtgagattattgtgactcattttccgtttgatgagcaaaattgttccatgaagctgggtacttggacctacgacggatccgttgtggctattaatcctgagagcgaccagcctgacctctcaaattttatggaatcaggcgagtgggtcattaaggagagtcgagggtggaagcacagtgttacctactcctgttgtcccgatacaccatatctggacatcacataccactttgtcatgcaacgccttcccctatacttcattgtcaatgtaatcatcccctgcttgctttttagctttctcactgggttggtgttctatttaccaacagattccggggagaagatgaccctgagcatttcagtgctacttagccttactgtgtttctgttggtgattgtcgagttgatcccctcgacctcctccgccgtccctctgataggtaagtatatgctatttacaatggtgtttgtcatcgcttcaatcattatcaccgtgattgttataaatacacaccaccgatctccatcaacgcacgtcatgcccaactgggtccggaaggtattcattgataccatccctaacatcatgttcttttctaccatgaaacgcccatctcgagaaaagcaggacaaaaaaatttttaccgaagacattgatatctctgatatcagtggcaagccaggaccccctccgatgggatttcattcgccactgatcaaacaccctgaagtgaagtcagccatcgagggaattaagtacattgcagagaccatgaagagcgatcaggagagcaataacgccgctgcagaatggaagtacgtcgctatggtcatggatcatatcttacttggtgtgttcatgctcgtgtgcatcataggcaccctcgctgtatttgctgggcgtctcatagagcttaatcagcagggttag

SEQ ID NO: 31913 - DNA, 1449 bp, Artificial Sequence
  derived and/or modified sequence
atggagccctggcccctgctgctgctcttcagcctgtgcagcgctggcctggtgctgggcagcgagcacgagacccggctggtggccaagctgttcaaggactacagctctgtggtgcggcctgtggaggaccaccggcaggtggtggaggtgacagtgggcctgcagctgatccagctgatcaacgtggatgaggtgaaccagatcgtgaccaccaacgtgcggctgaagcagggcgacatggtggacctgccccggcccagctgtgtgaccctgggcgtgcccctcttcagccacctgcagaatgagcagtgggtggactacaacctgaagtggaacccagatgattatggaggagtgaagaagatccacatccccagcgagaagatctggaggccagacctggtgctgtacaacaatgctgatggagactttgccatcgtgaagttcaccaaggtgctgctgcagtacacaggccacatcacctggaccccaccagccatcttcaagagctactgtgagatcatcgtgacccacttcccctttgatgagcagaactgcagcatgaagctgggcacctggacctatgatggctctgtggtggccatcaaccctgagagtgaccagcctgacctgagcaacttcatggagagcggggagtgggtgatcaaggagagccggggctggaagcacagcgtgacctacagctgctgcccagacaccccctacctggacatcacctaccactttgtgatgcagaggctgcccctgtacttcatcgtgaatgtcatcatcccctgcctgctcttctccttcctgaccggcctggtgttctacctgcccacagacagcggggagaagatgaccctgagcatctctgtgctgctgagcctgactgtgttcctgctggtgattgtggagctgatccccagcaccagcagcgctgtgcccctgattggcaagtacatgctgttcaccatggtgtttgtgattgccagcatcatcatcaccgtgattgtcatcaacacccaccacaggagccccagcacccacgtgatgcccaactgggtgaggaaggtgttcatcgacaccatccccaacatcatgttcttcagcaccatgaagaggcccagccgggagaagcaggacaagaagatcttcacagaagatattgacatcagtgacatcagcggcaagccaggccccccacccatgggcttccacagccccctcatcaagcaccctgaggtgaagagcgccatcgagggcatcaagtacatcgccgagaccatgaagagtgaccaggagagcaacaatgctgctgctgagtggaagtatgtggccatggtgatggaccacatcctgctgggcgtcttcatgctggtgtgcatcatcggcaccctggccgtgtttgctggccgcctcatcgagctgaaccagcagggctag

SEQ ID NO: 31914 - DNA, 1449 bp, Artificial Sequence
  derived and/or modified sequence
atggagccctggcccctgctgctgctgttcagcctgtgcagcgccgggttggtccttggctcggaacacgagacccggttagttgctaaacttttcaaagactactctagcgttgtgcgcccagttgaagaccaccgccaggtggtcgaggtgacagttggtctgcagcttattcagttaatcaatgtggatgaggttaatcagatcgtgaccaccaatgttcgattaaagcagggggacatggtcgacctgccccggccctcctgtgtaacccttggagtcccgctctttagccatctgcagaacgaacagtgggttgattataacctgaaatggaaccctgacgactacgggggtgtgaagaaaatccacattccttctgaaaagatttggaggccagacctggtactctataacaatgccgatggtgacttcgcaattgtcaagtttacgaaggtgttactgcagtatacaggccatattacgtggactccacccgccattttcaaatcttattgtgagatcatcgttacgcacttcccatttgacgaacagaactgcagcatgaaacttgggacatggacttatgatggctccgtcgtcgcgattaaccccgagtctgaccaaccggatttgagtaattttatggaaagtggggagtgggtgataaaagaatccaggggctggaaacactcagtgacatactcttgctgtccagataccccgtacctggatatcacctatcattttgttatgcaaaggctgcctctgtactttatcgtaaacgttatcatcccctgtctgcttttttcgtttctgactggtctggtgttctatctgccgacggactcaggagaaaaaatgacactcagcatttccgtcctcctgtctttgacagtcttcctgctcgttattgtcgaactcattccgtccacctcttcggctgtcccactgatcggtaagtatatgcttttcacgatggtttttgtgatcgcttcaatcataatcacggtcatcgtgatcaatactcatcatagaagtccatctacccatgtgatgcccaattgggtgcgcaaggtttttatcgacactatacctaacattatgtttttcagcacaatgaagcgaccaagccgagaaaagcaggacaagaaaattttcacagaggatatcgacatctccgatatttcaggtaagcctggcccacctcctatgggtttccattcgccgttgatcaagcaccccgaagttaagtccgctatagaggggattaaatatattgcggagactatgaagagtgaccaggagagcaacaatgccgcggctgagtggaaatacgtggccatggtgatggaccacatcctgctgggggtctttatgctggtttgcatcattgggaccctagccgtctttgccgggagacttatagagctcaatcagcagggctag

SEQ ID NO: 31915 - DNA, 1449 bp, Artificial Sequence
  derived and/or modified sequence
atggaaccctggccactgttgctgctcttctccctgtgttccgccggattagtcctcggtagtgaacacgagacacgccttgtagccaaactgtttaaggattactcttctgtggttagacctgtggaggaccaccgccaggtcgtcgaagttaccgtgggattacaactcatccaactcataaatgtggacgaagtaaaccagatagtgacaacaaacgtccgactcaaacagggggacatggttgatctcccacggccatcctgcgttaccctgggtgtacctctgttctctcacctgcagaacgagcagtgggtggattataatctcaagtggaaccccgatgactatggcggtgtaaagaaaattcacattcctagtgagaagatctggcgcccagacttggtgctgtataacaacgctgacggtgatttcgctatcgtgaagtttactaaggtcctgctccagtacactggccacattacatggaccccacctgctatctttaaatcctactgcgaaattatcgtgacacacttccccttcgacgaacaaaactgcagtatgaagctgggaacctggacttacgatggcagcgtggttgccatcaatcctgagagcgatcaacctgatctatctaattttatggagagtggggagtgggtcataaaagagagccgaggctggaaacacagcgtgacatacagttgctgccctgatacaccttacctcgatatcacataccacttcgttatgcaacggctgcccttgtactttatcgtgaacgttatcattccttgtcttctcttctccttccttaccggcctggtcttttatcttccaaccgacagtggtgagaagatgacgttgagcatatctgtgttgctaagcctcaccgtattcctcctggttattgtggaactaattccatcaaccagttccgcagtgcccctaatcggcaagtacatgttatttacaatggtttttgtaatagcgtctataatcatcaccgtcatcgtcattaatacccatcaccgctcccctagcacacatgtgatgccaaactgggttaggaaggttttcatagacacaatccctaatattatgttcttctctacaatgaagagaccatcccgggagaagcaggacaaaaagatattcacggaggacatcgacatctcagatattagcggaaagcccggacctccgccaatgggctttcacagcccattaattaagcacccggaagtcaagagtgctatcgaaggcattaaatacatcgcggagactatgaagagtgatcaggagtccaacaatgctgctgctgaatggaagtacgtagcaatggtcatggatcacatactgctcggagtgttcatgctggtgtgcattattggaacgctcgccgtgttcgctgggagactcatcgagctcaatcaacagggatag

SEQ ID NO: 31916 - DNA, 1980 bp, Artificial Sequence
  derived and/or modified sequence
cagccagagtgccagtgagaagcacaggccaccactctgccctggtccacacaagctccggtagcccatggagccctggcctctcctcctgctctttagcctttgctcagctggcctcgtcctgggctccgaacatgagacccgtctggtggcaaagctatttaaagactacagcagcgtggtgcggccagtggaagaccaccgccaggtcgtggaggtcaccgtgggcctgcagctgatacagctcatcaatgtggatgaagtaaatcagatcgtgacaaccaatgtgcgtctgaaacagggtgacatggtagatctgccacgccccagctgcgtgactttgggagttcctttgttttctcatctgcagaatgagcaatgggtggattacaacctaaaatggaatccagatgactatggcggtgtgaaaaaaattcacattccttcagaaaagatctggcgcccagaccttgttctctataacaatgcagatggtgactttgctattgtcaagttcaccaaagtgctcctgcagtacactggccacatcacgtggacacctccagccatctttaaaagctactgtgagatcatcgtcacccactttccctttgatgaacagaactgcagcatgaagctgggcacctggacctacgacggctctgtcgtggccatcaacccggaaagcgaccagccagacctgagcaacttcatggagagcggggagtgggtgatcaaggagtcccggggctggaagcactccgtgacctattcctgctgccccgacaccccctacctggacatcacctaccacttcgtcatgcagcgcctgcccctctacttcatcgtcaacgtcatcatcccctgcctgctcttctccttcttaactggcctggtattctacctgcccacagactcaggggagaagatgactctgagcatctctgtcttactgtctttgactgtgttccttctggtcatcgtggagctgatcccctccacgtccagtgctgtgcccttgattggaaaatacatgctgttcaccatggtgttcgtcattgcctccatcatcatcactgtcatcgtcatcaacacacaccaccgctcacccagcacccatgtcatgcccaactgggtgcggaaggtttttatcgacactatcccaaatatcatgtttttctccacaatgaaaagaccatccagagaaaagcaagacaaaaagatttttacagaagacattgatatctctgacatttctggaaagccagggcctccacccatgggcttccactctcccctgatcaaacaccccgaggtgaaaagtgccatcgagggcatcaagtacatcgcagagaccatgaagtcagaccaggagtctaacaatgcggcggcagagtggaagtacgttgcaatggtgatggaccacatactcctcggagtcttcatgcttgtttgcatcatcggaaccctagccgtgtttgcaggtcgactcattgaattaaatcagcaaggatgagcagaaaatgagctgagcttagctctgccctggaacctaccagagcagagaagggcaggagaggaagatttgtctacttgctccactcgcacttatcaaacgtgttatattccatacttattattgatgataagatttacctttatgtaagtttatggccttgaagtgttttcatattgcttctccctttagttctgctgtctccctgaagagtgaaccctctttagtaaatgaaactaatcactaaaaaaagtgttcatttccagtgtctggaagagtttttgccaggataaccgaggttttctgttgcattgtcattgctgttatatttatatatttacttattttgtctaaccacgagaccactagggagttgctgatgttctaaatgaagtgtattctttgcttaagagtcagttttgtacctactaagaaaaccccatctaccagtcctaaagagataa

SEQ ID NO: 31917 - DNA, 1449 bp, Artificial Sequence
  derived and/or modified sequence
atggagccctggcccctgctgctgctgttcagcctgtgcagcgccggcctggtgctgggcagcgagcacgagaccagactggtggccaagctgttcaaggactacagcagcgtggtgagacccgtggaggaccacagacaggtggtggaggtgaccgtgggcctgcagctgatccagctgatcaacgtggacgaggtgaaccagatcgtgaccaccaacgtgagactgaagcagggcgacatggtggacctgcccagacccagctgcgtgaccctgggcgtgcccctgttcagccacctgcagaacgagcagtgggtggactacaacctgaagtggaaccccgacgactacggcggcgtgaagaagatccacatccccagcgagaagatctggagacccgacctggtgctgtacaacaacgccgacggcgacttcgccatcgtgaagttcaccaaggtgctgctgcagtacaccggccacatcacctggaccccccccgccatcttcaagagctactgcgagatcatcgtgacccacttccccttcgacgagcagaactgcagcatgaagctgggcacctggacctacgacggcagcgtggtggccatcaaccccgagagcgaccagcccgacctgagcaacttcatggagagcggcgagtgggtgatcaaggagagcagaggctggaagcacagcgtgacctacagctgctgccccgacaccccctacctggacatcacctaccacttcgtgatgcagagactgcccctgtacttcatcgtgaacgtgatcatcccctgcctgctgttcagcttcctgaccggcctggtgttctacctgcccaccgacagcggcgagaagatgaccctgagcatcagcgtgctgctgagcctgaccgtgttcctgctggtgatcgtggagctgatccccagcaccagcagcgccgtgcccctgatcggcaagtacatgctgttcaccatggtgttcgtgatcgccagcatcatcatcaccgtgatcgtgatcaacacccaccacagaagccccagcacccacgtgatgcccaactgggtgagaaaggtgttcatcgacaccatccccaacatcatgttcttcagcaccatgaagagacccagcagagagaagcaggacaagaagatcttcaccgaggacatcgacatcagcgacatcagcggcaagcccggccccccccccatgggcttccacagccccctgatcaagcaccccgaggtgaagagcgccatcgagggcatcaagtacatcgccgagaccatgaagagcgaccaggagagcaacaacgccgccgccgagtggaagtacgtggccatggtgatggaccacatcctgctgggcgtgttcatgctggtgtgcatcatcggcaccctggccgtgttcgccggcagactgatcgagctgaaccagcagggctag

SEQ ID NO: 31918 - protein, 255 aa, Artificial Sequence
  derived and/or modified sequence
MASSDLEQLCSHVNEKIGNIKKTLSLRNCGQEPTLKTVLNKIGDEIIVINELLNKLELEIQYQEQTNNSLKELCESLEEDYKDIEHLKENVPSHLPQVTVTQSCVKGSDLDPEEPIKVEEPEPVKKPPKEQRSIKEMPFITCDEFNGVPSYMKSRLTYNQINDVIKEINKAVISKYKILHQPKKSMNSVTRNLYHRFIDEETKDTKGRYFIVEADIKEFTTLKADKKFHVLLNILRHCRRLSEVRGGGLTRYVIT

SEQ ID NO: 31919 - protein, 209 aa, Artificial Sequence
  derived and/or modified sequence
MASSDLEQLCSHVNEKIGNIKKTLSLRNCGQEPTLKTVLNKIGDEIIVINELLNKLELEIQYQEQTNNSLKELCESLEEDYKDIEHLKENVPSHLPQVTVTQSWYMKSRLTYNQINDVIKEINKAVISKYKILHQPKKSMNSVTRNLYHRFIDEETKDTKGRYFIVEADIKEFTTLKADKKFHVLLNILRHCRRLSEVRGGGLTRYVIT

SEQ ID NO: 31920 - DNA, 630 bp, Artificial Sequence
  derived and/or modified sequence
atggccagcagcgacctggagcagctgtgcagccacgtgaacgagaagatcggcaacatcaagaagaccctgagcctgagaaactgcggccaggagcccaccctgaagaccgtgctgaacaagatcggcgacgagatcatcgtgatcaacgagctgctgaacaagctggagctggagatccagtaccaggagcagaccaacaacagcctgaaggagctgtgcgagagcctggaggaggactacaaggacatcgagcacctgaaggagaacgtgcccagccacctgccccaggtgaccgtgacccagagctggtacatgaagagcagactgacctacaaccagatcaacgacgtgatcaaggagatcaacaaggccgtgatcagcaagtacaagatcctgcaccagcccaagaagagcatgaacagcgtgaccagaaacctgtaccacagattcatcgacgaggagaccaaggacaccaagggcagatacttcatcgtggaggccgacatcaaggagttcaccaccctgaaggccgacaagaagttccacgtgctgctgaacatcctgagacactgcagaagactgagcgaggtgagaggcggcggcctgaccagatacgtgatcacctag

SEQ ID NO: 31921 - DNA, 768 bp, Artificial Sequence
  derived and/or modified sequence
atggcgtccagcgatctggagcagctgtgcagccacgtcaatgagaagatcgggaatattaagaagactctcagcctccgaaactgtggtcaggagcctactctcaagaccgtgctgaacaaaataggagacgagatcattgtgatcaacgagctccttaataaactcgaacttgaaatccagtaccaggaacagaccaataattctctgaaggagttgtgtgagtctcttgaggaagactataaggatatcgaacaccttaaagagaacgttccctcgcacctgcctcaggtgacggttactcagtcatgcgtcaaggggtccgacctcgaccccgaagagcccataaaagtggaggagcctgagccggtcaagaagccgccaaaagagcagcgcagcatcaaagaaatgccttttatcacatgtgacgagttcaacggggtcccaagctacatgaaatcccgtcttacgtacaatcagatcaatgatgtgatcaaagagattaacaaggccgttataagcaaatataagatcctgcaccagcccaagaagagtatgaattccgtgactcgcaatttataccacaggttcattgatgaagagactaaagacactaaagggagatacttcatcgttgaggccgatatcaaggagttcactaccctaaaggctgataaaaaatttcacgtgcttctgaacatcctgagacattgcaggcggttgagcgaggtaaggggcggcgggttaacacgatacgtgattacttag

SEQ ID NO: 31922 - DNA, 768 bp, Artificial Sequence
  derived and/or modified sequence
atggcatcctccgatctggagcaactctgcagccatgtgaatgagaaaatcggcaatattaaaaagactttatctctaaggaactgtggtcaggagccgactttgaagactgtcctgaataagatcggcgacgagatcattgtcattaacgaactcctcaacaagctcgagctggagattcagtaccaggagcaaaccaacaattcgttgaaagaactctgcgaatctcttgaggaggactacaaggacatcgagcatctcaaagaaaatgtgccctctcatctcccccaggttaccgtgacgcaaagttgtgtgaaggggtctgacctcgaccccgaagagcccatcaaggtcgaagaaccggagcctgtgaagaagcctccgaaagagcaacgctcgattaaagagatgcctttcattacatgcgacgaatttaacggcgttccgtcttatatgaagtcacgactgacctacaaccaaattaacgatgttatcaaagaaattaataaagccgtgattagtaaatataaaatcctacaccagcccaagaaaagtatgaatagcgtgacccgtaacctctatcataggtttatcgacgaagagactaaggataccaagggaaggtacttcatcgtcgaggctgacatcaaagaatttacaaccctcaaggccgataagaagttccacgtccttcttaatattcttaggcactgcaggcggctatcagaggtccggggcggtggacttaccaggtatgttatcacctag

SEQ ID NO: 31923 - DNA, 630 bp, Artificial Sequence
  derived and/or modified sequence
atggcttcttctgatcttgagcagctgtgtagccacgtaaatgagaaaatcgggaatattaagaagacgctctctcttcgcaattgtggccaggagccaacactgaaaactgtcttaaataaaatcggagatgaaatcatcgttattaacgaactgctcaataagcttgagctggagatccaataccaggaacagactaacaactcacttaaagaactgtgcgagtcgctggaggaggattataaagatatagagcacctaaaagagaacgtcccaagccacctgcctcaggttactgtgacccaaagctggtacatgaaaagtcgccttacctacaaccagatcaacgatgttatcaaagagataaacaaggcagtgatcagcaaatataaaatcctgcatcaacccaagaaatccatgaactccgtgacgcgtaatctgtatcacagattcatagacgaagagacgaaagacacaaagggccgttatttcatcgtcgaagcagacatcaaggaatttaccacccttaaagctgataagaagttccatgtcctcctgaatatcttaagacattgccgccgtctcagtgaggtgcgaggaggcgggctaactcgctacgttattacttag

SEQ ID NO: 31924 - DNA, 768 bp, Artificial Sequence
  derived and/or modified sequence
atggccagcagtgacctggagcagctgtgcagccacgtgaatgagaagattggcaacatcaagaagaccctgagcctgaggaactgtggccaggagcccaccctgaagacagtgctgaacaagattggagatgagatcatcgtcatcaatgagctgctgaacaagctggagctggagatccagtaccaggagcagaccaacaacagcctgaaggagctgtgtgagagcctggaggaggactacaaggacatcgagcacctgaaggaaaatgtgcccagccacctgccccaggtgacagtgacccagagctgtgtgaagggcagtgacctggaccctgaggagcccatcaaggtggaggagcctgagcctgtgaagaagccacccaaggagcagaggagcatcaaggagatgcccttcatcacctgtgatgagttcaacggggtgcccagctacatgaagagccggctgacctacaaccagatcaatgatgtgatcaaggagatcaacaaggctgtgatcagcaagtacaagatcctgcaccagcccaagaagtccatgaacagcgtgaccaggaacctgtaccaccgcttcattgatgaggagaccaaggacaccaagggccgctacttcatcgtggaggccgacatcaaggagttcaccaccctgaaggctgacaagaagttccacgtgctgctgaacatcctgcggcactgccggcggctgtctgaggtgcggggcggcggcctgacccgctacgtgatcacctag

SEQ ID NO: 31925 - DNA, 630 bp, Artificial Sequence
  derived and/or modified sequence
atggccagcagtgacctggagcagctgtgcagccacgtgaatgagaagattggcaacatcaagaagaccctgagcctgaggaactgtggccaggagcccaccctgaagacagtgctgaacaagattggagatgagatcatcgtcatcaatgagctgctgaacaagctggagctggagatccagtaccaggagcagaccaacaacagcctgaaggagctgtgtgagagcctggaggaggactacaaggacatcgagcacctgaaggaaaatgtgcccagccacctgccccaggtgacagtgacccagagctggtacatgaagagccggctgacctacaaccagatcaatgatgtgatcaaggagatcaacaaggctgtgatcagcaagtacaagatcctgcaccagcccaagaagtccatgaacagcgtgaccaggaacctgtaccaccgcttcattgatgaggagaccaaggacaccaagggccgctacttcatcgtggaggccgacatcaaggagttcaccaccctgaaggctgacaagaagttccacgtgctgctgaacatcctgcggcactgccggcggctgtctgaggtgcggggcggcggcctgacccgctacgtgatcacctag

SEQ ID NO: 31926 - DNA, 768 bp, Artificial Sequence
  derived and/or modified sequence
atggccagcagcgacctggagcagctgtgcagccacgtgaacgagaagatcggaaacattaagaagactctgagcctgagaaactgcggtcaagagcctaccttgaagacagtgctcaacaaaattggtgacgagattatcgtaatcaacgagctactgaacaagcttgagctggagatacagtaccaggaacaaaccaataactcactcaaagagctgtgtgagagcctagaagaagattacaaggacatagagcatctgaaagagaacgtaccctcccacctgccacaggtgaccgtgactcaatcttgtgttaaggggtcagacctcgatccagaagagccgataaaagtggaagagcctgaaccggtcaagaaaccacccaaagaacaaagatctattaaggaaatgccattcattacctgcgacgagttcaacggtgtacctagctatatgaagtcgagacttacctataaccagataaacgacgtcattaaggagattaacaaagccgtgatcagcaaatataagatcctgcatcagccaaaaaagagtatgaactctgtgacccgcaacctgtatcacaggttcatcgacgaggagaccaaagacaccaaaggccgctacttcatcgtggaagcggacattaaagagtttacgactctcaaggccgacaaaaagtttcacgtactcctgaatatcctgcgccattgcaggcgactgtctgaagtacgcggtggaggcctgactagatatgtgataacgtag

SEQ ID NO: 31927 - DNA, 2914 bp, Artificial Sequence
  derived and/or modified sequence
agcctgcgcttcggaagcatggatgtgcgcctgcgctgcgctagggcgcggcgggcggtttgaattttgcttacagagtcccgtctcaccatcctgggcttccaacggagactgcggtatccgcagctggagacccagcggcgagtagccttttgctcccggacggacttgaggttggagtctgtgtgttggggaccctgcctttggaagcgcccgagaggcttaaaggatggcctcgtcagatctggaacaattatgctctcatgttaatgaaaagattggcaatattaagaaaaccttatcattaagaaactgtggccaggaacctaccttgaaaactgtattaaataaaataggagatgagatcattgtaataaatgaacttctaaataaattggaattggaaattcagtatcaagaacaaaccaacaattcactcaaggaactctgtgaatctcttgaagaagattacaaagacatagaacatcttaaagaaaacgttccttcccatttgcctcaagtaacagtaacccagagctgtgttaagggatcagatcttgatcctgaagaaccaatcaaagttgaagaacctgaacccgtaaagaagcctcccaaagagcaaagaagtattaaggaaatgccatttataacttgtgatgagttcaatggtgttccttcgtacatgaaatcccgcttaacctataatcaaattaatgatgttattaaagaaatcaacaaggcagtaattagtaaatataaaatcctacatcagccaaaaaagtctatgaattctgtgaccagaaatctctatcacagatttattgatgaagaaacgaaggataccaaaggtcgttattttatagtggaagctgacataaaggagttcacaactttgaaagctgacaagaagtttcacgtgttactgaatattttacgacactgccggaggctatcagaggtccgagggggaggacttactcgttatgttataacctgagtcccttgtgaacttttgaacataccaacagggtatagagtatagaggctatttctataattttcttatatataatttttttaacttttaatcttttttgtttccttttttttttttttgagacaggatcttgctttgtcacccaggggcttgctttgtcacgcaggctagagtgcagtggcgcaaacatggctcactgcagcctcaacctcccaggctcaagtgatcctcccacctcagccccctgaatggctgggactacaagcgtgcgccaccatgcctggctaatttttgtattttttggagagatggggtttcaccatgttgcctaggctggtcttgagctcctgagctcaaacaatccaccctcctcagcctcccaaagtgctgggattacaggcttgagccaccacacctgacctattcttgtttcttataaaaataaaacttttttggataaagcttatttcttgtttttttctttttctttttttttttttttgagacagtctcgctctttcacccaggccggactgcagcggcgctatctcggctcactgcaaactctgcctcccaggttcacgccatcctcctgcctcagcctcctgagtagctgggactacaggcacctgccaccacgcccagctaattttttgtatttttagtagagatggggtttcaccgtgttagccaggatggtctcgatctcctgacctcatgatccgcccacctcggcctcccaaagtgctgggattacaggcgtgagccaccgcgcccggccaacttatatattttcaagattcacctcctctcaccaaatatttaactacctgctgaatacgcctctgtactaggcacataatggaactaaaaaatgctcatgtccagtttttgtgttgagtgaacaatgctgcagaccctaataagattgggtacagatcggcatgcgcctgtagtcccagctactcaggagaattgcttgaacctaggaggtggaggttgcagtgagccgagatcgtgccactgcactccagtctgggcaacagagcgagactccatctcagaaaaaaagaaaaaaagactgggtacagatgtgatattggaagaaaaagatcaagctgatgaggttaggatacccaggccctttggacttaaagatcactagtgtctaaattccatcgatggcatttcagtctataggtaaacttcctggaagctggatttggagacagtttatcatctgattattgggctttcgtataggtccttagggagcagcttacctgaaatgcatttagtgtacaccagtctgtaaacttcaacctgtaatgaaagtgtaataaatgtacattgagttgatgtgataatgtgatataataagaaatatatatttgatcttcctatctagttccttgttcagagctcctaaaacccttgtaatttccaaagtgatggagtacatcttttgttctagtatttggtctttgaccccagttcctgacacaaagctcctaaattcctttaaatttcccagtgataggagaattttttgttctaatgaggtcactcttgatgggcacctggataactcaggatgggggctgctcacaaagaccacatcatgattggaagtttcaaactttcagtctcccacctccagagaggggagaggggctggagatttgtgtcaataatccatcaggcctatgtcaacaagacataatccgttaactatggagttcagggagcttcagggttggcaaacattttgatgtgccaggaaggtgacgcactccagctttatgaagtcagcaagtcctgtgctcaggatgcttctggaccttgccccaggtaccccttcatgtggctgttgttcatctgtatcctttgtagtagccttaaaataaactgttaaac

SEQ ID NO: 31928 - DNA, 768 bp, Artificial Sequence
  derived and/or modified sequence
atggccagcagcgacctggagcagctgtgcagccacgtgaacgagaaaattgggaatataaagaaaaccctgtcccttcgtaactgtggccaagagcccaccctgaagacggtacttaacaagattggggacgaaataatcgtgatcaacgagctgctgaacaagctagagctcgaaatccagtaccaagaacagactaataatagcctaaaagagctctgcgaaagtctggaagaggactataaggatatagagcacctcaaggagaacgtgcccagccacctgccacaggtgacagtaacccaatcgtgcgtgaaaggtagcgacttggatcccgaagagcctatcaaagtagaggagccagagcctgttaaaaaacctcctaaggagcagcgatcaattaaagagatgccttttatcacctgcgatgaattcaacggggtgcctagttacatgaagagccgcctgacctataaccaaatcaacgacgtgatcaaggaaattaataaggctgttatctcaaaatataagattctacaccagcctaaaaagagcatgaatagtgtgactcgaaatctctaccatcgttttattgatgaagaaaccaaggatactaaaggcagatactttattgtggaagcagacattaaggaatttacaactctgaaggccgacaagaagttccatgtgctgctgaacatacttagacactgcaggagactcagcgaagtgcggggtggcggccttaccaggtatgtaatcacctag

SEQ ID NO: 31929 - DNA, 630 bp, Artificial Sequence
  derived and/or modified sequence
atggccagcagcgacctggagcagctgtgcagccacgtgaacgagaagatcggcaacataaaaaagactctcagtttgcggaattgtgggcaggagccaaccctgaaaactgtattgaataagatcggcgatgaaatcatcgtcataaatgaactgctgaacaaactcgagctggagatccagtaccaagagcagaccaacaatagcctgaaggaactgtgcgagtctttggaggaagactacaaagatattgagcatctaaaggagaatgttcctagtcacttacctcaagtgacggtgacccagagctggtatatgaagagcaggctcacctataatcaaattaatgacgttataaaggaaattaacaaggccgtgatcagtaagtacaagatcctgcaccagcccaaaaaatctatgaactccgtgacaaggaatctctaccatcgttttatcgacgaggaaacaaaggacaccaagggccgctacttcatcgtggaggccgacatcaaggaatttaccaccctcaaggccgataagaagtttcacgtgctgctcaatattctgagacattgcagaaggttaagtgaagtgaggggtggaggcctaacacgttacgtcattacatag

SEQ ID NO: 31930 - DNA, 768 bp, Artificial Sequence
  derived and/or modified sequence
atggccagctccgacttggagcagttgtgtagtcatgtcaacgagaagatcggcaacatcaaaaaaacgctgtcccttcgaaactgtggccaggaacccaccctcaagacggtcctcaacaagataggcgatgagatcattgtgataaacgaattgctgaataagctggagctggaaatccaatatcaggagcagaccaataacagcctaaaggaactgtgcgagtcactcgaggaggattacaaggatatagagcaccttaaggagaatgtgccctcccaccttccccaggtgacggttacacagtcctgcgtgaaaggttcagatttggacccagaggagcccattaaggtcgaggagccggagccagttaagaagcctcccaaagagcagagatcaattaaagaaatgcccttcatcacttgcgacgagttcaatggtgtcccaagctacatgaagagccgcctaacctacaatcagattaatgatgtgatcaaagaaatcaacaaggcagtgatttccaaatataaaatcctgcatcagcccaagaagtctatgaatagcgtgacacgtaacttgtatcaccgtttcatcgacgaggagactaaagataccaagggccgttacttcatcgttgaagctgatattaaggagttcacaactctgaaagccgataaaaaattccatgtgctactgaatatactccgacactgcagaaggctgagtgaggtgcgcggtgggggtttgacaaggtatgtgataacctag

SEQ ID NO: 31931 - DNA, 2731 bp, Artificial Sequence
  derived and/or modified sequence
agcctgcgcttcggaagcatggatgtgcgcctgcgctgcgctagggcgcggcgggcggtttgaattttgcttacagagtcccgtctcaccatcctgggcttccaacggagactgcggtatccgcagctggagacccagcggcgagtagccttttgctcccggacggacttgagaggcttaaaggatggcctcgtcagatctggaacaattatgctctcatgttaatgaaaagattggcaatattaagaaaaccttatcattaagaaactgtggccaggaacctaccttgaaaactgtattaaataaaataggagatgagatcattgtaataaatgaacttctaaataaattggaattggaaattcagtatcaagaacaaaccaacaattcactcaaggaactctgtgaatctcttgaagaagattacaaagacatagaacatcttaaagaaaacgttccttcccatttgcctcaagtaacagtaacccagagctggtacatgaaatcccgcttaacctataatcaaattaatgatgttattaaagaaatcaacaaggcagtaattagtaaatataaaatcctacatcagccaaaaaagtctatgaattctgtgaccagaaatctctatcacagatttattgatgaagaaacgaaggataccaaaggtcgttattttatagtggaagctgacataaaggagttcacaactttgaaagctgacaagaagtttcacgtgttactgaatattttacgacactgccggaggctatcagaggtccgagggggaggacttactcgttatgttataacctgagtcccttgtgaacttttgaacataccaacagggtatagagtatagaggctatttctataattttcttatatataatttttttaacttttaatcttttttgtttccttttttttttttttgagacaggatcttgctttgtcacccaggggcttgctttgtcacgcaggctagagtgcagtggcgcaaacatggctcactgcagcctcaacctcccaggctcaagtgatcctcccacctcagccccctgaatggctgggactacaagcgtgcgccaccatgcctggctaatttttgtattttttggagagatggggtttcaccatgttgcctaggctggtcttgagctcctgagctcaaacaatccaccctcctcagcctcccaaagtgctgggattacaggcttgagccaccacacctgacctattcttgtttcttataaaaataaaacttttttggataaagcttatttcttgtttttttctttttctttttttttttttttgagacagtctcgctctttcacccaggccggactgcagcggcgctatctcggctcactgcaaactctgcctcccaggttcacgccatcctcctgcctcagcctcctgagtagctgggactacaggcacctgccaccacgcccagctaattttttgtatttttagtagagatggggtttcaccgtgttagccaggatggtctcgatctcctgacctcatgatccgcccacctcggcctcccaaagtgctgggattacaggcgtgagccaccgcgcccggccaacttatatattttcaagattcacctcctctcaccaaatatttaactacctgctgaatacgcctctgtactaggcacataatggaactaaaaaatgctcatgtccagtttttgtgttgagtgaacaatgctgcagaccctaataagattgggtacagatcggcatgcgcctgtagtcccagctactcaggagaattgcttgaacctaggaggtggaggttgcagtgagccgagatcgtgccactgcactccagtctgggcaacagagcgagactccatctcagaaaaaaagaaaaaaagactgggtacagatgtgatattggaagaaaaagatcaagctgatgaggttaggatacccaggccctttggacttaaagatcactagtgtctaaattccatcgatggcatttcagtctataggtaaacttcctggaagctggatttggagacagtttatcatctgattattgggctttcgtataggtccttagggagcagcttacctgaaatgcatttagtgtacaccagtctgtaaacttcaacctgtaatgaaagtgtaataaatgtacattgagttgatgtgataatgtgatataataagaaatatatatttgatcttcctatctagttccttgttcagagctcctaaaacccttgtaatttccaaagtgatggagtacatcttttgttctagtatttggtctttgaccccagttcctgacacaaagctcctaaattcctttaaatttcccagtgataggagaattttttgttctaatgaggtcactcttgatgggcacctggataactcaggatgggggctgctcacaaagaccacatcatgattggaagtttcaaactttcagtctcccacctccagagaggggagaggggctggagatttgtgtcaataatccatcaggcctatgtcaacaagacataatccgttaactatggagttcagggagcttcagggttggcaaacattttgatgtgccaggaaggtgacgcactccagctttatgaagtcagcaagtcctgtgctcaggatgcttctggaccttgccccaggtaccccttcatgtggctgttgttcatctgtatcctttgtagtagccttaaaataaactgttaaac

SEQ ID NO: 31932 - DNA, 768 bp, Artificial Sequence
  derived and/or modified sequence
atggcctcctctgacctggagcagctatgctcacacgtgaatgaaaagatcgggaacatcaaaaagacgctaagcctcaggaattgtggccaggaaccgacattgaagacagttctgaacaaaataggcgacgagattatcgtcatcaacgagctcttaaataagctggagctggagatacagtatcaggagcagaccaataactctctgaaagagctctgcgaaagccttgaggaggactataaggacattgagcacctcaaagaaaacgtcccctcccacctgcctcaggtcactgtgacccagagctgtgtcaagggctcagatttagaccccgaggagcccatcaaagtagaggaaccagagccagttaagaagccccctaaggagcaacggagtatcaaagaaatgccttttattacctgtgacgaatttaatggggtcccctcatatatgaaatcacgtctaacgtataatcagattaacgacgtgattaaggaaattaacaaggctgtcatttccaagtacaagattctgcatcagcctaagaagtccatgaactccgttacacgtaatctgtaccatcggttcatagatgaggaaacgaaggatactaaagggagatacttcatcgttgaagctgacatcaaagagttcactacactgaaggccgataagaagttccacgttctgcttaacatcctcagacactgcaggcggctgtcagaggtccgcggagggggattaacaaggtatgttatcacatag

SEQ ID NO: 31933 - DNA, 630 bp, Artificial Sequence
  derived and/or modified sequence
atggcatcatctgacctagaacaactctgcagccatgttaacgagaagatcggtaacataaagaaaactctgagtttacggaattgcgggcaagaacccacgctgaagaccgtacttaataaaataggagatgagatcattgtgatcaacgagctgctcaataaactggagcttgaaattcagtatcaggaacagaccaacaatagcctcaaggagttgtgtgagtccctggaagaggattacaaagatattgagcacttaaaggaaaatgtacccagccatctaccgcaggtgacagtcacccaatcatggtatatgaaaagtcgcttaacctacaaccagatcaatgatgtcatcaaggagataaacaaggctgtcattagtaagtacaagatcttacaccagcctaaaaaatccatgaatagtgtgacccgcaacctgtatcacaggtttatcgacgaggaaaccaaggacaccaagggccgatactttatcgttgaggccgacatcaaagagttcaccacccttaaggcagataaaaagttccatgtattactgaatattcttcggcattgtcggcgactcagcgaagtcaggggtggcggtcttaccagatatgtaatcacctag

SEQ ID NO: 31934 - DNA, 2905 bp, Artificial Sequence
  derived and/or modified sequence
gatgacgcaaaccgggaacagcggctgagcctgcgcttcggaagcatggatgtgcgcctgcgctgcgctagggcgcggcgggcggtttgaattttgcttacagagtcccgtctcaccatcctgggcttccaacggagactgcggtatccgcagctggagacccagcggcgagtagccttttgctcccggacggacttgagaggcttaaaggatggcctcgtcagatctggaacaattatgctctcatgttaatgaaaagattggcaatattaagaaaaccttatcattaagaaactgtggccaggaacctaccttgaaaactgtattaaataaaataggagatgagatcattgtaataaatgaacttctaaataaattggaattggaaattcagtatcaagaacaaaccaacaattcactcaaggaactctgtgaatctcttgaagaagattacaaagacatagaacatcttaaagaaaacgttccttcccatttgcctcaagtaacagtaacccagagctgtgttaagggatcagatcttgatcctgaagaaccaatcaaagttgaagaacctgaacccgtaaagaagcctcccaaagagcaaagaagtattaaggaaatgccatttataacttgtgatgagttcaatggtgttccttcgtacatgaaatcccgcttaacctataatcaaattaatgatgttattaaagaaatcaacaaggcagtaattagtaaatataaaatcctacatcagccaaaaaagtctatgaattctgtgaccagaaatctctatcacagatttattgatgaagaaacgaaggataccaaaggtcgttattttatagtggaagctgacataaaggagttcacaactttgaaagctgacaagaagtttcacgtgttactgaatattttacgacactgccggaggctatcagaggtccgagggggaggacttactcgttatgttataacctgagtcccttgtgaacttttgaacataccaacagggtatagagtatagaggctatttctataattttcttatatataatttttttaacttttaatcttttttgtttccttttttttttttttgagacaggatcttgctttgtcacccaggggcttgctttgtcacgcaggctagagtgcagtggcgcaaacatggctcactgcagcctcaacctcccaggctcaagtgatcctcccacctcagccccctgaatggctgggactacaagcgtgcgccaccatgcctggctaatttttgtattttttggagagatggggtttcaccatgttgcctaggctggtcttgagctcctgagctcaaacaatccaccctcctcagcctcccaaagtgctgggattacaggcttgagccaccacacctgacctattcttgtttcttataaaaataaaacttttttggataaagcttatttcttgtttttttctttttctttttttttttttttgagacagtctcgctctttcacccaggccggactgcagcggcgctatctcggctcactgcaaactctgcctcccaggttcacgccatcctcctgcctcagcctcctgagtagctgggactacaggcacctgccaccacgcccagctaattttttgtatttttagtagagatggggtttcaccgtgttagccaggatggtctcgatctcctgacctcatgatccgcccacctcggcctcccaaagtgctgggattacaggcgtgagccaccgcgcccggccaacttatatattttcaagattcacctcctctcaccaaatatttaactacctgctgaatacgcctctgtactaggcacataatggaactaaaaaatgctcatgtccagtttttgtgttgagtgaacaatgctgcagaccctaataagattgggtacagatcggcatgcgcctgtagtcccagctactcaggagaattgcttgaacctaggaggtggaggttgcagtgagccgagatcgtgccactgcactccagtctgggcaacagagcgagactccatctcagaaaaaaagaaaaaaagactgggtacagatgtgatattggaagaaaaagatcaagctgatgaggttaggatacccaggccctttggacttaaagatcactagtgtctaaattccatcgatggcatttcagtctataggtaaacttcctggaagctggatttggagacagtttatcatctgattattgggctttcgtataggtccttagggagcagcttacctgaaatgcatttagtgtacaccagtctgtaaacttcaacctgtaatgaaagtgtaataaatgtacattgagttgatgtgataatgtgatataataagaaatatatatttgatcttcctatctagttccttgttcagagctcctaaaacccttgtaatttccaaagtgatggagtacatcttttgttctagtatttggtctttgaccccagttcctgacacaaagctcctaaattcctttaaatttcccagtgataggagaattttttgttctaatgaggtcactcttgatgggcacctggataactcaggatgggggctgctcacaaagaccacatcatgattggaagtttcaaactttcagtctcccacctccagagaggggagaggggctggagatttgtgtcaataatccatcaggcctatgtcaacaagacataatccgttaactatggagttcagggagcttcagggttggcaaacattttgatgtgccaggaaggtgacgcactccagctttatgaagtcagcaagtcctgtgctcaggatgcttctggaccttgccccaggtaccccttcatgtggctgttgttcatctgtatcctttgtagtagccttaaaataaactgttaaacacaagtaaa

SEQ ID NO: 31935 - DNA, 768 bp, Artificial Sequence
  derived and/or modified sequence
atggccagcagcgacctggagcagctgtgcagccacgtgaacgagaagatcggcaacatcaagaagaccctgagcctgagaaactgcggccaggagcccaccctgaagaccgtgctgaacaagatcggcgacgagatcatcgtgatcaacgagctgctgaacaagctggagctggagatccagtaccaggagcagaccaacaacagcctgaaggagctgtgcgagagcctggaggaggactacaaggacatcgagcacctgaaggagaacgtgcccagccacctgccccaggtgaccgtgacccagagctgcgtgaagggcagcgacctggaccccgaggagcccatcaaggtggaggagcccgagcccgtgaagaagccccccaaggagcagagaagcatcaaggagatgcccttcatcacctgcgacgagttcaacggcgtgcccagctacatgaagagcagactgacctacaaccagatcaacgacgtgatcaaggagatcaacaaggccgtgatcagcaagtacaagatcctgcaccagcccaagaagagcatgaacagcgtgaccagaaacctgtaccacagattcatcgacgaggagaccaaggacaccaagggcagatacttcatcgtggaggccgacatcaaggagttcaccaccctgaaggccgacaagaagttccacgtgctgctgaacatcctgagacactgcagaagactgagcgaggtgagaggcggcggcctgaccagatacgtgatcacctag

SEQ ID NO: 31936 - DNA, 768 bp, Artificial Sequence
  derived and/or modified sequence
atggcttcatcagatctggaacagctgtgtagccatgtgaacgaaaagattggaaatatcaaaaagacgctcagcctccggaattgcgggcaagaaccaacgctgaaaaccgtcctgaataagatcggggacgagatcattgttatcaatgagctgctgaacaagcttgagttggagattcagtatcaagaacagaccaacaacagcctgaaggagctttgcgaaagccttgaagaagactataaggacatcgagcacctcaaggagaatgtgccttcccacctaccccaggtgactgtgacccagtcttgcgtaaaggggagcgatcttgacccagaagagccaatcaaagtggaggagcccgagcctgtcaagaaacctcccaaggagcagaggagcattaaagaaatgccattcatcacgtgtgacgagtttaacggtgttccatcctatatgaagtccaggcttacctacaaccaaattaatgacgtcatcaaagagatcaacaaggccgtgatttccaagtacaagatcctccaccaacccaaaaagtccatgaattcagtgactagaaatctgtaccatcgatttattgatgaagaaaccaaggataccaagggacggtactttatcgtagaagccgacatcaaagaattcaccacgctgaaagccgataaaaaattccatgtgctgttgaacatcctgagacattgcaggaggctgtccgaagtcaggggggggggcctaaccagatatgtcatcacatag

SEQ ID NO: 31937 - DNA, 768 bp, Artificial Sequence
  derived and/or modified sequence
atggccagcagcgacctggagcagctgtgcagccacgtgaacgagaaaatcgggaacatcaagaaaaccctttcattacgaaattgcgggcaggaaccaacccttaaaaccgttcttaacaagatcggggatgaaatcatcgttattaacgaactcttgaataagcttgagctggagatccagtaccaagaacagaccaataattctttgaaggaactttgcgagtccctggaagaggactacaaggacattgagcatttgaaagaaaacgtgccctctcacctgccgcaggtgaccgttacccagagctgtgtcaaagggagtgatctcgaccccgaagaaccaattaaggtcgaagagcctgagcccgttaaaaagccgccaaaggaacagcggtcaattaaagagatgcccttcatcacttgcgatgagttcaatggggtcccctcatacatgaaatctcgtctgacttacaatcagatcaatgatgtcattaaggagataaataaagcagtgatttcaaaatacaaaatactgcatcagcctaagaagtcgatgaactccgttacgagaaacctttatcacaggttcattgatgaagagacaaaggataccaagggccgttatttcatagtggaagcggatataaaggaatttaccaccctgaaagctgacaaaaaattccacgtgctcttgaatattctgagacactgcaggaggttgtcagaagtgaggggcgggggattaaccaggtatgtgattacgtag

SEQ ID NO: 31938 - DNA, 768 bp, Artificial Sequence
  derived and/or modified sequence
atggcatcgtccgatctggagcaactctgctcacacgtgaacgaaaaaattggaaacataaagaagacactgtctcttcgtaactgcggccaagagcccacacttaaaactgtgctgaacaagatcggagacgagattatagtgatcaacgaactgctgaacaaactggaattggaaattcagtaccaggagcagactaataacagcctgaaagagctgtgcgaaagtctggaagaggactacaaagatatcgagcaccttaaagaaaatgtcccgtctcacctcccacaggtgaccgtcacccaaagttgtgtgaaagggtccgatctggacccagaagagcctatcaaggtggaagagcccgaaccggtcaagaaaccaccaaaggaacagcggtcgatcaaagagatgccattcattacttgcgacgagtttaacggagtcccatcatatatgaagagcagactgacttataaccagatcaacgacgtgatcaaggaaattaataaggcagtcatctccaaatacaaaattttacatcagcccaaaaaaagtatgaacagcgtgacacggaacctgtaccaccgttttatcgacgaagagacaaaggacactaaaggacgttacttcattgtcgaggccgatataaaagagtttacgactctcaaagccgacaaaaagttccacgtgttgctaaatattctcaggcattgtaggcgtctgtctgaggttaggggcggtgggctgaccagatacgtgataacctag

SEQ ID NO: 31939 - protein, 559 aa, Artificial Sequence
  derived and/or modified sequence
MADERKDEAKAPHWTSAPLTEASAHSHPPEIKDQGGAGEGLVRSANGFPYREDEEGAFGEHGSQGTYSNTKENGINGELTSADRETAEEVSARIVQVVTAEAVAVLKGEQEKEAQHKDQTAALPLAAEETANLPPSPPPSPASEQTVTVEEAAGGESALAPSVFKQAKDKVSNSTLSKIPALQGSTKSPRYSSACPSTTKRATFSDSLLIQPTSAGSTDRLPYSKSGNKDGVTKSPEKRSSLPRPSSILPPRRGVSGDRDENSFSLNSSISSSARRTTRSEPIRRAGKSGTSTPTTPGSTAITPGTPPSYSSRTPGTPGTPSYPRTPHTPGTPKSAILVPSEKKVAIIRTPPKSPATPKQLRLINQPLPDLKNVKSKIGSTDNIKYQPKGGQVRILNKKIDFSKVQSRCGSKDNIKHSAGGGNVQIVTKKIDLSHVTSKCGSLKNIRHRPGGGRVKIESVKLDFKEKAQAKVGSLDNAHHVPGGGNVKIDSQKLNFREHAKARVDHGAEIITQSPGRSSVASPRRLSNVSSSGSINLLESPQLATLAEDVTAALAKQGL

SEQ ID NO: 31940 - DNA, 1680 bp, Artificial Sequence
  derived and/or modified sequence
atggcagacgaacgaaaagatgaagctaaggcccctcattggacttctgcccctctgaccgaggcctctgcacacagccatccccccgagatcaaggatcaaggaggagctggagagggtctggtcagatctgcgaatggctttccatatagagaagacgaggagggggcatttggcgagcacgggagccagggcacctatagcaatactaaagagaatggaataaacggcgaattaacgagtgccgatagggagaccgccgaagaggtcagcgcgaggattgtccaggtcgtcacagccgaggcagtggcagtacttaaaggcgagcaggagaaagaggcccagcataaagatcagaccgctgccttgcccctggccgctgaggagacagccaatctcccaccgtctcctcctccgtcccccgcatccgagcagacggttacagtggaagaagcggctggaggcgaatccgccttggcccccagcgttttcaagcaggccaaagacaaagtaagtaactctaccttatctaagatccctgcccttcagggatcaaccaaatccccacgttattccagcgcatgccctagtactacaaagcgggccacatttagcgactcccttcttattcagccgacatctgccggttcgacagacagactgccttactccaaatctggaaacaaggacggtgtcactaagtccccagaaaaacgtagctcgctgcccaggccctcctccattctgcccccaagacgaggagtgtctggagacagagatgaaaattcgttttccctcaacagtagcatctcaagcagcgcccgacgcaccacacggagcgaacccatccgacgcgctggcaagagcggaacttccacccccacaactcccggtagcaccgccattaccccgggaacaccaccttcttactcgtcaaggacacctgggacaccagggactccaagctatccccgcacaccccacaccccggggaccccgaagtctgcaatcttggtgccaagtgaaaagaaggttgctatcatccgcacacctccgaagagccccgcaacacccaaacagttgaggctgataaaccagcctctgcctgatctgaaaaacgtcaagtcaaagattggcagtaccgacaacataaaataccagcccaagggcggacaggtccggatcctcaacaagaagatcgacttttctaaggtccagagccgctgcggatccaaagacaatatcaagcactctgctggcggggggaacgtgcagatcgtgaccaaaaagattgacctatcacatgttaccagcaagtgcggaagtctgaagaacatccgacatcggcccgggggcggtagggtgaagatcgagtcggtcaaattggacttcaaggagaaagcccaagccaaggtaggcagtctcgacaatgcacaccacgtgcccggtggcggaaacgtgaagatcgactcgcagaagctgaactttagggagcacgccaaggcacgggtggatcatggcgcagaaattatcactcaatcccctggccgtagctccgtcgctagccctaggaggctgtccaacgtcagctcatcaggatcgatcaacttgctggagtccccacaactcgccacccttgcagaagacgttacagctgcccttgccaaacagggcttatag

SEQ ID NO: 31941 - DNA, 1680 bp, Artificial Sequence
  derived and/or modified sequence
atggctgatgagaggaaggatgaggccaaggccccccactggaccagcgcccccctgacagaggccagcgcccacagccaccccccagagatcaaggaccagggcggggccggggagggcctggtgcgcagcgccaacggcttcccctaccgggaggatgaggagggcgccttcggggagcacggcagccagggcacctacagcaacaccaaggaaaatggcatcaacggggagctgaccagcgctgaccgggagacagctgaggaggtgtctgcccgcatcgtgcaggtggtgacagctgaggccgtggccgtgctgaagggggagcaggagaaggaggcccagcacaaggaccagacagctgccctgcccctggccgctgaggagacagccaacctgccccccagccccccacccagccctgccagcgagcagacagtgacagtggaggaggccgccggcggggagagcgccctggcccccagcgtcttcaagcaggccaaggacaaggtgagcaacagcaccctgagcaagatcccagccctgcagggcagcaccaagagcccccgctacagcagcgcctgccccagcaccaccaagagggccaccttcagtgacagcctgctgatccagcccaccagcgctggcagcacagaccggctgccctacagcaagagcggcaacaaggatggagtgaccaagagccctgagaagaggagcagcctgccccggcccagcagcatcctgcccccccggcggggcgtgtctggggacagagatgaaaattccttcagcctgaacagcagcatcagcagcagcgcccggaggaccaccaggtctgagcccatccggcgggccggcaagagcggcaccagcacccccaccaccccaggcagcacagccatcaccccaggcaccccacccagctacagcagcaggaccccaggcaccccaggcacccccagctaccccaggaccccccacaccccaggcacccccaagagcgccatcctggtgcccagcgagaagaaggtggccatcatccgcaccccacccaagagccctgccacccccaagcagctgcggctcatcaaccagcccctgcctgacctgaagaatgtgaagagcaagattggcagcacagacaacatcaagtaccagcccaagggcggccaggtgcgcatcctgaacaagaagattgacttcagcaaggtgcagagccgctgtggcagcaaggacaacatcaagcacagcgctgggggcggcaatgtgcagatcgtgaccaagaagattgacctgagccacgtgaccagcaaatgtggcagcctgaagaacatccgccacaggcctgggggcggccgggtgaagattgaatctgtgaagctggacttcaaggagaaggcccaggccaaggtgggcagcctggacaatgcccaccacgtgcctgggggcggcaatgtgaagattgacagccagaagctgaacttccgggagcacgccaaggcccgggtggaccacggggctgagatcatcacccagagccctggccgcagctctgtggccagcccccggcggctgagcaatgtgagcagcagcggcagcatcaacctgctggagagcccccagctggccaccctggccgaggatgtgacagctgccctggccaagcagggcctgtag

SEQ ID NO: 31942 - DNA, 2241 bp, Artificial Sequence
  derived and/or modified sequence
ggcgctcgggctgcgcgggctctgggcagcagcagcagcagcagcagcatcctctcttcctttacttcccttccgcttctttctcttccttctccttctttttcccccccctccccttcttcccctaacccttctacccctctcctttttctccggagggcgctaagtccgtgagcggtggcagtcgcgaccgcgggtgcatccagtttctgcgcccagattttattgatctaatccaaagtatcttataacttctggctggaattaagattcttcagcttgtctctaaccgaggaagcattgattgggagctactcattcagaaaattaaaagaaagaagccagaaaatattatcaaccctttgagaacacgacacaacgaactttatattttaccacttccttgaatagttgcaggagaaataacaaggcattgaagaatggcagatgaacggaaagatgaagcaaaggcacctcactggacctcagcaccgctaacagaggcatctgcacactcacatccacctgagattaaggatcaaggcggagcaggggaaggacttgtccgaagcgccaatggattcccatacagggaggatgaagagggtgcctttggagagcatgggtcacagggcacctattcaaataccaaagagaatgggatcaacggagagctgacctcagctgacagagaaacagcagaggaggtgtctgcaaggatagttcaagtagtcactgctgaggctgtagcagtcctgaaaggtgaacaagagaaagaagctcaacataaagaccagactgcagctctgcctttagcagctgaagaaacagctaatctgcctccttctccacccccatcacctgcctcagaacagactgtcacagtggaggaagcagcaggtggggaatcagctctggctcccagtgtatttaaacaggcaaaggacaaagtctctaattctaccttgtcaaagattcctgctttacagggtagcacaaagtccccaagatacagctcagcctgccctagcacgactaaaagggctacattttctgacagtttattaatacagcccacctcagcaggctccacagaccgtttgccatactcaaaatcagggaacaaggacggagtaaccaagagcccagaaaagcgctcttctctcccaagaccttcctccattctccctcctcggcgaggtgtgtcaggagacagagatgagaattccttctctctcaacagttctatctcttcttcagcacggcggaccaccaggtcagagccaattcgcagagcagggaagagtggtacctcaacacccactacccctgggtctactgccatcactcctggcaccccaccaagttattcttcacgcacaccaggcactcctggaacccctagctatcccaggacccctcacacaccaggaacccccaagtctgccatcttggtgccgagtgagaagaaggtcgccatcatacgtactcctccaaaatctcctgcgactcccaagcagcttcggcttattaaccaaccactgccagacctgaagaatgtcaaatccaaaatcggatcaacagacaacatcaaataccagcctaaaggggggcaggttaggattttaaacaagaagatcgattttagcaaagttcagtccagatgtggttccaaggataacatcaaacattcggctgggggcggaaatgtacaaattgttaccaagaaaatagacctaagccatgtgacatccaaatgtggctctctgaagaacatccgccacaggccaggtggcggacgtgtgaaaattgagagtgtaaaactagatttcaaagaaaaggcccaagctaaagttggttctcttgataatgctcatcatgtacctggaggtggtaatgtcaagattgacagccaaaagttgaacttcagagagcatgctaaagcccgtgtggaccatggggctgagatcattacacagtccccaggcagatccagcgtggcatcaccccgacgactcagcaatgtctcctcgtctggaagcatcaacctgctcgaatctcctcagcttgccactttggctgaggatgtcactgctgcactcgctaagcagggcttgtgaatatttctcatttagcattgaaataataatatttaggcatgagctcttggcaggagtgggctctgagcagttgttatattcattctttataaaccataaaataaataatctcatccccaaa

SEQ ID NO: 31943 - DNA, 1680 bp, Artificial Sequence
  derived and/or modified sequence
atggccgacgagcggaaggacgaggccaaggccccccactggaccagcgcacctttaactgaggcatccgcacatagccatccaccagagatcaaagatcaaggcggcgctggcgagggtctcgtgcgtagcgcgaatggatttccctaccgggaggacgaggagggagcttttggagaacacggcagccagggtacttattctaacaccaaggagaatgggatcaacggggagttgacgtcagctgacagggagactgcagaggaggtgagcgcccgaatcgttcaggtggtcacagccgaggccgtggccgtgttaaagggggagcaggagaaagaggcccaacataaggatcagaccgcggccctgcctctcgctgcagaagagaccgcgaatctgcctccttctccgcccccttcccctgcatctgaacagactgtcaccgtggaggaggccgcaggaggagaatcagctttagctccctcagtatttaagcaggccaaagataaggtatccaattcaacactctcaaagattcccgccctacaggggagtactaaatcgcctcgatactcttccgcgtgcccaagtactacgaagagggccaccttcagcgatagcttattgatccagccgacgagtgcaggcagcactgaccggctcccatacagtaagtcaggaaataaggacggtgtgaccaaaagcccagagaagcgttcctcgctcccccgcccaagtagcattctgcccccccggcggggagtgtctggcgaccgcgatgagaattcctttagcctcaattcctccatttctagttctgctcgtcgcactactaggtccgagccaatccgaagggcagggaaatctggcacatcgaccccaacaactccaggatctaccgcgattactcccgggacgccaccctcatattccagccgaacaccggggactcccggaaccccctcttaccctcgcaccccacacacacccgggaccccgaaaagtgccatactcgtgcccagcgaaaagaaggtggccattatccggactccccctaagtctcccgctactcctaagcagctgaggctgatcaaccaaccattgcctgacctgaagaacgtgaaatctaagatcggatctaccgacaacatcaaataccaacctaagggcgggcaggtgcgaatcctgaacaagaaaattgatttcagcaaagtccagtctagatgcggatcaaaagacaacatcaagcacagtgcaggggggggtaatgttcagatcgtgacgaaaaagatagatctgtctcacgtcactagtaaatgcggtagcctgaagaacatacggcaccggccaggcggcggcagggtcaaaatcgagagtgtgaagctcgacttcaaagaaaaggctcaagcaaaggttggatccctcgataatgctcaccatgtgcccggcgggggtaatgttaagatagacagccagaagcttaactttagggagcatgccaaggctcgagttgaccacggcgcggaaattatcactcagagtccgggacgttcttccgtcgcaagtccgcggcggctcagcaacgtctccagtagtgggtcgataaatctcttagaaagcccccagctcgcgaccctcgctgaggacgtgactgcggctctggctaaacaaggtctgtag

SEQ ID NO: 31944 - DNA, 1680 bp, Artificial Sequence
  derived and/or modified sequence
atggcagacgaaagaaaagatgaggccaaagctccacattggacctcggcgccactcactgaggccagtgcccattcccatccacctgaaattaaagatcaagggggagccggagaggggctggttcgctcagctaatggatttccttatcgtgaagacgaggaaggagccttcggggagcacggcagtcaggggacttatagcaacaccaaagagaacggcatcaatggcgagctcacaagcgccgacagggagaccgctgaggaagtgagcgcgaggatagtgcaagtcgttaccgctgaggcagtggctgtgctcaagggggagcaggagaaggaggcccaacacaaggatcagacagcagccctgcctttggcagccgaagagacagctaatctgccaccctccccgccaccaagcccagcaagcgagcagacagttaccgtggaggaggcagctggcggagagagtgctctggccccatctgtttttaagcaagccaaggataaggtctcgaattcaacactctctaagatcccagcactgcagggatcgaccaaatccccgagatacagctccgcctgtccttccacaactaagagggccaccttctccgatagtctgctaatccagcccacttcagccggttctactgataggttgccttacagcaagtctggtaataaggacggcgttaccaagagccccgaaaagaggtcctcgctgcctagaccaagcagcatcctgccacccagacgaggcgtgtcaggtgaccgcgacgaaaattcattttccctcaactcaagcatctctagttcggcaaggagaacaacccgctctgaacctattaggcgcgcaggaaaaagcggaaccagcactcctaccacccctggtagtacagcgattactcccggaactcctccttcttattccagtaggacccccggaaccccagggacgccaagttaccccagaaccccacatactcccggaacccctaagagtgctattttggtaccgagtgagaaaaaagtcgcgatcatcagaacaccccctaagagccccgctacgcctaaacagctgcgactcataaaccaacccttgccagatttgaagaacgtgaagagcaagataggcagcactgataacataaaataccagccgaagggtgggcaagtccgcatactgaacaaaaaaatcgatttcagtaaggtgcaaagtcggtgtggcagcaaggacaatatcaaacacagtgctggaggcggaaacgtgcagattgttacgaaaaagatcgatctgtctcacgtgacctctaagtgcggcagtcttaaaaatattcgtcacaggcccggtggcggacgtgtgaaaattgaaagtgtaaagctggacttcaaggagaaagcccaagccaaagtaggctcccttgataatgcccaccacgtgccgggaggcggaaatgtgaagatcgattctcagaagctgaacttcagagagcatgccaaggctagagtcgaccacggggctgaaatcataacccagtcgcctgggaggagcagtgtggccagcccacggaggctgagcaatgttagctcaagcggctccatcaatctgttagaaagcccacagcttgctacccttgcagaagatgtgacagcggctttggccaaacagggcttgtag

SEQ ID NO: 31945 - DNA, 1680 bp, Artificial Sequence
  derived and/or modified sequence
atggccgacgagagaaaggacgaggccaaggccccccactggaccagcgcccccctgaccgaggccagcgcccacagccacccccccgagatcaaggaccagggcggcgccggcgagggcctggtgagaagcgccaacggcttcccctacagagaggacgaggagggcgccttcggcgagcacggcagccagggcacctacagcaacaccaaggagaacggcatcaacggcgagctgaccagcgccgacagagagaccgccgaggaggtgagcgccagaatcgtgcaggtggtgaccgccgaggccgtggccgtgctgaagggcgagcaggagaaggaggcccagcacaaggaccagaccgccgccctgcccctggccgccgaggagaccgccaacctgccccccagccccccccccagccccgccagcgagcagaccgtgaccgtggaggaggccgccggcggcgagagcgccctggcccccagcgtgttcaagcaggccaaggacaaggtgagcaacagcaccctgagcaagatccccgccctgcagggcagcaccaagagccccagatacagcagcgcctgccccagcaccaccaagagagccaccttcagcgacagcctgctgatccagcccaccagcgccggcagcaccgacagactgccctacagcaagagcggcaacaaggacggcgtgaccaagagccccgagaagagaagcagcctgcccagacccagcagcatcctgccccccagaagaggcgtgagcggcgacagagacgagaacagcttcagcctgaacagcagcatcagcagcagcgccagaagaaccaccagaagcgagcccatcagaagagccggcaagagcggcaccagcacccccaccacccccggcagcaccgccatcacccccggcaccccccccagctacagcagcagaacccccggcacccccggcacccccagctaccccagaaccccccacacccccggcacccccaagagcgccatcctggtgcccagcgagaagaaggtggccatcatcagaaccccccccaagagccccgccacccccaagcagctgagactgatcaaccagcccctgcccgacctgaagaacgtgaagagcaagatcggcagcaccgacaacatcaagtaccagcccaagggcggccaggtgagaatcctgaacaagaagatcgacttcagcaaggtgcagagcagatgcggcagcaaggacaacatcaagcacagcgccggcggcggcaacgtgcagatcgtgaccaagaagatcgacctgagccacgtgaccagcaagtgcggcagcctgaagaacatcagacacagacccggcggcggcagagtgaagatcgagagcgtgaagctggacttcaaggagaaggcccaggccaaggtgggcagcctggacaacgcccaccacgtgcccggcggcggcaacgtgaagatcgacagccagaagctgaacttcagagagcacgccaaggccagagtggaccacggcgccgagatcatcacccagagccccggcagaagcagcgtggccagccccagaagactgagcaacgtgagcagcagcggcagcatcaacctgctggagagcccccagctggccaccctggccgaggacgtgaccgccgccctggccaagcagggcctgtag

SEQ ID NO: 31946 - DNA, 1092 bp, Artificial Sequence
  derived and/or modified sequence
atgagatgggtgagacacgacgcccccgccagaagaggccagctgagaagactgctggagcacgtgagactgcccctgctggcccccgcctacttcctggagaaggtggaggccgacgagctgctgcaggcctgcggcgagtgcagacccctgctgctggaggccagagcctgcttcatcctgggcagagaggccggcgccctgagaaccagacccagaagattcatggacctggccgaggtgatcgtggtgatcggcggctgcgacagaaagggcctgctgaagctgcccttcgccgacgcctaccaccccgagagccagagatggacccccctgcccagcctgcccggctacaccagaagcgagttcgccgcctgcgccctgagaaacgacgtgtacgtgagcggcggccacatcaacagccacgacgtgtggatgttcagcagccacctgcacacctggatcaaggtggccagcctgcacaagggcagatggagacacaagatggccgtggtgcagggccagctgttcgccgtgggcggcttcgacggcctgagaagactgcacagcgtggagagatacgaccccttcagcaacacctgggccgccgccgcccccctgcccgaggccgtgagcagcgccgccgtggccagctgcgccggcaagctgttcgtgatcggcggcgccagacagggcggcgtgaacaccgacaaggtgcagtgcttcgaccccaaggaggacagatggagcctgagaagccccgcccccttcagccagagatgcctggaggccgtgagcctggaggacaccatctacgtgatgggcggcctgatgagcaagatcttcacctacgaccccggcaccgacgtgtggggcgaggccgccgtgctgcccagccccgtggagagctgcggcgtgaccgtgtgcgacggcaaggtgcacatcctgggcggcagagacgacagaggcgagagcaccgacaaggtgttcaccttcgaccccagcagcggccaggtggaggtgcagcccagcctgcagagatgcaccagcagccacggctgcgtgaccatcatccagagcctgggcagatag

SEQ ID NO: 31947 - DNA, 1752 bp, Artificial Sequence
  derived and/or modified sequence
atgagacagggccacgcccccgaggagagcgagcccggctgcgaggccccctgcgccggcccctgccacgcccagagagtgctgcaggccctgaacgcctacagaagaagcggcaccctgaccgacgtggtgctgagagccggcggcagagacttcccctgccacagagccgccctgagcgccggcagcgcctacttcagaagcctgttcgccgccggcagacccgagagaggccccgccgtggtgcccgtggtgcccgtggcccccgaggcccccggcaccagccccgccggcgccgccgccgccctggccgtggtgctggactacgtgtacggcgccggcgtgagactgagagccgaggacgaggccgccgccgtgctggccctggccgagagactgggcgtggccggcctgagagaggcctgcgtgagattcctggagggcagactgagagccgccaacagcctggccctgagaagagtggccgccgccttcagcctggcccccctggccgagagatgcggcagagtgctgagacaggccttcgccgaggtggccagacacgccgacttcctggagctggcccccgacgaggtggtggccctgctggccgaccccgccctgggcgtggccagagaggaggccgtgttcgaggccgccatgagatgggtgagacacgacgcccccgccagaagaggccagctgagaagactgctggagcacgtgagactgcccctgctggcccccgcctacttcctggagaaggtggaggccgacgagctgctgcaggcctgcggcgagtgcagacccctgctgctggaggccagagcctgcttcatcctgggcagagaggccggcgccctgagaaccagacccagaagattcatggacctggccgaggtgatcgtggtgatcggcggctgcgacagaaagggcctgctgaagctgcccttcgccgacgcctaccaccccgagagccagagatggacccccctgcccagcctgcccggctacaccagaagcgagttcgccgcctgcgccctgagaaacgacgtgtacgtgagcggcggccacatcaacagccacgacgtgtggatgttcagcagccacctgcacacctggatcaaggtggccagcctgcacaagggcagatggagacacaagatggccgtggtgcagggccagctgttcgccgtgggcggcttcgacggcctgagaagactgcacagcgtggagagatacgaccccttcagcaacacctgggccgccgccgcccccctgcccgaggccgtgagcagcgccgccgtggccagctgcgccggcaagctgttcgtgatcggcggcgccagacagggcggcgtgaacaccgacaaggtgcagtgcttcgaccccaaggaggacagatggagcctgagaagccccgcccccttcagccagagatgcctggaggccgtgagcctggaggacaccatctacgtgatgggcggcctgatgagcaagatcttcacctacgaccccggcaccgacgtgtggggcgaggccgccgtgctgcccagccccgtggagagctgcggcgtgaccgtgtgcgacggcaaggtgcacatcctgggcggcagagacgacagaggcgagagcaccgacaaggtgttcaccttcgaccccagcagcggccaggtggaggtgcagcccagcctgcagagatgcaccagcagccacggctgcgtgaccatcatccagagcctgggcagatag

SEQ ID NO: 31948 - DNA, 1092 bp, Artificial Sequence
  derived and/or modified sequence
atgcgttgggttcgtcatgacgctccagctcggcgcggacagctgaggcgcctcctggagcacgtgagactgccactactcgcgccagcctactttttggagaaggtcgaagcagacgagttacttcaagcctgtggtgagtgcaggccactgttgttggaagctcgcgcatgtttcatcctgggaagggaagccggggcattgagaacaagaccccgccgcttcatggatctcgcagaagtgatagtcgtgattggcggctgtgatcgaaaggggctgctgaagctcccattcgcggatgcctatcacccagagtcccaacggtggacaccactccctagcctcccaggatacacgcgttctgaattcgctgcttgcgctttaaggaatgacgtgtacgtctcaggtggccatattaatagccatgacgtctggatgtttagctcacaccttcacacatggattaaagtcgcctccttacacaagggcagatggagacacaaaatggccgtcgtacagggccagttatttgctgttggcgggtttgacggattacgacgcctgcacagcgttgaaaggtatgaccctttcagtaacacctgggctgccgcggcgcccctccccgaggcagtgtcgtcagccgccgtagcaagctgcgccggcaagctgttcgtaattggcggggccagacaggggggcgtgaatacagataaagtgcagtgctttgatccaaaggaagacagatggagtctgaggagccccgcaccatttagccagcgctgcctggaggcagtgtcgctagaggatactatatacgtgatgggcggtttaatgagtaagatttttacgtacgatcctggaactgatgtatggggagaggctgctgttttgccatcccctgtagaatcttgtggggtcacggtctgcgatggtaaggtgcatattctgggcggccgagatgatcgaggggagtccaccgacaaagtgttcaccttcgacccctccagtgggcaagtagaagtgcagccctccttacagagatgcacgtcctctcacggatgtgtgacgatcatacagtccctgggaagatag

SEQ ID NO: 31949 - DNA, 1752 bp, Artificial Sequence
  derived and/or modified sequence
atgagacagggacacgcacccgaagagagcgagccaggctgcgaggcaccgtgtgctggaccttgccacgctcagagagtgctccaggctctaaatgcgtatagacgcagcgggactctgacagacgtggtgctgcgggccggaggtagggacttcccctgtcaccgagctgcactgtctgcaggatctgcctactttaggtctctttttgccgccggacggccagagaggggacccgccgtggtgccagtcgtgcccgtcgcaccggaggcacctggtacaagccctgctggggctgcggctgccctggcagtcgtcttggattacgtctacggcgccggggtgcgcctgagagccgaggatgaggcagcagcagtgcttgcactggcagaaaggctgggggttgccggactcagggaagcctgtgtgagattcctggaggggcgtctgcgggccgccaacagcctggctcttcggcgggtagcagctgcgttttctttggcgccccttgccgaacgttgtggccgcgtcctacgccaggcatttgcagaggtggccagacacgcagacttcctcgagttagcgcccgatgaggtggtagcactgcttgccgaccctgccctgggtgttgcgcgggaggaagccgtgttcgaagccgccatgcgctgggtcagacacgatgcaccagcgaggagagggcagctgcgcagactcctggagcacgtccggctgccactgcttgcacctgcctatttcttggagaaagtcgaggcggatgagctccttcaggcatgcggggaatgcaggcccctcctgctcgaagcgcgagcctgcttcatcctgggcagggaagccggagcactccgaacaaggccaaggcgctttatggacctcgcagaggtcatcgttgtgatcgggggctgcgatcgcaagggcctgttgaagttaccgttcgcagacgcctaccaccctgagtcacagcggtggaccccgctcccatctctacccggatatacaagaagtgagttcgctgcatgcgcactgcggaatgatgtctacgtcagcgggggccacattaatagtcacgacgtttggatgttttcctcacatctccacacttggatcaaagtcgcgtccctacacaaggggagatggcgccacaaaatggccgtggtccaaggccagctgttcgccgtagggggtttcgatggtctcagacgcttacatagtgtggagcgctacgatccattctcaaatacctgggcagctgccgcaccgttgcccgaggccgtgtcgtccgccgctgtagctagctgcgccggaaagcttttcgtgatcgggggagcccggcaggggggtgtcaatacagacaaggttcaatgtttcgaccctaaggaggacagatggagtctcagatcccccgctccattctcccagcgttgtctggaagccgtcagcttggaggacaccatctacgtgatgggcgggctgatgtccaaaatcttcacctacgaccccggtacagacgtatggggggaagccgcagtgttgccgagcccagttgagtcctgtggtgtgactgtgtgtgacggaaaagtccatatccttggcgggagagatgatcggggcgaatctacagataaggttttcaccttcgaccccagttcgggacaggtcgaagttcagcctagcctacagcgttgcacttctagccacggctgcgtaaccatcatccagagtctgggacgctag

SEQ ID NO: 31950 - DNA, 1092 bp, Artificial Sequence
  derived and/or modified sequence
atgcgctgggtgagacatgatgccccagcccggcggggccagctgcggcggctgctggagcacgtgcggctgcccctgctggccccagcctacttcctggagaaggtggaggctgatgagctgctgcaggcctgtggagaatgtcggcccctgctgctggaggcccgggcctgcttcatcctgggccgggaggccggggccctgcggacccggccccggcgcttcatggacctggccgaggtgattgtggtgattggaggctgtgacaggaagggcctgctgaagctgccctttgctgatgcctaccaccctgagagccagcgctggacccccctgcccagcctgcccggctacaccaggagtgaatttgctgcctgtgccctgagaaatgatgtgtatgtgtctgggggccacatcaacagccatgatgtgtggatgttcagcagccacctgcacacctggatcaaggtggccagcctgcacaagggccgctggaggcacaagatggctgtggtgcagggccagctgtttgctgtgggcggctttgatggcctgcggcggctgcacagcgtggagagatatgaccccttcagcaacacctgggccgccgccgcccccctgcctgaggccgtgtcctctgctgctgtggccagctgtgccggcaagctgtttgtgattggaggagcccggcagggcggcgtgaacacagacaaggtgcagtgctttgaccccaaggaggaccgctggagcctgcggagccctgcccccttcagccagcgctgcctggaggccgtgtccctggaggacaccatctacgtgatgggcggcctgatgagcaagatcttcacctatgaccccggcacagatgtgtggggcgaggccgctgtgctgcccagccctgtggagagctgtggggtgacagtgtgtgatggcaaggtgcacatcctgggcggcagagatgacagaggagagagcacagacaaggtgttcacctttgaccccagcagcggccaggtggaggtgcagcccagcctgcagcgctgcaccagcagccacggctgtgtgaccatcatccagagcctgggccgctag

SEQ ID NO: 31951 - DNA, 1752 bp, Artificial Sequence
  derived and/or modified sequence
atgaggcagggccacgcccctgaggagagcgagcccggctgtgaggccccctgtgccggcccctgccacgcccagagggtgctgcaggccctgaatgcctacagaagaagtggcaccctgacagatgtggtgctgcgggccggcggccgggacttcccctgccacagagctgccctgtctgctggcagcgcctacttccgcagcctgtttgctgctggccggcctgagcggggccctgctgtggtgcctgtggtgcctgtggcccctgaggcccctggcaccagccctgctggagctgctgctgccctggccgtggtgctggactatgtgtatggagctggggtgcggctgcgggcagaagatgaagctgctgctgtgctggccctggccgagcggctgggcgtggccggcctgcgggaggcctgtgtgcgcttcctggagggccgcctgcgggccgccaacagcctggccctgcggcgggtggccgccgccttcagcctggcccccctggccgagcgctgtggccgggtgctgcggcaggcctttgctgaggtggcccggcatgctgacttcctggagctggccccagatgaggtggtggccctgctggccgaccctgccctgggcgtggcccgggaggaggccgtgtttgaagctgccatgcgctgggtgagacatgatgccccagcccggcggggccagctgcggcggctgctggagcacgtgcggctgcccctgctggccccagcctacttcctggagaaggtggaggctgatgagctgctgcaggcctgtggagaatgtcggcccctgctgctggaggcccgggcctgcttcatcctgggccgggaggccggggccctgcggacccggccccggcgcttcatggacctggccgaggtgattgtggtgattggaggctgtgacaggaagggcctgctgaagctgccctttgctgatgcctaccaccctgagagccagcgctggacccccctgcccagcctgcccggctacaccaggagtgaatttgctgcctgtgccctgagaaatgatgtgtatgtgtctgggggccacatcaacagccatgatgtgtggatgttcagcagccacctgcacacctggatcaaggtggccagcctgcacaagggccgctggaggcacaagatggctgtggtgcagggccagctgtttgctgtgggcggctttgatggcctgcggcggctgcacagcgtggagagatatgaccccttcagcaacacctgggccgccgccgcccccctgcctgaggccgtgtcctctgctgctgtggccagctgtgccggcaagctgtttgtgattggaggagcccggcagggcggcgtgaacacagacaaggtgcagtgctttgaccccaaggaggaccgctggagcctgcggagccctgcccccttcagccagcgctgcctggaggccgtgtccctggaggacaccatctacgtgatgggcggcctgatgagcaagatcttcacctatgaccccggcacagatgtgtggggcgaggccgctgtgctgcccagccctgtggagagctgtggggtgacagtgtgtgatggcaaggtgcacatcctgggcggcagagatgacagaggagagagcacagacaaggtgttcacctttgaccccagcagcggccaggtggaggtgcagcccagcctgcagcgctgcaccagcagccacggctgtgtgaccatcatccagagcctgggccgctag

SEQ ID NO: 31952 - DNA, 1500 bp, Artificial Sequence
  derived and/or modified sequence
gagggccgcctgcgcgccgccaacagcctagcgctgcgccgcgtggccgccgccttctcgctggccccgctggccgagcgctgcggccgcgtcctgcgtcaggccttcgccgaggtggcgcgccacgccgacttcctggagctggcgcctgacgaggtggtggcgctgctggcggaccccgcgctgggcgtggcgcgcgaggaggccgtgtttgaagcggccatgcgctgggtgcgccacgacgcgccggcccgccgcggccagctgcgacgcctgctggagcacgtgcgcctgccgctactggcgcccgcttacttcctggagaaggtggaggcggacgagctgctgcaggcctgcggcgagtgccgcccgctgctgctcgaggctcgcgcctgcttcatcctgggccgcgaggccggtgcgctgcggacccggccgcggagattcatggacctagctgaagtgatcgtggtcatcggcggttgcgaccgcaaaggtctcctgaagctgcccttcgccgatgcctaccatccagagagccagcggtggaccccactgcccagcctgcccggctacactcgctcagaattcgccgcctgtgctctccgcaatgacgtctacgtctccggaggccacatcaacagtcatgatgtgtggatgtttagctcccatctgcacacctggatcaaggtagcctctctgcacaagggcaggtggaggcacaagatggcagttgtgcaggggcagctgttcgcggtgggtggcttcgacggcctgaggcgcctgcacagcgtggagcgctacgaccccttctccaacacctgggcggccgccgcgcccctcccggaggccgtgagctcggcggcggtggcgtcctgcgcgggcaagctcttcgtgattgggggcgccaggcagggcggcgtcaacacggacaaggtgcagtgctttgaccccaaggaggaccggtggagcctgcggtcaccagcacccttctcacagcggtgtctcgaggctgtctcccttgaggacaccatctatgtcatggggggtctcatgagcaaaatcttcacctatgatccaggcacagatgtgtggggggaggcagctgtcctccccagccctgtggaaagctgtggagtcactgtgtgtgacgggaaggtccacatccttggcgggcgggatgatcgcggagaaagcaccgataaggtcttcacctttgaccccagcagtgggcaggtggaggtccagccatccctgcagcgctgcaccagctcccacggctgtgtcaccatcatccagagcttgggcaggtgattcagatttggacagcctgagccaggaggcggagaggcaggcggagctcagatgcacactctgctccctcatggcacctccacgcaaacagcccttaacttaatggtcccttttcttgtataaataaaatcttgttgggtctgtgttccagctgcagtctgccctgcctggagatggaatgtctaa

SEQ ID NO: 31953 - DNA, 1936 bp, Artificial Sequence
  derived and/or modified sequence
atgcggcaaggccatgcgccggaggagtcggagccgggctgcgaagcgccgtgcgcgggtccgtgccacgcgcagcgcgtgctgcaggccctgaacgcctaccggcggagcggcaccctcaccgacgtggtgctgcgcgccggcgggcgcgactttccgtgccaccgcgcggcgctcagcgcgggcagcgcctacttccgcagcttgttcgcggccgggcggcccgagcgcggcccggccgtggtgccagtggtgccagtagctcccgaggcgccaggcacgagcccggccggggcggcggcggcgctggccgtggtgctcgactacgtgtacggagcgggcgtgcggctgcgcgcggaggacgaggcggcggccgtgctggcgctggcggagcggctgggcgtggcgggcctgcgcgaggcctgcgtgcgctttctcgagggccgcctgcgcgccgccaacagcctagcgctgcgccgcgtggccgccgccttctcgctggccccgctggccgagcgctgcggccgcgtcctgcgtcaggccttcgccgaggtggcgcgccacgccgacttcctggagctggcgcctgacgaggtggtggcgctgctggcggaccccgcgctgggcgtggcgcgcgaggaggccgtgtttgaagcggccatgcgctgggtgcgccacgacgcgccggcccgccgcggccagctgcgacgcctgctggagcacgtgcgcctgccgctactggcgcccgcttacttcctggagaaggtggaggcggacgagctgctgcaggcctgcggcgagtgccgcccgctgctgctcgaggctcgcgcctgcttcatcctgggccgcgaggccggtgcgctgcggacccggccgcggagattcatggacctagctgaagtgatcgtggtcatcggcggttgcgaccgcaaaggtctcctgaagctgcccttcgccgatgcctaccatccagagagccagcggtggaccccactgcccagcctgcccggctacactcgctcagaattcgccgcctgtgctctccgcaatgacgtctacgtctccggaggccacatcaacagtcatgatgtgtggatgtttagctcccatctgcacacctggatcaaggtagcctctctgcacaagggcaggtggaggcacaagatggcagttgtgcaggggcagctgttcgcggtgggtggcttcgacggcctgaggcgcctgcacagcgtggagcgctacgaccccttctccaacacctgggcggccgccgcgcccctcccggaggccgtgagctcggcggcggtggcgtcctgcgcgggcaagctcttcgtgattgggggcgccaggcagggcggcgtcaacacggacaaggtgcagtgctttgaccccaaggaggaccggtggagcctgcggtcaccagcacccttctcacagcggtgtctcgaggctgtctcccttgaggacaccatctatgtcatggggggtctcatgagcaaaatcttcacctatgatccaggcacagatgtgtggggggaggcagctgtcctccccagccctgtggaaagctgtggagtcactgtgtgtgacgggaaggtccacatccttggcgggcgggatgatcgcggagaaagcaccgataaggtcttcacctttgaccccagcagtgggcaggtggaggtccagccatccctgcagcgctgcaccagctcccacggctgtgtcaccatcatccagagcttgggcaggtgattcagatttggacagcctgagccaggaggcggagaggcaggcggagctcagatgcacactctgctccctcatggcacctccacgcaaacagcccttaacttaatggtcccttttcttgtataaataaaatcttgttgggtctgtgttccagctgcagtctgccctgcctggagatggaatgtct

SEQ ID NO: 31954 - DNA, 1092 bp, Artificial Sequence
  derived and/or modified sequence
atgcggtgggtgcggcacgacgcccccgcccggcggggccagctgcggagattacttgagcacgtgcgacttccgttgctggctcctgcctattttcttgagaaagtggaggccgacgagcttctgcaggcctgcggtgagtgcaggccattgctgctcgaggctcgagcctgctttatcctgggaagagaagccggcgccctccgcacccgaccccggcggtttatggatctagccgaggttatagtcgtgatagggggatgtgaccgtaagggactgttgaagcttcccttcgccgacgcctaccaccccgagtctcaacggtggactcctctacctagcctgccagggtacacaaggtccgagttcgcggcatgcgctttgaggaatgacgtgtacgtctcaggcggacatataaacagtcatgatgtgtggatgttctcatcacatctgcacacatggattaaggtcgcatcactccacaagggcaggtggcggcacaaaatggctgtagtccagggccaactgtttgctgtgggaggctttgacggactcaggcgactccactccgtggagcgctacgatccattttccaatacttgggctgccgccgcgccgttgcctgaggctgtgtcttctgctgccgtggccagttgcgcaggtaaactctttgttattggaggagcccgtcagggaggagtgaataccgacaaagttcagtgctttgatcccaaggaagacaggtggtccctgaggtctccagccccattctcacaaaggtgtctggaggcagtaagtctcgaggataccatctatgtcatgggaggactcatgtctaagatattcacttatgacccaggcaccgatgtctggggcgaggccgccgtcctccctagtccagttgagtcctgcggagtgaccgtgtgcgatgggaaggtgcacatcctgggcggcagagatgatcggggcgaaagtacagataaggtattcactttcgacccatcctctggccaggtcgaggtgcagccctctctgcagcgatgtacttcgtctcatggatgtgttacaatcatccagagcttaggtcggtag

SEQ ID NO: 31955 - DNA, 1752 bp, Artificial Sequence
  derived and/or modified sequence
atgcggcagggccacgcccccgaggagagcgagcccggctgcgaggctccatgtgccggaccttgtcacgcccaaagagttctgcaggcgcttaatgcgtaccgcaggtctggcacacttaccgatgtcgtgctccgagccggcggtagagactttccttgtcacagagccgctcttagtgcagggagcgcttattttcggtcactgtttgctgcaggacgacctgagcggggcccagccgttgtgcccgttgtgcccgtggcccctgaagcgccaggcacttccccggctggagccgcagccgcccttgccgttgtgttagattatgtttatggcgccggagtccggctccgcgcagaagacgaggccgctgccgttcttgccctggcggagaggctgggggtggcaggtttgcgcgaagcctgcgtaagatttctggaaggacgcttgcgcgctgccaattccttggcgctgcgccgtgtcgcagcggcattttctctggccccactggcagaaagatgcgggcgagtcctgagacaggcgttcgctgaggtggcccggcacgctgactttctcgagttggcccctgacgaagttgtggccctgttggctgatcccgcactgggcgtggcgcgggaggaggctgtgtttgaggctgcaatgcgctgggtacggcacgatgctcctgcaaggcgcggacagctcagacgacttttagagcatgtacgcctgcctttgttagcgcctgcttacttcctggagaaggtggaggcagacgagttgctccaagcctgcggggaatgccggccgttgcttctggaagcccgggcatgtttcatccttggacgggaagccggagcattgagaactaggccacgtcggtttatggatctggcagaagtgattgtagtgataggcgggtgcgatcgtaagggtttattgaagttgccatttgctgatgcttaccatcccgaatcccagcgctggacgcctttgccctctttgcccggctatactagatccgaatttgccgcatgcgccctccggaatgatgtttacgtttcaggcggtcatatcaacagtcacgacgtatggatgtttagcagccacctgcacacctggatcaaagtggcctcattgcacaaaggcagatggcggcataagatggccgttgttcaggggcaactgtttgctgtcggaggatttgacggcttacggcggctacatagcgtggagcgttatgatcctttctccaatacctgggcagctgcagctcccctcccagaagcagtgtcaagcgctgcggtggctagttgcgccggtaagctgtttgtgatcggaggtgccaggcaaggaggagtgaacactgacaaggtccagtgtttcgaccccaaggaggaccgatggagcctaaggtcacctgcacccttctctcagcggtgtctcgaagctgtgagcctggaggacactatctacgtcatgggcggtttgatgtctaaaatcttcacctacgacccaggcacagatgtctggggtgaggccgccgtactgcccagtccagtcgagagctgtggagttaccgtctgtgatgggaaagtgcacatcctaggaggtagagatgataggggtgaatctacagacaaggtatttaccttcgatccctccagcggtcaggtggaagtgcaaccttctctgcagcggtgcaccagttcacatggttgcgtgaccattattcaaagcctaggacgatag

SEQ ID NO: 31956 - DNA, 1092 bp, Artificial Sequence
  derived and/or modified sequence
atgcgatgggtccggcacgacgcaccggctagacgaggacagctgagacgactgttggagcacgttcgcttgcccctgctcgcgcctgcatactttcttgaaaaggtggaagccgacgagctgttacaggcttgtggcgagtgtagacccctgctgcttgaggcacgagcttgttttatcctgggacgcgaggccggagccttgcggactcgtcctaggcgattcatggatttggccgaagtgattgttgtcatcggaggttgtgataggaaggggctactgaagctgcccttcgctgacgcttaccatcccgaaagccagagatggactcccctgcccagcctgccaggatatactagaagtgagttcgcagcgtgtgctctcaggaatgacgtctacgtctctggcggacacatcaatagccacgatgtgtggatgtttagctcacacttacacacctggataaaggtggctagcctccataaaggtaggtggaggcataagatggccgttgtgcagggacaactcttcgcggttggaggattcgatggtttaagaagactgcatagcgtggaaaggtacgatcccttctccaacacctgggctgccgctgcccctcttcccgaggcagttagttccgctgcagtggctagttgtgcaggcaagctgtttgtcatcgggggtgccagacagggaggtgtgaacaccgataaggttcaatgcttcgatcctaaggaagacaggtggtcactcagatcccccgctccattctctcaaaggtgtctcgaggccgtgtccctggaggatactatatatgtgatggggggactgatgagcaaaattttcacatatgatccaggtacagacgtttggggggaagccgcagtgctcccttcacctgtggaatcttgtggcgttacagtgtgtgacgggaaggtgcacatcctgggcggacgcgatgaccggggtgagtcaactgacaaggtgttcacattcgatcccagctcaggacaggtagaagtccaaccatccttgcagcgctgcacctccagccacgggtgtgtcacgatcattcaatccctgggtcgatag

SEQ ID NO: 31957 - DNA, 1752 bp, Artificial Sequence
  derived and/or modified sequence
atgcgccagggccatgcacccgaggagtccgaacctggatgcgaggcaccctgcgctggcccttgccatgcacagcgtgtgctgcaggccctgaatgcttaccgcaggagcggcactctgacagacgtggtgctgagggctgggggtagggattttccctgtcaccgagcagctttgtcggcaggcagcgcctatttccgctctctgttcgccgcagggagaccagaaaggggccctgcagtggtcccagtggtgcccgttgcacccgaggctccagggacaagcccagcaggtgctgcggcagcattggctgtggttctggattatgtgtatggtgctggggtcagactgcgcgctgaggatgaggccgctgctgtgctggccttagcagagaggctcggtgtggccggacttcgcgaagcctgtgtgcggtttctcgagggcaggctgcgcgctgctaattctctggctctgcgccgagtggctgcagcatttagtttagcacctcttgcagagaggtgcggacgtgttcttaggcaggcctttgcagaggtagccaggcatgcggatttcctcgaactggcacccgatgaggtagtggcgctgctggcggaccctgccctcggtgtcgcaagagaggaggcagtctttgaagctgccatgcgctgggttaggcacgatgcacctgctcgtaggggacagctccggaggttgttagagcacgtgcggctccctctccttgcccctgcctattttctggagaaagtcgaggctgacgagctcctgcaagcatgcggggaatgcagacctcttctcctcgaggcacgcgcatgctttatccttgggagggaagcgggagccctgcgcacgcgtccccgtaggttcatggacctggcggaggtgatcgtcgtgatcggagggtgtgaccgaaagggactgcttaaactgccctttgcagacgcgtatcacccagaatcccagaggtggacacccctcccctctctccctgggtatactcggagcgaatttgcggcttgcgcgttgaggaatgatgtttacgtatctggcggtcatattaacagtcacgacgtttggatgttctcttctcacctccacacatggatcaaggtggcatccttacacaaaggtcggtggcgacataagatggcagttgtacaaggccagctcttcgccgtgggcggatttgacggtctgcggcgactacactccgtagagcggtacgacccctttagcaacacctgggcggctgccgctcctctacctgaggcagtaagcagcgcagccgtcgcgtcatgcgctggcaagctgttcgttatcgggggagcgcgacagggtggtgtgaatacagataaagtacagtgtttcgaccccaaggaagaccgatggtctttgcgcagccccgctcccttcagccagcgctgtctcgaagctgtcagccttgaggacaccatatatgtaatgggaggattaatgagtaagatctttacctatgatccaggcactgatgtgtggggcgaggctgccgttctcccatctcccgtggagtcttgtggagtgacagtgtgcgatggtaaggtgcatattctgggcggtcgcgacgacagaggtgagtccaccgataaagtgtttaccttcgatccaagcagcggccaggtggaggttcagccatctctccagcgctgcacatcttctcacgggtgtgtgacaatcatccagtccctagggcgatag

SEQ ID NO: 31958 - protein, 277 aa, Artificial Sequence
  derived and/or modified sequence
MASYYEILDVPRSASADDIKKAYRRKALQWHPDKNPDNKEFAEKKFKEVAEAYEVLSDKHKREIYDRYGREGLTGTGTGPSRAEAGSGGPGFTFTFRSPEEVFREFFGSGDPFAELFDDLGPFSELQNRGSRHSGPFFTFSSSFPGHSDFSSSSFSFSPGAGAFRSVSTSTTFVQGRRITTRRIMENGQERVEVEEDGQLKSVTINGVPDDLALGLELSRREQQPSVTSRSGGTQVQQTPASCPLDSDLSEDEDLQLAMAYSLSEMEAAGKKPADVF

SEQ ID NO: 31959 - DNA, 834 bp, Artificial Sequence
  derived and/or modified sequence
atggcttcgtactacgagattctggacgtgccgcggtccgcctccgctgacgacattaaaaaggcgtacagaagaaaggcgctgcagtggcacccggataaaaaccccgacaataaggagtttgctgaaaagaagttcaaagaggtggcggaggcatatgaagtcctgagcgataagcataagcgtgaaatttatgatcgctacggccgggagggtcttaccggaaccggtacaggaccctcccgagcggaagccggctcaggcggacctggtttcaccttcactttccggtcacccgaagaagtatttcgcgagttttttggatccggcgacccttttgccgagctgtttgatgatctggggccctttagcgaattgcagaaccgcgggtctcgccacagcggtccctttttcacattttcatcatctttcccaggacacagcgatttcagtagcagcagttttagctttagtcccggggccggcgcttttcgtagcgtcagcacgtccaccacttttgtccagggaagaagaattacaactcgacgcatcatggaaaatggacaagagagagtggaggtggaagaggacggacaactgaaaagtgtcacaataaacggcgtgcctgacgacttggctctgggattggaactctcccgacgcgagcagcaaccctctgtgacctccagatccggggggacacaggttcaacaaaccccagcctcatgccctctcgatagcgacttgtctgaggacgaggacctccaactggcaatggcttatagcctgtcagagatggaggccgccgggaagaagcccgcagacgtcttctag

SEQ ID NO: 31960 - DNA, 687 bp, Artificial Sequence
  derived and/or modified sequence
atggcctcatactacgaaattctggacgttccccggagcgcttctgctgacgatattaagaaggcatataggcgcaaggcgctgcagtggcaccctgacaagaatccagacaacaaagagttcgccgagaagaaatttaaagaggtcgctgaagcatacgaggtactttccgataagcacaaaagagaaatctacgacaggtacggtcgggaaggcctcacaggtacaggcacaggacctagcagagccgaagccggctctggaggccctgggtttacgtttacattccggtcaccagaagaggtatttcgtgaatttttcggcagcggtgaccccttcgccgaattattcgacgatctgggcccctttagcgaactgcagaatcgaggctctagacatagtggcccctttttcacattctcatcttccttccccggtcacagcgatttttcaagctcaagcttttctttttcgcctggagccggagctttccgctcagtgtcaactagtactaccttcgtccaaggccggcgaataaccacacgccgaatcatggaaaatggtcaggaacgggtggaggtagaggaagatggacagctcaaatctgtgacgatcaatggtgtgccagatgatcttgcccttgggctggaactgtctcgacgcgagcagcagccaagcgtcacatag

SEQ ID NO: 31961 - DNA, 447 bp, Artificial Sequence
  derived and/or modified sequence
atggcatcttattatgagattcttgacgtccccagatccgccagcgcggacgatattaaaaaggcttaccggcgcaaggcccttcagtggcatcctgacaagaatccggacaacaaggagtttgcggagaagaaattcaaggaagtggccgaagcctacgaggttctgtccgacaaacacaaaagggagatttacgacagatacggccgggaggggctaactggcacgggcactggacctagccgcgccgaggcaggttccggtggcccggggtttacctttacattcaggagccccgaagaggtattccgtgaattctttggtagcggcgacccatttgcagagctcttcgacgatctgggtcccttctctgagttacaaaacagggggagccgacactcagggccttttttcacatttagcagttcatttccaggccatagttag

SEQ ID NO: 31962 - DNA, 369 bp, Artificial Sequence
  derived and/or modified sequence
atggcgagctattatgagatcctggatgtgcccaggtccgcatctgctgacgacataaagaaggcctacagaagaaaagcactgcagtggcatcccgacaaaaatccagacaataaggaatttgcggagaaaaagtttaaagaagtagctgaggcctatgaagtgctttctgacaaacacaaaagggaaatttacgaccggtacggtcgcgagggacttactggtacgggaaccgggcctagcagggcggaggccggctcaggcggaccaggattcacctttaccttcagatcgcccgaagaggtttttcgcgagtttttcggcagcggcgacccattcgcagaactctttgacgatctggggccatag

SEQ ID NO: 31963 - DNA, 834 bp, Artificial Sequence
  derived and/or modified sequence
atggccagctactatgagatcctggatgtgcccaggtctgccagcgcagatgacatcaagaaggcctacagaaggaaggccctgcagtggcacccagacaagaacccagacaacaaggagtttgctgagaagaagttcaaggaggtggccgaggcctatgaggtgctgagtgacaagcacaagcgggagatctatgacagatatggccgggagggcctgaccggcaccggcaccggccccagcagagctgaggccggcagcggcggccctggcttcaccttcaccttccgcagccctgaggaggtgttccgggagttctttggaagtggggacccctttgctgagctgtttgatgacctgggccccttcagcgagctgcagaacagaggcagccgccacagcggccccttcttcaccttcagcagcagcttccctggccacagcgacttcagcagcagcagcttctccttcagccctggagctggggccttccgctctgtgtccaccagcaccacctttgtgcagggccgccgcatcaccacccggcgcatcatggagaatggccaggagcgggtggaggtggaggaggatggccagctgaagtctgtgaccatcaacggggtgcctgatgacctggccctgggcctggagctgagccggcgggagcagcagcccagcgtgaccagccgcagcggcggcacccaggtgcagcagaccccagccagctgccccctggacagcgacctgtctgaagatgaggacctgcagctggccatggcctacagcctgtctgagatggaggccgccggcaagaagccagcagatgtgttctag

SEQ ID NO: 31964 - DNA, 687 bp, Artificial Sequence
  derived and/or modified sequence
atggccagctactatgagatcctggatgtgcccaggtctgccagcgcagatgacatcaagaaggcctacagaaggaaggccctgcagtggcacccagacaagaacccagacaacaaggagtttgctgagaagaagttcaaggaggtggccgaggcctatgaggtgctgagtgacaagcacaagcgggagatctatgacagatatggccgggagggcctgaccggcaccggcaccggccccagcagagctgaggccggcagcggcggccctggcttcaccttcaccttccgcagccctgaggaggtgttccgggagttctttggaagtggggacccctttgctgagctgtttgatgacctgggccccttcagcgagctgcagaacagaggcagccgccacagcggccccttcttcaccttcagcagcagcttccctggccacagcgacttcagcagcagcagcttctccttcagccctggagctggggccttccgctctgtgtccaccagcaccacctttgtgcagggccgccgcatcaccacccggcgcatcatggagaatggccaggagcgggtggaggtggaggaggatggccagctgaagtctgtgaccatcaacggggtgcctgatgacctggccctgggcctggagctgagccggcgggagcagcagcccagcgtgacctag

SEQ ID NO: 31965 - DNA, 447 bp, Artificial Sequence
  derived and/or modified sequence
atggccagctactatgagatcctggatgtgcccaggtctgccagcgcagatgacatcaagaaggcctacagaaggaaggccctgcagtggcacccagacaagaacccagacaacaaggagtttgctgagaagaagttcaaggaggtggccgaggcctatgaggtgctgagtgacaagcacaagcgggagatctatgacagatatggccgggagggcctgaccggcaccggcaccggccccagcagagctgaggccggcagcggcggccctggcttcaccttcaccttccgcagccctgaggaggtgttccgggagttctttggaagtggggacccctttgctgagctgtttgatgacctgggccccttcagcgagctgcagaacagaggcagccgccacagcggccccttcttcaccttcagcagcagcttccctggccacagctag

SEQ ID NO: 31966 - DNA, 369 bp, Artificial Sequence
  derived and/or modified sequence
atggccagctactatgagatcctggatgtgcccaggtctgccagcgcagatgacatcaagaaggcctacagaaggaaggccctgcagtggcacccagacaagaacccagacaacaaggagtttgctgagaagaagttcaaggaggtggccgaggcctatgaggtgctgagtgacaagcacaagcgggagatctatgacagatatggccgggagggcctgaccggcaccggcaccggccccagcagagctgaggccggcagcggcggccctggcttcaccttcaccttccgcagccctgaggaggtgttccgggagttctttggaagtggggacccctttgctgagctgtttgatgacctgggcccctag

SEQ ID NO: 31967 - DNA, 834 bp, Artificial Sequence
  derived and/or modified sequence
atggccagctactacgagatcctggacgtgccccggagcgccagcgctgacgacatcaagaaggcttaccggcggaaggcactgcagtggcatcccgataaaaatccggataataaagagttcgccgagaaaaaattcaaggaggttgccgaagcctacgaggtgctgtcagataagcataagagggagatttatgaccggtatgggcgcgagggtctgacagggaccggaactgggccttcccgggctgaagccgggtcaggaggccccggcttcactttcacattccgctcccctgaagaggtgttcagggaatttttcggttcaggggatccgtttgccgagttgttcgatgatctgggacccttttctgaactccagaaccgaggaagccgccactccgggcccttctttacttttagcagctcttttcctggacatagcgactttagcagtagtagcttctctttctctcccggggccggcgcatttcgtagcgttagcacttcaacgacctttgtgcagggccggaggatcacaacccgccggatcatggagaacggccaggagagggtcgaggtcgaagaggatgggcaattgaagtctgtcacaatcaacggggtgcctgatgacttagccctggggctggagctttccagacgggagcagcagccctctgtcactagccgctccggtggcacgcaggtgcagcagacgccagcctcctgcccgctggatagcgacctttccgaggacgaagatctgcagctcgccatggcctacagtttgtccgaaatggaggccgccggaaagaaaccagcggacgttttctag

SEQ ID NO: 31968 - DNA, 687 bp, Artificial Sequence
  derived and/or modified sequence
atggccagctactacgagatcctggacgtgccccggagcgccagcgccgacgatatcaaaaaagcgtaccggagaaaagcgctacaatggcaccccgacaaaaacccagacaataaggagttcgctgaaaagaagttcaaggaagtcgctgaagcatacgaagttctttctgataagcacaaacgagagatttacgaccggtacggccgagaggggctgactggcacgggcactggaccctccagggcagaagcagggagtggaggacctggtttcacattcacatttagatcaccggaggaggttttccgcgagttttttggatccggagacccttttgccgaattattcgacgacctgggacccttctctgagctgcagaatagaggcagtcgtcactccggacctttcttcactttctcaagtagcttccccgggcacagcgacttttcaagtagttccttttcattctcgccgggagcgggcgcattccgtagcgtctctacctccactacgtttgttcagggccggagaattactacccgccgcatcatggagaacggacaggaacgggtcgaggtcgaggaagacggccagcttaaatccgtcaccattaatggcgtgcctgacgatctggcgctgggcttagaactgagccgacgagaacaacagccatcagtaacctag

SEQ ID NO: 31969 - DNA, 447 bp, Artificial Sequence
  derived and/or modified sequence
atggccagctactacgagatcctggacgtgccccggagcgccagcgccgacgacattaaaaaagcctaccgccgaaaggcactgcaatggcaccccgataaaaatccagataataaagaattcgctgagaagaagttcaaggaggtggctgaagcctacgaggtcctgagcgacaaacataaacgggagatctacgacaggtacggaagagagggactcacaggaactgggacaggccctagtcgtgccgaagccggttcaggcggtcccggctttaccttcacgttccggtcccctgaagaggttttcagagagtttttcgggtctggggatccattcgccgagttgttcgatgatttgggaccattttctgaactgcaaaaccggggatcgcgccactctggtcccttttttaccttcagctcatcatttcccggccactcttag

SEQ ID NO: 31970 - DNA, 369 bp, Artificial Sequence
  derived and/or modified sequence
atggccagctactacgagatcctggacgtgccccggagcgccagcgctgatgacatcaaaaaggcctatcggcgtaaagcgttgcagtggcaccccgataaaaaccccgacaataaagagtttgccgagaagaaatttaaggaagtggccgaagcgtacgaggttctgagcgacaagcacaaaagagagatatatgaccggtacgggagggaggggttgaccggcacggggacaggcccgtcccgtgccgaagcgggtagcggtgggcccggcttcacattcacctttcgatcaccagaagaggtgtttcgggaattttttgggtccggagatcccttcgccgaattattcgacgacctaggcccttag

SEQ ID NO: 31971 - DNA, 834 bp, Artificial Sequence
  derived and/or modified sequence
atggcctcatattatgagatactggacgttcctaggtcagcttctgctgatgatattaagaaggcctaccgccgaaaggccctccagtggcatcctgacaagaaccctgacaacaaagaatttgccgagaagaaattcaaggaggtagccgaggcctatgaagtgttatccgacaagcataaacgggagatctatgacaggtacggacgcgaaggactcaccggcaccggtacgggtccgagccgcgcagaggctgggtcaggcggaccgggattcacatttactttccgtagccccgaggaagtgttcagagagttttttgggagtggagatccctttgctgagctctttgacgatcttggacctttctcagagttgcagaacaggggctctcgtcattcaggcccattctttacttttagctcatctttccctggccattctgattttagcagttccagcttttccttttcacccggtgccggagctttcaggtccgtcagtacgtcgacgacattcgtgcaagggaggaggatcaccactcgccgtattatggagaatggtcaagaaagagtggaggtggaggaggatggtcagctgaagtctgtgaccatcaacggggtgcccgatgatttggcgctcggactggagctttctaggagagagcaacagcctagcgtcacctcccgcagcggtggcactcaggtgcagcaaactcccgcaagttgtcccctggattctgatctcagtgaggacgaggacttgcagttggccatggcatactcactgagcgaaatggaagcagccggtaaaaaaccagctgacgtgttctag

SEQ ID NO: 31972 - DNA, 687 bp, Artificial Sequence
  derived and/or modified sequence
atggctagttattacgaaatcctggatgtccccaggtccgctagcgcagatgatattaagaaagcctaccgcaggaaggctttgcagtggcacccagacaaaaacccagacaacaaggaattcgccgaaaaaaagttcaaggaagtcgctgaggcgtacgaggtactgagtgacaaacataagcgggagatctacgacagatacggcagagagggccttacaggtacaggtactgggccttcacgggctgaggcagggtcgggtgggcctggctttaccttcacctttcgcagccctgaggaagtgttccgcgagttcttcgggagcggagacccttttgccgagttgtttgatgacttaggaccattcagcgagctgcagaaccgtggatcccgtcattcgggtcccttttttacctttagttcgagcttcccaggccactctgacttttcctccagttcattttcttttagccccggtgccggagcctttcggtccgtgtccacttctaccacatttgtgcaggggaggaggatcaccacacggaggatcatggagaacgggcaggaacgggtggaggtcgaagaagacggacaactgaaatccgtaacgataaacggagtgccagacgacttggctctaggcctggaactgagcaggcgagaacaacagccaagtgtgacctag

SEQ ID NO: 31973 - DNA, 447 bp, Artificial Sequence
  derived and/or modified sequence
atggcttcatattatgaaatcctagacgtgccacgtagtgcttctgcagatgacataaaaaaagcctatagaagaaaagcactccagtggcatcctgataaaaatccagacaacaaagagttcgccgagaaaaaattcaaggaggtggctgaggcatacgaggtcctgtctgataagcataagagagagatctatgacaggtacggacgcgaaggcttgaccggaactggaaccggcccatcgcgggcagaggctggctctgggggacctgggtttacctttacatttcgctcccccgaggaagtcttcagagagttcttcggaagcggcgatccgttcgcagaactattcgatgatctggggccatttagtgagctgcagaaccgaggttctcgacactctggccctttctttactttttcctcttcgttcccaggccactcgtag

SEQ ID NO: 31974 - DNA, 369 bp, Artificial Sequence
  derived and/or modified sequence
atggcctcctactacgaaattttggatgtgcccagatctgccagtgcggatgatatcaagaaagcgtacagacgaaaggcactgcagtggcaccccgataaaaaccccgataacaaagagttcgccgaaaaaaaatttaaagaagtggcggaagcttatgaagtcctctcagacaagcacaaacgcgaaatctatgatcgatacgggcgtgagggccttactgggacagggaccgggcctagtagagcggaggcagggtctgggggtccaggctttaccttcacattccgctcacccgaagaggtcttccgggaattctttggatctggggatccatttgccgaactgttcgacgacctgggaccgtag

SEQ ID NO: 31975 - DNA, 834 bp, Artificial Sequence
  derived and/or modified sequence
atggccagctactacgagatcctggacgtgcccagaagcgccagcgccgacgacatcaagaaggcctacagaagaaaggccctgcagtggcaccccgacaagaaccccgacaacaaggagttcgccgagaagaagttcaaggaggtggccgaggcctacgaggtgctgagcgacaagcacaagagagagatctacgacagatacggcagagagggcctgaccggcaccggcaccggccccagcagagccgaggccggcagcggcggccccggcttcaccttcaccttcagaagccccgaggaggtgttcagagagttcttcggcagcggcgaccccttcgccgagctgttcgacgacctgggccccttcagcgagctgcagaacagaggcagcagacacagcggccccttcttcaccttcagcagcagcttccccggccacagcgacttcagcagcagcagcttcagcttcagccccggcgccggcgccttcagaagcgtgagcaccagcaccaccttcgtgcagggcagaagaatcaccaccagaagaatcatggagaacggccaggagagagtggaggtggaggaggacggccagctgaagagcgtgaccatcaacggcgtgcccgacgacctggccctgggcctggagctgagcagaagagagcagcagcccagcgtgaccagcagaagcggcggcacccaggtgcagcagacccccgccagctgccccctggacagcgacctgagcgaggacgaggacctgcagctggccatggcctacagcctgagcgagatggaggccgccggcaagaagcccgccgacgtgttctag

SEQ ID NO: 31976 - DNA, 687 bp, Artificial Sequence
  derived and/or modified sequence
atggccagctactacgagatcctggacgtgcccagaagcgccagcgccgacgacatcaagaaggcctacagaagaaaggccctgcagtggcaccccgacaagaaccccgacaacaaggagttcgccgagaagaagttcaaggaggtggccgaggcctacgaggtgctgagcgacaagcacaagagagagatctacgacagatacggcagagagggcctgaccggcaccggcaccggccccagcagagccgaggccggcagcggcggccccggcttcaccttcaccttcagaagccccgaggaggtgttcagagagttcttcggcagcggcgaccccttcgccgagctgttcgacgacctgggccccttcagcgagctgcagaacagaggcagcagacacagcggccccttcttcaccttcagcagcagcttccccggccacagcgacttcagcagcagcagcttcagcttcagccccggcgccggcgccttcagaagcgtgagcaccagcaccaccttcgtgcagggcagaagaatcaccaccagaagaatcatggagaacggccaggagagagtggaggtggaggaggacggccagctgaagagcgtgaccatcaacggcgtgcccgacgacctggccctgggcctggagctgagcagaagagagcagcagcccagcgtgacctag

SEQ ID NO: 31977 - DNA, 447 bp, Artificial Sequence
  derived and/or modified sequence
atggccagctactacgagatcctggacgtgcccagaagcgccagcgccgacgacatcaagaaggcctacagaagaaaggccctgcagtggcaccccgacaagaaccccgacaacaaggagttcgccgagaagaagttcaaggaggtggccgaggcctacgaggtgctgagcgacaagcacaagagagagatctacgacagatacggcagagagggcctgaccggcaccggcaccggccccagcagagccgaggccggcagcggcggccccggcttcaccttcaccttcagaagccccgaggaggtgttcagagagttcttcggcagcggcgaccccttcgccgagctgttcgacgacctgggccccttcagcgagctgcagaacagaggcagcagacacagcggccccttcttcaccttcagcagcagcttccccggccacagctag

SEQ ID NO: 31978 - DNA, 369 bp, Artificial Sequence
  derived and/or modified sequence
atggccagctactacgagatcctggacgtgcccagaagcgccagcgccgacgacatcaagaaggcctacagaagaaaggccctgcagtggcaccccgacaagaaccccgacaacaaggagttcgccgagaagaagttcaaggaggtggccgaggcctacgaggtgctgagcgacaagcacaagagagagatctacgacagatacggcagagagggcctgaccggcaccggcaccggccccagcagagccgaggccggcagcggcggccccggcttcaccttcaccttcagaagccccgaggaggtgttcagagagttcttcggcagcggcgaccccttcgccgagctgttcgacgacctgggcccctag

SEQ ID NO: 31979 - DNA, 1946 bp, Artificial Sequence
  derived and/or modified sequence
agccggccttctccccgtctctagtagtttccgcaccgctgacgcatgcctgcgcgcacagctgggccgggcgcgtcctacgcagcagccgcgagccgggctgcgggtgccagacggttcccggcggggggcaggggcggggcgccgcaggaggccgggactcctggcggaggagccccaaggaggcccgcctgacgactgaccagttgccatggcatcctactacgagatcctagacgtgccgcgaagtgcgtccgctgatgacatcaagaaggcgtatcggcgcaaggctctccagtggcacccagacaaaaacccagataataaagagtttgctgagaagaaatttaaggaggtggccgaggcatatgaagtgctgtctgacaagcacaagcgggagatttacgaccgctatggccgggaagggctgacagggacaggaactggcccatctcgggcagaagctggcagtggtgggcctggcttcaccttcaccttccgcagccccgaggaggtcttccgggaattctttgggagtggagacccttttgcagagctctttgatgacctgggccccttctcagagcttcagaaccggggttcccgacactcaggccccttctttaccttctcttcctccttccctgggcactccgatttctcctcctcatctttctccttcagtcctggggctggtgcttttcgctctgtttctacatctaccacctttgtccaaggacgccgcatcaccacacgcagaatcatggagaacgggcaggagcgggtggaagtggaggaggatgggcagctgaagtcagtcacaatcaatggtgtcccagatgacctggcactgggcttggagctgagccgtcgcgagcagcagccgtcagtcacttccaggtctgggggcactcaggtccagcagacccctgcctcatgccccttggacagcgacctctctgaggatgaggacctgcagctggccatggcctacagcctgtcagagatggaggcagctgggaagaaacccgcagatgtgttctgagctggatgccgggttccagaatcgctgcacagttccaacaggacagcgccttcccccatgcgctgggaggggaccctccatttctccccctcacccatgctgagtgtagagccggggcctgggtggcgggtgggggccgggtgggaggtggcagtagtcttagcctgtgcactctcttccttgggtgtttggtgctggctcctggggactacaaatcccagagtgcggtgtgcccggcctcatttctgatagatcccgcttgggggaggtggtgtatggttacggagctgtgcatcttgggacatgtagtagcccaggtcggcttgtcactcgctgtgagatggggagattttgtcttttgatttatccctgtagggctggcagggttgtagatgaagggggaatgatctgagccttggttcccctgacacgtcttgctagccccagggttagagtgggcagggcagagccgcgcagcacctgggagcggtacctttcccttgggcagcctggggtcccaggaacaagccagggcgagtggcatgtctgcctgagcagggtgtggccccagaaagctgaggagtgtgggctggcagagagcttcgagggcaaggccacccgcgggggcgtgtgtgtggtggggcttggcatgtgatggcagctccaggcatgccgctgcttgtatggctttctttggcctctgaccctgctgcccattctttccaacatcacagatgaactgcctctcctcctccctgcctggggagcccagtggccagggaggggagtggtggagccagtcgctgtaacactgagcctcagagacgaaccaaaaccagctgggctgagctcagatccagggggaaatgctggaagtcaataaaactgagttttgagagct

SEQ ID NO: 31980 - DNA, 828 bp, Artificial Sequence
  derived and/or modified sequence
ggagccggccttctccccgtctctagtagtttccgcaccgctgacgcatgcctgcgcgcacagctgggccgggcgcgtcctacgcagcagccgcgagccgggctgcggccccaaggaggcccgcctgacgactgaccagttgccatggcatcctactacgagatcctagacgtgccgcgaagtgcgtccgctgatgacatcaagaaggcgtatcggcgcaaggctctccagtggcacccagacaaaaacccagataataaagagtttgctgagaagaaatttaaggaggtggccgaggcatatgaagtgctgtctgacaagcacaagcgggagatttacgaccgctatggccgggaagggctgacagggacaggaactggcccatctcgggcagaagctggcagtggtgggcctggcttcaccttcaccttccgcagccccgaggaggtcttccgggaattctttgggagtggagacccttttgcagagctctttgatgacctgggccccttctcagagcttcagaaccggggttcccgacactcaggccccttctttaccttctcttcctccttccctgggcactccgatttctcctcctcatctttctccttcagtcctggggctggtgcttttcgctctgtttctacatctaccacctttgtccaaggacgccgcatcaccacacgcagaatcatggagaacgggcaggagcgggtggaagtggaggaggatgggcagctgaagtcagtcacaatcaatggtgtcccagatgacctggcactgggcttggagctgagccgtcgcgagcagcagccgtcagtcact

SEQ ID NO: 31981 - DNA, 652 bp, Artificial Sequence
  derived and/or modified sequence
aggtgcggccgggggcccgggtcaggctgggggccctggatcggactgctggagttggggggccccgatagggctcctgggcctgggcgtcgagatagctcttggccccggcctgcgggggcagataaggctgccggagggagcctagtcaccggccgcaagcagagcccgccccaaggaggcccgcctgacgactgaccagttgccatggcatcctactacgagatcctagacgtgccgcgaagtgcgtccgctgatgacatcaagaaggcgtatcggcgcaaggctctccagtggcacccagacaaaaacccagataataaagagtttgctgagaagaaatttaaggaggtggccgaggcatatgaagtgctgtctgacaagcacaagcgggagatttacgaccgctatggccgggaagggctgacagggacaggaactggcccatctcgggcagaagctggcagtggtgggcctggcttcaccttcaccttccgcagccccgaggaggtcttccgggaattctttgggagtggagacccttttgcagagctctttgatgacctgggccccttctcagagcttcagaaccggggttcccgacactcaggccccttctttaccttctcttcctccttccctgggcactccg

SEQ ID NO: 31982 - DNA, 686 bp, Artificial Sequence
  derived and/or modified sequence
gaggtgcggccgggggcccgggtcaggctgggggccctggatcggactgctggagttggggggccccgatagggctcctgggcctgggcgtcgagatagctcttggccccggcctgcgggggcagataaggctgccggagggagcctagtcaccggccgcaagcagagcccggtgtgctccgcttccaactgggagcgccttccgccacccggggagggggactgctgcagccacagggtggggctcttggttctttccgcctgactccttctcttctgcagccccaaggaggcccgcctgacgactgaccagttgccatggcatcctactacgagatcctagacgtgccgcgaagtgcgtccgctgatgacatcaagaaggcgtatcggcgcaaggctctccagtggcacccagacaaaaacccagataataaagagtttgctgagaagaaatttaaggaggtggccgaggcatatgaagtgctgtctgacaagcacaagcgggagatttacgaccgctatggccgggaagggctgacagggacaggaactggcccatctcgggcagaagctggcagtggtgggcctggcttcaccttcaccttccgcagccccgaggaggtcttccgggaattctttgggagtggagacccttttgcagagctctttgatgacctgggcccctt

SEQ ID NO: 31983 - protein, 154 aa, Artificial Sequence
  derived and/or modified sequence
MIHFILLFSRQGKLRLQKWYITLPDKERKKITREIVQIILSRGHRTSSFVDWKELKLVYKRYASLYFCCAIENQDNELLTLEIVHRYVELLDKYFGNVCELDIIFNFEKAYFILDEFIIGGEIQETSKKIAVKAIEDSDMLQETMEEYMNKPTF

SEQ ID NO: 31984 - protein, 164 aa, Artificial Sequence
  derived and/or modified sequence
MIHFILLFSRQGKLRLQKWYITLPDKERKKITREIVQIILSRGHRTSSFVDWKELKLVYKRYASLYFCCAIENQDNELLTLEIVHRYVELLDKYFGNVCELDIIFNFEKAYFILDEFIIGGEIQETSKKIAVKAIEDSDMLQENRLSPRGRDCSEPRSCHCTLA

SEQ ID NO: 31985 - protein, 154 aa, Artificial Sequence
  derived and/or modified sequence
MIHFILLFSRQGKLRLQKWYITLPDKERKKITREIVQIILSRGHRTSSFVDWKELKLVYKRYASLYFCCAIENQDNELLTLEIVHRYVELLDKYFGNVCELDIIFNFEKAYFILDEFIIGGEIQETSKKIAVKAIEDSDMLQEVSTVSQTMGER

SEQ ID NO: 31986 - DNA, 465 bp, Artificial Sequence
  derived and/or modified sequence
atgatccacttcatcctgctgttcagcagacagggcaagctgagactgcagaagtggtacatcaccctgcccgacaaggagagaaagaagatcaccagagagatcgtgcagatcatcctgagcagaggccacagaaccagcagcttcgtggactggaaggagctgaagctggtgtacaagagatacgccagcctgtacttctgctgcgccatcgagaaccaggacaacgagctgctgaccctggagatcgtgcacagatacgtggagctgctggacaagtacttcggcaacgtgtgcgagctggacatcatcttcaacttcgagaaggcctacttcatcctggacgagttcatcatcggcggcgagatccaggagaccagcaagaagatcgccgtgaaggccatcgaggacagcgacatgctgcaggagaccatggaggagtacatgaacaagcccaccttctag

SEQ ID NO: 31987 - DNA, 495 bp, Artificial Sequence
  derived and/or modified sequence
atgatccacttcatcctgctgttcagcagacagggcaagctgagactgcagaagtggtacatcaccctgcccgacaaggagagaaagaagatcaccagagagatcgtgcagatcatcctgagcagaggccacagaaccagcagcttcgtggactggaaggagctgaagctggtgtacaagagatacgccagcctgtacttctgctgcgccatcgagaaccaggacaacgagctgctgaccctggagatcgtgcacagatacgtggagctgctggacaagtacttcggcaacgtgtgcgagctggacatcatcttcaacttcgagaaggcctacttcatcctggacgagttcatcatcggcggcgagatccaggagaccagcaagaagatcgccgtgaaggccatcgaggacagcgacatgctgcaggagaacagactgagccccagaggcagagactgcagcgagcccagaagctgccactgcaccctggcctag

SEQ ID NO: 31988 - DNA, 465 bp, Artificial Sequence
  derived and/or modified sequence
atgatccacttcatcctgctgttcagcagacagggcaagctgagactgcagaagtggtacatcaccctgcccgacaaggagagaaagaagatcaccagagagatcgtgcagatcatcctgagcagaggccacagaaccagcagcttcgtggactggaaggagctgaagctggtgtacaagagatacgccagcctgtacttctgctgcgccatcgagaaccaggacaacgagctgctgaccctggagatcgtgcacagatacgtggagctgctggacaagtacttcggcaacgtgtgcgagctggacatcatcttcaacttcgagaaggcctacttcatcctggacgagttcatcatcggcggcgagatccaggagaccagcaagaagatcgccgtgaaggccatcgaggacagcgacatgctgcaggaggtgagcaccgtgagccagaccatgggcgagagatag

SEQ ID NO: 31989 - DNA, 465 bp, Artificial Sequence
  derived and/or modified sequence
atgatccactttattctgttattctccaggcagggcaagctgcgcctgcagaaatggtatataaccctgcctgataaggaacgaaagaaaatcacacgagagatagttcagatcattctgtcaagagggcaccgcacaagttcgttcgtagactggaaggagctgaagttggtctacaaacgatacgcgagtctatatttttgttgtgcaattgagaatcaggacaacgaacttcttaccctggagattgttcaccgatacgttgagctgttggacaaatacttcggaaacgtatgtgagctcgatattattttcaatttcgaaaaggcatatttcattcttgacgagttcattatcggaggagagattcaggagacatctaaaaagatcgcagtgaaggctatagaggacagtgatatgttacaggaaaccatggaagagtacatgaacaagcccactttctag

SEQ ID NO: 31990 - DNA, 495 bp, Artificial Sequence
  derived and/or modified sequence
atgatccactttatcctcttgttctccagacagggcaagctccggcttcaaaaatggtacatcacactgccagataaggagcggaagaagataacgcgtgaaatcgtgcagataattttgtcgagaggccaccgcacaagcagcttcgtcgattggaaagaactgaagttagtgtataagcgctacgcgtccctgtacttttgctgcgctatcgaaaaccaggataatgagctgttgacactggagatagtccacaggtatgtggaactgctggataaatattttggtaacgtctgcgaactagacatcatctttaactttgagaaggcttacttcatcctggacgaatttatcatcggtggtgagattcaggaaacgtcaaagaaaattgccgtcaaagccattgaggattctgacatgctgcaagaaaaccggctgtccccgcgagggcgggattgttctgagccccgcagctgccactgtaccctggcgtag

SEQ ID NO: 31991 - DNA, 465 bp, Artificial Sequence
  derived and/or modified sequence
atgattcacttcatcctattgtttagcagacagggcaagctgcgattgcagaagtggtacattacactgcccgataaggaaagaaaaaagatcactagggagatagtacagattattctgagcagaggccatagaacaagctcctttgtggactggaaggagctcaaactggtctacaagaggtatgccagcctgtacttttgttgcgccatcgagaatcaggataacgagttgctcactctagaaatcgtacacaggtatgtagagctgcttgataagtactttggtaacgtctgcgagctggatatcatcttcaacttcgagaaggcctactttattcttgatgagttcatcatcggtggcgaaatccaggagaccagcaagaagatcgcagtcaaggccatcgaagacagcgatatgctccaggaggtatccacggtcagccagaccatgggggaaaggtag

SEQ ID NO: 31992 - DNA, 830 bp, Artificial Sequence
  derived and/or modified sequence
attgtgggaagcagccatggtctaagccgggcgcctcacctgtcagccgcaccggctccagcgctcgcctctcgccctcgcttctccagcgctccttgctcgcaaggcgggggaggcggcggcccagccacgatgatacatttcatattgctcttcagtcgacaagggaaattacggctacagaaatggtacatcactctccctgataaagagaggaagaagatcacccgggaaattgttcagattattctctcccgtggtcacaggacaagcagttttgttgactggaaggagctaaaacttgtttataaaaggtatgctagtttatatttttgctgtgcaatagaaaatcaggacaatgagctcttgacgctagagattgtgcatcgttacgtggagctgctggacaaatattttggaaatgtctgtgagctggatattatctttaattttgaaaaggcttatttcatcctggacgagtttataataggtggggaaattcaggaaacatccaagaaaattgctgtcaaagccattgaagactctgatatgttacaggagacaatggaagaatacatgaacaagcctacattttaactggaaatctacttgaagactccagcactacatgttatgaagctgtaaataagcaacgcctcccatccggttttttgatggagcctcaggcaccatgccaaaaataatttaaagggattctttgttaactaacaaagttaaagttgtttaacatatttataattactatgtgtctgtattattaaaaaaaattatgtgtctgtgttatactgtataggtacttgtagctctaa

SEQ ID NO: 31993 - DNA, 1785 bp, Artificial Sequence
  derived and/or modified sequence
cacactttcagtgccagggcattgtgggaagcagccatggtctaagccgggcgcctcacctgtcagccgcaccggctccagcgctcgcctctcgccctcgcttctccagcgctccttgctcgcaaggcgggggaggcggcggcccagccacgatgatacatttcatattgctcttcagtcgacaagggaaattacggctacagaaatggtacatcactctccctgataaagagaggaagaagatcacccgggaaattgttcagattattctctcccgtggtcacaggacaagcagttttgttgactggaaggagctaaaacttgtttataaaaggtatgctagtttatatttttgctgtgcaatagaaaatcaggacaatgagctcttgacgctagagattgtgcatcgttacgtggagctgctggacaaatattttggaaatgtctgtgagctggatattatctttaattttgaaaaggcttatttcatcctggacgagtttataataggtggggaaattcaggaaacatccaagaaaattgctgtcaaagccattgaagactctgatatgttacaggagaatcgtttgagccccagaggcagagattgcagtgagccgagatcatgccattgcactctagcctaggcaacaagagcaaaactccatctaaaaaaaaaaaaaaagaaaagaaaaaggagaattatgaagaacttggttccacaagtaagatagtcctcatactgcatcagtagtgacttaaacttttttaaaacttttattttttgtggggggatctgttgaatttgggaagcctccagttttaataaaatttttttattatggtggaaacatgtctgtaaaacttaggactatagaaatgcaaagaataaagaactgagggagttacacacatttgtagtcagaaattaagttcaaaaaataatttaggtcatttgcattttttagtatgcaaaataaatggaaaaattaaagtgcaataaaaatataatttgggaaatgaatgcagtaaaattgaaaacattgaaatattataatttaataaaataaacttcaaaaaatgtatgaaaatataagtatctttacttatataggattaaatatatttctgataatctgtcctctataatgaattggtttaattatgtttttctgtttttagaaatgggcatctttttatttctggaaacaactttttaatgagattttatcaaacattagactatgactaattataatattcaaagccaataccaaaacgatggataaataaatgaataaaacaaggcacattaatagaaaaaaatgaatgaaatcaattacgggttctacttgaaacacctaatctcattataatagcaataataaaacaatttgtacatactttattagtcgaacatttattaaaaatataagagcatagagcaaattaatttggaagaaaatttaaatcttttacatacaaataccctcaagaataataaatcatggagtattaataaaattaaaccagctgataattttagaaagtgcttcatgcacagagacttttattcaagtcctctttgctttctgctagtgcttttttttttttcttgaaatgggatgggatctcactctgtcacccaggctggagtgcagtagcacgatagcagcgcactgcaacctggacctcctgggctcaagcaatcctctcaccgcagcctcctgagtagctggggctacaggtgtgtgccaccatacttggctaattaaaaaaaaaaaa

SEQ ID NO: 31994 - DNA, 499 bp, Artificial Sequence
  derived and/or modified sequence
ctcgcaaggcgggggaggcggcggcccagccacgatgatacatttcatattgctcttcagtcgacaagggaaattacggctacagaaatggtacatcactctccctgataaagagaggaagaagatcacccgggaaattgttcagattattctctcccgtggtcacaggacaagcagttttgttgactggaaggagctaaaacttgtttataaaaggtatgctagtttatatttttgctgtgcaatagaaaatcaggacaatgagctcttgacgctagagattgtgcatcgttacgtggagctgctggacaaatattttggaaatgtctgtgagctggatattatctttaattttgaaaaggcttatttcatcctggacgagtttataataggtggggaaattcaggaaacatccaagaaaattgctgtcaaagccattgaagactctgatatgttacaggaggtcagtacggtttcccaaaccatgggagaaagatga

SEQ ID NO: 31995 - DNA, 465 bp, Artificial Sequence
  derived and/or modified sequence
atgatccacttcatcctgctcttcagccggcagggcaagctgcggctgcagaagtggtacatcaccctgcctgacaaggagaggaagaagatcacccgggagatcgtgcagatcatcctgagccggggccacaggaccagcagctttgtggactggaaggagctgaagctggtgtacaagagatatgccagcctgtacttctgctgtgccatcgagaaccaggacaatgagctgctgaccctggagatcgtgcacagatatgtggagctgctggacaagtactttggaaatgtgtgtgagctggacatcatcttcaactttgagaaggcctacttcatcctggatgagttcatcattggaggagagatccaggagaccagcaagaagattgctgtgaaggccatcgaggacagcgacatgctgcaggagaccatggaggagtacatgaacaagcccaccttctag

SEQ ID NO: 31996 - DNA, 495 bp, Artificial Sequence
  derived and/or modified sequence
atgatccacttcatcctgctcttcagccggcagggcaagctgcggctgcagaagtggtacatcaccctgcctgacaaggagaggaagaagatcacccgggagatcgtgcagatcatcctgagccggggccacaggaccagcagctttgtggactggaaggagctgaagctggtgtacaagagatatgccagcctgtacttctgctgtgccatcgagaaccaggacaatgagctgctgaccctggagatcgtgcacagatatgtggagctgctggacaagtactttggaaatgtgtgtgagctggacatcatcttcaactttgagaaggcctacttcatcctggatgagttcatcattggaggagagatccaggagaccagcaagaagattgctgtgaaggccatcgaggacagcgacatgctgcaggagaaccggctgagcccccggggccgggactgcagcgagcccaggagctgccactgcaccctggcctag

SEQ ID NO: 31997 - DNA, 465 bp, Artificial Sequence
  derived and/or modified sequence
atgatccacttcatcctgctcttcagccggcagggcaagctgcggctgcagaagtggtacatcaccctgcctgacaaggagaggaagaagatcacccgggagatcgtgcagatcatcctgagccggggccacaggaccagcagctttgtggactggaaggagctgaagctggtgtacaagagatatgccagcctgtacttctgctgtgccatcgagaaccaggacaatgagctgctgaccctggagatcgtgcacagatatgtggagctgctggacaagtactttggaaatgtgtgtgagctggacatcatcttcaactttgagaaggcctacttcatcctggatgagttcatcattggaggagagatccaggagaccagcaagaagattgctgtgaaggccatcgaggacagcgacatgctgcaggaggtgtccacagtgtcccagaccatgggagagaggtag

SEQ ID NO: 31998 - DNA, 465 bp, Artificial Sequence
  derived and/or modified sequence
atgatccacttcatcctgctgttcagccggcagggcaagctgcggctccaaaaatggtatatcacactgccagataaggagagaaaaaagataacacgggaaatagtacagatcatcctgagcagaggccatagaacatctagctttgttgattggaaggaactcaagcttgtctacaaacgatatgctagtctatacttctgttgcgcaatcgaaaatcaggataacgagctgctcacactcgagatagtacaccgatatgtcgagttactggataagtacttcggcaatgtgtgcgaattagacattattttcaactttgaaaaggcctactttatcctggacgaatttatcattggcggggaaatccaagagactagcaaaaagattgcagtgaaggcaattgaagatagcgacatgttgcaggagacaatggaagaatacatgaacaagcctaccttttag

SEQ ID NO: 31999 - DNA, 495 bp, Artificial Sequence
  derived and/or modified sequence
atgatccacttcatcctgctgttcagccggcagggcaagctgcggcttcaaaagtggtacatcacacttcctgacaaggagcgaaagaaaatcactcgcgaaatagttcaaatcattctctcgcgtggacaccgaacaagttcttttgtggactggaaagaactgaagctggtctataagcggtatgcgtccctctacttttgttgcgctattgaaaaccaggataatgaactgctgacccttgagatcgtccatcgatacgttgaactcctcgataagtacttcgggaacgtctgtgagctggacatcatctttaattttgagaaagcatacttcatcctagacgagtttattatcggcggagaaattcaagagacctctaaaaaaattgccgttaaggctatcgaagacagtgacatgctgcaggagaaccggctgtcgcccaggggtagggattgttctgaaccacgctcttgccactgtactctagcatag

SEQ ID NO: 32000 - DNA, 465 bp, Artificial Sequence
  derived and/or modified sequence
atgatccacttcatcctgctgttcagccggcagggcaagctgcggctgcagaaatggtacatcactcttcctgacaaagagcgcaaaaagatcacgagggaaattgtccagatcatcttgtccaggggacaccgcacaagcagctttgtggactggaaagagcttaagcttgtgtataaacgctatgcatccctatacttttgctgtgccatcgaaaaccaggataatgagttgttgactttagagattgtgcaccgctatgtcgaacttcttgacaagtatttcggcaatgtgtgcgaactagacattatctttaacttcgagaaggcctatttcattcttgatgaattcattatcggtggggagatccaggaaaccagcaaaaagattgccgtgaaggctatcgaagattcagatatgctccaggaagtgtccaccgtgtcccaaactatgggggagcggtag

SEQ ID NO: 32001 - DNA, 465 bp, Artificial Sequence
  derived and/or modified sequence
atgattcacttcattctgcttttttccagacagggtaaattgcgtttacagaaatggtacatcaccctcccagacaaagaacgcaagaagattacacgtgaaatagtgcagatcatactctcaaggggacatcgcacctccagttttgtcgattggaaagaactgaaactggtctacaagaggtatgcgagcttatatttttgttgtgctatcgaaaatcaggacaacgaactattaaccctggagatcgtgcaccgctatgtggaactgctagacaaatacttcggaaacgtgtgcgagttagatataatctttaatttcgaaaaagcttactttatactggacgaattcattatcggcggagagatccaggagacaagcaaaaagattgctgtgaaggccatcgaggattccgacatgctgcaagaaacaatggaagaatacatgaataagcctaccttctag

SEQ ID NO: 32002 - DNA, 495 bp, Artificial Sequence
  derived and/or modified sequence
atgatacacttcatactactgttttcgaggcagggtaagctacgcctccagaagtggtatataaccttaccggacaaggagagaaaaaaaattactcgggaaattgtgcagattatactctctagggggcacagaacgagtagctttgtagattggaaagagctgaagctggtctataaacggtatgcatccctgtatttctgttgtgccatagagaatcaagacaatgagttactgacactggagatcgtgcatcgctacgtggagctcctagacaagtactttggaaatgtgtgcgaactggacattatttttaattttgaaaaggcatactttattctcgatgaatttataatcggtggggagattcaggaaactagcaagaagattgctgtaaaggctattgaggacagcgatatgctccaggagaatagattgagccctagaggtagagactgttccgagcctcgttcctgtcactgtaccctggcatag

SEQ ID NO: 32003 - DNA, 465 bp, Artificial Sequence
  derived and/or modified sequence
atgattcacttcatccttttgttcagcagacaaggaaaattacggctccagaagtggtacataactctgccagataaggaaagaaaaaaaatcacgcgtgaaattgttcagatcatcctgtcccggggtcaccgaactagctcatttgtcgattggaaggagctaaagctggtttacaagaggtatgccagcctgtatttctgctgcgcgatcgagaaccaagataatgaattgctgaccttggaaatcgtgcacaggtatgtggaactactcgacaagtatttcggtaatgtgtgcgaattggacatcatattcaattttgaaaaagcctacttcattttagatgaattcattattggtggcgagatccaggaaacgtctaagaagattgccgtgaaggctatcgaggactctgacatgctgcaggaggtctccacagtgagccagactatgggggagcggtag

SEQ ID NO: 32004 - protein, 458 aa, Artificial Sequence
  derived and/or modified sequence
MAPPAARLALLSAAALTLAARPAPSPGLGPGPECFTANGADYRGTQNWTALQGGKPCLFWNETFQHPYNTLKYPNGEGGLGEHNYCRNPDGDVSPWCYVAEHEDGVYWKYCEIPACQMPGNLGCYKDHGNPPPLTGTSKTSNKLTIQTCISFCRSQRFKFAGMESGYACFCGNNPDYWKYGEAASTECNSVCFGDHTQPCGGDGRIILFDTLVGACGGNYSAMSSVVYSPDFPDTYATGRVCYWTIRVPGASHIHFSFPLFDIRDSADMVELLDGYTHRVLARFHGRSRPPLSFNVSLDFVILYFFSDRINQAQGFAVLYQAVKEELPQERPAVNQTVAEVITEQANLSVSAARSSKVLYVITTSPSHPPQTVPGWTVYGLATLLILTVTAIVAKILLHVTFKSHRVPASGDLRDCHQPGTSGEIWSIFYKPSTSISIFKKKLKGQSQQDDRNPLVSD

SEQ ID NO: 32005 - DNA, 1377 bp, Artificial Sequence
  derived and/or modified sequence
atggccccccccgccgccagactggccctgctgagcgccgccgccctgaccctggccgccagacccgcccccagccccggcctgggccccggccccgagtgcttcaccgccaacggcgccgactacagaggcacccagaactggaccgccctgcagggcggcaagccctgcctgttctggaacgagaccttccagcacccctacaacaccctgaagtaccccaacggcgagggcggcctgggcgagcacaactactgcagaaaccccgacggcgacgtgagcccctggtgctacgtggccgagcacgaggacggcgtgtactggaagtactgcgagatccccgcctgccagatgcccggcaacctgggctgctacaaggaccacggcaaccccccccccctgaccggcaccagcaagaccagcaacaagctgaccatccagacctgcatcagcttctgcagaagccagagattcaagttcgccggcatggagagcggctacgcctgcttctgcggcaacaaccccgactactggaagtacggcgaggccgccagcaccgagtgcaacagcgtgtgcttcggcgaccacacccagccctgcggcggcgacggcagaatcatcctgttcgacaccctggtgggcgcctgcggcggcaactacagcgccatgagcagcgtggtgtacagccccgacttccccgacacctacgccaccggcagagtgtgctactggaccatcagagtgcccggcgccagccacatccacttcagcttccccctgttcgacatcagagacagcgccgacatggtggagctgctggacggctacacccacagagtgctggccagattccacggcagaagcagaccccccctgagcttcaacgtgagcctggacttcgtgatcctgtacttcttcagcgacagaatcaaccaggcccagggcttcgccgtgctgtaccaggccgtgaaggaggagctgccccaggagagacccgccgtgaaccagaccgtggccgaggtgatcaccgagcaggccaacctgagcgtgagcgccgccagaagcagcaaggtgctgtacgtgatcaccaccagccccagccaccccccccagaccgtgcccggctggaccgtgtacggcctggccaccctgctgatcctgaccgtgaccgccatcgtggccaagatcctgctgcacgtgaccttcaagagccacagagtgcccgccagcggcgacctgagagactgccaccagcccggcaccagcggcgagatctggagcatcttctacaagcccagcaccagcatcagcatcttcaagaagaagctgaagggccagagccagcaggacgacagaaaccccctggtgagcgactag

SEQ ID NO: 32006 - DNA, 1377 bp, Artificial Sequence
  derived and/or modified sequence
atggcccctccagcagccagacttgcactgctgtcagcagctgctcttactttagccgcccgccctgcaccatcgccgggactgggacctggtcctgaatgtttcactgctaatggagctgactacaggggcactcagaattggaccgctctgcaaggaggaaaaccatgcctcttttggaatgaaacgtttcagcacccttataacaccctgaaatatcccaacggagaaggcggacttggtgagcacaactactgccgcaacccagatggcgacgtttccccatggtgttatgtggccgaacacgaggatggcgtgtattggaaatactgcgagatcccagcttgccagatgcccggaaatcttgggtgttataaagatcatggaaatcctccgccacttactgggacttcaaagacgagcaacaaactgacaattcaaacctgtattagtttttgccgctctcaaagatttaaatttgccggtatggagtcaggctacgcatgtttctgcggcaataatccagattattggaaatatggagaagccgcctccactgaatgcaactctgtctgtttcggtgaccacacccaaccttgcgggggggatgggcggatcattctgtttgatacgctagtcggagcctgtggagggaattatagtgcaatgagctctgttgtttatagccctgacttccccgatacctatgccacgggtcgggtctgctactggacgatacgtgtgccgggggcgagccacattcacttctcattcccactgtttgatattagggattctgctgacatggtggaattactcgacgggtacacgcatcgggtccttgctcggttccacggaagatcccgaccgccactgagcttcaatgttagcctcgactttgttattctttatttttttagcgataggatcaaccaggcgcagggcttcgccgtgctctaccaagctgttaaagaggagctgccacaggagcgccctgcagtcaaccagaccgtggccgaagtcatcaccgagcaagcaaatctctctgtgagtgccgcccgctcgtctaaagtactctacgtcattactacttcacctagccatcccccacagaccgtcccaggatggacagtatatggtcttgctacactcctaatcttgacagtgaccgcgattgttgctaaaattctactacatgtgacattcaagagtcatagggtgccggcatccggtgacctcagggattgtcaccagccgggcacttctggcgagatctggtctattttttacaaaccaagcacgtcaatcagcatttttaagaagaaattgaaagggcagtctcaacaagacgacagaaatcccctggtcagcgactag

SEQ ID NO: 32007 - DNA, 6138 bp, Artificial Sequence
  derived and/or modified sequence
cgcgctgccccctttaccccgggccgcgccccggggccccgcactgacggcccatggcgccgccagccgcccgcctcgccctgctctccgccgcggcgctcacgctggcggcccggcccgcgcctagccccggcctcggccccggacccgagtgtttcacagccaatggtgcggattataggggaacacagaactggacagcactacaaggcgggaagccatgtctgttttggaacgagactttccagcatccatacaacactctgaaataccccaacggggaggggggcctgggtgagcacaactattgcagaaatccagatggagacgtgagcccctggtgctatgtggcagagcacgaggatggtgtctactggaagtactgtgagatacctgcttgccagatgcctggaaaccttggctgctacaaggatcatggaaacccacctcctctaactggcaccagtaaaacgtccaacaaactcaccatacaaacttgcatcagtttttgtcggagtcagaggttcaagtttgctgggatggagtcaggctatgcttgcttctgtggaaacaatcctgattactggaagtacggggaggcagccagtaccgaatgcaacagcgtctgcttcggggatcacacccaaccctgtggtggcgatggcaggatcatcctctttgatactctcgtgggcgcctgcggtgggaactactcagccatgtcttctgtggtctattcccctgacttccccgacacctatgccacggggagggtctgctactggaccatccgggttccgggggcctcccacatccacttcagcttccccctatttgacatcagggactcggcggacatggtggagcttctggatggctacacccaccgtgtcctagcccgcttccacgggaggagccgcccacctctgtccttcaacgtctctctggacttcgtcatcttgtatttcttctctgatcgcatcaatcaggcccagggatttgctgttttataccaagccgtcaaggaagaactgccacaggagaggcccgctgtcaaccagacggtggccgaggtgatcacggagcaggccaacctcagtgtcagcgctgcccggtcctccaaagtcctctatgtcatcaccaccagccccagccacccacctcagactgtcccaggatggacagtctatggtctggcaactctcctcatcctcacagtcacagccattgtagcaaagatacttctgcacgtcacattcaaatcccatcgtgttcctgcttcaggggaccttagggattgtcatcaaccagggacttcgggggaaatctggagcattttttacaagccttccacttcaatttccatctttaagaagaaactcaagggtcagagtcaacaagatgaccgcaatccccttgtgagtgactaaaaaccccactgtgcctaggacttgaggtccctctttgagctcaaggctgccgtggtcaacctctcctgtggttcttctctgacagactcttcccctcctctccctctgcctcggcctcttcggggaaaccctcctcctacagactaggaagaggcaccctgctgccagggcaggcagagcctggattcctcctgcttcatcgattgcacttaggagagagactcaaagccctggggcccggccctctctgcatctctctctgatctagctagcagtgggggtgtcaggacagtgaggctgagatgacagaggtggtcatggctggcacagggctcaggtacattctagatggctgtcaggtggtgggtagctttagttacattgaatttttcttgcttctctatttttgtccacacacaaatcagtttctcctgatctttatgtcttggaacagggccagacagggagaactctcaggtactcttgggagttggtcccatacaagtgcggactcctggacattagcgaggtgtaaagagggcagtgtctgtgctgccccggcagctttgctctccagatgctggactagggtgggcctccttcagcctgggagggtctgagaataagatctagtgacccccatttatatcaaacctgataccttacacatgggcttctttctagattcttctttccatagctcatggagctgcagggaaagctttaagagctttggtcatataaaacatccattcagctgggcgcgatggctcatgcctgtaatcccagcactgtgggaggctgaggcgggcagatcacctgaggtcaggagttcgagaccagcctggccaacatggtgaaaccccgtctctactaaaaatataaaaattagtcaggcgtggtggcaggcgcctgtaatcccagctactcagaaggctgagacagaagaacagcttgaacccaggaggctgagattgcagtgagccgagatcgcaccactgcactccagcctgggtgacaagagtgagactctgtctcaaaaaaacaaaacacaaataaacaaaaaaaatccattcatttactcatgcaataaattctcctgcaagcttttatgggcactcagtaagtactcaggattggctttatcagccttgccactgagcagctcatggtcctatggaacctgagccaggcctcagtctctccatgattggctcagctaactctcagttcagagtggagagtatcaatcttgtgtttttgcccttaggcagcactatatgagacatggggcctgtggtccttccttctggtgtcccccgtgttaaaagataaaaaacaccccaagggccgggcgcggtggctcatgcctgtaatcccagcactttgggaggctgaggcgggtggatcacgaggtcaggtgatcgaaaccatcctggctaagatggtgaaaccccgtctctactaaaaatacaaaaaattagctgggtgtggtggtgggcgcctgtagtcccagctgctcgggaggctgaggcaggagaatggcgtgaacccgggaggcggagcttgcagtgagcagagatcacgccactgcactccagcctgggtgacagtgcaagactctgtctcaaaaaaaaaaaaaacactccaagggccatccgtgctctctgcccctcctgtggggaccaagtggggttaggaatggctcagtggggaaggagagcactcttgtccccagtcccttgccaccctgtcccttagatagggaggtgggctgcagagattggtgccagaagagggtgggtttgggaattggagctcctccaaggagctcctcctaagattgagtgctgcagctgtagtggctgctggttgggagagtaagtgccatcactaatttaaaagtccttgccatctggaatcaggctttgtcaacagcagctgagaaaagcagcctgtgcctctgctggccaggcctaggccctcgtcagagcgtgcctctccacaaggcacttgggcctgggtgattgttgcgcctctggctttggcgtttcctctttgcagcactttgcctacctcccccaagccctgagccactgcctgctggggctcctactgaggttctggaaacacctctgcacctgccgcccctgggaggaaagagggccacacaggaagtgtctgcagggagaggtggcactcggcagcctgagttcaggagaggtgcttggagcttcaggcagaggggccttcagaggagggaaacggagcaatgtgtcacaggcaggcaggggcaggactgccaccccaggccccgtgggaggcctgctgagggcacagagctgctcggtgcagccttcatgctttgatctggaaagagcagctgtccgcaggcctctgtctccaagaggcctgtcacacaggaggaccgctggaaacataccaacacgtgcagtctcccctccaagctattcatgctgtttgtggaatctctctcaaacataagtgtcaggtgtgtgtcgtcccaacgggtcctgtgctgtgaatagatccatgtgcagcacaaagggaatgtggcacgtggccccaggaagagttcacccggccagggggcagttgttcagttgcctggggctgacactgaccactggcctctggggtgtcctgcagcccaaatgcccaccttgccctcctcacatctcagtcaggggaggccatgcccaagccaatgtgctgtcacagcctgcagcgggggcagcacttcctcggagggcctgggaggtgctggggatgccccagcgcttctcttcctgcctcgccctggcatggcccagcgcctctaggatcaacttacgatccgtggagcagccccgggaaacccaaatctggctcaggacagcgtacgggcaggagggctgtaaatcatcccaggctaagcctccgtgggcactggctcctgccgcagcctggctatggactcagttagaaccaggtagaaagtcagcgacaccccacagaaggccactgcggctaggtaaacacctgagaaagaaactgctccagaagagatgacgtgggcttccaggagcatggaggaggtggcacttgaacttttaggaaactccttagatgagataaagtgggggttggaggtggcgaaaagagggtaaccctgggaaagtcagtcagaacccatggcagaagactgcaggagaggcaggggaggggcttcggggaccactgtggacagagctctgaaagcaccctggccaaagcccctcctgaggtgacagagcgtgggaggaggctgcactgggcctgcgtgccatcctcacccctgttccccgctggcgccaggccctgccttcttggtacctgtgccaacaggagagccctcaccagccgatcttgtcactctccgtggtgacagtgtcttggccagctgtggcccctagtttctagcagcgtttctcagtgtccttggcccttctgagaaggcaggcgggaggcacacggtgccctgttcttccccgtttgtccagttgcttgcaaagcagagaatgagtaggagtgaacccgagtgacttcacccgccctgtcccccacgtcaggacaggcttgaggcctctctgggcgtgagcgaggaaaccaggctgctctaacttctgaagagtgggctctggctcaagactccaatcggccagaagcccacagagatcaaagcactagcaagttcagctgtcctggccctcgggtagaacccacgggcgtgcctgggtgcggctccacccacatgccccactgtcagcccaggcaggagccttcctggccgggctcaggatctgcctgcagcccagccaggccatcacccagccccgatgcatcctggcactgcacgcttactcttcacaagcacttatacgcggatggcctccgagaccctgcctccctggtctgctgaggtcaggccaggtctcccacggagccgggcagctccacaccccaccacctggcaccgttaggtttcagatctcccgtgtggtgtttgatgtcggcttttgttcctaccttgggagtttggattgtttcctctggtgtctttgtttaccttcctcactgttctacctcctggccaggtctcagcttagcttccctggtgtggggtgtttttcaagccttccagccacagctgtctcccctcaggctggacggctccggggtgacagggcttcaccctctgcctgcagacccctggtgggcacatctcacaggcttccgtcttgctgagttgggtacggaggcagaagtggggtgtggaggaaagtcagagggaaatctgcttcagaaaggaagggtctttagacacaaagactggaggcccttccccgcccgcacgggagctgccatcgtgggtctcatgcacgtcaagaccttcccacatccaaactcagcttccagcagggattttgactttggatgacaaggctttatttgtaaatatgctcttaatatgcaactttgagaataaaatagaaacatcatgtattttaaaatataagatgaagtgtgacgcactgtatacaatttaatatatatttttagggttttgttatttaagaaaatggaatgtaatggtacttttacaaacgagaaaaaatgttatttttactttctggaaaaaataaatattctcattgttgtagaaaga

SEQ ID NO: 32008 - DNA, 1377 bp, Artificial Sequence
  derived and/or modified sequence
atggcccctcctgctgcccggctggccctgctgtctgctgctgccctgaccctggccgcccggcctgcccccagccctggcctgggccctggccctgagtgcttcaccgccaacggggctgactaccggggcacccagaactggacagccctgcagggcggcaagccctgcctcttctggaatgagaccttccagcacccctacaacaccctgaagtacccaaatggagagggcggcctgggggagcacaactactgcagaaatccagatggagatgtgagcccctggtgctacgtggccgagcatgaagatggagtgtactggaagtactgtgagatcccagcctgccagatgcctggcaacctgggctgctacaaggaccacggcaaccccccacccctgaccggcaccagcaagaccagcaacaagctgaccatccagacctgcatctccttctgccgcagccagcgcttcaagtttgctggcatggagagcggctacgcctgcttctgtggcaacaacccagactactggaagtacggggaggccgccagcacagagtgcaacagcgtgtgctttggagaccacacccagccctgtggaggagatggccgcatcatcctgtttgacaccctggtgggcgcctgtggcggcaactacagcgccatgagctctgtggtgtacagcccagacttcccagacacctacgccaccggccgggtgtgctactggaccatccgggtgcctggggccagccacatccacttctccttccccctgtttgacatccgggacagcgctgacatggtggagctgctggatggctacacccaccgggtgctggcccgcttccacggccgcagccggccccccctgtccttcaacgtgtccctggactttgtgatcctgtacttcttcagtgaccgcatcaaccaggcccagggctttgctgtgctgtaccaggccgtgaaggaggagctgccccaggagaggcctgctgtgaaccagacagtggccgaggtgatcacagagcaggccaacctgtctgtgtctgctgcccggagcagcaaggtgctgtatgtgatcaccaccagccccagccaccccccccagacagtgcccggctggacagtgtatggcctggccaccctgctgatcctgactgtgacagccatcgtggccaagatcctgctgcacgtgaccttcaagagccaccgggtgcctgccagcggggacctgcgggactgccaccagcccggcaccagcggggagatctggagcatcttctacaagcccagcaccagcatcagcatcttcaagaagaagctgaagggccagagccagcaggatgacaggaaccccctggtgtctgactag

SEQ ID NO: 32009 - DNA, 1377 bp, Artificial Sequence
  derived and/or modified sequence
atggccccccccgccgcccggctggccctgctgagcgccgccgccctgacgcttgctgctagacctgctccctcacctggcctggggcccggaccggagtgcttcacagctaacggcgctgattacagaggaacccagaactggactgcactccagggcgggaagccctgcctgttctggaacgagacattccagcacccttataataccttgaaatatccaaatggagaaggcggactcggggagcataactactgtaggaatcctgatggagatgtctccccttggtgttatgtggctgagcacgaggatggcgtgtattggaaatactgcgagattcccgcttgccagatgccagggaacctggggtgttacaaggatcacggcaacccgcccccgctgactgggacatccaagacatctaataagctgaccattcagacctgtatctcattttgccggagccaacgctttaagttcgccgggatggagagtggctacgcctgcttttgcggaaataatcccgattattggaaatacggcgaagcagcctccactgagtgcaacagcgtctgctttggcgaccacactcaaccttgcggaggcgacggacgcattattctctttgacaccctggttggagcctgcggaggcaattactcagctatgtcttctgtggtgtactcacctgattttccagatacatatgctactggcagggtgtgttactggaccatcagagtaccaggagcctctcacatacacttctccttccctttatttgacattcgcgactccgccgacatggtagaacttctcgatgggtacacccatcgagtgttggccagattccacggcagaagccggccccctctgagctttaacgtttctctggactttgtgattctctactttttttccgatagaatcaatcaggcccaggggtttgccgtcctgtaccaagcagtgaaagaggagctgccgcaagagaggcccgctgtgaaccagaccgttgcggaagtcattactgagcaggcaaacctgtcagtgagcgctgctcgctcaagtaaagtactgtacgtgataactacctcaccttcacacccgcctcagaccgttcctggatggaccgtttacggcctggcgacattgctgatactgacagtgacagcaatagttgccaagatcctcctccatgttacctttaagtctcacagagtgcctgcctcaggagatctcagagactgtcatcagcctgggacatccggtgagatttggagtatcttttacaagccgtctacctctatatctatctttaaaaagaaattgaagggacagtcccagcaagatgaccgtaatccactcgtttccgattag

SEQ ID NO: 32010 - DNA, 1377 bp, Artificial Sequence
  derived and/or modified sequence
atggcaccccctgcagctcggctggcgttgctgagtgcggcagctcttactctggccgcacggcctgcaccttccccaggactaggacccggtcccgaatgcttcactgctaacggcgctgactacagaggaacccaaaattggactgctcttcagggaggaaaaccatgtctgttctggaacgagaccttccagcacccctataacacactgaagtacccaaatggtgagggaggcttaggagagcacaactactgcaggaatcccgacggagatgttagtccatggtgctacgtggccgaacacgaggatggagtctactggaagtattgtgagatacctgcttgccagatgcctggaaacttgggatgctataaggaccatggaaacccaccaccattgaccggaactagtaaaacctcgaataagctgacaatccagacctgcatcagcttctgccggagccagcggttcaagtttgcaggcatggaatcaggatatgcctgtttctgtggtaataatcccgattactggaagtatggggaagccgcaagcacagagtgtaatagtgtatgctttggagaccatacccaaccctgcggcggtgatggcagaatcatactttttgatacactggtgggggcatgtggcggaaactattctgccatgtcgtcggttgtttacagccctgacttcccagatacttatgcaactggcagagtttgttactggactatccgggtaccaggggctagccacatacatttctcgttcccactatttgacataagagacagcgccgatatggtagagttactcgacgggtacacgcaccgggtgctggccagattccacgggaggtccagaccacctctgtcctttaacgtctctctcgacttcgttatcctgtatttttttagcgatcggataaaccaagctcaggggttcgccgtgttgtaccaagccgtgaaagaggagctaccacaggaacgtcccgctgtcaatcaaaccgtcgcggaggtaattaccgaacaagccaacctgagtgtgtcagccgctcgcagttcgaaggtgttgtatgttattacaacatccccttcccacccccctcaaactgtcccaggatggaccgtgtacggcctcgccacgttgctgattttaaccgtcacagccatcgtggcaaaaattttattacatgtgacttttaaatcacatcgagtgccagcgagcggggacctgcgagactgtcaccagcctggaacgagcggcgagatatggagcattttttacaagccctcaacatctatttccatcttcaaaaaaaagctgaagggccagagccagcaggacgaccgtaatccactggtgtcagattag

SEQ ID NO: 32011 - protein, 647 aa, Artificial Sequence
  derived and/or modified sequence
MSDEVFSTTLAYTKSPKVTKRTTFQDELIRAITARSARQRSSEYSDDFDSDEIVSLGDFSDTSADENSVNKKMNDFHISDDEEKNPSKLLFLKTNKSNGNITKDEPVCAIKNEEEMAPDGCEDIVVKSFSESQNKDEEFEKDKIKMKPKPRILSIKSTSSAENNSLDTDDHFKPSPRPRSMLKKKSHMEEKDGLEDKETALSEELELHSAPSSLPTPNGIQLEAEKKAFSENLDPEDSCLTSLASSSLKQILGDSFSPGSEGNASGKDPNEEITENHNSLKSDENKENSFSADHVTTAVEKSKESQVTADDLEEEKAKAELIMDDDRTVDPLLSKSQSILISTSATASSKKTIEDRNIKNKKSTNNRASSASARLMTSEFLKKSSSKRRTPSTTTSSHYLGTLKVLDQKPSQKQSIEPDRADNIRAAVYQEWLEKKNVYLHEMHRIKRIESENLRIQNEQKKAAKREEALASFEAWKAMKEKEAKKIAAKKRLEEKNKKKTEEENAARKGEALQAFEKWKEKKMEYLKEKNRKEREYERAKKQKEEETVAEKKKDNLTAVEKWNEKKEAFFKQKEKEKINEKRKEELKRAEKKDKDKQAINEYEKWLENKEKQERIERKQKKRHSFLESEALPPWSPPSRTVFAKVF

SEQ ID NO: 32012 - protein, 377 aa, Artificial Sequence
  derived and/or modified sequence
MSDEVFSTTLAYTKSPKVTKRTTFQDELIRAITARSARQRSSEYSDDFDSDEIVSLGDFSDTSADENSVNKKMNDFHISDDEEKNPSKLLFLKTNKSNGNITKDEPVCAIKNEEEMAPDGCEDIVVKSFSESQNKDEEFEKDKIKMKPKPRILSIKSTSSAENNSLDTDDHFKPSPRPRSMLKKKSHMEEKDGLEDKETALSEELELHSAPSSLPTPNGIQLEAEKKAFSENLDPEDSCLTSLASSSLKQILGDSFSPGSEGNASGKDPNEEITENHNSLKSDENKENSFSADHVTTAVEKSKESQVTADDLEEEKAKAELIMDDDRTVDPLLSKSQSILISTSATASSKKTIEDRNIKNKKSTNNRASSASASKAS

SEQ ID NO: 32013 - protein, 31 aa, Artificial Sequence
  derived and/or modified sequence
MSDEVFSTTLAYTKSPKVTKRTTFQDELIRA

SEQ ID NO: 32014 - protein, 623 aa, Artificial Sequence
  derived and/or modified sequence
MSDEVFSTTLAYTKSPKVTKRTTFQDELIRAITARSARQRSSEYSDDFDSDEIVSLGDFSDTSADENSVNKKMNDFHISDDEEKNPSKLLFLKTNKSNGNITKDEPVCAIKNEEEMAPDGCEDIVVKSFSESQNKDEEFEKDKIKMKPKPRILSIKSTSSAENNSLDTDDHFKPSPRPRSMLKKKSHMEEKDGLEDKETALSEELELHSAPSSLPTPNGIQLEAEKKAFSENLDPEDSCLTSLASSSLKQILGDSFSPGSEGNASGKADHVTTAVEKSKESQVTADDLEEEKAKAELIMDDDRTVDPLLSKSQSILISTSATASSKKTIEDRNIKNKKSTNNRASSASARLMTSEFLKKSSSKRRTPSTTTSSHYLGTLKVLDQKPSQKQSIEPDRADNIRAAVYQEWLEKKNVYLHEMHRIKRIESENLRIQNEQKKAAKREEALASFEAWKAMKEKEAKKIAAKKRLEEKNKKKTEEENAARKGEALQAFEKWKEKKMEYLKEKNRKEREYERAKKQKEEETVAEKKKDNLTAVEKWNEKKEAFFKQKEKEKINEKRKEELKRAEKKDKDKQAINEYEKWLENKEKQERIERKQKKRHSFLESEALPPWSPPSRTVFAKVF

SEQ ID NO: 32015 - DNA, 1134 bp, Artificial Sequence
  derived and/or modified sequence
atgagcgacgaggtgttcagcaccaccctggcctacaccaagagccccaaggtgaccaagagaaccaccttccaggacgagctgatcagagccatcaccgccagaagcgccagacagagaagcagcgagtacagcgacgacttcgacagcgacgagatcgtgagcctgggcgacttcagcgacaccagcgccgacgagaacagcgtgaacaagaagatgaacgacttccacatcagcgacgacgaggagaagaaccccagcaagctgctgttcctgaagaccaacaagagcaacggcaacatcaccaaggacgagcccgtgtgcgccatcaagaacgaggaggagatggcccccgacggctgcgaggacatcgtggtgaagagcttcagcgagagccagaacaaggacgaggagttcgagaaggacaagatcaagatgaagcccaagcccagaatcctgagcatcaagagcaccagcagcgccgagaacaacagcctggacaccgacgaccacttcaagcccagccccagacccagaagcatgctgaagaagaagagccacatggaggagaaggacggcctggaggacaaggagaccgccctgagcgaggagctggagctgcacagcgcccccagcagcctgcccacccccaacggcatccagctggaggccgagaagaaggccttcagcgagaacctggaccccgaggacagctgcctgaccagcctggccagcagcagcctgaagcagatcctgggcgacagcttcagccccggcagcgagggcaacgccagcggcaaggaccccaacgaggagatcaccgagaaccacaacagcctgaagagcgacgagaacaaggagaacagcttcagcgccgaccacgtgaccaccgccgtggagaagagcaaggagagccaggtgaccgccgacgacctggaggaggagaaggccaaggccgagctgatcatggacgacgacagaaccgtggaccccctgctgagcaagagccagagcatcctgatcagcaccagcgccaccgccagcagcaagaagaccatcgaggacagaaacatcaagaacaagaagagcaccaacaacagagccagcagcgccagcgccagcaaggccagctag

SEQ ID NO: 32016 - DNA, 96 bp, Artificial Sequence
  derived and/or modified sequence
atgagcgacgaggtgttcagcaccaccctggcctacaccaagagccccaaggtgaccaagagaaccaccttccaggacgagctgatcagagcctag

SEQ ID NO: 32017 - DNA, 1872 bp, Artificial Sequence
  derived and/or modified sequence
atgagcgacgaggtgttcagcaccaccctggcctacaccaagagccccaaggtgaccaagagaaccaccttccaggacgagctgatcagagccatcaccgccagaagcgccagacagagaagcagcgagtacagcgacgacttcgacagcgacgagatcgtgagcctgggcgacttcagcgacaccagcgccgacgagaacagcgtgaacaagaagatgaacgacttccacatcagcgacgacgaggagaagaaccccagcaagctgctgttcctgaagaccaacaagagcaacggcaacatcaccaaggacgagcccgtgtgcgccatcaagaacgaggaggagatggcccccgacggctgcgaggacatcgtggtgaagagcttcagcgagagccagaacaaggacgaggagttcgagaaggacaagatcaagatgaagcccaagcccagaatcctgagcatcaagagcaccagcagcgccgagaacaacagcctggacaccgacgaccacttcaagcccagccccagacccagaagcatgctgaagaagaagagccacatggaggagaaggacggcctggaggacaaggagaccgccctgagcgaggagctggagctgcacagcgcccccagcagcctgcccacccccaacggcatccagctggaggccgagaagaaggccttcagcgagaacctggaccccgaggacagctgcctgaccagcctggccagcagcagcctgaagcagatcctgggcgacagcttcagccccggcagcgagggcaacgccagcggcaaggccgaccacgtgaccaccgccgtggagaagagcaaggagagccaggtgaccgccgacgacctggaggaggagaaggccaaggccgagctgatcatggacgacgacagaaccgtggaccccctgctgagcaagagccagagcatcctgatcagcaccagcgccaccgccagcagcaagaagaccatcgaggacagaaacatcaagaacaagaagagcaccaacaacagagccagcagcgccagcgccagactgatgaccagcgagttcctgaagaagagcagcagcaagagaagaacccccagcaccaccaccagcagccactacctgggcaccctgaaggtgctggaccagaagcccagccagaagcagagcatcgagcccgacagagccgacaacatcagagccgccgtgtaccaggagtggctggagaagaagaacgtgtacctgcacgagatgcacagaatcaagagaatcgagagcgagaacctgagaatccagaacgagcagaagaaggccgccaagagagaggaggccctggccagcttcgaggcctggaaggccatgaaggagaaggaggccaagaagatcgccgccaagaagagactggaggagaagaacaagaagaagaccgaggaggagaacgccgccagaaagggcgaggccctgcaggccttcgagaagtggaaggagaagaagatggagtacctgaaggagaagaacagaaaggagagagagtacgagagagccaagaagcagaaggaggaggagaccgtggccgagaagaagaaggacaacctgaccgccgtggagaagtggaacgagaagaaggaggccttcttcaagcagaaggagaaggagaagatcaacgagaagagaaaggaggagctgaagagagccgagaagaaggacaaggacaagcaggccatcaacgagtacgagaagtggctggagaacaaggagaagcaggagagaatcgagagaaagcagaagaagagacacagcttcctggagagcgaggccctgcccccctggagcccccccagcagaaccgtgttcgccaaggtgttctag

SEQ ID NO: 32018 - DNA, 1944 bp, Artificial Sequence
  derived and/or modified sequence
atgtctgacgaggtcttcagcactacactggcttacactaagtcacccaaagtgacaaaacgaacaacatttcaagatgagcttatcagggccattactgcccgcagcgccagacagagatcgtccgagtattcagacgattttgactccgacgaaattgtgtccctcggtgacttttctgacacaagtgcagatgaaaatagtgtgaataaaaaaatgaatgattttcacatatcggacgacgaggagaagaatccgtccaaactgctgttcttaaagaccaacaaatcaaacggcaatattacaaaggacgaaccagtgtgcgcaattaagaacgaagaagaaatggcgccagacggctgtgaagacattgtcgtgaagtcgttttcagaatcccagaacaaagatgaagagtttgagaaagacaaaataaagatgaaaccaaaacccaggattctttccatcaagagcacatcttccgccgagaataatagcctagacactgacgatcactttaagccttctccaaggcccagatctatgctgaaaaagaagtctcacatggaagagaaggacggcttggaggacaaagaaacggcattatccgaagagctcgaactgcactccgcgccctcctccctacccacaccaaatggcatccagctggaagccgagaagaaggcgttcagcgagaatctcgaccccgaggacagttgtctcacctctctcgcgtctagttcactgaagcagattttgggtgacagcttttcccctgggtctgaaggtaacgcctcgggcaaggaccctaatgaggagatcacggaaaaccataatagcttgaagtccgacgaaaacaaggagaattcattcagtgccgaccatgttacgaccgccgtcgagaagagcaaggagtcccaggttacagcagacgacctggaggaggaaaaagcaaaagcagagttgatcatggatgatgaccgtaccgtggaccctctattatcgaaatcccagtcaatcttgatcagcacatctgcaacagcttcctcgaaaaagactattgaagacaggaacatcaaaaataagaagagcactaataaccgagccagttccgcttctgcccggctaatgacatccgagttcctaaagaagtcctcctctaaacgccggactcctagtacgaccacctccagccactatttaggtacacttaaggtgcttgatcagaaacccagtcagaagcagagtattgagccagacagggccgacaatattcgcgctgcggtgtatcaggagtggctggagaaaaagaacgtgtacctgcatgaaatgcaccggatcaaacggatagaaagtgaaaatctgaggattcagaacgaacagaagaaagcagcaaaacgcgaggaggcccttgctagcttcgaggcttggaaggctatgaaggagaaagaggccaagaaaatcgctgcaaaaaagcgcctggaggagaagaacaagaagaagacggaagaggagaatgctgcacggaaaggtgaggctttgcaagccttcgaaaagtggaaggaaaaaaagatggagtatctgaaagagaagaacaggaaagaacgggagtatgagagggctaagaagcaaaaagaggaggaaaccgttgccgaaaaaaaaaaggataaccttaccgctgtggaaaaatggaacgagaaaaaagaggctttcttcaagcaaaaagaaaaggagaagatcaacgagaaacgcaaggaagaactgaagcgtgcggagaagaaggacaaagataaacaagcaatcaacgagtacgagaaatggctggagaataaagaaaagcaggaacggattgaacgaaaacaaaaaaagcgccactcctttcttgaaagcgaagcccttccaccttggtcacctccttccaggacggttttcgccaaggtattttag

SEQ ID NO: 32019 - DNA, 1134 bp, Artificial Sequence
  derived and/or modified sequence
atgtccgacgaagtgttctcaacaactttagcctacacaaaaagccccaaagtgactaagcgcacgacttttcaggacgaactaatcagagctatcactgctcgaagcgcccggcagcgcagctctgagtactccgacgactttgacagtgatgaaatcgtcagccttggggatttcagcgacacatccgcagacgagaattctgttaacaagaagatgaatgatttccacatcagcgatgatgaggagaaaaacccctccaaactgttattcctaaagacgaacaaatctaacggcaatataacgaaggacgagcctgtttgcgccatcaaaaatgaggaggagatggccccagatggctgcgaagatatcgtcgtaaagagtttctcagagtctcagaataaagacgaggaattcgagaaagacaagattaagatgaaaccaaagccaaggatcctttcaatcaagagtacatccagcgctgagaacaattccctggacacagacgaccacttcaaaccttcccctcgcccacggagcatgctaaagaaaaagtcccatatggaggaaaaggacggtctcgaggacaaggagacggcccttagcgaagaactagaactccacagcgcccccagttcattgcctacgccaaacggaatccagctggaggctgaaaaaaaagcattctcagagaaccttgatccagaagatagctgcctgaccagcttagcatcttcctccttgaagcaaatactcggcgactcgttttctcctggaagcgagggaaacgcctctggcaaggacccaaatgaggagatcaccgagaaccacaattccctcaagtctgatgaaaacaaggagaatagtttttcagccgaccatgtcactactgccgtggagaagtcaaaggaatcccaggtcaccgccgatgacctggaggaagaaaaggccaaggcagagctcattatggacgacgataggactgttgaccctctgctgtcaaaatcccagtctattctgatatctactagcgccaccgcatctagtaaaaaaacaattgaggatcggaacatcaagaacaagaagagtacaaataacagggcctcatcggcctcagcttcaaaggcaagctag

SEQ ID NO: 32020 - DNA, 96 bp, Artificial Sequence
  derived and/or modified sequence
atgtctgacgaagtcttcagcaccaccctggcttacactaagtcaccaaaggtgacgaaaagaactacgttccaggacgaactgattcgggcatag

SEQ ID NO: 32021 - DNA, 1872 bp, Artificial Sequence
  derived and/or modified sequence
atgagcgatgaagtgttttccaccactctagcatataccaaatctccaaaagtgacgaaacgaacaacatttcaggacgagttgatcagggcaatcacggctaggtcagcgagacagcgaagctctgaatactcagatgatttcgatagtgacgaaatcgtaagcctaggcgactttagcgataccagcgccgacgaaaattctgtcaataagaagatgaatgattttcatatcagcgacgatgaagagaagaacccctccaaactcttattcctgaagacaaacaagtccaatggtaacatcactaaggacgaacccgtttgcgccataaaaaatgaggaagaaatggcacctgacgggtgcgaagatattgtggtaaagagtttcagtgagagtcaaaacaaggacgaagagtttgaaaaggacaaaataaaaatgaaaccaaagccacgcatcttatccatcaagtccacatcaagtgcggagaacaacagtctcgatacagacgatcatttcaaaccttccccgagacccagaagtatgctgaagaagaaatctcacatggaagaaaaggacgggcttgaggataaggagaccgccctgagcgaagaactcgaactgcacagcgcaccaagcagtctgcccactccaaatgggatccagcttgaggccgaaaagaaggcctttagcgaaaatctagatccagaagacagctgcttaacgtccctggccagctcgagcctaaaacaaattctgggcgacagtttctcccccggttctgaaggaaacgcatcgggcaaagcagatcatgtcacaactgctgtcgagaaaagcaaagaatcccaggtgacggctgacgacctagaagaagagaaagcaaaggctgaattgattatggacgatgacaggaccgtagacccccttctgagtaagtctcagagcattctgatctccactagcgccactgcgagttctaagaagacaatcgaagatcgcaacattaagaacaagaagagcacaaataatcgggcttcctcagccagtgccagactcatgacatctgaatttctgaaaaaatcatcatccaagcgacgcactccttcaactactacctcctcccactatctgggcactctaaaagtgctcgaccaaaaaccctcccagaaacaaagcattgaacccgatagagcagataacattcgtgccgccgtctatcaggaatggctcgaaaagaaaaatgtgtacctgcacgagatgcatcgtatcaagagaatagaatccgaaaacctgcgtatccagaatgaacagaaaaaagccgccaagcgagaagaagccctggcgagtttcgaggcatggaaggcgatgaaggagaaggaagccaagaaaattgccgcaaaaaaaagattggaggagaaaaacaagaagaagactgaagaggagaatgctgcacgaaaaggggaggcattgcaagccttcgagaagtggaaggagaaaaagatggagtacctcaaagaaaaaaacaggaaggaacgagagtacgagcgggctaagaagcagaaggaagaagagactgtcgctgagaaaaagaaagacaacctcacagcagtggagaaatggaacgagaaaaaagaggcattcttcaagcagaaggaaaaagaaaagataaacgagaagcggaaggaggagctgaaacgcgcagagaaaaaagataaagacaagcaggctattaatgaatatgagaagtggctggaaaacaaagaaaagcaggaaagaatcgagagaaagcagaagaagcggcactcatttctcgaaagcgaggcattacctccttggagcccaccttcccgcaccgtatttgctaaagtgttttag

SEQ ID NO: 32022 - DNA, 1944 bp, Artificial Sequence
  derived and/or modified sequence
atgtctgatgaggtgttcagcaccaccctggcctacaccaagagccccaaggtgaccaagaggaccaccttccaggatgagctgatccgggccatcacagcccggagcgcccggcagaggagcagcgagtacagtgatgactttgacagtgatgaaattgtgtccctgggggacttcagtgacaccagcgcagatgagaacagcgtgaacaagaagatgaatgacttccacatcagtgatgatgaggagaagaaccccagcaagctgctcttcctgaagaccaacaagagcaatggaaacatcaccaaggatgagcctgtgtgtgccatcaagaatgaggaggagatggccccagatggctgtgaggacatcgtggtgaagagcttcagcgagagccagaacaaggatgaggagtttgagaaggacaagatcaagatgaagcccaagccccgcatcctgagcatcaagagcaccagcagcgctgagaacaacagcctggacacagatgaccacttcaagcccagcccccggcccaggtccatgctgaagaagaagagccacatggaggagaaggatggcctggaggacaaggagacagccctgtctgaggagctggagctgcacagcgcccccagcagcctgcccacccccaacggcatccagctggaggccgagaagaaggccttcagcgagaacctggaccctgaggacagctgcctgaccagcctggccagcagcagcctgaagcagatcctgggggacagcttcagccctggcagcgagggcaatgccagcggcaaggaccccaatgaggagatcacagagaaccacaacagcctgaagagtgatgagaacaaggaaaattccttctctgctgaccacgtgaccacagctgtggagaagagcaaggagagccaggtgacagcagatgacctggaggaggagaaggccaaggccgagctgatcatggatgatgacagaacagtggaccccctgctgagcaagagccagagcatcctgatcagcaccagcgccacagccagcagcaagaagaccatcgaggacaggaacatcaagaacaagaagagcaccaacaacagagccagcagcgccagcgcccggctgatgaccagcgagttcctgaagaagagcagcagcaagaggaggacccccagcaccaccaccagcagccactacctgggcaccctgaaggtgctggaccagaagcccagccagaagcagagcattgaaccagacagagctgacaacatccgggctgctgtgtaccaggagtggctggagaagaagaatgtgtacctgcacgagatgcaccgcatcaagagaattgaaagtgagaacctgcgcatccagaatgagcagaagaaggccgccaagcgggaggaggccctggccagctttgaggcctggaaggccatgaaggagaaggaggccaagaagattgctgccaagaagaggctggaggagaagaacaagaagaagacagaggaggagaatgctgccaggaaaggagaggccctgcaggcctttgagaagtggaaggagaagaagatggagtacctgaaggagaagaacaggaaggagcgggagtatgagcgggccaagaagcagaaggaggaggagaccgtggccgagaagaagaaggacaacctgacagctgtggagaagtggaatgagaagaaggaggccttcttcaagcagaaggagaaggagaagatcaatgagaagaggaaggaggagctgaagagagctgagaagaaggacaaggacaagcaggccatcaatgaatatgagaagtggctggagaacaaggagaagcaggagcgcatcgagaggaagcagaagaagaggcacagcttcctggagagcgaggccctgcccccctggagcccccccagcaggacagtgtttgccaaggtgttctag

SEQ ID NO: 32023 - DNA, 1134 bp, Artificial Sequence
  derived and/or modified sequence
atgtctgatgaggtgttcagcaccaccctggcctacaccaagagccccaaggtgaccaagaggaccaccttccaggatgagctgatccgggccatcacagcccggagcgcccggcagaggagcagcgagtacagtgatgactttgacagtgatgaaattgtgtccctgggggacttcagtgacaccagcgcagatgagaacagcgtgaacaagaagatgaatgacttccacatcagtgatgatgaggagaagaaccccagcaagctgctcttcctgaagaccaacaagagcaatggaaacatcaccaaggatgagcctgtgtgtgccatcaagaatgaggaggagatggccccagatggctgtgaggacatcgtggtgaagagcttcagcgagagccagaacaaggatgaggagtttgagaaggacaagatcaagatgaagcccaagccccgcatcctgagcatcaagagcaccagcagcgctgagaacaacagcctggacacagatgaccacttcaagcccagcccccggcccaggtccatgctgaagaagaagagccacatggaggagaaggatggcctggaggacaaggagacagccctgtctgaggagctggagctgcacagcgcccccagcagcctgcccacccccaacggcatccagctggaggccgagaagaaggccttcagcgagaacctggaccctgaggacagctgcctgaccagcctggccagcagcagcctgaagcagatcctgggggacagcttcagccctggcagcgagggcaatgccagcggcaaggaccccaatgaggagatcacagagaaccacaacagcctgaagagtgatgagaacaaggaaaattccttctctgctgaccacgtgaccacagctgtggagaagagcaaggagagccaggtgacagcagatgacctggaggaggagaaggccaaggccgagctgatcatggatgatgacagaacagtggaccccctgctgagcaagagccagagcatcctgatcagcaccagcgccacagccagcagcaagaagaccatcgaggacaggaacatcaagaacaagaagagcaccaacaacagagccagcagcgccagcgccagcaaggccagctag

SEQ ID NO: 32024 - DNA, 96 bp, Artificial Sequence
  derived and/or modified sequence
atgtctgatgaggtgttcagcaccaccctggcctacaccaagagccccaaggtgaccaagaggaccaccttccaggatgagctgatccgggcctag

SEQ ID NO: 32025 - DNA, 1872 bp, Artificial Sequence
  derived and/or modified sequence
atgtctgatgaggtgttcagcaccaccctggcctacaccaagagccccaaggtgaccaagaggaccaccttccaggatgagctgatccgggccatcacagcccggagcgcccggcagaggagcagcgagtacagtgatgactttgacagtgatgaaattgtgtccctgggggacttcagtgacaccagcgcagatgagaacagcgtgaacaagaagatgaatgacttccacatcagtgatgatgaggagaagaaccccagcaagctgctcttcctgaagaccaacaagagcaatggaaacatcaccaaggatgagcctgtgtgtgccatcaagaatgaggaggagatggccccagatggctgtgaggacatcgtggtgaagagcttcagcgagagccagaacaaggatgaggagtttgagaaggacaagatcaagatgaagcccaagccccgcatcctgagcatcaagagcaccagcagcgctgagaacaacagcctggacacagatgaccacttcaagcccagcccccggcccaggtccatgctgaagaagaagagccacatggaggagaaggatggcctggaggacaaggagacagccctgtctgaggagctggagctgcacagcgcccccagcagcctgcccacccccaacggcatccagctggaggccgagaagaaggccttcagcgagaacctggaccctgaggacagctgcctgaccagcctggccagcagcagcctgaagcagatcctgggggacagcttcagccctggcagcgagggcaatgccagcggcaaggctgaccacgtgaccacagctgtggagaagagcaaggagagccaggtgacagcagatgacctggaggaggagaaggccaaggccgagctgatcatggatgatgacagaacagtggaccccctgctgagcaagagccagagcatcctgatcagcaccagcgccacagccagcagcaagaagaccatcgaggacaggaacatcaagaacaagaagagcaccaacaacagagccagcagcgccagcgcccggctgatgaccagcgagttcctgaagaagagcagcagcaagaggaggacccccagcaccaccaccagcagccactacctgggcaccctgaaggtgctggaccagaagcccagccagaagcagagcattgaaccagacagagctgacaacatccgggctgctgtgtaccaggagtggctggagaagaagaatgtgtacctgcacgagatgcaccgcatcaagagaattgaaagtgagaacctgcgcatccagaatgagcagaagaaggccgccaagcgggaggaggccctggccagctttgaggcctggaaggccatgaaggagaaggaggccaagaagattgctgccaagaagaggctggaggagaagaacaagaagaagacagaggaggagaatgctgccaggaaaggagaggccctgcaggcctttgagaagtggaaggagaagaagatggagtacctgaaggagaagaacaggaaggagcgggagtatgagcgggccaagaagcagaaggaggaggagaccgtggccgagaagaagaaggacaacctgacagctgtggagaagtggaatgagaagaaggaggccttcttcaagcagaaggagaaggagaagatcaatgagaagaggaaggaggagctgaagagagctgagaagaaggacaaggacaagcaggccatcaatgaatatgagaagtggctggagaacaaggagaagcaggagcgcatcgagaggaagcagaagaagaggcacagcttcctggagagcgaggccctgcccccctggagcccccccagcaggacagtgtttgccaaggtgttctag

SEQ ID NO: 32026 - DNA, 1395 bp, Artificial Sequence
  derived and/or modified sequence
acttccttcgtctgggtggttgccccagcgacacgttgggccgaagagcggtgttgggtacccgagagacccggcggtggggaagtcacttcctcccgaagacgctgtttcctagcaaccgccctccgcctctgttattagcccctcctcctcgctcggtccaggaccggctctgcgggcgccgccaggcccagaccaagctactatcagaagttgaattctaataattagctattttataaaggtaacgagaaaaaatacactatgtctgatgaagtttttagcaccactttggcatatacaaagagtccaaaagttaccaaaagaactactttccaggatgagctaataagagcaattacagctcgctcagccagacaaaggagttctgaatactcagatgactttgacagtgatgagattgtttctttaggtgatttttctgacacttcagcagatgaaaattcagttaataaaaaaatgaatgactttcatatatcagatgatgaagaaaagaatccttcaaaactattgtttttgaaaaccaataaatcaaacggtaacataaccaaagatgagccagtgtgtgccatcaaaaatgaagaggaaatggcacctgatgggtgtgaagacattgttgtaaaatctttctctgaatctcaaaataaggatgaggaatttgaaaaagacaaaataaaaatgaaacctaaacccagaattctttcaattaaaagcacatcttcagcagaaaacaacagccttgacacagatgatcactttaaaccatcacctcggccaaggagtatgttgaaaaagaaaagtcacatggaggagaaggatggactagaagataaagaaactgccctcagtgaagaattggagttacattctgcaccttcttcccttccaacgccgaatggcatacaattagaagctgagaaaaaagcattctctgaaaaccttgatcctgaggattcatgcttaacaagtctagcatcatcatcacttaaacaaattcttggagattctttttcaccaggatctgagggaaacgcatctggaaaagatccaaatgaagaaatcactgaaaaccataattccttgaaatcagatgaaaataaagagaattcattttcagcagaccatgtgactactgcagttgagaaatccaaggaaagtcaagtgactgctgatgaccttgaagaagaaaaggcaaaagcggaactgattatggatgatgacagaacagttgatccactactatctaaatctcagagtatcttaatatctaccagtgcaacagcatcttcaaagaaaacaattgaagatagaaatataaagaataaaaagtcaacaaataatagagcatccagtgcatctgccagcaaagctagt

SEQ ID NO: 32027 - DNA, 1944 bp, Artificial Sequence
  derived and/or modified sequence
atgagcgacgaggtgttcagcaccaccctggcctacaccaagagccctaaagtaacgaagcgcacaaccttccaggacgagttaatccgggctattacagccagaagcgctcggcaacgctctagcgaatactcagatgactttgattccgacgagatagtttccctgggcgatttcagtgacacctctgccgatgaaaactctgtgaataaaaaaatgaacgacttccacatctcagacgacgaggagaagaacccaagtaagctactgttcctgaagacgaacaagagcaacggcaacataacgaaggatgagcctgtatgcgctatcaagaacgaagaagagatggcccccgatggatgcgaagatatcgtggtgaagtccttttccgaatctcagaacaaggacgaagaatttgaaaaggataagatcaagatgaaaccaaagcccaggatcctgtctattaagtccacctcatcagcggaaaataattcattggacactgacgaccacttcaaaccttccccaaggccgagaagtatgctgaaaaagaaaagccacatggaggagaaggacggtttagaagacaaggagaccgccttatcagaagagctcgagctgcactctgcgccttccagccttcctacccctaacggaatccaattggaggctgagaagaaagcattctcagaaaacctagatcccgaagatagttgcttgacatcactggcttcttcctccttgaaacaaattcttggcgattcgttctcgcctgggtccgaaggcaatgcgtctggcaaagaccctaatgaggagataaccgagaaccacaatagcctcaagtcagacgagaacaaagaaaactctttctcagctgatcacgtaacaaccgccgtggaaaaatctaaagaaagtcaggtaacggccgacgatttagaagaggagaaggccaaggctgaacttataatggacgacgacaggacagtagaccccctcttaagtaagtcgcagagcatcttgatctctacgagcgccacagcgagctccaaaaaaacgatagaagatcgtaatatcaagaacaagaaatccacaaacaaccgagcaagtagcgcaagcgcaaggctcatgacttctgaatttctcaagaaatcgagcagtaaacggaggacacctagcactaccaccagtagccattatcttgggaccctgaaagtgctggaccagaaaccctctcagaagcagtccattgagcctgatagagccgacaacatcagggccgcagtgtaccaggagtggctagagaaaaagaatgtttatctccatgagatgcaccgcataaaaaggatagaaagcgagaacttgcgcattcagaatgagcagaagaaggcagccaaacgggaggaagcactggcatcctttgaggcatggaaagctatgaaggagaaagaggccaagaaaattgctgcaaaaaaaaggctggaggagaaaaataaaaagaaaactgaagaggagaacgccgctaggaaaggagaagccttgcaggcttttgagaaatggaaggagaaaaagatggaatatttgaaagaaaagaaccgaaaggagagggagtacgaacgtgccaagaagcagaaagaagaggaaacagtcgcagagaaaaaaaaagataaccttaccgctgtggaaaagtggaatgagaaaaaggaagcatttttcaagcagaaggagaaagagaagattaatgagaaacggaaggaagagttgaagcgggcagagaaaaaggacaaggataagcaggccattaacgaatacgagaagtggctggagaataaggaaaagcaagagcggattgagcgcaagcagaagaagcggcacagctttttagaatctgaagctctcccgccttggtctccaccttccagaactgtgtttgccaaagtgttttag

SEQ ID NO: 32028 - DNA, 1134 bp, Artificial Sequence
  derived and/or modified sequence
atgagcgacgaggtgttcagcaccaccctggcctacaccaagagccctaaggtgacaaagaggactacttttcaagacgaacttatccgggctatcaccgctcggtccgcacgacagcgctcctccgagtactcagatgacttcgatagcgacgaaatcgtgagcctcggtgatttctcagacaccagtgccgatgagaactccgtaaataagaaaatgaacgacttccatattagcgatgacgaggaaaaaaacccgtcaaaactgctcttcctcaagacaaataagagtaatggaaatatcaccaaggatgagcccgtatgtgctataaaaaatgaggaggagatggctcccgatgggtgtgaggacatcgtcgtgaaaagcttttcagaaagccagaacaaggatgaggaatttgagaaggacaaaattaagatgaagccgaagccgcgaatcctgtcaattaaatcgacgtctagcgcggagaacaattccctcgatactgacgatcactttaagcctagtcctagaccacgcagcatgttaaaaaaaaagagccacatggaggaaaaggacggtctggaggacaaagagacagcgctttctgaggaactggagctgcactctgcaccttcaagcctacctaccccaaacggtattcaattggaggcagagaagaaggctttcagcgaaaacctggaccccgaagacagctgcctcacaagcctggcttcaagctccctgaagcaaatattgggggattcattttcacctggatctgaggggaatgcatctgggaaagatcccaatgaggagattaccgaaaaccacaacagcctgaagagcgatgaaaataaggagaacagctttagcgccgatcacgtcacgacagcagtcgaaaagtccaaagagtcccaagtgacagcagacgatctggaggaggagaaagcaaaagctgaattaataatggatgatgacagaacagtggaccccctactctccaagtcccaaagcattctgatctccaccagcgctaccgccagctccaagaagaccattgaagatagaaacattaaaaataagaaatctacgaataatcgagcatcgtcggcgagcgcctcgaaggcctcttag

SEQ ID NO: 32029 - DNA, 96 bp, Artificial Sequence
  derived and/or modified sequence
atgagcgacgaggtgttcagcaccaccctggcctacaccaagagccccaaagttactaagcgcactaccttccaggacgaactcatacgcgcgtag

SEQ ID NO: 32030 - DNA, 1872 bp, Artificial Sequence
  derived and/or modified sequence
atgagcgacgaggtgttcagcaccaccctggcctacaccaagagccctaaggtgacaaaacggaccacatttcaggacgagctgatccgcgctataacggctcgcagcgcaaggcagcgtagctccgagtattctgatgattttgatagtgacgaaatcgtgtccctgggggacttttccgatacgtcagccgacgaaaatagcgtaaataaaaagatgaacgacttccacataagtgatgatgaggaaaagaatccaagtaaactactgtttctcaaaacaaataaatctaatggcaacatcacaaaggatgagccggtgtgcgccatcaaaaatgaggaggagatggcccccgatggctgcgaagacatcgtggtgaagtccttttccgagtctcagaataaggatgaggaattcgagaaggacaaaatcaaaatgaagccaaaacctaggattttgtcgattaaaagtaccagctcagcggagaataatagcctggacaccgacgaccacttcaaaccatctccacgacctcggtctatgctgaagaagaagagtcacatggaggagaaggacggattagaggacaaggagacggccctgagcgaggagctcgaactgcactcagcgccatcatcactcccaacacctaacggtatccagcttgaagcggagaaaaaagccttcagtgaaaatctggaccctgaggatagctgtcttacaagcctcgcaagcagtagtcttaagcagatactaggagattccttttcccccgggtccgagggaaatgcatccggaaaggcggatcatgtgactacagcggtggagaagtctaaagaatcccaggtaacagcagacgaccttgaggaagagaaagcaaaggctgaactgatcatggacgacgaccgcaccgtggatcctctgctgagcaaatcccagtcaatccttatctccacgtctgcaacggccagtagcaagaaaaccattgaggatagaaacatcaaaaataagaagtctactaataatagggcaagcagcgcctccgcacggctcatgacgtccgagttcttaaagaagtcgagtagcaagaggcgaacacccagcactactacttccagccattacctgggaaccctgaaggtgctagatcaaaagccttcacagaaacagagcatagagccagatcgagcagataatataagggcagcagtgtaccaggaatggctggaaaagaaaaacgtatacttacacgagatgcatcggatcaagcgcatagagtcagagaacctgcgcattcagaatgagcagaagaaagccgcaaagagggaggaagccctggcatctttcgaggcgtggaaagccatgaaagagaaagaagccaaaaaaatcgccgcaaaaaagaggttggaggaaaaaaacaaaaagaagaccgaggaagagaatgctgcccgcaagggggaggcacttcaagctttcgagaagtggaaggaaaagaaaatggagtacctaaaagagaagaatcggaaagaacgtgaatatgagagagctaaaaaacaaaaagaagaggagacggtagctgagaagaaaaaggacaatcttaccgccgtggagaaatggaatgaaaagaaggaggcattttttaagcagaaagaaaaagagaaaatcaacgagaaaagaaaggaggagctgaagagagccgagaagaaagacaaggacaaacaggccatcaatgagtacgagaagtggttggaaaacaaggaaaagcaggaacgcatcgaacgcaagcagaaaaagcgacactcatttctggagtccgaagctctaccaccttggtcaccgccttcacgcactgtgtttgccaaggtgttctag

SEQ ID NO: 32031 - DNA, 1944 bp, Artificial Sequence
  derived and/or modified sequence
atgtctgatgaggtgttctcaacgaccctggcttacaccaagtcaccaaaagtgaccaagagaacgaccttccaggacgagttgattagagctataacagccagaagtgctagacaaagaagcagcgagtactctgatgacttcgacagtgacgagattgtgagtcttggcgacttctccgacaccagcgcagacgagaatagtgtgaacaaaaagatgaatgactttcacatcagtgatgacgaggaaaaaaaccccagcaagttgttgttcctgaagacaaacaaaagcaacggaaatatcactaaggacgaacccgtgtgtgccattaagaatgaggaagagatggcacccgacggatgtgaggacattgtggtgaagtccttttcagaatcacagaataaggatgaagaatttgaaaaagataaaataaagatgaagcccaagcctcgcattctgtccattaaatccacgtcctccgctgaaaataactcgttggacacggacgaccatttcaaaccgagcccaaggccacgctcgatgctgaagaagaaatcgcatatggaagagaaagacggtctcgaggacaaagaaacagccttgtccgaagagttggagctgcactctgcaccatcgtccctgcctactcctaatggtattcagttagaagccgagaaaaaagcattttccgaaaatctggatcccgaggactcctgtttgaccagcctggcatccagctcgctgaaacagattctcggcgatagcttcagtcctgggtcagagggcaacgcctcaggtaaagatcctaatgaggagataacggaaaaccataacagcctgaagtcagatgagaacaaagaaaattcattctctgctgaccatgtgacaaccgcagttgagaagagtaaggagtctcaggtcactgccgatgacttggaggaagagaaggccaaagcagagctgattatggacgacgacaggaccgtcgatcccttgctgagcaagtctcagagtatactaatcagcacatccgctactgcttcaagtaagaagacgattgaggataggaacatcaaaaacaaaaagtccacgaacaatagggcctcttctgccagtgccaggctgatgacatctgagtttttgaagaagagctcgagcaagagacggacaccctcaacaacgaccagcagtcactacctagggacactcaaggtgttggaccagaaaccctctcagaagcagagcatcgagcccgatagagcagacaacatacgggcagccgtgtatcaggaatggctagagaagaaaaatgtgtacctgcacgaaatgcaccgtataaaaagaattgagtctgagaatctgaggatccagaacgaacagaaaaaagcagctaagagagaggaggccctggccagcttcgaggcctggaaggctatgaaggaaaaagaggctaaaaagatagccgcaaagaaaaggctggaggaaaaaaataaaaaaaaaacagaggaagagaacgccgcaagaaagggtgaggctttgcaggctttcgaaaagtggaaagaaaagaaaatggaatatctgaaggaaaaaaatcggaaggagagggagtacgagagagctaaaaagcagaaagaagaggaaactgtcgcagaaaagaaaaaggataacctcacggcggtggaaaaatggaacgagaagaaggaggccttctttaaacagaaagagaaagagaagattaatgagaagaggaaggaggaactcaaacgtgctgagaaaaaagataaggacaagcaagcgatcaacgagtacgagaagtggcttgaaaacaaagagaagcaggaacgcattgagcgaaaacagaaaaagcggcatagcttcttggagagtgaggctcttcctccttggtccccaccgtccagaaccgtttttgcgaaggtattctag

SEQ ID NO: 32032 - DNA, 1134 bp, Artificial Sequence
  derived and/or modified sequence
atgtctgacgaggtcttttctactactctggcatatacaaagagccctaaggtgactaagaggactacctttcaggatgaactgattagagcaattaccgctaggtcggctcgccagaggtcttccgaatatagcgatgactttgattccgacgaaattgtaagcctgggagattttagcgacacctctgcagatgaaaatagcgtcaataaaaaaatgaacgactttcacattagtgatgatgaggagaagaatccaagtaagttactgtttctgaaaacaaacaaatctaatggaaacataaccaaagatgagcccgtgtgcgcgatcaagaatgaggaggagatggctccagatggctgtgaggatattgtggtcaagtccttctctgagtctcagaataaggacgaggagttcgaaaaagacaagataaagatgaagcctaaaccccgtatcctatctattaagagcacctcttctgctgagaataacagcctagacacggatgatcactttaaaccttcacctcgcccacgatccatgcttaagaagaagagtcatatggaagagaaagatggactcgaagataaggagacggccctgagtgaagaattggagctgcattccgccccaagtagcttgcccactcccaatgggatccagctggaagccgagaagaaagcatttagcgaaaatttggatccggaggactcctgtctgacatcgctggctagcagctctctaaagcagatcctgggcgacagcttttcccccggttcagagggcaatgcctctgggaaggatcccaacgaggagatcactgagaatcacaattctctcaagagcgatgaaaataaagagaactctttcagcgccgatcatgttacaacagcggtggagaagagcaaagaaagtcaggtgacagccgatgacctcgaggaggagaaggccaaggctgaactgatcatggacgatgacagaaccgtggacccgttgctgtccaagtcacagtcgatactgatttctacgtcggccacagcgtcatccaaaaaaacgatcgaagacagaaacatcaaaaacaaaaaatctaccaataatagagctagtagtgcgtctgccagtaaggcctcctag

SEQ ID NO: 32033 - DNA, 96 bp, Artificial Sequence
  derived and/or modified sequence
atgagcgatgaagtgttctctacaacgttagcatatactaagagcccaaaggttacaaagagaaccacatttcaggacgagctgatccgggcttag

SEQ ID NO: 32034 - DNA, 1872 bp, Artificial Sequence
  derived and/or modified sequence
atgtccgacgaggtcttttctactacactagcctatactaaatcgccgaaggtgacgaagagaacaacattccaggacgaactgatccgcgcaataacagcccgttccgccagacagcggtcgtccgaatacagtgacgatttcgatagcgatgaaattgtctcactcggcgatttctctgacactagcgccgacgagaattctgtgaacaaaaaaatgaacgattttcacatcagcgacgacgaggagaagaaccccagcaaactgctcttccttaagacgaacaagagcaacggcaatatcacaaaagacgagccagtatgtgcaattaagaacgaggaggagatggctccagatggatgcgaggatatagtggtcaagagtttctcagagtcacagaataaggacgaggaattcgaaaaagacaaaatcaaaatgaaacccaaaccaagaatcttgtcaatcaagagcacaagttccgctgagaacaattccttagacacagatgaccattttaagccatcaccaagacctaggagcatgctcaaaaagaagtcacacatggaggagaaagacggattggaggataaagaaacagctctgtctgaggaactggagctgcactctgccccaagcagcttgcctacgcctaacggtatccagctggaagccgaaaagaaagccttcagcgaaaacctcgacccagaagatagctgtctaacgtccttggcatcctctagcttaaaacagattttgggagactccttctcccctggcagcgaaggaaatgcatctggaaaagcggaccatgtgacaacagcggtcgagaagagcaaggagagccaggtgactgctgacgatctcgaggaggaaaaagccaaagccgagttgatcatggatgacgacaggaccgtcgacccgctgctttctaagtcacagtcgatattaatctctacctccgctaccgcttctagcaaaaaaacaatcgaagatcgcaatattaaaaacaagaaatcaacaaacaaccgcgcatcgtcagcctccgcccgtctaatgacatctgagttcctgaaaaagagctcctccaaaaggagaacaccaagcactacaacttcttcacactacctgggcacactgaaggtgctggaccaaaagccctcccagaaacagagcatcgagcccgaccgagccgataacattagagcggctgtatatcaggaatggctggaaaagaaaaacgtttacctccacgagatgcatcggattaaacgcatagaatcagaaaacttgcgaatccagaatgaacaaaaaaaggcagcgaagagagaggaagccttagcatcctttgaggcttggaaggcaatgaaggaaaaggaggcaaaaaaaattgcagccaaaaaaagacttgaggaaaagaacaaaaaaaagaccgaagaggagaacgctgccagaaagggagaagccttgcaggcctttgagaagtggaaggagaaaaagatggagtacctgaaagagaagaatagaaaggagagagaatatgaacgcgctaagaagcagaaagaggaggaaacagtggccgaaaagaaaaaggacaatttgacagctgttgaaaagtggaacgaaaagaaggaggcttttttcaaacagaaggagaaggaaaagatcaatgagaagcgaaaggaggagctgaaaagggcagagaagaaagacaaagacaagcaagccataaatgaatacgaaaaatggctcgaaaacaaagagaaacaagaacgtatcgagcgtaagcaaaagaagcgccactcgttcctggaaagtgaagctttgcctccatggagcccgccaagccggaccgtgttcgctaaagtgttttag

SEQ ID NO: 32035 - DNA, 2044 bp, Artificial Sequence
  derived and/or modified sequence
ttattagcccctcctcctcgctcggtccaggaccggctctgcgggcgccgccaggcccagaccaagctactatcagaagttgaattctaataattagctattttataaaggtaacgagaaaaaatacactatgtctgatgaagtttttagcaccactttggcatatacaaagagtccaaaagttaccaaaagaactactttccaggatgagctaataagagcaattacagctcgctcagccagacaaaggagttctgaatactcagatgactttgacagtgatgagattgtttctttaggtgatttttctgacacttcagcagatgaaaattcagttaataaaaaaatgaatgactttcatatatcagatgatgaagaaaagaatccttcaaaactattgtttttgaaaaccaataaatcaaacggtaacataaccaaagatgagccagtgtgtgccatcaaaaatgaagaggaaatggcacctgatgggtgtgaagacattgttgtaaaatctttctctgaatctcaaaataaggatgaggaatttgaaaaagacaaaataaaaatgaaacctaaacccagaattctttcaattaaaagcacatcttcagcagaaaacaacagccttgacacagatgatcactttaaaccatcacctcggccaaggagtatgttgaaaaagaaaagtcacatggaggagaaggatggactagaagataaagaaactgccctcagtgaagaattggagttacattctgcaccttcttcccttccaacgccgaatggcatacaattagaagctgagaaaaaagcattctctgaaaaccttgatcctgaggattcatgcttaacaagtctagcatcatcatcacttaaacaaattcttggagattctttttcaccaggatctgagggaaacgcatctggaaaagcagaccatgtgactactgcagttgagaaatccaaggaaagtcaagtgactgctgatgaccttgaagaagaaaaggcaaaagcggaactgattatggatgatgacagaacagttgatccactactatctaaatctcagagtatcttaatatctaccagtgcaacagcatcttcaaagaaaacaattgaagatagaaatataaagaataaaaagtcaacaaataatagagcatccagtgcatctgccagattaatgacctctgagtttttgaagaaatctagttctaaaaggagaactccatcgacaactacctcttctcactatttagggactttaaaagtcttggaccaaaaaccttcacagaaacagagcatagaacctgatagagcagataacataagggcagctgtttatcaggagtggttagaaaagaaaaatgtgtatttacatgaaatgcacagaataaaaagaattgaaagtgaaaacttaaggatccaaaatgaacagaaaaaagctgctaaaagagaagaagcattagcatcatttgaggcctggaaggctatgaaagaaaaggaagcaaagaaaatagctgccaaaaagaggcttgaagaaaaaaacaagaagaaaactgaagaagaaaatgctgcaagaaaaggagaagcactacaagcttttgaaaaatggaaagagaaaaagatggaatatcttaaagagaaaaatagaaaggagagagaatatgaaagagcaaagaaacagaaagaggaggaaactgttgccgagaaaaagaaagataatttaactgctgttgagaaatggaatgaaaaaaaggaagcttttttcaagcaaaaggaaaaagaaaaaataaatgagaaaagaaaggaagaactgaaaagagctgagaaaaaagataaagataaacaagctattaatgaatatgaaaaatggctggaaaataaggaaaaacaagaaagaattgaacgaaaacagaagaaacgtcattcctttcttgaaagtgaggcacttcctccgtggagccctccaagcagaactgtgttcgcaaaagtgttttgataattctagttcttacattatttggttatttatcggtttgcc

SEQ ID NO: 32036 - DNA, 7333 bp, Artificial Sequence
  derived and/or modified sequence
acttccttcgtctgggtggttgccccagcgacacgttgggccgaagagcggtgttgggtacccgagagacccggcggtggggaagtcacttcctcccgaagacgctgtttcctagcaaccgccctccgcctctgttattagcccctcctcctcgctcggtccaggaccggctctgcgggcgccgccaggcccagaccaagctactatcagaagttgaattctaataattagctattttataaaggtaacgagaaaaaatacactatgtctgatgaagtttttagcaccactttggcatatacaaagagtccaaaagttaccaaaagaactactttccaggatgagctaataagagcaattacagctcgctcagccagacaaaggagttctgaatactcagatgactttgacagtgatgagattgtttctttaggtgatttttctgacacttcagcagatgaaaattcagttaataaaaaaatgaatgactttcatatatcagatgatgaagaaaagaatccttcaaaactattgtttttgaaaaccaataaatcaaacggtaacataaccaaagatgagccagtgtgtgccatcaaaaatgaagaggaaatggcacctgatgggtgtgaagacattgttgtaaaatctttctctgaatctcaaaataaggatgaggaatttgaaaaagacaaaataaaaatgaaacctaaacccagaattctttcaattaaaagcacatcttcagcagaaaacaacagccttgacacagatgatcactttaaaccatcacctcggccaaggagtatgttgaaaaagaaaagtcacatggaggagaaggatggactagaagataaagaaactgccctcagtgaagaattggagttacattctgcaccttcttcccttccaacgccgaatggcatacaattagaagctgagaaaaaagcattctctgaaaaccttgatcctgaggattcatgcttaacaagtctagcatcatcatcacttaaacaaattcttggagattctttttcaccaggatctgagggaaacgcatctggaaaagatccaaatgaagaaatcactgaaaaccataattccttgaaatcagatgaaaataaagagaattcattttcagcagaccatgtgactactgcagttgagaaatccaaggaaagtcaagtgactgctgatgaccttgaagaagaaaaggcaaaagcggaactgattatggatgatgacagaacagttgatccactactatctaaatctcagagtatcttaatatctaccagtgcaacagcatcttcaaagaaaacaattgaagatagaaatataaagaataaaaagtcaacaaataatagagcatccagtgcatctgccagattaatgacctctgagtttttgaagaaatctagttctaaaaggagaactccatcgacaactacctcttctcactatttagggactttaaaagtcttggaccaaaaaccttcacagaaacagagcatagaacctgatagagcagataacataagggcagctgtttatcaggagtggttagaaaagaaaaatgtgtatttacatgaaatgcacagaataaaaagaattgaaagtgaaaacttaaggatccaaaatgaacagaaaaaagctgctaaaagagaagaagcattagcatcatttgaggcctggaaggctatgaaagaaaaggaagcaaagaaaatagctgccaaaaagaggcttgaagaaaaaaacaagaagaaaactgaagaagaaaatgctgcaagaaaaggagaagcactacaagcttttgaaaaatggaaagagaaaaagatggaatatcttaaagagaaaaatagaaaggagagagaatatgaaagagcaaagaaacagaaagaggaggaaactgttgccgagaaaaagaaagataatttaactgctgttgagaaatggaatgaaaaaaaggaagcttttttcaagcaaaaggaaaaagaaaaaataaatgagaaaagaaaggaagaactgaaaagagctgagaaaaaagataaagataaacaagctattaatgaatatgaaaaatggctggaaaataaggaaaaacaagaaagaattgaacgaaaacagaagaaacgtcattcctttcttgaaagtgaggcacttcctccgtggagccctccaagcagaactgtgttcgcaaaagtgttttgataattctagttcttacattatttggttatttatcggtttgccaatattagccatagatttaaaaccattcaattatttatagttagaggaatatattttaattaaatgccagacactcctgctgacaatgaaagaaatactttggaatgtaatcagtgaaagcatttttttgaactgtagataaactgcctcaaacaaagacctaataatcagattgtttttaccattaagatacataagattttatcatgtcctgataattcttatggtggagtgattcatgatctttttcattaagctctgtatgttatttaagtatatttaattccagtaataaaaaggaaatcatctaggtaccataatgatagaaattattccttttgtggatgattgtgaatctagattcaggtttttaaatgaagggtcgctgggaagtgcgcatatattattccttctgaaactgatgtttagctcaaagcagttgcatttgtactgtgctagttagaattttcatcagttgaggcagtagctcagtagaactctaatcatcaaggctttttatttaagaattttgccttatgttttaatatgagtgtactttatctgttccaggcttatgtgataatcataggtactttataatgagtccacctctgaaatttttctttctgaattctatctcactttattatttcagtgataccaaaagacatcaatgtcacagtagtgatatacttatgtattagttatggaaattccacaggagttcaaggtcattatcactataattattttcctgactaaagccataaaggtgatttaggcaattattgtcatcttagctagtcctgttttatagcttatattcagcagacagctgtatgggaaggtaaatatgttgacaatgtccacaaagcctttatttatttatttatttgatctctgcatgtcctcgtagtaactggtctcatacttgacctggtcatctggtttaagacagaccaagtgtatgctcacggagctgaaatgcattagtcagttgtgcaatgaggagatgatggatgagaatatatagttcctatttattgagcatctaatatataatctctactggacctttacaaatgtatttaacatctttacaacaacttttcagggtaggtgttaccggcttcatcttacatataaaaatactggcgctcagataaaccaagtaacttaccgtccatctggagtgtgcctgagttgagatcaaacgggattcagtacgtctgactgaatctgcctccttctgaaatctctatgctctttttcacacttctctgtagcctcagagactgccaagttctgtcaagacctctgcataatatcaacgttacaaacacgttttaacttttagagcctaaaatcatgtattgttatccaaagatgatctttctctacagaaatagctgcttgttcttagagatggtggaggtcattaaatctataaagtgagataaaaatccataagatttcatgagttactcaggcatcttataactactatcagaatatcagaaaactcagcaagttatgtgacaaaggctttgagatgatcactccagacgttccacatactgagcatcagccttcttgctgcagtgcatgtgcaagataagatgtcataggcagctttgtaagattgtatcagtgctatagacaattaagagaaatttcatagataaaactagaaccctttctatatggccagaactgtaatactttatgaaattgatctgattatcagcaatatgtagtatcagcatggaatttaggacctctcttactcattcctgtgtcccccatagtaccaaaaacagtgcctgccaaaatagattaaaagtgtttattgtattagctgtttagagctgaaaagatatttacaaattccagggaagtaaaaggaaaaaaactgaaaaaggtacagctacttttggggatgtgagatcatggatgtgtatcttatagatttcacattatttatttactttccattattttcttctacattatcatatttagtggctaaccattattacttcttaggttgttgtgagaaccgagttaattaatgtaaactatttgacacataataaggacttaaatgttcattgttgtcattattgatttattaccatgagccctacatttccccattcatgagtgtgcgaacattaacatagatagggttgataatggttatttgacattacacatttttaggaagaagaaatttctgtcttgctggccagtccaggctgtaacactcaaaaaaacaaaacaaaacaaaacaaaacaaaaaaacagaaagatgccttgtattagggccttcctaaaaagaaagctaagtaagtattaatttcttaggattgcttctgaggtaggatgaggtgtttgcatagacccaacaagtcattcacttcaaattttttttgtcttactatgataaataacatattatttcctgtttacagcaacctgcactgaaattaactagttgaataaaatcacctcttctagcacaaataaagctgagttcggggaggtgggtgaaaatacagtactgttgtttacttcctaagatccaagggagagaatcaagcttggtaatattctcttgaatatacatttacctatttaaaaggtatgattttcccatatttccttaggaagtatgtcatgtcaatatagatatttactcattaggtttacattaatttgtattataagggaatgtttaattcaaattaaggacattaaaagtatatagactttcatataaaagttccggttttataaattgcgttgatcacttaaagaatgcagagatctcaaagtaaagaaaacaaattttatgaatattttaaaacattacttaaaacaagtttccttagaaagcacatttgtggataaatttaaatattaatactaaataataaagtagtatacagaatttaaatttcataataatgaagaaagtggtaatgctatttaacttaaaagatgcaatatggcattttagatcaagaggttaaagttttcttaatgaaagaaagtaacgatttatgggataaaaatattccagtggtttgtatttgcttcatacttcaaaagtgttagtccatttattgtttaaagttatattgaaactgatattttcactgctgccaaagcagtacctgacagtagataggtatccacagtcttatgttccttagagttatagaactatgcctctgaaaggggttttaatactttaataaacctggcctaaactgttttatttctaagttgaagaaactgattgtcaagtactttgacttgtccaatctcatacaactaactatggtacatctagagttagatctcagtatcaggggtcccagttgtattctgctcaccattccacaatttcgatattgataaaactttcacactaacttttgaactgtggttattattaatttagttgattcatgtcctcttatttatctccttactcctccactgctgccttcataactgtccaccagatcaaagctatttgggtacctacactttaaagtgaggggaaataatgaagtttcttaaatcctgtgtcatggactaagatacaataaagaaaaggaatttcacaaagtaggggaaattacgtgttagttataatcattcccaagaataaactagtaaaagaaacttagatttccctaatttaatcttgactccgattttgatagtgctatataaaaaggtatttaaacccatatgcttccttttacataaaagaaagatatcaactttcctagtttgcatttacactggctaataggataataaaatgctgtgtaaatgttaaactggaagtttctctgagttatttttactttaaaatttcatgtgattatgccattttgaatatgtatattacatgtaattgtataatgttaactcgggtaggcaaaattcttggtattaaatttaggatgttttaaaaattattaagaagatattaatgtctgctttttgatagcatatattttcatgtaatgtttagtgtattaaaatcaaccattcaagatttattttattgggtgacactattgactgtgttccaaaatgcccatagtgttaggaaatgtggtgtgagttttatttgtgggctaaggataaaataatcatatgctaatataccttttattataaatgactaaaaatttggatataaaactgatgttttactacacaaattacagagagagataatataattatataattattaaataattagaaaatgcaaataagcaaaagtcacccatgttcccagttctcatctcctgaagatagttataactaacatattattttgtactcttcctgttaattagtttctagtgtactttctcctgtagctgaaattaagctgagaaaaaaggaagagatagttcctccctcctctttctctctcccactctgtctctctcctgtgctatctgtgtgtatatacaaatatgtatgcatatatatataatgatgtacataatatatataaaatacaaatactaatgtgcatattttcaaacatacacatattttttattatttgaaataagaatgagtcagactacatatttggtagccagatttttttcactcagtgatatatcatgaacatatttccatgctaatataattttctaataattttagatgctgtaactacaatttcattgttaatgggcaatttgttgctttacaaatggtaaattatatgataaataatatgatcattattcttgtagccaatatcattattagaaatgatggaccgcattaaagctataaaattaaataagaatttataaatgtaaggagttattcagacatcttgtatctagtattacaatatcagaaaactcagcaggttatatgacatatacactttgagatagtcactcagaggttttcacatacaggattaaccttgctgcagtgcgtgtgcaagattaaaaaagatgtcacgggtcactttgtaatgtcatatcgttgctgttgataaataaaggaaatgttataaataaaa

SEQ ID NO: 32037 - DNA, 1944 bp, Artificial Sequence
  derived and/or modified sequence
atgagcgacgaggtgttcagcaccaccctggcctacaccaagagccccaaggtgaccaagagaaccaccttccaggacgagctgatcagagccatcaccgccagaagcgccagacagagaagcagcgagtacagcgacgacttcgacagcgacgagatcgtgagcctgggcgacttcagcgacaccagcgccgacgagaacagcgtgaacaagaagatgaacgacttccacatcagcgacgacgaggagaagaaccccagcaagctgctgttcctgaagaccaacaagagcaacggcaacatcaccaaggacgagcccgtgtgcgccatcaagaacgaggaggagatggcccccgacggctgcgaggacatcgtggtgaagagcttcagcgagagccagaacaaggacgaggagttcgagaaggacaagatcaagatgaagcccaagcccagaatcctgagcatcaagagcaccagcagcgccgagaacaacagcctggacaccgacgaccacttcaagcccagccccagacccagaagcatgctgaagaagaagagccacatggaggagaaggacggcctggaggacaaggagaccgccctgagcgaggagctggagctgcacagcgcccccagcagcctgcccacccccaacggcatccagctggaggccgagaagaaggccttcagcgagaacctggaccccgaggacagctgcctgaccagcctggccagcagcagcctgaagcagatcctgggcgacagcttcagccccggcagcgagggcaacgccagcggcaaggaccccaacgaggagatcaccgagaaccacaacagcctgaagagcgacgagaacaaggagaacagcttcagcgccgaccacgtgaccaccgccgtggagaagagcaaggagagccaggtgaccgccgacgacctggaggaggagaaggccaaggccgagctgatcatggacgacgacagaaccgtggaccccctgctgagcaagagccagagcatcctgatcagcaccagcgccaccgccagcagcaagaagaccatcgaggacagaaacatcaagaacaagaagagcaccaacaacagagccagcagcgccagcgccagactgatgaccagcgagttcctgaagaagagcagcagcaagagaagaacccccagcaccaccaccagcagccactacctgggcaccctgaaggtgctggaccagaagcccagccagaagcagagcatcgagcccgacagagccgacaacatcagagccgccgtgtaccaggagtggctggagaagaagaacgtgtacctgcacgagatgcacagaatcaagagaatcgagagcgagaacctgagaatccagaacgagcagaagaaggccgccaagagagaggaggccctggccagcttcgaggcctggaaggccatgaaggagaaggaggccaagaagatcgccgccaagaagagactggaggagaagaacaagaagaagaccgaggaggagaacgccgccagaaagggcgaggccctgcaggccttcgagaagtggaaggagaagaagatggagtacctgaaggagaagaacagaaaggagagagagtacgagagagccaagaagcagaaggaggaggagaccgtggccgagaagaagaaggacaacctgaccgccgtggagaagtggaacgagaagaaggaggccttcttcaagcagaaggagaaggagaagatcaacgagaagagaaaggaggagctgaagagagccgagaagaaggacaaggacaagcaggccatcaacgagtacgagaagtggctggagaacaaggagaagcaggagagaatcgagagaaagcagaagaagagacacagcttcctggagagcgaggccctgcccccctggagcccccccagcagaaccgtgttcgccaaggtgttctag

SEQ ID NO: 32038 - protein, 426 aa, Artificial Sequence
  derived and/or modified sequence
MEAAFGQVAGSACPRRGGEGRDWKAESLADLWPKSSPGDSHRWCKGPGAGPAGPQLREAARASSGLGGGGRHPSRIPAIALQDMLLLKKHTEDISSVYEIRERLGSGAFSEVVLAQERGSAHLVALKCIPKKALRGKEALVENEIAVLRRISHPNIVALEDVHESPSHLYLAMELVTGGELFDRIMERGSYTEKDASHLVGQVLGAVSYLHSLGIVHRDLKPENLLYATPFEDSKIMVSDFGLSKIQAGNMLGTACGTPGYVAPELLEQKPYGKAVDVWALGVISYILLCGYPPFYDESDPELFSQILRASYEFDSPFWDDISESAKDFIRHLLERDPQKRFTCQQALRHLWISGDTAFDRDILGSVSEQIRKNFARTHWKRAFNATSFLRHIRKLGQIPEGEGASEQGMARHSHSGLRAGQPPKW

SEQ ID NO: 32039 - DNA, 1281 bp, Artificial Sequence
  derived and/or modified sequence
atggaagcagcttttgggcaagtcgccgggtccgcttgccctagaagaggcggagagggtagagactggaaggcggagtcccttgccgatctgtggcccaagtcttctcctggagacagccatcggtggtgtaaggggccgggtgccggcccagccggacctcagctgcgggaggccgcccgcgcatccagcggccttggaggaggagggagacatcccagcagaattccagccattgcactgcaagatatgttgttgctcaagaagcatacagaggacatctcctcggtgtacgagatacgggagaggctaggctctggcgcgttctccgaggtcgtgctcgcgcaggagagaggcagtgcccacctggttgcattgaagtgtattcccaagaaagccctgcgaggaaaagaagctctggttgagaacgagatcgcggtgctgcgccgaatcagtcatccaaacatagtggctctggaagatgtccacgagtctcccagtcacctgtacctagccatggagctggtgactggcggcgagttatttgatcggatcatggaaagggggtcctacactgagaaagacgcttcccacttagtcggacaggtactgggtgccgtgtcttacttgcactctcttggaattgtacaccgggatctgaagcccgagaatctgctgtatgctaccccctttgaagactccaaaatcatggtcagcgattttgggctgagcaagatccaggcagggaatatgttgggtacggcttgtggcacacccgggtatgtggcacctgaactgttagagcagaaaccctatggtaaggcggtcgacgtgtgggccctaggagtcatctcatacatcctgctgtgcggctatccaccgttttatgacgaatcagatccggaacttttctcacagatcctgagagcaagctatgagtttgattcacccttctgggacgatatcagtgaatctgctaaggacttcatcaggcacttgctcgagagggatccacagaagcgtttcacctgtcagcaggctctgcggcacctctggatctccggagatactgcttttgacagggacatcttgggttcagtttctgaacagattcggaagaattttgctagaactcattggaaacgggcttttaatgccacatcgtttctgcggcatattagaaagctgggtcagattccagagggtgagggagcatctgagcagggcatggcaaggcacagccactccggtttgagggccggccagccaccgaaatggtag

SEQ ID NO: 32040 - DNA, 1281 bp, Artificial Sequence
  derived and/or modified sequence
atggaggccgccttcggccaggtggccggcagcgcctgccccaggagaggaggagagggccgggactggaaggccgagagcctggccgacctgtggcccaagagcagccctggggacagccaccgctggtgcaagggccctggagctggccctgctggcccccagctgcgggaggccgcccgggccagcagcggcctgggcggcggcggccgccaccccagccgcatcccagccatcgccctgcaggacatgctgctgctgaagaagcacacagaggacatcagctctgtgtatgagatccgggagcggctgggcagcggggccttcagcgaggtggtgctggcccaggagcggggcagcgcccacctggtggccctgaagtgcatccccaagaaggccctgcggggcaaggaggccctggtggagaatgaaattgctgtgctgcggcgcatcagccaccccaacatcgtggccctggaggatgtgcatgagagccccagccacctgtacctggccatggagctggtgactggaggagagctgtttgaccgcatcatggagcggggcagctacacagagaaggatgccagccacctggtgggccaggtgctgggcgctgtgtcctacctgcacagcctgggcatcgtgcaccgggacctgaagccagagaacctgctgtatgccaccccatttgaggacagcaagatcatggtgtctgactttggcctgagcaagatccaggccggcaacatgctgggcacagcctgtggcaccccaggctacgtggcccctgagctgctggagcagaagccctacggcaaggctgtggatgtgtgggccctgggcgtcatctcctacatcctgctgtgtggctacccacccttctatgatgaaagtgaccctgagctgttcagccagatcctgcgggccagctatgaatttgacagccccttctgggatgacatcagcgagagcgccaaggacttcatccgccacctgctggagcgggacccccagaagcgcttcacctgccagcaggccctgcggcacctgtggatcagcggggacacagcctttgaccgggacatcctgggctctgtgtctgagcagatcaggaagaactttgcccggacccactggaagagggccttcaatgccaccagcttcctgcggcacatcaggaagctgggccagatccctgagggggagggcgccagcgagcagggcatggcccggcacagccacagcggcctgcgggccggccagccccccaagtggtag

SEQ ID NO: 32041 - DNA, 1281 bp, Artificial Sequence
  derived and/or modified sequence
atggaggccgccttcggccaggtggccggcagcgcctgcccccggcgtggtggtgaaggtcgcgactggaaggccgaatccctggctgatctgtggccaaaatcctcaccaggcgactctcacaggtggtgcaaaggacctggtgccgggccagcaggtcctcagctgagagaggccgcacgtgcgtcttctggccttggtgggggaggaaggcacccaagccgcatcccagcgattgccctgcaggacatgctccttctcaagaagcacacggaagatatcagcagcgtttatgagatccgggagcggctcggttctggagcattttcagaagtggtgctggctcaggaaaggggaagtgctcaccttgtggcgctcaagtgtatacctaaaaaggccctccgggggaaggaagccctcgtcgagaacgaaatagcagttctgagaagaattagccaccctaacattgtggccttggaagatgttcacgaaagtccgtctcacctttacctcgccatggagcttgtgacggggggtgagctcttcgataggattatggaaagaggctcctatacggaaaaggacgcaagccatctcgtcggtcaggtcctgggcgcagtatcgtacctacattctcttggaatagtccatcgtgatctgaagcccgaaaatctcctgtatgcaacgccttttgaggatagtaaaataatggtgtccgactttggcttgagcaaaatccaggctgggaatatgctcggcacggcctgtggcacccccgggtatgtggcccccgagctactggagcagaagccatacggaaaggcagtcgatgtgtgggcattgggggtaatttcttacattcttctctgtggatacccacccttctacgacgagagcgatccagaactgttttctcagatactgcgcgcctcgtatgagtttgacagtcccttctgggatgatatcagcgagtccgccaaggatttcatcaggcatttactcgaaagggaccctcaaaagcggtttacttgtcagcaggccttgagacatctatggatctctggcgacaccgcatttgatcgcgacatactgggatccgtttcggaacagattcgaaaaaactttgccaggacacattggaaacgcgctttcaacgccacctccttcctcagacacatccgtaagctcggccagatccccgagggggagggggcttccgagcaggggatggctcggcattcacactcaggcctgcgggccggacaacccccaaagtggtag

SEQ ID NO: 32042 - DNA, 1939 bp, Artificial Sequence
  derived and/or modified sequence
gacttggattgacatagagagctgcaggagggtgacatgatctcaataaaaggaatgctctggctgctgggtagagaagaaagcgagggtgagggattaatggtggagccagagggagcccagtgagtgccgggagcccagggtggcagagctgtggtgcagggttgcagggtcctggagctaggcatggaggctgctttcgggcaagtggccgggtcagcctgtcctcggagaggcggtgaaggcagagactggaaggcagagagccttgccgacctgtggccgaagagctctccgggagacagccaccggtggtgcaaaggccctggggccggcccagccgggccgcagctccgggaggcggcgcgagcgagcagtgggctgggcggtggcggccggcacccgagccggatcccggcgattgccttacaagacatgctgctgctgaagaaacacacggaggacatcagcagcgtctacgagatccgcgagaggctcggctcgggtgccttctccgaggtggtgctggcccaggagcggggctccgcacacctcgtggccctcaagtgcatccccaagaaggccctccggggcaaggaggccctggtggagaacgagatcgcagtgctccgtaggatcagtcaccccaacatcgtcgctctggaggatgtccacgagagcccttcccacctctacctggccatggaactggtgacgggtggcgagctgtttgaccgcatcatggagcgcggctcctacacagagaaggatgccagccatctggtgggtcaggtccttggcgccgtctcctacctgcacagcctggggatcgtgcaccgggacctcaagcccgaaaacctcctgtatgccacgccctttgaggactcgaagatcatggtctctgactttggactctccaaaatccaggctgggaacatgctaggcaccgcctgtgggacccctggatatgccgagccagtgacactgagcggcatggctgcgtgtgtgcctgtgcgtgcgtctgtctgtctctggcccccagccccagagctcttggagcagaaaccctacgggaaggccgtagatgtgtgggccctgggcgtcatctcctacatcctgctgtgtgggtacccccccttctacgacgagagcgaccctgagctcttcagccagatcctgagggccagctatgagtttgactctcctttctgggatgacatctcagaatcagccaaagacttcatccggcaccttctggagcgagacccccagaagaggttcacctgccaacaggccttgcggcacctttggatctctggggacacagccttcgacagggacatcttaggctctgtcagtgagcagatccggaagaactttgctcggacacactggaagcgagccttcaatgccacctcgttcctgcgccacatccggaagctggggcagatcccagagggcgagggggcctctgagcagggcatggcccgccacagccactcaggcctccgtgctggccagccccccaagtggtgatgcccaggcagatgccgaggccaagtggactgacccccagatttccttcccttggatgctttcggtcccctcccccaacccctccccctggggctggcctctgctggattttgagatttgagggtgtggcgcatggcgctggggttggaatggggcacccccaagtctgtccccaggctctgccctgcctgggggcagtggctcccctcccctgttgcctctcccgcccctgccccccccgccccgccaaaagccgagggggtgctggcaggcgggcctcaggggctgtctttcctgcacggctgttgtgtgcttcgctgagtgtgggtggtcctgcttgtgtcatggtcatggccttccagccccctccagttttccccaaaccaataaagaaagatacagc

SEQ ID NO: 32043 - DNA, 448 bp, Artificial Sequence
  derived and/or modified sequence
tctccccgctcctggcaggctgcagccgtctcctcccggtgctccctccttccttgagctctctccaccgctgcccactgggggctacagcttcccggctaccctggaagctggaggccgggaccagctcttcagggtcttctctggcccagcctttgactgaagctggtctggagacaggggcattagagaagtgactcatagatggcctaaagaagcggggccactcaaggacccaggacagagggaagagggccaacccagctggaccacaggcaaaccccattgcctttgagagaaagaagaggacccggtgaaacatgctgctgctgaagaaacacacggaggacatcagcagcgtctacgagatccgcgagaggctcggctcgggtgccttctccgaggtggtgctggcccaggagcggggctccgcacacctcgtggccct

SEQ ID NO: 32044 - DNA, 311 bp, Artificial Sequence
  derived and/or modified sequence
cggatgtgtggaggcagagaggcagcatccaggcgctggtcgccttcgggacatgctgctgctgaagaaacacacggaggacatcagcagcgtctacgagatccgcgagaggctcggctcgggtgccttctccgaggtggtgctggcccaggagcggggctccgcacacctcgtggccctcaagtgcatccccaagaaggccctccggggcaaggaggccctggtggagaacgagatcgcagtgctccgtaggatcagtcaccccaacatcgtcgctctggaggatgtccacgagagcccttcccacctct

SEQ ID NO: 32045 - DNA, 1585 bp, Artificial Sequence
  derived and/or modified sequence
gacttggattgacatagagagctgcaggagggtgacatgatctcaataaaaggaatgctctggctgctgggtagagaagaaagcgagggtgagggattaatggtggagccagagggagcccagtgagtgccgggagcccagggtggcagagctgtggtgcagggttgcagggtcctggagctaggcatggaggctgctttcgggcaagtggccgggtcagcctgtcctcggagaggcggtgaaggcagagactggaaggcagagagccttgccgacctgtggccgaagagctctccgggagacagccaccggtggtgcaaaggccctggggccggcccagccgggccgcagctccgggaggcggcgcgagcgagcagtgggctgggcggtggcggccggcacccgagccggatcccggcgattgccttacaagacatgctgctgctgaagaaacacacggaggacatcagcagcgtctacgagatccgcgagaggctcggctcgggtgccttctccgaggtggtgctggcccaggagcggggctccgcacacctcgtggccctcaagtgcatccccaagaaggccctccggggcaaggaggccctggtggagaacgagatcgcagtgctccgtaggatcagtcaccccaacatcgtcgctctggaggatgtccacgagagcccttcccacctctacctggccatggaactggtgacgggtggcgagctgtttgaccgcatcatggagcgcggctcctacacagagaaggatgccagccatctggtgggtcaggtccttggcgccgtctcctacctgcacagcctggggatcgtgcaccgggacctcaagcccgaaaacctcctgtatgccacgccctttgaggactcgaagatcatggtctctgactttggactctccaaaatccaggctgggaacatgctaggcaccgcctgtgggacccctggatatgtggccccagagctcttggagcagaaaccctacgggaaggccgtagatgtgtgggccctgggcgtcatctcctacatcctgctgtgtgggtacccccccttctacgacgagagcgaccctgagctcttcagccagatcctgagggccagctatgagtttgactctcctttctgggatgacatctcagaatcagccaaagacttcatccggcaccttctggagcgagacccccagaagaggttcacctgccaacaggccttgcggcacctttggatctctggggacacagccttcgacagggacatcttaggctctgtcagtgagcagatccggaagaactttgctcggacacactggaagcgagccttcaatgccacctcgttcctgcgccacatccggaagctggggcagatcccagagggcgagggggcctctgagcagggcatggcccgccacagccactcaggcctccgtgctggccagccccccaagtggtgatgcccaggcagatgccgaggccaagtggactgacccccagatttccttcccttggatgctttcggtcccctcccccaacccctccccctggggctggcctctgctggattttgagatt

SEQ ID NO: 32046 - DNA, 1281 bp, Artificial Sequence
  derived and/or modified sequence
atggaggcagctttcggtcaggtggctggttccgcttgtccccgacggggaggagagggcagggactggaaggcagaaagcttggcagatttatggcccaagtcttcacccggagattctcaccgttggtgtaaggggccaggagctggaccagccggaccccagttgcgggaagctgcccgagcgtcgtcggggttgggcggtggaggtcgtcatccctctcgtatacccgctattgctctccaggatatgttgcttcttaagaaacacactgaggacatcagcagtgtgtacgagatccgcgagagactgggaagtggcgcattctctgaagtggtgctggcgcaggagcgcggttccgcacatctggtagcactgaaatgcattccaaaaaaggctttacgcggtaaggaggccctcgtggaaaatgagattgctgttctccgcaggatctctcatccaaacatcgtcgcccttgaggatgtccatgagtctccctcacacttgtacctcgctatggagctggtgaccggaggcgagctgtttgatagaatcatggagcgtggatcttacaccgagaaagatgcttcacacctcgttggacaggtcctgggggcagtgagttatcttcacagcctcggtatcgtgcaccgcgacctaaaaccggagaatttgctttacgccacaccctttgaagactcgaagattatggtttcggacttcggcttgagtaagattcaggcagggaatatgctgggaactgcatgtggcaccccgggatatgtagccccagagctgctggaacagaagccttatggtaaggccgtggacgtctgggccctgggggtgatcagctatattctcttatgtggataccctccattttacgacgaatccgaccccgagctgtttagccagatcctgagagctagttacgaattcgatagtccattctgggacgatatttccgaaagcgctaaggatttcattagacaccttctcgagcgcgatccgcaaaagcgctttacatgtcagcaggccttgaggcacctgtggatatccggagacacagcctttgatcgggacatattgggctccgtgagtgagcaaatcaggaagaatttcgccagaacccactggaaacgtgctttcaacgccaccagctttctgcgccacatccgcaagctgggccaaattcccgaaggggagggcgcatccgagcagggaatggcacggcatagccactctggcttgcgagcaggccagcccccaaaatggtag

SEQ ID NO: 32047 - DNA, 1281 bp, Artificial Sequence
  derived and/or modified sequence
atggaggccgccttcggccaggtggccggcagcgcctgccccagaagaggcggcgagggcagagactggaaggccgagagcctggccgacctgtggcccaagagcagccccggcgacagccacagatggtgcaagggccccggcgccggccccgccggcccccagctgagagaggccgccagagccagcagcggcctgggcggcggcggcagacaccccagcagaatccccgccatcgccctgcaggacatgctgctgctgaagaagcacaccgaggacatcagcagcgtgtacgagatcagagagagactgggcagcggcgccttcagcgaggtggtgctggcccaggagagaggcagcgcccacctggtggccctgaagtgcatccccaagaaggccctgagaggcaaggaggccctggtggagaacgagatcgccgtgctgagaagaatcagccaccccaacatcgtggccctggaggacgtgcacgagagccccagccacctgtacctggccatggagctggtgaccggcggcgagctgttcgacagaatcatggagagaggcagctacaccgagaaggacgccagccacctggtgggccaggtgctgggcgccgtgagctacctgcacagcctgggcatcgtgcacagagacctgaagcccgagaacctgctgtacgccacccccttcgaggacagcaagatcatggtgagcgacttcggcctgagcaagatccaggccggcaacatgctgggcaccgcctgcggcacccccggctacgtggcccccgagctgctggagcagaagccctacggcaaggccgtggacgtgtgggccctgggcgtgatcagctacatcctgctgtgcggctacccccccttctacgacgagagcgaccccgagctgttcagccagatcctgagagccagctacgagttcgacagccccttctgggacgacatcagcgagagcgccaaggacttcatcagacacctgctggagagagacccccagaagagattcacctgccagcaggccctgagacacctgtggatcagcggcgacaccgccttcgacagagacatcctgggcagcgtgagcgagcagatcagaaagaacttcgccagaacccactggaagagagccttcaacgccaccagcttcctgagacacatcagaaagctgggccagatccccgagggcgagggcgccagcgagcagggcatggccagacacagccacagcggcctgagagccggccagccccccaagtggtag

SEQ ID NO: 32048 - protein, 415 aa, Artificial Sequence
  derived and/or modified sequence
MFADLDYDIEEDKLGIPTVPGKVTLQKDAQNLIGISIGGGAQYCPCLYIVQVFDNTPAALDGTVAAGDEITGVNGRSIKGKTKVEVAKMIQEVKGEVTIHYNKLQADPKQGMSLDIVLKKVKHRLVENMSSGTADALGLSRAILCNDGLVKRLEELERTAELYKGMTEHTKNLLRAFYELSQTHRAFGDVFSVIGVREPQPAASEAFVKFADAHRSIEKFGIRLLKTIKPMLTDLNTYLNKAIPDTRLTIKKYLDVKFEYLSYCLKVKEMDDEEYSCIALGEPLYRVSTGNYEYRLILRCRQEARARFSQMRKDVLEKMELLDQKHVQDIVFQLQRLVSTMSKYYNDCYAVLRDADVFPIEVDLAHTTLAYGLNQEEFTDGEEEEEEEDTAAGEPSRDTRGAAGPLDKGGSWCDS

SEQ ID NO: 32049 - protein, 229 aa, Artificial Sequence
  derived and/or modified sequence
MFADLDYDIEEDKLGIPTVPGKVTLQKDAQNLIGISIGGGAQYCPCLYIVQVFDNTPAALDGTVAAGDEITGVNGRSIKGKTKVEVAKMIQEVKGEVTIHYNKLQADPKQGMSLDIVLKKVKHRLVENMSSGTADALGLSRAILCNDGLVKRLEELERTAELYKGMTEHTKNLLRAFYELSQTHRAFGDVFSVIGVREPQPAASEAFVKFADAHRSIEKFGIRLLKTIK

SEQ ID NO: 32050 - protein, 134 aa, Artificial Sequence
  derived and/or modified sequence
MFADLDYDIEEDKLGIPTVPGKVTLQKDAQNLIGISIGGGAQYCPCLYIVQVFDNTPAALDGTVAAGDEITGVNGRSIKGKTKVEVAKMIQEVKGEVTIHYNKLQADPKQGMSLDIVLKKVKHRLVENMSSGTA

SEQ ID NO: 32051 - protein, 130 aa, Artificial Sequence
  derived and/or modified sequence
MFADLDYDIEEDKLGIPTVPGKVTLQKDAQNLIGISIGGGAQYCPCLYIVQVFDNTPAALDGTVAAGDEITGVNGRSIKGKTKVEVAKMIQEVKGEVTIHYNKLQADPKQGMSLDIGQRLGFHGPGPHSS

SEQ ID NO: 32052 - protein, 38 aa, Artificial Sequence
  derived and/or modified sequence
MFADLDYDIEEDKLGIPTVPGKVTLQKDAQNLIGISIG

SEQ ID NO: 32053 - DNA, 1248 bp, Artificial Sequence
  derived and/or modified sequence
atgttcgctgacctggactatgatatcgaggaggataaactgggcatccctacagtaccagggaaagttacacttcagaaggatgctcagaacctgatcgggatatccataggtgggggcgctcaatattgtccatgcctttacatcgttcaagttttcgacaacactccggccgccctcgacggaacagttgccgctggagatgagataaccggagtcaatggccggtccatcaaagggaagacaaaggtcgaggtcgctaagatgatccaggaggtgaagggtgaagtcactattcactacaataaactccaggctgaccccaagcagggcatgtccctcgacattgtgctgaagaaggttaaacataggctcgtagagaatatgagttccgggactgccgatgctcttggtttaagccgtgcaatcctttgcaatgacggcctggtgaaaagactagaggagcttgagagaactgctgagctttacaaagggatgacagagcatacaaagaatctgctcagagcattctacgagctaagccagacccaccgtgctttcggggacgtcttctctgtgataggcgtgcgagaaccccagcccgcagctagtgaagccttcgtcaagtttgccgacgctcataggagcatcgaaaaattcggtatacgactcctcaaaaccatcaaaccgatgctaactgaccttaacacttatttaaataaggccatacctgatacaagattgactattaagaagtacctggacgtaaagttcgaatacctttcctattgtcttaaggtcaaagaaatggatgacgaggaatactcgtgtattgctctgggggaaccgctttaccgcgtgagtaccggaaactatgagtatagacttattctacggtgccgtcaggaagcaagggctagatttagtcagatgaggaaagacgtcctagagaaaatggagctccttgatcaaaaacacgtgcaggatatagtatttcagctccagagactggtgagtaccatgtccaagtactataacgattgctatgcggtgctccgagatgctgacgtgttcccaatcgaagtcgatttggcgcacactactttggcctatggcctgaaccaggaggaattcaccgatggggaagaggaagaggaggaggaggacacagctgcaggtgagccaagtcgcgatacacggggagccgctggacctctggataaaggcgggtcttggtgtgatagctag

SEQ ID NO: 32054 - DNA, 1248 bp, Artificial Sequence
  derived and/or modified sequence
atgttcgcggatttggattatgatattgaggaggacaaattagggattcccacagtgcctggtaaggtgaccctgcaaaaagatgcacagaatctcatcggcatctccataggaggcggggcgcaatactgtccatgcctgtacattgtgcaagtctttgataacacccccgcagcactggacggtactgtcgcagccggggacgagatcactggtgtcaacggccggtcaattaagggcaaaacaaaagtggaagtcgcaaaaatgattcaagaggtgaagggtgaggtgaccatccattacaataaactgcaagccgatcccaagcaaggaatgtctcttgacattgtccttaagaaggtgaagcaccggctcgttgaaaacatgagctcaggcacggccgatgcactcggtcttagtcgggcaattctgtgcaacgacggacttgtgaaacggcttgaggaattggagcggaccgctgagctgtacaaggggatgacagaacatacaaaaaacctgctgagagctttctatgaacttagccaaacacaccgggctttcggggatgtgttctcagtgattggagtgagagagccacagccagctgctagcgaagctttcgttaagtttgctgatgctcatcgatcaatcgagaagttcggtatcagactccttaaaacaatcaagcccatgctcactgatctaaacacgtacctgaacaaggctatacccgatactcggcttacaatcaagaaatacctggatgtcaagtttgagtatctgtcctattgcctgaaagtcaaggagatggacgacgaggagtattcttgtattgccttaggcgagcccctgtacagagtaagcaccgggaactatgaatacagactgattttgcggtgtcggcaggaagctagggctagattttctcaaatgcgaaaagacgtactggaaaagatggaattgcttgatcagaaacacgtccaggatatagtcttccagctgcagcgtttagtatccacaatgagtaagtactacaatgactgctacgccgtgctacgcgacgctgacgtctttccaatcgaggtagatttggctcacaccaccctggcttatggtctgaaccaggaagagtttaccgacggtgaggaggaagaagaagaagaggacacagcggccggagagccaagccgggacactagaggggccgctggccctctggacaagggcggctcctggtgcgattcatag

SEQ ID NO: 32055 - DNA, 690 bp, Artificial Sequence
  derived and/or modified sequence
atgtttgccgatctcgactacgacattgaggaagataaacttggcatccccacggtacctggcaaagtgacattacaaaaggacgctcagaaccttattggaatctcaatcggcggaggcgcccaatattgtccatgtctgtacatcgtgcaggtgtttgacaacacaccggctgcattggatggaactgtagctgctggcgacgagataaccggagtgaacggtagatccatcaagggaaagaccaaggtggaagtagcaaagatgattcaggaggtcaaaggcgaggttactatccattataacaaactgcaggccgatcccaagcagggtatgtcgctggacatcgttctgaaaaaagtgaaacacaggctcgtcgagaacatgtctagcgggactgctgatgctctgggacttagcagagcaatactatgtaatgatgggcttgttaaaaggctggaggaactggagaggacagccgagctttacaagggaatgacagaacacactaaaaacctgcttcgggctttttatgaactttcacagactcatagggcatttggcgatgtcttcagtgtaatcggtgttcgagagccacaaccagcggcttctgaagctttcgtgaagtttgctgatgcccacaggtcgattgaaaaatttggaatcaggcttctcaaaacgataaagtag

SEQ ID NO: 32056 - DNA, 1248 bp, Artificial Sequence
  derived and/or modified sequence
atgtttgctgacctggactatgacatcgaggaggacaagctgggcatccccaccgtgcctgggaaggtgaccctgcagaaggatgcccagaacctgattggcatcagcattggaggaggagcccagtactgcccctgcctgtacatcgtgcaggtgtttgacaacaccccagctgccctggatggcaccgtggccgctggagatgagatcactggagtgaatggccgcagcatcaagggcaagaccaaggtggaggtggccaagatgatccaggaggtgaagggggaggtgaccatccactacaacaagctgcaggccgaccccaagcagggcatgagcctggacatcgtgctgaagaaggtgaagcaccggctggtggagaacatgagcagcggcacagcagatgccctgggcctgagccgggccatcctgtgcaatgatggcctggtgaagaggctggaggagctggagaggacagctgagctgtacaagggcatgacagagcacaccaagaacctgctgcgggccttctatgagctgagccagacccaccgggcctttggagatgtgttcagcgtcatcggcgtgcgggagccccagcctgctgccagcgaggcctttgtgaagtttgctgatgcccacaggagcattgagaagtttggcatccggctgctgaagaccatcaagcccatgctgacagacctgaacacctacctgaacaaggccatcccagacacccggctgaccatcaagaagtacctggatgtgaagtttgagtacctgagctactgcctgaaggtgaaggagatggatgatgaggagtacagctgcatcgccctgggggagcccctgtacagagtgtccactggaaattatgagtaccgcctcatcctgcgctgccggcaggaggcccgggcccgcttcagccagatgaggaaggatgtgctggagaagatggagctgctggaccagaagcacgtgcaggacatcgtgttccagctgcagaggctggtgtccaccatgagcaagtactacaatgactgctatgctgtgctgagagatgctgatgtgttccccatcgaggtggacctggcccacaccaccctggcctacggcctgaaccaggaggagttcacagatggagaggaggaggaggaggaggaggacacagctgctggggagcccagccgggacaccagaggagctgctggccccctggacaagggcggctcctggtgtgacagctag

SEQ ID NO: 32057 - DNA, 690 bp, Artificial Sequence
  derived and/or modified sequence
atgtttgctgacctggactatgacatcgaggaggacaagctgggcatccccaccgtgcctgggaaggtgaccctgcagaaggatgcccagaacctgattggcatcagcattggaggaggagcccagtactgcccctgcctgtacatcgtgcaggtgtttgacaacaccccagctgccctggatggcaccgtggccgctggagatgagatcactggagtgaatggccgcagcatcaagggcaagaccaaggtggaggtggccaagatgatccaggaggtgaagggggaggtgaccatccactacaacaagctgcaggccgaccccaagcagggcatgagcctggacatcgtgctgaagaaggtgaagcaccggctggtggagaacatgagcagcggcacagcagatgccctgggcctgagccgggccatcctgtgcaatgatggcctggtgaagaggctggaggagctggagaggacagctgagctgtacaagggcatgacagagcacaccaagaacctgctgcgggccttctatgagctgagccagacccaccgggcctttggagatgtgttcagcgtcatcggcgtgcgggagccccagcctgctgccagcgaggcctttgtgaagtttgctgatgcccacaggagcattgagaagtttggcatccggctgctgaagaccatcaagtag

SEQ ID NO: 32058 - DNA, 1248 bp, Artificial Sequence
  derived and/or modified sequence
atgttcgccgacctggactacgacatcgaggaggacaagctgggcattcctacggtacccgggaaagtgaccctgcagaaggacgcccaaaatctgatcggcattagtatcgggggcggagcgcagtactgtccctgcttgtacattgtccaggtgtttgataatactccggctgcccttgacggtaccgttgcagctggcgatgaaataactggtgttaacggcaggagcatcaagggaaagaccaaggtcgaagtcgccaagatgattcaagaagttaaaggtgaggtgactatccactacaacaaactgcaagcggaccccaagcaaggcatgtcacttgacatcgtcctcaaaaaggtgaagcacaggttagtcgaaaatatgagtagtggaactgcagacgccctgggtttatcccgagctatcttatgtaatgacggtctggtgaaaagactggaggagctcgagcggactgccgaactgtacaaaggcatgacagagcacacaaagaacctgctacgcgccttctacgaactgagtcagacccatcgcgcatttggcgacgtcttttcagtgattggcgtgcgagagccccagcccgcggccagtgaagccttcgttaagttcgccgatgcccatagaagtatagagaaattcggaatacgactgctcaaaacgataaaacctatgctcaccgatttgaacacatacttgaacaaggctattccagacactaggctaacaatcaagaagtatctggatgtcaaatttgaatatctgtcctactgtttgaaggtcaaggaaatggacgacgaggagtactcatgtatagctcttggtgagccactctacagagtgagtactggaaattacgagtaccggttgattctgagatgcaggcaggaggccagggcccgcttcagtcagatgcggaaagatgtgcttgaaaaaatggaattgttggaccaaaagcatgtgcaagatattgtcttccagctccaacgcctggtaagtactatgtccaaatactataatgactgttacgccgttctccgcgacgctgatgtttttcctattgaggtcgatttggcccacacaacactcgcttacggactgaaccaggaggaatttaccgacggggaggaggaggaggaggaggaggatacagctgctggagagccttctagagatacaaggggcgccgccgggccattggataagggggggtcgtggtgcgattcctag

SEQ ID NO: 32059 - DNA, 1248 bp, Artificial Sequence
  derived and/or modified sequence
atgttcgccgacctggactacgacatcgaggaggacaagctgggcatcccaacggtccctggcaaggtgacattacagaaggacgcccagaatttaatcggaatctcaatcggaggcggggcacaatattgcccctgtctgtacattgttcaggtgttcgataacacacccgccgccttggatggtactgtggctgccggggacgagatcaccggtgtgaacgggaggtctatcaaaggcaagactaaagtagaagtggctaagatgattcaggaagtgaagggagaagtaaccatacattacaataagctgcaggcggatcccaaacaggggatgtcccttgacatcgtccttaagaaagtgaagcatcggctcgtcgagaacatgagttcgggaacggccgacgctttgggactttctcgggcaattctgtgcaacgatggactcgtgaagcggcttgaggagctcgagagaacagcagaactgtataagggtatgaccgaacacacgaagaacttactccgcgcgttctatgagctcagccaaacccacagagcattcggagatgtgtttagcgtgataggcgtgcgggaaccccagccagctgctagcgaggcgttcgtcaaatttgccgatgctcatcgcagtatcgagaaatttggcattagactgttgaagactatcaagcctatgttgactgacctcaatacctacctgaataaggccattccagatacaaggctgactatcaaaaaatacttggacgtaaagtttgagtacctctcgtattgtctcaaggtgaaggaaatggatgacgaagaatactcgtgcatcgcactgggggagcccctgtatcgggtgagcaccgggaattacgaatacaggctgattttacggtgcaggcaggaggcacgcgctcgattcagccaaatgcgaaaagatgtgctggagaagatggaactgctcgaccagaaacacgtgcaggatatcgtcttccagttgcaacggctggtaagcactatgtccaagtactacaacgattgttatgccgtgttgagggatgccgacgtcttcccaatcgaggtcgaccttgctcacactactctggcttatgggctgaaccaagaagaattcactgatggcgaagaagaggaggaggaggaggataccgcggctggtgaaccctctagagatactcgcggagctgccgggccccttgacaagggtgggtcatggtgtgattcctag

SEQ ID NO: 32060 - DNA, 690 bp, Artificial Sequence
  derived and/or modified sequence
atgttcgccgacctggactacgacatcgaggaggacaagctgggcattcctactgtccccggaaaggtgacattgcagaaagacgctcagaacctcattggaatctctattggaggtggtgcacagtattgtccctgcctgtatatcgtgcaggttttcgacaatacgccagccgctcttgacggaactgtcgcggcaggagacgagatcactggcgtgaatggccggagcattaaaggcaagaccaaggttgaggttgccaagatgattcaggaggtgaaaggagaggtgacaatacactataacaaactgcaggccgatcctaagcagggaatgtctttggatatcgtgctgaagaaggtcaaacacaggcttgtggagaacatgtctagcggcaccgctgatgccctgggtctgtcccgtgccattctgtgtaatgacgggctggttaaaaggctggaggaattggagaggactgctgaactgtacaaaggcatgacagaacataccaaaaacctattgcgtgctttttacgagctgagccagactcatagggccttcggggacgtgttctctgtgatcggggtgcgtgaacctcagcccgccgcgtcagaagctttcgtgaaattcgctgatgctcatcgaagtatagagaaatttggcatccgcctgttaaaaaccataaaatag

SEQ ID NO: 32061 - DNA, 1248 bp, Artificial Sequence
  derived and/or modified sequence
atgtttgctgacctagactatgatatcgaggaggacaaacttggcatcccaaccgttcccggaaaggtcacccttcagaaggatgcacagaacctgattggcatttctatcggcggaggggcacagtattgcccctgcctgtatatcgttcaggtgttcgacaacacacccgcagcactggatggaactgttgccgctggcgatgagatcactggagttaacggaaggagcattaagggcaagaccaaggtcgaagtagccaaaatgatccaggaggtgaagggagaggttacgattcattacaacaagttgcaggccgatcccaagcaaggcatgtcgctggatatcgtgctcaagaaagtgaagcatagactggtggagaatatgtcatctgggacagcagatgctctgggcttgtcacgtgccatcctgtgcaacgacggactggttaagcggctggaagaactggagcgtacagcagaactgtataaaggaatgacagaacacactaagaacctcctgcgcgctttttatgagttgtcccaaacccaccgcgcattcggcgacgtattttctgtaattggcgtgagagagccccaacctgctgccagcgaggcttttgtgaagtttgccgacgctcacaggagcatcgagaagtttggaatcaggctccttaagactatcaaaccgatgctcaccgatcttaatacctatcttaataaagctatcccagatacccgtcttacgataaagaaatatttggatgttaaattcgagtatctgagctattgtcttaaggtcaaagagatggacgacgaggaatactcatgcatagccctgggagagcccttatatcgcgtgtccaccggcaactatgagtatcgcctgatcctcagatgtagacaagaggcgcgtgccaggttcagccagatgcgcaaggacgtgctggaaaaaatggaactgctggaccaaaagcacgtgcaggacattgtgttccagcttcagcgcctagtcagcacaatgagcaaatactacaacgattgttacgccgtccttcgggacgcagatgttttccctattgaagtggacctcgcccacacaacattagcctacgggcttaatcaagaggaatttactgacggagaggaagaggaagaggaggaagacaccgctgcaggtgagccctccagagatacccgcggtgccgctggaccactggataagggaggtagctggtgcgattcctag

SEQ ID NO: 32062 - DNA, 1248 bp, Artificial Sequence
  derived and/or modified sequence
atgttcgctgacctcgactacgacattgaagaagataagctaggaatcccaactgtgccaggaaaagtgaccctacagaaggatgcccagaaccttatcggcatttctatcggaggcggtgcccagtactgtccctgcctgtatattgttcaggtgttcgacaataccccggctgccctggacgggacagtcgctgccggtgatgagatcacaggagtaaacgggaggagcatcaaggggaagacaaaagtcgaggtcgctaaaatgatccaagaagtgaaaggggaagttacaattcactacaataagctgcaggccgacccaaagcagggcatgagtttagatatcgtcctcaaaaaggtgaagcatcgtctggtggaaaacatgtcttctggcactgccgacgctctaggactgtcccgggcaattctctgcaacgacggactggtgaagcgtctggaggagttggaaagaacagcagagttatataaggggatgacggaacatacaaaaaatctactgcgggctttttacgaactgagtcagacacatcgcgcttttggggacgtatttagtgtgataggggtacgggaaccccagcctgcagcttctgaagcgttcgtaaagttcgcagatgcgcaccgaagcatcgagaagtttggcataaggttattaaagaccataaaacccatgctcacagacctgaacacttacttgaacaaggccatccccgacaccaggctgacgatcaaaaagtatctcgacgtcaaatttgaatatctcagctattgcttgaaagtgaaagaaatggatgacgaagagtactcttgtatcgctttgggcgagcccctgtaccgggttagtacagggaactacgagtatcggttgatcttacgctgtaggcaagaggcacgcgctaggttttctcagatgcgcaaggatgttttggaaaagatggagctgttggaccagaagcatgtgcaggacatcgtgttccaactccagcgccttgtgtcaacaatgtctaaatattataacgactgttacgccgtgctgagagatgcggacgtgttccccattgaagtggacctggcacacaccactctggcctacggtcttaaccaggaggaatttacagatggagaggaggaagaagaagaggaagataccgcagccggagaaccctcccgggacacgagaggcgctgccggtcccttagataaaggtggatcatggtgcgattcttag

SEQ ID NO: 32063 - DNA, 690 bp, Artificial Sequence
  derived and/or modified sequence
atgttcgccgatttggactacgatatcgaagaggacaagctgggcatccctacagttccagggaaagtcacactccagaaggacgcacagaatctgattggaataagcattgggggaggcgcacagtactgcccttgtctgtacatcgtccaggttttcgataacacaccagccgcactcgatggtacggtggcagccggtgatgaaatcacaggcgttaatggtcggtctatcaaggggaagactaaggttgaggtcgctaagatgatccaggaggtgaagggcgaagtcacaatacattataataagctgcaggcggacccaaagcaagggatgagccttgacatcgtgcttaagaaagtcaagcatcggctggtagagaacatgagcagtggcacagccgatgcccttggacttagccgcgcaattttatgtaacgacggcctggtcaagcggctggaggagctggagcggacggcagaactgtacaaaggtatgacagaacatactaaaaatctgttacgggctttttacgagttgagccagacacaccgggctttcggcgacgtctttagcgttatcggcgtgcgtgagccacaaccggctgcatctgaggctttcgtgaagtttgccgacgcccacagatcgatcgagaaatttggcatcagactccttaaaacaattaaatag

SEQ ID NO: 32064 - DNA, 2055 bp, Artificial Sequence
  derived and/or modified sequence
aatcgcggccaccgccaggtggaacggcaggtgggttcaggtaccagcctggccgggacccggctgtgggaccaacgcttccggtgagcgacagaggcagctccccagggcctggagacccgtggggcggactctgggatctgagcctatcgccctggcctggagcccccctttgtacctattccccattcccctaccgagctgggcagttagccagcccactccaactctcggaaccatgtttgcagacttggattatgacatcgaagaggataaactcggaatcccgactgtgcctgggaaggtgaccctgcagaaggatgctcagaacctgatcgggatcagcattggaggaggggcccagtactgtccctgcctctatatcgtccaggtatttgacaacaccccagcagccttggacggcacagtggcagctggcgatgagatcaccggtgtcaatggcaggtcaatcaaagggaaaactaaggtggaggtggcgaagatgattcaggaggtgaagggggaggtgaccatccactacaacaagctgcaggcggaccccaagcagggcatgtccctggacattgtgttgaagaaagtcaagcaccggctggtggagaacatgagttcagggaccgcagatgctctgggcctgagccgggccatcctgtgcaatgatgggcttgtcaagaggctagaggagctggagcggaccgctgagctatacaaagggatgacggaacacaccaagaacctcctacgggccttttatgagctgtcgcagactcaccgggcctttggggacgtgttctccgtgatcggggtgcgggagccccagccagctgcgagcgaggcttttgtgaagttcgccgatgcccaccgcagcatcgagaagttcggcattcggcttctgaaaaccatcaagccgatgctgacggatctgaacacgtacctcaacaaagccatcccggacactcgcctcaccatcaagaagtacctggacgtgaagtttgagtacctgtcgtactgcctgaaggtgaaggagatggatgacgaggaatacagctgcattgccctaggcgagcccctttaccgggtgagcaccggcaactatgagtaccgcctgatcctgcgctgccgccaggaggcgcgcgcccgcttctcccagatgcgcaaggatgtgctggagaagatggagctgctggaccagaagcacgtccaggacatcgtgttccagctgcagcgcctcgtgtccaccatgtccaagtactacaacgactgctacgcagtgctgcgggatgccgacgtcttccccatcgaggtagacctggcgcacaccacattggcctatggcctcaaccaggaggagttcacagatggggaggaggaggaggaggaggaagacacggcagctggggagccgtccagggatacacgaggggctgctgggcccttggacaagggtggaagctggtgtgactcctgagtgccccgcggctgtggtgccgggggcagggtgcgtgggaggacggagcctgggagcggggcggggccgccgcgcaagggggcgacgcataaaggcctgctggcttggggcgcctgcctccctgctcctctgtcctcgcacagcgaacctgggctcctgcccaggacaggcaccagggtcatggcctgggacctggacactggcccctccaccctccctcccctcccggctccccggccagagggagagcttggtctctggacctgccttaggaaggagagggagggcaggaaggaaaagaaaggacttggaggtggcaggagtccgagccctgctccttgtgggcgctcacactgcccccggagcctgctgggagtggggccagccgtggacagctgaggttggggtcaatgcctcctgggcacccttgcctcgccccagaccggcccgtccagtccccatcacacctcggcggcctttatttattctgttcccccagctcggccacttctctgaaggagggctgggttctgggcctgtatcgaataaacacaaacctggatggcgca

SEQ ID NO: 32065 - DNA, 2164 bp, Artificial Sequence
  derived and/or modified sequence
ggcggggttagacgctgtcagcctgtccagaccgttcctctgttttcgcttgttcctactaacagcgagcttccgccaatacttgttctcgttcttggttccgagcgtcccgggagccgggaagggaaggattgtctgcagggattggagcaaatatccagtggggggaaagccgggacttccgcgtcttgccggaagtgacgtgacaatcgcggccaccgccaggtggaacggcaggtgggttcaggtaccagcctggccgggacccggctgtgggaccaacgcttccgttccccattcccctaccgagctgggcagttagccagcccactccaactctcggaaccatgtttgcagacttggattatgacatcgaagaggataaactcggaatcccgactgtgcctgggaaggtgaccctgcagaaggatgctcagaacctgatcgggatcagcattggaggaggggcccagtactgtccctgcctctatatcgtccaggtatttgacaacaccccagcagccttggacggcacagtggcagctggcgatgagatcaccggtgtcaatggcaggtcaatcaaagggaaaactaaggtggaggtggcgaagatgattcaggaggtgaagggggaggtgaccatccactacaacaagctgcaggcggaccccaagcagggcatgtccctggacattgtgttgaagaaagtcaagcaccggctggtggagaacatgagttcagggaccgcagatgctctgggcctgagccgggccatcctgtgcaatgatgggcttgtcaagaggctagaggagctggagcggaccgctgagctatacaaagggatgacggaacacaccaagaacctcctacgggccttttatgagctgtcgcagactcaccgggcctttggggacgtgttctccgtgatcggggtgcgggagccccagccagctgcgagcgaggcttttgtgaagttcgccgatgcccaccgcagcatcgagaagttcggcattcggcttctgaaaaccatcaagccgatgctgacggatctgaacacgtacctcaacaaagccatcccggacactcgcctcaccatcaagaagtacctggacgtgaagtttgagtacctgtcgtactgcctgaaggtgaaggagatggatgacgaggaatacagctgcattgccctaggcgagcccctttaccgggtgagcaccggcaactatgagtaccgcctgatcctgcgctgccgccaggaggcgcgcgcccgcttctcccagatgcgcaaggatgtgctggagaagatggagctgctggaccagaagcacgtccaggacatcgtgttccagctgcagcgcctcgtgtccaccatgtccaagtactacaacgactgctacgcagtgctgcgggatgccgacgtcttccccatcgaggtagacctggcgcacaccacattggcctatggcctcaaccaggaggagttcacagatggggaggaggaggaggaggaggaagacacggcagctggggagccgtccagggatacacgaggggctgctgggcccttggacaagggtggaagctggtgtgactcctgagtgccccgcggctgtggtgccgggggcagggtgcgtgggaggacggagcctgggagcggggcggggccgccgcgcaagggggcgacgcataaaggcctgctggcttggggcgcctgcctccctgctcctctgtcctcgcacagcgaacctgggctcctgcccaggacaggcaccagggtcatggcctgggacctggacactggcccctccaccctccctcccctcccggctccccggccagagggagagcttggtctctggacctgccttaggaaggagagggagggcaggaaggaaaagaaaggacttggaggtggcaggagtccgagccctgctccttgtgggcgctcacactgcccccggagcctgctgggagtggggccagccgtggacagctgaggttggggtcaatgcctcctgggcacccttgcctcgccccagaccggcccgtccagtccccatcacacctcggcggcctttatttattctgttcccccagctcggccacttctctgaaggagggctgggttctgggcctgtatcgaataaacacaaacctggatggcgca

SEQ ID NO: 32066 - DNA, 954 bp, Artificial Sequence
  derived and/or modified sequence
agaccgttcctctgttttcgcttgttcctactaacagcgagcttccgccaatacttgttctcgttcttggttccgagcgtcccgggagccgggaagggaaggattgtctgcagggattggagcaaatatccagtggggggaaagccgggacttccgcgtcttgccggaagtgacgtgacaatcgcggccaccgccaggtggaacggcagttccccattcccctaccgagctgggcagttagccagcccactccaactctcggaaccatgtttgcagacttggattatgacatcgaagaggataaactcggaatcccgactgtgcctgggaaggtgaccctgcagaaggatgctcagaacctgatcgggatcagcattggaggaggggcccagtactgtccctgcctctatatcgtccaggtatttgacaacaccccagcagccttggacggcacagtggcagctggcgatgagatcaccggtgtcaatggcaggtcaatcaaagggaaaactaaggtggaggtggcgaagatgattcaggaggtgaagggggaggtgaccatccactacaacaagctgcaggcggaccccaagcagggcatgtccctggacattgtgttgaagaaagtcaagcaccggctggtggagaacatgagttcagggaccgcagatgctctgggcctgagccgggccatcctgtgcaatgatgggcttgtcaagaggctagaggagctggagcggaccgctgagctatacaaagggatgacggaacacaccaagaacctcctacgggccttttatgagctgtcgcagactcaccgggcctttggggacgtgttctccgtgatcggggtgcgggagccccagccagctgcgagcgaggcttttgtgaagttcgccgatgcccaccgcagcatcgagaagttcggcattcggcttctgaaaaccatcaagc

SEQ ID NO: 32067 - DNA, 1248 bp, Artificial Sequence
  derived and/or modified sequence
atgttcgccgacctggactacgacatcgaggaggacaagctgggcatccccaccgtgcccggcaaggtgaccctgcagaaggacgcccagaacctgatcggcatcagcatcggcggcggcgcccagtactgcccctgcctgtacatcgtgcaggtgttcgacaacacccccgccgccctggacggcaccgtggccgccggcgacgagatcaccggcgtgaacggcagaagcatcaagggcaagaccaaggtggaggtggccaagatgatccaggaggtgaagggcgaggtgaccatccactacaacaagctgcaggccgaccccaagcagggcatgagcctggacatcgtgctgaagaaggtgaagcacagactggtggagaacatgagcagcggcaccgccgacgccctgggcctgagcagagccatcctgtgcaacgacggcctggtgaagagactggaggagctggagagaaccgccgagctgtacaagggcatgaccgagcacaccaagaacctgctgagagccttctacgagctgagccagacccacagagccttcggcgacgtgttcagcgtgatcggcgtgagagagccccagcccgccgccagcgaggccttcgtgaagttcgccgacgcccacagaagcatcgagaagttcggcatcagactgctgaagaccatcaagcccatgctgaccgacctgaacacctacctgaacaaggccatccccgacaccagactgaccatcaagaagtacctggacgtgaagttcgagtacctgagctactgcctgaaggtgaaggagatggacgacgaggagtacagctgcatcgccctgggcgagcccctgtacagagtgagcaccggcaactacgagtacagactgatcctgagatgcagacaggaggccagagccagattcagccagatgagaaaggacgtgctggagaagatggagctgctggaccagaagcacgtgcaggacatcgtgttccagctgcagagactggtgagcaccatgagcaagtactacaacgactgctacgccgtgctgagagacgccgacgtgttccccatcgaggtggacctggcccacaccaccctggcctacggcctgaaccaggaggagttcaccgacggcgaggaggaggaggaggaggaggacaccgccgccggcgagcccagcagagacaccagaggcgccgccggccccctggacaagggcggcagctggtgcgacagctag

SEQ ID NO: 32068 - DNA, 690 bp, Artificial Sequence
  derived and/or modified sequence
atgttcgccgacctggactacgacatcgaggaggacaagctgggcatccccaccgtgcccggcaaggtgaccctgcagaaggacgcccagaacctgatcggcatcagcatcggcggcggcgcccagtactgcccctgcctgtacatcgtgcaggtgttcgacaacacccccgccgccctggacggcaccgtggccgccggcgacgagatcaccggcgtgaacggcagaagcatcaagggcaagaccaaggtggaggtggccaagatgatccaggaggtgaagggcgaggtgaccatccactacaacaagctgcaggccgaccccaagcagggcatgagcctggacatcgtgctgaagaaggtgaagcacagactggtggagaacatgagcagcggcaccgccgacgccctgggcctgagcagagccatcctgtgcaacgacggcctggtgaagagactggaggagctggagagaaccgccgagctgtacaagggcatgaccgagcacaccaagaacctgctgagagccttctacgagctgagccagacccacagagccttcggcgacgtgttcagcgtgatcggcgtgagagagccccagcccgccgccagcgaggccttcgtgaagttcgccgacgcccacagaagcatcgagaagttcggcatcagactgctgaagaccatcaagtag

SEQ ID NO: 32069 - protein, 2570 aa, Artificial Sequence
  derived and/or modified sequence
MTATTRGSPVGGNDNQGQAPDGQSQPPLQQNQTSSPDSSNENSPATPPDEQGQGDAPPQLEDEEPAFPHTDLAKLDDMINRPRWVVPVLPKGELEVLLEAAIDLSKKGLDVKSEACQRFFRDGLTISFTKILTDEAVSGWKFEIHRCIINNTHRLVELCVAKLSQDWFPLLELLAMALNPHCKFHIYNGTRPCESVSSSVQLPEDELFARSPDPRSPKGWLVDLLNKFGTLNGFQILHDRFINGSALNVQIIAALIKPFGQCYEFLTLHTVKKYFLPIIEMVPQFLENLTDEELKKEAKNEAKNDALSMIIKSLKNLASRVPGQEETVKNLEIFRLKMILRLLQISSFNGKMNALNEVNKVISSVSYYTHRHGNPEEEEWLTAERMAEWIQQNNILSIVLRDSLHQPQYVEKLEKILRFVIKEKALTLQDLDNIWAAQAGKHEAIVKNVHDLLAKLAWDFSPEQLDHLFDCFKASWTNASKKQREKLLELIRRLAEDDKDGVMAHKVLNLLWNLAHSDDVPVDIMDLALSAHIKILDYSCSQDRDTQKIQWIDRFIEELRTNDKWVIPALKQIREICSLFGEAPQNLSQTQRSPHVFYRHDLINQLQHNHALVTLVAENLATYMESMRLYARDHEDYDPQTVRLGSRYSHVQEVQERLNFLRFLLKDGQLWLCAPQAKQIWKCLAENAVYLCDREACFKWYSKLMGDEPDLDPDINKDFFESNVLQLDPSLLTENGMKCFERFFKAVNCREGKLVAKRRAYMMDDLELIGLDYLWRVVIQSNDDIASRAIDLLKEIYTNLGPRLQVNQVVIHEDFIQSCFDRLKASYDTLCVLDGDKDSVNCARQEAVRMVRVLTVLREYINECDSDYHEERTILPMSRAFRGKHLSFVVRFPNQGRQVDDLEVWSHTNDTIGSVRRCILNRIKANVAHTKIELFVGGELIDPADDRKLIGQLNLKDKSLITAKLTQISSNMPSSPDSSSDSSTGSPGNHGNHYSDGPNPEVESCLPGVIMSLHPRYISFLWQVADLGSSLNMPPLRDGARVLMKLMPPDSTTIEKLRAICLDHAKLGESSLSPSLDSLFFGPSASQVLYLTEVVYALLMPAGAPLADDSSDFQFHFLKSGGLPLVLSMLTRNNFLPNADMETRRGAYLNALKIAKLLLTAIGYGHVRAVAEACQPGVEGVNPMTQINQVTHDQAVVLQSALQSIPNPSSECMLRNVSVRLAQQISDEASRYMPDICVIRAIQKIIWASGCGSLQLVFSPNEEITKIYEKTNAGNEPDLEDEQVCCEALEVMTLCFALIPTALDALSKEKAWQTFIIDLLLHCHSKTVRQVAQEQFFLMCTRCCMGHRPLLFFITLLFTVLGSTARERAKHSGDYFTLLRHLLNYAYNSNINVPNAEVLLNNEIDWLKRIRDDVKRTGETGIEETILEGHLGVTKELLAFQTSEKKFHIGCEKGGANLIKELIDDFIFPASNVYLQYMRNGELPAEQAIPVCGSPPTINAGFELLVALAVGCVRNLKQIVDSLTEMYYIGTAITTCEALTEWEYLPPVGPRPPKGFVGLKNAGATCYMNSVIQQLYMIPSIRNGILAIEGTGSDVDDDMSGDEKQDNESNVDPRDDVFGYPQQFEDKPALSKTEDRKEYNIGVLRHLQVIFGHLAASRLQYYVPRGFWKQFRLWGEPVNLREQHDALEFFNSLVDSLDEALKALGHPAMLSKVLGGSFADQKICQGCPHRYECEESFTTLNVDIRNHQNLLDSLEQYVKGDLLEGANAYHCEKCNKKVDTVKRLLIKKLPPVLAIQLKRFDYDWERECAIKFNDYFEFPRELDMEPYTVAGVAKLEGDNVNPESQLIQQSEQSESETAGSTKYRLVGVLVHSGQASGGHYYSYIIQRNGGDGERNRWYKFDDGDVTECKMDDDEEMKNQCFGGEYMGEVFDHMMKRMSYRRQKRWWNAYILFYERMDTIDQDDELIRYISELAITTRPHQIIMPSAIERSVRKQNVQFMHNRMQYSMEYFQFMKKLLTCNGVYLNPPPGQDHLLPEAEEITMISIQLAARFLFTTGFHTKKVVRGSASDWYDALCILLRHSKNVRFWFAHNVLFNVSNRFSEYLLECPSAEVRGAFAKLIVFIAHFSLQDGPCPSPFASPGPSSQAYDNLSLSDHLLRAVLNLLRREVSEHGRHLQQYFNLFVMYANLGVAEKTQLLKLSVPATFMLVSLDEGPGPPIKYQYAELGKLYSVVSQLIRCCNVSSRMQSSINGNPPLPNPFGDPNLSQPIMPIQQNVADILFVRTSYVKKIIEDCSNSEETVKLLRFCCWENPQFSSTVLSELLWQVAYSYTYELRPYLDLLLQILLIEDSWQTHRIHNALKGIPDDRDGLFDTIQRSKNHYQKRAYQCIKCMVALFSNCPVAYQILQGNGDLKRKWTWAVEWLGDELERRPYTGNPQYTYNNWSPPVQSNETSNGYFLERSHSARMTLAKACELCPEEVKKATSVQQIEMEESKEPDDQDAPDEHESPPPEDAPLYPHSPGSQYQQNNHVHGQPYTGPAAHHMNNPQRTGQRAQENYEGSEEVSPPQTKDQ

SEQ ID NO: 32070 - DNA, 7713 bp, Artificial Sequence
  derived and/or modified sequence
atgaccgccaccaccagaggcagccccgtgggcggcaacgacaaccagggccaggcccccgacggccagagccagccccccctgcagcagaaccagaccagcagccccgacagcagcaacgagaacagccccgccaccccccccgacgagcagggccagggcgacgcccccccccagctggaggacgaggagcccgccttcccccacaccgacctggccaagctggacgacatgatcaacagacccagatgggtggtgcccgtgctgcccaagggcgagctggaggtgctgctggaggccgccatcgacctgagcaagaagggcctggacgtgaagagcgaggcctgccagagattcttcagagacggcctgaccatcagcttcaccaagatcctgaccgacgaggccgtgagcggctggaagttcgagatccacagatgcatcatcaacaacacccacagactggtggagctgtgcgtggccaagctgagccaggactggttccccctgctggagctgctggccatggccctgaacccccactgcaagttccacatctacaacggcaccagaccctgcgagagcgtgagcagcagcgtgcagctgcccgaggacgagctgttcgccagaagccccgaccccagaagccccaagggctggctggtggacctgctgaacaagttcggcaccctgaacggcttccagatcctgcacgacagattcatcaacggcagcgccctgaacgtgcagatcatcgccgccctgatcaagcccttcggccagtgctacgagttcctgaccctgcacaccgtgaagaagtacttcctgcccatcatcgagatggtgccccagttcctggagaacctgaccgacgaggagctgaagaaggaggccaagaacgaggccaagaacgacgccctgagcatgatcatcaagagcctgaagaacctggccagcagagtgcccggccaggaggagaccgtgaagaacctggagatcttcagactgaagatgatcctgagactgctgcagatcagcagcttcaacggcaagatgaacgccctgaacgaggtgaacaaggtgatcagcagcgtgagctactacacccacagacacggcaaccccgaggaggaggagtggctgaccgccgagagaatggccgagtggatccagcagaacaacatcctgagcatcgtgctgagagacagcctgcaccagccccagtacgtggagaagctggagaagatcctgagattcgtgatcaaggagaaggccctgaccctgcaggacctggacaacatctgggccgcccaggccggcaagcacgaggccatcgtgaagaacgtgcacgacctgctggccaagctggcctgggacttcagccccgagcagctggaccacctgttcgactgcttcaaggccagctggaccaacgccagcaagaagcagagagagaagctgctggagctgatcagaagactggccgaggacgacaaggacggcgtgatggcccacaaggtgctgaacctgctgtggaacctggcccacagcgacgacgtgcccgtggacatcatggacctggccctgagcgcccacatcaagatcctggactacagctgcagccaggacagagacacccagaagatccagtggatcgacagattcatcgaggagctgagaaccaacgacaagtgggtgatccccgccctgaagcagatcagagagatctgcagcctgttcggcgaggccccccagaacctgagccagacccagagaagcccccacgtgttctacagacacgacctgatcaaccagctgcagcacaaccacgccctggtgaccctggtggccgagaacctggccacctacatggagagcatgagactgtacgccagagaccacgaggactacgacccccagaccgtgagactgggcagcagatacagccacgtgcaggaggtgcaggagagactgaacttcctgagattcctgctgaaggacggccagctgtggctgtgcgccccccaggccaagcagatctggaagtgcctggccgagaacgccgtgtacctgtgcgacagagaggcctgcttcaagtggtacagcaagctgatgggcgacgagcccgacctggaccccgacatcaacaaggacttcttcgagagcaacgtgctgcagctggaccccagcctgctgaccgagaacggcatgaagtgcttcgagagattcttcaaggccgtgaactgcagagagggcaagctggtggccaagagaagagcctacatgatggacgacctggagctgatcggcctggactacctgtggagagtggtgatccagagcaacgacgacatcgccagcagagccatcgacctgctgaaggagatctacaccaacctgggccccagactgcaggtgaaccaggtggtgatccacgaggacttcatccagagctgcttcgacagactgaaggccagctacgacaccctgtgcgtgctggacggcgacaaggacagcgtgaactgcgccagacaggaggccgtgagaatggtgagagtgctgaccgtgctgagagagtacatcaacgagtgcgacagcgactaccacgaggagagaaccatcctgcccatgagcagagccttcagaggcaagcacctgagcttcgtggtgagattccccaaccagggcagacaggtggacgacctggaggtgtggagccacaccaacgacaccatcggcagcgtgagaagatgcatcctgaacagaatcaaggccaacgtggcccacaccaagatcgagctgttcgtgggcggcgagctgatcgaccccgccgacgacagaaagctgatcggccagctgaacctgaaggacaagagcctgatcaccgccaagctgacccagatcagcagcaacatgcccagcagccccgacagcagcagcgacagcagcaccggcagccccggcaaccacggcaaccactacagcgacggccccaaccccgaggtggagagctgcctgcccggcgtgatcatgagcctgcaccccagatacatcagcttcctgtggcaggtggccgacctgggcagcagcctgaacatgccccccctgagagacggcgccagagtgctgatgaagctgatgccccccgacagcaccaccatcgagaagctgagagccatctgcctggaccacgccaagctgggcgagagcagcctgagccccagcctggacagcctgttcttcggccccagcgccagccaggtgctgtacctgaccgaggtggtgtacgccctgctgatgcccgccggcgcccccctggccgacgacagcagcgacttccagttccacttcctgaagagcggcggcctgcccctggtgctgagcatgctgaccagaaacaacttcctgcccaacgccgacatggagaccagaagaggcgcctacctgaacgccctgaagatcgccaagctgctgctgaccgccatcggctacggccacgtgagagccgtggccgaggcctgccagcccggcgtggagggcgtgaaccccatgacccagatcaaccaggtgacccacgaccaggccgtggtgctgcagagcgccctgcagagcatccccaaccccagcagcgagtgcatgctgagaaacgtgagcgtgagactggcccagcagatcagcgacgaggccagcagatacatgcccgacatctgcgtgatcagagccatccagaagatcatctgggccagcggctgcggcagcctgcagctggtgttcagccccaacgaggagatcaccaagatctacgagaagaccaacgccggcaacgagcccgacctggaggacgagcaggtgtgctgcgaggccctggaggtgatgaccctgtgcttcgccctgatccccaccgccctggacgccctgagcaaggagaaggcctggcagaccttcatcatcgacctgctgctgcactgccacagcaagaccgtgagacaggtggcccaggagcagttcttcctgatgtgcaccagatgctgcatgggccacagacccctgctgttcttcatcaccctgctgttcaccgtgctgggcagcaccgccagagagagagccaagcacagcggcgactacttcaccctgctgagacacctgctgaactacgcctacaacagcaacatcaacgtgcccaacgccgaggtgctgctgaacaacgagatcgactggctgaagagaatcagagacgacgtgaagagaaccggcgagaccggcatcgaggagaccatcctggagggccacctgggcgtgaccaaggagctgctggccttccagaccagcgagaagaagttccacatcggctgcgagaagggcggcgccaacctgatcaaggagctgatcgacgacttcatcttccccgccagcaacgtgtacctgcagtacatgagaaacggcgagctgcccgccgagcaggccatccccgtgtgcggcagcccccccaccatcaacgccggcttcgagctgctggtggccctggccgtgggctgcgtgagaaacctgaagcagatcgtggacagcctgaccgagatgtactacatcggcaccgccatcaccacctgcgaggccctgaccgagtgggagtacctgccccccgtgggccccagaccccccaagggcttcgtgggcctgaagaacgccggcgccacctgctacatgaacagcgtgatccagcagctgtacatgatccccagcatcagaaacggcatcctggccatcgagggcaccggcagcgacgtggacgacgacatgagcggcgacgagaagcaggacaacgagagcaacgtggaccccagagacgacgtgttcggctacccccagcagttcgaggacaagcccgccctgagcaagaccgaggacagaaaggagtacaacatcggcgtgctgagacacctgcaggtgatcttcggccacctggccgccagcagactgcagtactacgtgcccagaggcttctggaagcagttcagactgtggggcgagcccgtgaacctgagagagcagcacgacgccctggagttcttcaacagcctggtggacagcctggacgaggccctgaaggccctgggccaccccgccatgctgagcaaggtgctgggcggcagcttcgccgaccagaagatctgccagggctgcccccacagatacgagtgcgaggagagcttcaccaccctgaacgtggacatcagaaaccaccagaacctgctggacagcctggagcagtacgtgaagggcgacctgctggagggcgccaacgcctaccactgcgagaagtgcaacaagaaggtggacaccgtgaagagactgctgatcaagaagctgccccccgtgctggccatccagctgaagagattcgactacgactgggagagagagtgcgccatcaagttcaacgactacttcgagttccccagagagctggacatggagccctacaccgtggccggcgtggccaagctggagggcgacaacgtgaaccccgagagccagctgatccagcagagcgagcagagcgagagcgagaccgccggcagcaccaagtacagactggtgggcgtgctggtgcacagcggccaggccagcggcggccactactacagctacatcatccagagaaacggcggcgacggcgagagaaacagatggtacaagttcgacgacggcgacgtgaccgagtgcaagatggacgacgacgaggagatgaagaaccagtgcttcggcggcgagtacatgggcgaggtgttcgaccacatgatgaagagaatgagctacagaagacagaagagatggtggaacgcctacatcctgttctacgagagaatggacaccatcgaccaggacgacgagctgatcagatacatcagcgagctggccatcaccaccagaccccaccagatcatcatgcccagcgccatcgagagaagcgtgagaaagcagaacgtgcagttcatgcacaacagaatgcagtacagcatggagtacttccagttcatgaagaagctgctgacctgcaacggcgtgtacctgaaccccccccccggccaggaccacctgctgcccgaggccgaggagatcaccatgatcagcatccagctggccgccagattcctgttcaccaccggcttccacaccaagaaggtggtgagaggcagcgccagcgactggtacgacgccctgtgcatcctgctgagacacagcaagaacgtgagattctggttcgcccacaacgtgctgttcaacgtgagcaacagattcagcgagtacctgctggagtgccccagcgccgaggtgagaggcgccttcgccaagctgatcgtgttcatcgcccacttcagcctgcaggacggcccctgccccagccccttcgccagccccggccccagcagccaggcctacgacaacctgagcctgagcgaccacctgctgagagccgtgctgaacctgctgagaagagaggtgagcgagcacggcagacacctgcagcagtacttcaacctgttcgtgatgtacgccaacctgggcgtggccgagaagacccagctgctgaagctgagcgtgcccgccaccttcatgctggtgagcctggacgagggccccggcccccccatcaagtaccagtacgccgagctgggcaagctgtacagcgtggtgagccagctgatcagatgctgcaacgtgagcagcagaatgcagagcagcatcaacggcaacccccccctgcccaaccccttcggcgaccccaacctgagccagcccatcatgcccatccagcagaacgtggccgacatcctgttcgtgagaaccagctacgtgaagaagatcatcgaggactgcagcaacagcgaggagaccgtgaagctgctgagattctgctgctgggagaacccccagttcagcagcaccgtgctgagcgagctgctgtggcaggtggcctacagctacacctacgagctgagaccctacctggacctgctgctgcagatcctgctgatcgaggacagctggcagacccacagaatccacaacgccctgaagggcatccccgacgacagagacggcctgttcgacaccatccagagaagcaagaaccactaccagaagagagcctaccagtgcatcaagtgcatggtggccctgttcagcaactgccccgtggcctaccagatcctgcagggcaacggcgacctgaagagaaagtggacctgggccgtggagtggctgggcgacgagctggagagaagaccctacaccggcaacccccagtacacctacaacaactggagcccccccgtgcagagcaacgagaccagcaacggctacttcctggagagaagccacagcgccagaatgaccctggccaaggcctgcgagctgtgccccgaggaggtgaagaaggccaccagcgtgcagcagatcgagatggaggagagcaaggagcccgacgaccaggacgcccccgacgagcacgagagccccccccccgaggacgcccccctgtacccccacagccccggcagccagtaccagcagaacaaccacgtgcacggccagccctacaccggccccgccgcccaccacatgaacaacccccagagaaccggccagagagcccaggagaactacgagggcagcgaggaggtgagccccccccagaccaaggaccagtag

SEQ ID NO: 32071 - DNA, 7713 bp, Artificial Sequence
  derived and/or modified sequence
atgaccgctaccactagaggctctccagtcggaggcaacgataatcagggtcaggcccccgatgggcagagtcagccacctttgcagcagaaccaaacgtccagcccagactcttccaatgaaaatagtccggcgacccctcctgatgaacagggacaaggagatgccccaccacaactggaggacgaagagccagcttttccccacacagacctcgccaaactcgacgatatgattaatcggcccagatgggttgtgccagttttaccaaagggcgaactggaagtgttgttggaagcagccatcgatctctcgaagaaggggcttgacgttaagtctgaggcctgccagcggttcttcagggatgggcttacaatctcttttacgaagatcctgactgacgaagccgtgtctggctggaaatttgaaatacaccgctgtataattaataacactcaccgactcgtcgagctatgtgttgccaaattatcacaagactggttcccactcctcgaactgctggccatggcgctgaatccacattgcaaatttcacatctataacggtacacgcccatgcgagagcgtcagcagcagcgtccagctcccggaggacgaactctttgcacgcagtcccgatccacggtccccgaaaggttggttagttgacctactgaacaagttcggcactcttaatggctttcagattctgcatgatagatttataaacggaagtgcacttaacgtacagattatagccgcgttaatcaagccgttcggacagtgctatgaattcctgactctccataccgtgaaaaagtacttcctgcccataatcgagatggtgccccagttcctggagaacctgacggatgaggaactgaagaaggaggctaaaaacgaggccaaaaatgacgctctttctatgatcattaaatcgttaaagaacctcgcttctagggtgccagggcaggaggagacggttaaaaatttagagattttccggctcaaaatgattctgaggcttcttcagatcagcagcttcaacgggaagatgaatgcactgaacgaagttaataaagtgatcagtagtgttagctactatacacacagacacggaaatcccgaggaggaagagtggctgactgccgaacgcatggcagagtggattcagcaaaataatatactttccatcgtcttaagagactcactgcaccaaccacagtacgtggaaaaacttgagaaaattctgagattcgtaattaaagagaaggctcttacactgcaggacctggataacatttgggcggcccaggccggaaagcatgaagccatagttaagaatgtgcatgatctgcttgcgaaacttgcatgggatttctcacccgagcaactcgatcatttgttcgactgttttaaagcttcttggaccaacgcctcaaagaagcagagagagaagctgctcgaactcattcgtcggttggccgaggacgataaagatggtgtcatggcccacaaggtgctgaaccttctctggaacctcgcccactccgatgacgtgcccgttgatatcatggatctagccctttccgctcatatcaagatccttgactacagctgctctcaagacagagacacgcagaagattcagtggatcgatcgctttattgaagaactgcgcaccaatgacaaatgggtcataccggcactgaaacaaatcagggagatctgttctctgtttggtgaagcaccacagaacttatcccagacacagcgatctcctcacgtcttctatcgccatgacctcataaatcagctgcagcataaccacgcactggttacactggtggccgagaacctggcaacatacatggagagcatgaggctatatgcaagggatcatgaagattatgacccacagacggtccggctcggctcaagatacagccatgtccaggaagttcaggaaagactgaatttcctgaggttcctcctgaaagacggacaattatggctttgcgcgccacaggctaagcagatttggaagtgtcttgccgaaaacgccgtgtacttgtgcgaccgggaggcttgttttaaatggtatagtaagctgatgggtgacgagcccgacctggacccagatattaacaaggatttttttgagagtaacgtcctccagctggacccgagcctcttaaccgagaacggaatgaaatgctttgagcgcttcttcaaggcagttaattgcagagagggcaaactcgtggcaaagcggagggcctatatgatggatgatctcgaactgataggactggattacttatggagggtcgtcatccaaagtaatgatgacatcgctagcagggctatcgacctactaaaagaaatttatacaaacctcggtccacgcctccaggtgaatcaggtagtgattcacgaggatttcattcagagctgcttcgaccgcctcaaagcaagttatgacacgctatgtgtcttggatggtgacaaagattctgtgaactgcgccaggcaggaagcagttaggatggttcgcgtgctaacagtgctgagagagtatatcaatgagtgtgacagcgattaccacgaggagcgtaccattctccccatgtcacgagccttcaggggcaaacacctgtcttttgttgtgcgcttccccaaccagggaaggcaggtggatgacctggaggtgtggagccatactaacgacaccatcggatcagtccggagatgtatcttaaaccggattaaggctaacgtcgcccatactaagatcgagctatttgttggcggggaactgattgacccagccgatgaccgaaaactcattggccaactgaatctcaaggacaagagcctgataacagccaaattgacccagatctcctccaacatgccctcctctcccgacagcagttcggacagcagcacaggcagccctggaaaccatggcaaccactacagtgatggacccaaccctgaagttgagagttgtcttcccggcgtgattatgtcactgcatcccagatatatttcctttctttggcaagtcgccgacctgggatcttcgctgaatatgcctcccctgcgagacggagcccgcgtgctaatgaaactcatgcctcctgatagtactacaattgagaagctccgggctatctgcctcgatcatgccaaactgggcgagtcatctctatctccctctctcgatagcttgtttttcgggccgtcagcgtcacaagtactttaccttactgaggtcgtgtatgcccttctgatgccagccggagccccccttgccgacgacagttccgattttcaattccactttctgaaatctggcggcctgccactcgtgttgtctatgctgacaagaaacaattttctccctaatgccgatatggagacacggcgcggagcttatctaaatgccctgaagattgccaaactcctgctaaccgccattggttacggccacgtccgggcagtggccgaggcatgccagcctggcgtcgagggagttaatccaatgacccaaattaatcaggtgactcacgaccaggcagtggttctgcagagtgccttgcagtctatccctaatcctagtagtgagtgtatgctcagaaatgtctcagtgcgtctcgcgcagcagattagcgatgaggcctcaaggtacatgccagacatttgtgtgatcagggcaatacagaaaatcatatgggctagcggatgcggctccctccagctcgtgttctccccaaatgaggaaatcaccaaaatctatgagaaaactaatgccgggaatgaacccgacttggaagatgagcaagtgtgttgtgaggccctggaggttatgactctctgctttgctctcataccaacagcactggatgcgctgagtaaggaaaaagcatggcagacttttatcattgacctgctgctacattgtcacagcaaaactgtgagacaggtggcccaagagcagtttttccttatgtgtacgagatgttgcatgggtcaccggccattgctcttcttcattaccttactttttactgtgttgggctcgaccgcccgggagcgcgctaagcattctggggactacttcaccctgctgcggcatctgctcaactatgcgtacaactccaacattaacgtccccaacgccgaggtgttgttgaacaacgaaatcgactggctgaaaagaatcagagatgatgtgaagcgtaccggcgaaactggtatcgaagagactatcctggaaggacatctgggcgtaaccaaggaactgctcgcattccaaaccagcgaaaaaaagtttcatattggttgtgaaaaaggaggtgcgaatctgattaaggagctgattgatgacttcatctttcccgcctctaatgtgtatttacagtacatgcggaacggcgaacttcccgcagaacaagcgatccccgtgtgcggtagccctcctaccatcaatgctggttttgaacttctggttgctctggctgtggggtgtgtgcgaaacctcaaacagatcgtcgattcactcactgagatgtactatatcgggacagcaatcaccacctgtgaagccctcaccgagtgggagtatctgccaccagtgggtccgcggcctccaaaggggtttgtgggtctgaagaatgcgggggcaacatgttacatgaacagcgtcatacagcagctgtatatgatacctagcatcaggaatggcattcttgcaatcgagggaactgggtcagatgttgacgacgatatgtccggagacgaaaagcaggacaatgagagcaatgtggatccgcgagacgatgtcttcggctacccacagcagttcgaggacaaacccgccttgtccaagacagaggatagaaaggaatacaatattggggtgctgcggcacctgcaggtgatctttggccacctcgcggcctctcgcctgcagtattacgtcccccgcgggttttggaaacagttccggctttggggcgagccagtcaatctgcgggaacagcacgatgctctcgagttctttaactctctggtggacagtctggacgaggctctgaaagccttagggcaccctgctatgttgtccaaagtcctgggcgggtcatttgcagatcagaaaatatgtcaggggtgtccccatagatacgaatgcgaggagtctttcactaccctgaacgttgacattcggaatcaccagaatctcctggattccctggagcaatatgtgaaaggtgatttgctggagggagcgaatgcgtaccattgcgagaagtgtaataagaaggtcgatactgtgaaaagactgttaataaagaaactgcctccagtcctggcaatccaactgaagcgattcgactatgactgggaaagagagtgcgccatcaaattcaatgattatttcgagtttcccagggaactagatatggaaccctatacggtagcaggggtggccaagctggagggagacaatgtgaacccagaatcccagctgatacagcagagcgagcaatctgagtcagaaaccgctgggtccacaaaataccggttagtaggtgtcctggtgcacagtggacaggcatctggcggacactactatagttacattattcaaagaaacgggggtgatggggaacgcaaccggtggtacaagttcgatgacggagacgttaccgagtgcaagatggacgacgacgaagagatgaaaaatcaatgtttcgggggagaatacatgggggaagtttttgaccacatgatgaagcgcatgagttaccggcggcaaaaacggtggtggaatgcatacattttgttctacgaacggatggacacaatagatcaggatgacgaattgatacgatatatatccgaacttgcaataaccacgagacctcaccaaataatcatgccctctgctatcgagcgtagtgtgcggaagcagaacgtgcagtttatgcacaaccgcatgcaatattcaatggaatatttccagtttatgaagaaactcttgacttgtaatggcgtgtacctgaacccgcctcctggtcaggatcacctcctgcccgaagcagaggaaattacaatgatctctattcagctcgccgcccgctttctgtttaccactggctttcataccaaaaaagtggtccgtgggagtgccagtgactggtatgacgccctgtgcatactgctcaggcactccaagaacgtgcgcttctggtttgcccataatgtactgtttaacgtttccaaccgcttcagcgagtacctgttggagtgtcctagcgccgaggtcagaggagcattcgccaagctcatcgtctttattgctcacttttctctccaggacgggccatgcccatcaccattcgcaagcccgggacctagttcacaggcgtacgacaacctgtctctgtccgatcacctgcttagggcggtgctcaatctcctgcggagagaagtaagtgagcacggtcgacatttacagcagtactttaatcttttcgtcatgtacgccaatctgggagtcgccgagaaaactcaacttttaaagctgagtgtccccgccactttcatgctggtttcactggatgaaggtcccgggccccccatcaagtatcagtacgctgagcttggaaagctgtactccgtggtgtcacaattaattcgctgttgcaacgtctcctcaagaatgcagagcagcatcaacggcaaccccccattgccaaatccttttggggatccaaatttatcccagccgatcatgcccatccaacagaatgtcgccgatattctctttgtgcggaccagttatgtgaagaaaattattgaggattgtagcaattccgaggaaacggttaagctgctcagattctgttgctgggaaaacccgcagttcagctcaactgtcctgagcgagctgttgtggcaggtggcatattcctatacatacgagcttcggccctatctagatctgctgctgcagatcttgctcatcgaggattcgtggcagactcaccgtattcacaatgccctgaagggtatccccgacgaccgggatggactgttcgacaccattcagcgctcaaaaaaccattatcaaaaacgtgcataccagtgtattaaatgtatggtcgccctattcagcaattgtcctgtggcctaccagattttgcagggaaatggggaccttaaaaggaaatggacttgggccgtggaatggctcggagatgagctggaaaggcgaccttataccggtaatccgcaatacacctacaataattggtctccccctgtacagtccaacgaaacttccaacggttattttctggagcgatcacactcagcaagaatgacacttgcgaaagcctgtgagttgtgtcctgaagaagtaaagaaagccacttcagttcagcagattgagatggaggagagcaaggaacctgacgaccaggacgcacctgacgaacatgagagtccaccccccgaggacgcccccttgtacccacattcaccgggctctcagtaccaacagaataaccatgtgcacggtcaaccctatactggtccggcagctcatcacatgaacaatcctcaacgcacaggccagagggctcaggaaaattacgagggctccgaggaggtgtctcctccccagacaaaagatcagtag

SEQ ID NO: 32072 - DNA, 7713 bp, Artificial Sequence
  derived and/or modified sequence
atgacagccaccacccggggcagccctgtgggcggcaatgacaaccagggccaggccccagatggccagagccagccccccctgcagcagaaccagaccagcagcccagacagcagcaatgaaaacagccctgccaccccaccagatgagcagggccagggagatgccccaccccagctggaggatgaggagcccgccttcccccacacagacctggccaagctggatgacatgatcaaccggccccgctgggtggtgcctgtgctgcccaagggggagctggaggtgctgctggaggccgccatcgacctgagcaagaagggcctggatgtgaagtctgaggcctgccagcgcttcttcagagatggcctgaccatctccttcaccaagatcctgacagatgaggccgtgtctggctggaagtttgagatccaccgctgcatcatcaacaacacccaccggctggtggagctgtgtgtggccaagctgagccaggactggttccccctgctggagctgctggccatggccctgaacccccactgcaagttccacatctacaacggcacccggccctgtgagagcgtgagcagctctgtgcagctgcctgaagatgagctgtttgcccggagcccagaccccaggagccccaagggctggctggtggacctgctgaacaagtttggcaccctgaatggcttccagatcctgcatgaccgcttcatcaatggaagtgccctgaatgtgcagatcatcgccgccctgatcaagcccttcggccagtgctatgagttcctgaccctgcacacagtgaagaagtacttcctgcccatcatcgagatggtgccccagttcctggagaacctgacagatgaggagctgaagaaggaggccaagaatgaggccaagaatgatgccctgtccatgatcatcaagagcctgaagaacctggccagccgggtgcccggccaggaggagaccgtgaagaacctggagatcttccggctgaagatgatcctgcggctgctgcagatcagcagcttcaacgggaagatgaatgccctgaatgaggtgaacaaggtgatcagctctgtgtcctactacacccaccgccacggcaaccctgaggaggaggagtggctgacagctgagaggatggccgagtggatccagcagaacaacatcctgagcatcgtgctgcgggacagcctgcaccagccccagtatgtggagaagctggagaagatcctgcgctttgtgatcaaggagaaggccctgaccctgcaggacctggacaacatctgggccgcccaggccggcaagcatgaggccatcgtgaagaatgtgcatgacctgctggccaagctggcctgggacttcagccctgagcagctggaccacctgtttgactgcttcaaggcctcctggaccaatgccagcaagaagcagcgggagaagctgctggagctgatccggcggctggccgaggatgacaaggatggagtgatggcccacaaggtgctgaacctgctgtggaacctggcccacagtgatgatgtgcctgtggacatcatggacctggccctgagcgcccacatcaagatcctggactacagctgcagccaggaccgggacacccagaagatccagtggattgaccgcttcatcgaggagctgcggaccaatgacaagtgggtgatcccagccctgaagcagatccgggagatctgcagcctgtttggagaggccccccagaacctgagccagacccagaggagcccccacgtgttctacagacatgacctgatcaaccagctgcagcacaaccacgccctggtgaccctggtggccgagaacctggccacctacatggagagcatgaggctgtatgcccgggaccatgaagattatgacccccagacagtgcggctgggcagccgctacagccacgtgcaggaggtgcaggagcggctgaacttcctgcgcttcctgctgaaggatggccagctgtggctgtgtgccccccaggccaagcagatctggaagtgcctggccgagaatgctgtgtacctgtgtgaccgggaggcctgcttcaagtggtacagcaagctgatgggagatgagccagacctggaccctgacatcaacaaggacttctttgagagcaatgtgctgcagctggaccccagcctgctgacagaaaatggcatgaagtgctttgagcgcttcttcaaggctgtgaactgccgggagggcaagctggtggccaagaggcgggcctacatgatggatgacctggagctgattggcctggactacctgtggagggtggtgatccagagcaatgatgacatcgccagccgggccatcgacctgctgaaggagatctacaccaacctgggcccccggctgcaggtgaaccaggtggtgattcatgaggacttcatccagagctgctttgaccggctgaaggccagctatgacaccctgtgtgtgctggatggagacaaggacagcgtgaactgtgcccggcaggaggccgtgaggatggtgcgggtgctgactgtgctgcgggagtacatcaatgaatgtgacagcgactaccacgaggagaggaccatcctgcccatgagccgggccttccggggcaagcacctgagctttgtggtgcgcttccccaaccagggccggcaggtggatgacctggaggtgtggagccacaccaatgacaccatcggctctgtgcggcgctgcatcctgaaccgcatcaaggccaacgtggcccacaccaagattgagctgtttgtgggcggggagctgattgatcctgcagatgacaggaagctgattggccagctgaacctgaaggacaagagcctcatcacagccaagctgacccagatcagcagcaacatgcccagcagcccagacagcagcagtgacagcagcacaggcagccctggcaaccacggcaaccactacagtgatggccccaaccctgaggtggagagctgcctgcccggggtcatcatgagcctgcacccccgctacatctccttcctgtggcaggtggccgacctgggcagcagcctgaacatgccacccctgagagatggagcccgggtgctgatgaagctgatgcccccagacagcaccaccatcgagaagctgcgggccatctgcctggaccacgccaagctgggggagagcagcctgagccccagcctggacagcctcttcttcggccccagcgccagccaggtgctgtacctgacagaggtggtgtatgccctgctgatgcctgctggggcccccctggctgatgacagcagtgacttccagttccacttcctgaagagcggcggcctgcccctggtgctgtccatgctgaccaggaacaacttcctgcccaatgctgacatggagacccggcggggggcctacctgaatgccctgaagatcgccaagctgctgctgacagccatcggctacggccacgtgcgggctgtggccgaggcctgccagcccggggtggagggcgtgaaccccatgacccagatcaaccaggtgacccatgaccaggccgtggtgctgcagagcgccctgcagagcatccccaaccccagcagcgagtgcatgctgagaaatgtgtctgtgcggctggcccagcagatcagtgatgaggccagccgctacatgccagacatctgtgtgatccgggccatccagaagatcatctgggccagcggctgcggcagcctgcagctggtgttcagccccaatgaggagatcaccaagatctatgagaagaccaatgctggaaatgaaccagacctggaggatgagcaggtgtgctgtgaggccctggaggtgatgaccctgtgctttgccctgatccccacagccctggatgccctgagcaaggagaaggcctggcagaccttcatcatcgacctgctgctgcactgccacagcaagacagtgcggcaggtggcccaggagcagttcttcctgatgtgcacccgctgctgcatgggccaccggcccctgctcttcttcatcaccctgctcttcaccgtgctgggcagcacagcccgggagcgggccaagcacagcggggactacttcaccctgctgcggcacctgctgaactatgcctacaacagcaacatcaacgtgcccaatgctgaggtgctgctgaacaatgaaattgactggctgaagaggatcagagatgatgtgaagaggactggagagaccggcatcgaggagaccatcctggagggccacctgggcgtgaccaaggagctgctggccttccagaccagcgagaagaagttccacatcggctgtgagaagggcggggccaacctgatcaaggagctgattgatgacttcatcttccctgccagcaatgtgtacctgcagtacatgagaaatggagagctgcctgctgagcaggccatccctgtgtgtggcagcccccccaccatcaatgccggctttgagctgctggtggccctggccgtgggctgtgtgaggaacctgaagcagatcgtggacagcctgacagagatgtactacatcggcacagccatcaccacctgtgaggccctgacagagtgggagtacctgccccctgtgggcccccggccccccaagggctttgtgggcctgaagaatgctggggccacctgctacatgaacagcgtcatccagcagctgtacatgatccccagcatcagaaatggcatcctggccatcgagggcactggaagtgatgtggatgatgacatgtctggagatgagaagcaggacaatgaaagcaatgtggaccccagagatgatgtgtttggctacccccagcagtttgaggacaagccagccctgagcaagacagaggacaggaaggagtacaacattggagtgctgcggcacctgcaggtgatcttcggccacctggccgccagccggctgcagtactacgtgccccggggcttctggaagcagttccggctgtggggcgagcctgtgaacctgcgggagcagcatgatgccctggagttcttcaacagcctggtggacagcctggatgaggccctgaaggccctgggccacccagccatgctgagcaaggtgctgggcggcagctttgctgaccagaagatctgccagggctgcccccacagatatgaatgtgaggagagcttcaccaccctgaatgtggacatccggaaccaccagaacctgctggacagcctggagcagtatgtgaagggggacctgctggagggcgccaatgcctaccactgtgagaagtgcaacaagaaggtggacacagtgaagaggctgctgatcaagaagctgccccctgtgctggccatccagctgaagagatttgattatgactgggagagagaatgtgccatcaagttcaatgactactttgagttcccccgggagctggacatggagccctacacagtggccggcgtggccaagctggagggggacaacgtgaaccctgagagccagctgatccagcagagcgagcagagcgagagcgagacagctggcagcaccaagtaccgcctggtgggcgtgctggtgcacagcggccaggccagcggcggccactactacagctacatcatccagagaaatggaggagatggagagaggaaccgctggtacaagtttgatgatggagatgtgacagagtgcaagatggatgatgatgaggagatgaagaaccagtgctttggaggagagtacatgggagaggtgtttgaccacatgatgaagaggatgagctaccgccggcagaagcgctggtggaatgcctacatcctcttctatgaaagaatggacaccatcgaccaggatgatgagctgatccgctacatcagcgagctggccatcaccacccggccccaccagatcatcatgcccagcgccatcgagaggtctgtgaggaagcagaatgtgcagttcatgcacaacaggatgcagtacagcatggagtacttccagttcatgaagaagctgctgacctgcaatggagtgtacctgaaccccccacctggccaggaccacctgctgcctgaggccgaggagatcaccatgatcagcatccagctggccgcccgcttcctgttcaccaccggcttccacaccaagaaggtggtgcggggcagcgccagtgactggtatgatgccctgtgcatcctgctgcggcacagcaagaatgtgcgcttctggtttgcccacaacgtgctcttcaacgtgagcaaccgcttcagcgagtacctgctggagtgccccagcgctgaggtgcggggggcctttgccaagctgattgtgttcatcgcccacttcagcctgcaggacggcccctgccccagcccctttgccagccctggccccagcagccaggcctatgacaacctgagcctgagtgaccacctgctgcgggctgtgctgaacctgctgcggcgggaggtgtctgaacatggccgccacctgcagcagtacttcaacctgtttgtgatgtatgccaacctgggcgtggccgagaagacccagctgctgaagctgtctgtgcctgccaccttcatgctggtgtccctggatgagggccctggcccccccatcaagtaccagtatgcagagctgggcaagctgtacagcgtggtgtcccagctgatccgctgctgcaatgtgagcagcaggatgcagagcagcatcaatggaaatccacccctgcccaacccctttggagaccccaacctgagccagcccatcatgcccatccagcagaatgtggccgacatcctgtttgtgaggaccagctatgtgaagaagatcatcgaggactgcagcaacagcgaggagaccgtgaagctgctgcgcttctgctgctgggagaacccccagttcagcagcacagtgctgtctgagctgctgtggcaggtggcctacagctacacctatgagctgcggccctacctggacctgctgctgcagatcctgctgattgaagattcctggcagacccaccgcatccacaatgccctgaagggcatcccagatgacagagatggcctgtttgacaccatccagaggagcaagaaccactaccagaagagggcctaccagtgcatcaagtgcatggtggccctcttcagcaactgccctgtggcctaccagatcctgcagggcaatggagacctgaagaggaagtggacctgggccgtggagtggctgggagatgagctggagcggcggccctacacaggcaacccccagtacacctacaacaactggagcccccctgtgcagagcaatgagaccagcaatggctacttcctggagaggagccacagcgccaggatgaccctggccaaggcctgtgagctgtgcccagaggaggtgaagaaggccacctctgtgcagcagatcgagatggaggagagcaaggagccagatgaccaggatgccccagatgagcacgagagccccccaccagaagatgcccccctgtacccccacagccctggcagccagtaccagcagaacaaccacgtgcacggccagccctacacaggccctgctgcccaccacatgaacaacccccagaggacaggccagagggcccaggagaactatgagggcagcgaggaggtgagccccccccagaccaaggaccagtag

SEQ ID NO: 32073 - DNA, 7713 bp, Artificial Sequence
  derived and/or modified sequence
atgaccgccaccacccggggcagccccgtgggcggcaacgacaaccagggtcaggcccccgacggccagagccagcccccgctccagcagaaccagacctctagccccgattcatccaatgagaattcccccgccacgcccccagacgaacagggacagggggacgcacctccacagctggaagacgaggaaccggccttcccacacacggacctcgctaaactcgacgacatgataaatagaccaagatgggtggtgccagttctgcccaaaggagaactcgaagtgctgctggaggctgccatcgatctctcaaagaaaggactggatgtcaagagcgaagcatgccaacgtttctttcgagacgggctaactatctcttttacaaaaatcctgacagacgaagcagtgtccggctggaagtttgagatccacaggtgtattatcaataatacccataggttggtcgaattatgcgtcgccaaactatctcaggactggttccccctgctggagctgctggctatggctttaaatcctcactgtaagttccatatttacaacgggacccgtccatgcgaatcagtatcatcaagcgtccaactccctgaagatgagctttttgctagatcccctgatccccgaagtccaaaaggatggcttgtggacctactcaacaaatttggcaccttgaacggcttccaaattctccatgatcggtttatcaatggaagcgccctgaatgtacaaatcatagcagcccttattaagccgttcgggcagtgctacgagtttctcacactgcacactgtcaagaaatactttctgcccatcatagaaatggtcccccagttcctggagaacctcaccgacgaggagttgaaaaaggaagccaaaaatgaggcaaagaacgacgcacttagtatgataataaagtcactcaagaacctcgcatccagagtcccggggcaagaggaaacagtcaagaatttggagatctttcgcctgaagatgattctacgtctgctgcagatctccagttttaacggcaaaatgaatgcattaaatgaagtcaataaagtcatctcatcggtgagctattacacacatcgccacgggaaccccgaagaggaggaatggctgaccgcggaacggatggccgagtggattcagcagaataatatcctgagcatcgtcttgcgcgactccctacatcaaccccagtatgtggaaaaactggagaaaatcctcaggttcgtaattaaagagaaggccctgactttgcaagatctcgataacatttgggcagcccaggctggcaagcacgaggccatcgtgaaaaatgtgcacgacctcctagcaaaattagcatgggatttcagtcctgaacaactggaccacctgtttgattgctttaaggcaagttggaccaacgcttctaagaagcagcgtgaaaagcttctggagttgatccgcagattagctgaggacgataaggatggggtcatggctcacaaagtactcaacttgctgtggaacctggcccattctgatgatgtcccggtagacataatggacctggcgctgagcgctcatataaagatcttggattattcctgctcgcaggacagggatactcagaagatccagtggatagataggtttatagaggaattacgcactaacgataagtgggtgatcccggcactcaagcagattcgcgaaatttgtagcctgttcggagaagcaccccaaaatctgtctcagacccagcgcagtcctcatgtattttacaggcatgaccttattaaccagctccaacacaatcacgcacttgtgacgctcgtagcagagaacctggcgacatacatggagtccatgcggttgtatgcccgggaccatgaggattacgacccccagacggtacgcctgggatctaggtacagtcacgtacaagaggtccaggagaggctgaattttctgaggtttttgctaaaagatggtcaactatggctgtgcgcaccacaggcaaagcagatttggaagtgcttagctgaaaatgccgtgtacttgtgtgacagagaagcctgttttaaatggtatagcaagctcatgggagatgagcccgatctggaccctgacataaacaaagacttcttcgagagcaacgtgttgcagctggatccaagtttgttaacggagaacggaatgaagtgttttgagagattctttaaagctgtgaactgcagggagggtaaactagtggctaagcgtcgggcatacatgatggacgatctggagctgattggcctcgattatctctggcgagtcgtgattcagtcaaacgacgacatcgcctctagggccatagatctgttaaaggagatctatactaacctgggacctagactgcaggtgaaccaggtggtaattcatgaggatttcattcaaagctgtttcgacagactgaaagcaagctacgacacactttgtgtcttagacggcgataaagactccgttaactgcgccaggcaggaggctgtgcgcatggtgcgcgttcttacagtgctgcgtgaatacattaacgaatgtgacagtgattatcatgaggagcgaactattctccctatgagcagggcattccggggtaagcacctctcgtttgtcgtgaggttccctaaccaggggcgacaggttgatgacctcgaggtatggagccacacaaatgacaccattggttccgtccgccggtgtatcctgaatcgcataaaggccaacgtggcccacaccaagattgaactgtttgtgggcggtgagcttattgaccccgcagacgacaggaagctcataggccagctcaacctgaaggacaagagtctgattacggctaagttgacacagatctctagcaatatgccttcttctcctgacagctcatcagattcgtctaccggcagtccaggtaaccacggaaaccattactccgatggccctaatcccgaggtcgagtcatgcctgcctggagtgattatgagtctacacccccgctacatcagctttctctggcaggtggcagatctaggcagcagtttgaacatgccccccctgagagatggagcacgcgtgctaatgaaactaatgccacctgacagtaccaccatcgagaagctccgtgctatttgcctcgaccatgcgaaactcggcgagagtagcttgtcccctagcctggatagtttgttctttggcccctcagcatctcaggtgctctatcttactgaggtggtttatgctctcttaatgcctgcaggggcccccctggctgatgattcgtccgactttcagttccacttcctgaagtcaggggggctgcccctggtcctgagtatgctcacaaggaacaactttctcccaaatgctgacatggagactagaagaggtgcctaccttaacgccctaaaaattgccaagctgctgctgacagctatcgggtatggccacgtgcgggccgtggccgaagcttgtcagcccggtgtggagggcgtcaaccctatgacccagataaaccaagtgacccacgaccaggctgtcgttcttcagagcgccctacagagtataccaaatccttcaagcgaatgcatgctgaggaacgtgagcgtgcggttggcccagcagatctctgacgaggctagtcgatatatgccagacatctgcgtgattcgggccattcagaagattatttgggcttctggctgcggttctctgcagctggtgttctcccccaatgaggagattacaaagatctacgagaaaacaaatgccggaaacgaaccggacctcgaggatgagcaagtttgttgtgaggccctggaagtcatgactctgtgttttgccttaatccccaccgcgctagacgctttatcaaaagagaaagcttggcagaccttcatcattgatctcttgctgcattgtcatagcaagaccgtgaggcaggttgcccaggagcagttttttctcatgtgcactcggtgctgcatgggacaccgacccctgcttttttttatcactctgttattcactgtgttggggtctaccgctcgcgagagggcaaaacattccggtgactatttcactttgctaaggcacctgctgaattacgcatacaattccaacatcaatgtgcctaatgccgaagttctgctgaacaatgaaatcgattggttgaagcgcataagagacgacgtgaagcgcactggtgagactgggatagaagaaacaatactggaagggcacctgggcgtgacaaaagaactgttagcgtttcagacctcagagaaaaaatttcatatcggatgtgaaaaaggcggagccaaccttatcaaagagctgattgacgattttatcttcccagcttccaacgtttatcttcaatacatgcgaaacggagagctaccggccgaacaggctataccagtctgcggaagtcccccgaccatcaatgccggcttcgaactgttggtggcgctggctgtgggatgtgtcaggaatctgaagcagatagtggacagtctaactgagatgtattacattggcacagctatcactacctgcgaagcgctaacagaatgggagtacctcccgccggtgggccctcgtccacccaagggcttcgtgggactgaaaaacgcaggggcaacctgttacatgaattccgttattcagcagttgtatatgattccaagcatccggaatggaattcttgccatagaaggaaccgggtcagacgtggacgacgatatgtcgggagacgagaagcaggacaatgagagtaatgtggaccctagggacgatgtttttggatatcctcagcaatttgaagacaagccagccctatcaaagaccgaagacaggaaagaatataacattggggtgctgcggcatctgcaggtcattttcggccacttggcagcatctcgcttgcagtattacgttccaaggggcttctggaagcaatttagactgtggggagagccagttaacttacgggaacaacatgatgccctcgaattttttaactcactggttgatagtcttgacgaggcattaaaggcactggggcatcccgccatgctgtctaaggtgctcggggggagcttcgcagatcaaaagatttgtcaaggctgcccccaccgctacgaatgcgaggagtccttcacgaccctgaatgtcgatatacgcaatcatcagaatttgctggatagtctggaacaatatgtgaaaggcgatctcttagagggtgccaatgcctaccactgcgagaagtgcaacaaaaaagttgatactgtgaaacgacttctgatcaaaaagctccctcctgttttagcaatacagttgaagcggttcgattacgactgggaaagagagtgtgctatcaagtttaatgattactttgagttcccccgagaactggatatggaaccatacacggtggccggcgtggccaagctcgagggagacaacgttaaccctgaatcacagctcatccagcagtctgagcaatcggaatctgaaacagctggttctacgaagtaccggttagtcggtgtgctcgtccactccgggcaggcctcaggcggacactattacagctatatcattcaacgcaatggcggtgacggagagcgtaatagatggtataaattcgacgacggagatgtgaccgaatgtaaaatggatgatgatgaagagatgaagaaccaatgctttggaggtgagtacatgggggaggtgttcgaccatatgatgaagcgtatgagctatagaaggcagaaaagatggtggaatgcttacattctcttttacgagcgcatggataccattgatcaggatgacgaactgattaggtacatctcggaactagctataacgactaggccccaccagataataatgccttctgctatcgagcggagcgtgcgcaaacaaaatgttcagtttatgcacaaccgcatgcagtattccatggagtactttcaatttatgaaaaagctgctcacctgcaatggtgtgtacctgaatccaccacctggacaggatcatttgctcccagaggcggaagagatcacaatgatatccattcagttggctgctcggtttctgttcaccacagggttccacactaagaaagtggtacgcggaagtgcatctgattggtacgatgccctgtgcatcctactgcgtcattcaaagaacgtgcggttttggttcgcacataatgttctgtttaacgtgagcaatcggttcagcgaatacctgctggagtgtccctccgccgaagtcaggggcgcatttgcaaaactgatagtgtttattgcccatttcagtttgcaggacggcccatgtccttccccatttgcctcccctggcccttcgagccaagcatatgataatctgtctctgagtgatcacctactgagggcagttctgaatttgctacggcgggaggtaagtgaacacggacggcaccttcagcaatatttcaatctttttgtgatgtacgcgaatctgggcgtagcagagaagacacaacttttgaagctgtcagttcccgcaactttcatgctggtgtctttagatgagggcccaggtccaccgattaagtaccaatacgctgagctggggaagctctacagtgtcgttagccagctgatcaggtgctgcaacgtaagcagcagaatgcaaagttccattaacggaaaccctcctctgcccaatccctttggggaccccaatctctcccaacccatcatgcctatccaacagaatgtcgcagacatactctttgttagaacatcatacgtgaaaaagattatagaggactgttccaattcggaggagaccgtaaaactgctcaggttctgttgctgggagaatccgcaattttcctcgacagtgcttagtgaactcctgtggcaggtcgcctatagctatacctacgagcttagaccttatcttgatctgctgctacaaatattactgatcgaagactcttggcaaacacaccgtattcacaacgcactcaagggtatccccgacgatagggacggacttttcgataccatacagcgctcaaaaaatcactatcaaaaacgggcttatcagtgtattaagtgtatggtcgcacttttttctaactgtcccgtggcataccagatcctccagggaaatggtgatttgaaaaggaagtggacttgggcggtcgagtggctgggtgatgaactagagagaagaccttatacgggaaaccctcagtacacctacaacaactggagccccccagtgcagagcaatgagactagtaatgggtacttccttgaaaggtctcactctgccagaatgactcttgccaaggcttgcgagctctgtcctgaagaagtaaagaaggccacatctgttcagcaaatcgaaatggaggagtctaaggaacccgatgatcaggacgcaccagacgagcacgagtcgccaccccctgaagacgctcctctgtatccccactccccagggtctcagtatcagcagaacaatcacgtgcatggtcagccttacacggggcctgccgcgcatcacatgaacaacccccagcgtacaggccagcgcgcccaggagaattatgaaggctctgaggaggtttctcctccacagacaaaggaccaatag

SEQ ID NO: 32074 - DNA, 7712 bp, Artificial Sequence
  derived and/or modified sequence
atgactgccacaacaaggggcagtcccgtgggaggaaatgacaaccaaggccaggccccagacggccagtcccagcctccgttacagcagaatcaaacgtctagccccgattcctctaacgagaatagccctgctactccgccagatgagcaaggccagggcgacgcgccaccccagctcgaggatgaggagcctgcgtttccccacacagatctcgccaagttagatgacatgattaataggccacgatgggttgtgcccgtgctcccgaagggagaacttgaggtcctcctggaggctgctatcgatctgtccaaaaagggcctagatgtcaagtctgaagcatgtcagagattttttcgggacgggctgactatctcctttaccaagatcctgacagacgaggcggtatccggttggaagttcgagatccaccggtgtatcataaacaatactcaccgcctcgtggagctgtgcgtggccaagctaagccaggactggtttcccttactcgagttgttggcaatggctcttaacccgcattgtaaatttcacatttataatgggaccagaccatgtgagagcgtcagttcgtcagtgcagctccccgaagacgaacttttcgcgaggagcccagatccgaggagtccaaagggctggctggtggacctactcaacaaatttgggaccctgaatggatttcagattctgcacgatcggttcatcaacgggtccgcactcaatgttcagatcatagccgctctaatcaagccgtttggacagtgctatgaatttctgacattgcacacagttaaaaagtacttcctaccaataattgaaatggtgccccagttcctggaaaacctcacggatgaagaattgaaaaaggaggctaagaatgaagcaaaaaacgacgcattgagcatgattataaaaagcctcaaaaatctggctagcagagtgcctgggcaggaggaaacagtgaagaatctagaaatctttagacttaagatgatcctgcgcctcctgcaaatatcctccttcaatggcaagatgaatgccctgaatgaggtgaataaagtgatttcttcagtgagttactacacgcatcgccacggcaatcccgaggaggaggagtggctcacagctgagcgtatggccgaatggatccagcagaacaacattctgtccattgtgctgcgagactcactgcaccaacctcaatatgtggagaaactcgaaaaaatcttgaggttcgtgatcaaggagaaggctttaaccctccaagatctggataacatctgggccgcacaagccggtaagcatgaggccatcgtcaagaacgtgcatgacctactggccaagctggcctgggatttctcaccagagcagctggatcacctttttgattgcttcaaagccagctggactaacgcctccaagaagcagagggagaagttattggaactgatcaggaggctggccgaagacgacaaggacggagtcatggcccacaaagtgttgaatctcttgtggaatctagctcactccgacgatgtgcctgtggacataatggatcttgccctgtctgctcacataaagattctcgattacagctgttcccaggatagagatacccaaaagattcaatggatcgaccgctttattgaagaacttcggaccaatgacaaatgggtcataccagctctaaaacagatcagggaaatctgttcactgtttggcgaagcgcctcagaatctctcacagactcagcgctcacctcatgtattctacagacacgatttgatcaaccaactgcagcataaccacgcactggtcacattggtggcagagaatctcgccacctatatggagagcatgaggctctatgccagagaccacgaggattacgatccccagaccgtgagactggggtctaggtactcacatgtgcaggaggtacaggaacgtctaaatttcttgaggttcctacttaaagacggccagctgtggctgtgtgctcctcaggcgaaacagatttggaagtgccttgcagagaatgcagtgtatctctgtgaccgcgaggcgtgctttaagtggtactcaaagttgatgggcgacgagcccgacctggatccagacatcaacaaagactttttcgaatccaacgtgctccaactggatccaagcctgctcacagagaacgggatgaaatgcttcgagcgcttttttaaggccgttaactgcagggaggggaagctggtggccaaacggagagcctatatgatggatgacctcgagctcataggactcgactacctgtggagagtggtgatacaatcgaacgacgacattgccagtagagctatcgatttgctaaaggagatatacacaaatctcgggcctagactgcaggtgaatcaagtggtgatccacgaagattttattcagtcctgtttcgatcggctgaaggccagttatgacactttgtgcgtcctggacggtgacaaggattctgtcaactgcgcacgacaggaggccgttagaatggtgcgagtcctgacggtcctccgggagtacattaacgagtgtgatagcgattatcatgaggagaggactatcctgcctatgagccgcgcttttcggggtaaacatctttcttttgttgttcgctttccgaaccaggggaggcaggtagatgatctggaagtttggagtcacacaaatgatacgatcggttcggtacgacgatgtatactcaacagaattaaagctaatgtggcccatacgaagatagaattgttcgtaggtggggagctgattgatcccgcagatgaccggaagctcattggccagttaaacctcaaagataaaagcctcattaccgccaaattaacccaaatcagcagcaatatgccaagctccccagatagcagttctgacagttccaccggatcacccggaaaccacggcaatcattactccgatggcccaaaccctgaggtggagagctgcctgcccggagttataatgtcgctccacccccgatacatctcgttcttatggcaggtagctgatctcggttcgagtctgaacatgccgccactccgtgacggtgctagggttctaatgaagctaatgcctcccgactccacaactattgaaaagctccgtgccatttgcttagatcatgctaaactgggcgaatccagcttgtcaccaagcttagacagcctgttcttcgggccatccgccagtcaggtcctatacctgacagaagtggtgtatgctctcctgatgcctgcaggggctccactggcagacgacagcagtgacttccagttccactttctgaaatcaggaggcttacccttggtcctcagtatgctgacccggaataactttctaccaaacgccgatatggagaccagacggggagcctacctgaacgctctgaagattgctaagctgcttctgaccgccatagggtacggacacgtgagggcggttgcagaagcttgccagcccggtgtagagggcgtcaatcctatgacgcagattaaccaggtaactcacgatcaggccgtggtactgcaatcggctctacaatccatacctaaccctagtagtgaatgtatgctgcggaatgtgtcagtgcggctggcacagcaaatttccgacgaagccagcagatatatgccggacatctgcgtcatcagagctatccaaaagatcatctgggcatccgggtgcggaagccttcagctggtcttctcccccaatgaggagattactaaaatctatgagaaaactaacgcaggcaacgaacctgacctcgaagacgagcaggtgtgctgcgaggctctggaggtcatgaccctgtgcttcgccttaattcctacggcactggacgcactcagcaaagagaaagcctggcagactttcatcatcgatctgctgttgcactgtcacagtaagactgtcaggcaggtcgctcaagaacagttttttctgatgtgcactagatgttgtatggggcaccggccactcctcttcttcattacacttctgtttacagtgctaggctccacagctcgagaaagggcgaagcatagtggagactactttacacttctaagacacctgctcaattacgcctataactctaacataaatgtgccgaatgccgaagtactacttaataacgagattgactggctgaagagaatccgggacgacgttaagcggaccggggagaccgggattgaggaaacaatcttggaaggccatctcggcgtgaccaaggaattgctggccttccagacgagcgagaaaaaatttcatattgggtgcgaaaaggggggagccaatttgatcaaagaactgatcgacgactttatattcccagcttccaatgtctacttgcagtacatgagaaatggtgagctgcccgcagagcaggctatcccggtgtgtgggagtcctcccaccatcaatgctgggttcgagcttctggttgcgctcgcagtgggctgtgtacggaacctgaaacagattgtggattccctgacagagatgtactatattggcacagccataacaacgtgcgaagcactgaccgagtgggaatacctgccccctgtaggcccacgcccacccaagggcttcgtgggcctcaagaacgcaggcgctacctgttacatgaattcagttatacaacagctgtatatgatacccagcatcaggaacggaattctcgccattgagggaactggctctgatgtggatgacgacatgtccggcgatgagaaacaagataatgagtcgaatgtggatccacgggatgacgtcttcgggtatccacagcaatttgaggataagcccgctctgtccaaaactgaggataggaaggagtataatattggggtgttgcggcaccttcaggtgatttttggacacctggccgcaagtagactccagtattatgtcccacgcggattctggaagcagttcaggctatggggtgaacccgtaaacctgagggaacagcacgacgcgcttgagttcttcaattccctggtcgattctttagatgaggcccttaaagcccttggtcatccggcaatgctctcaaaggtgttggggggaagctttgctgaccagaagatatgtcaagggtgccctcatagatatgagtgtgaggaatctttcaccacacttaacgtggatattcgaaatcaccagaatctgttagacagtctagagcagtatgtgaagggcgaccttctggaaggggctaacgcctatcactgtgaaaagtgtaataaaaaggtggacacagtgaaaaggttgctaataaagaagttgccacctgtcttggccatacaactcaagcgttttgattatgactgggagagagagtgtgccataaaatttaatgactactttgagtttccgagagaattggacatggaaccttacacggtggctggagtcgccaagcttgagggcgacaacgtgaaccccgaaagccagttgatccaacagagcgagcagtccgagtccgagacagccggatcaactaagtaccggcttgtgggcgtactggtgcacagcgggcaggcatctggcggacactattactcttatattatccagaggaacggcggagacggagagagaaaccgctggtacaaattcgacgatggagatgtgaccgagtgtaagatggatgacgacgaggaaatgaagaaccagtgcttcggtggagagtacatgggtgaagtgttcgaccatatgatgaaacggatgtcataccgccgacagaaacgctggtggaatgcttatatcttgttttacgagagaatggatactattgatcaagatgatgagctgataaggtatattagcgagttagctattaccactcggcctcaccaaatcatcatgccttctgccattgagcgctccgtccggaagcagaacgtgcagttcatgcacaatcgcatgcaatacagtatggaatatttccaattcatgaagaaactgctgacctgcaatggtgtgtacctgaatcctcccccaggccaggatcacttacttcctgaggccgaggaaattaccatgattagtatacaactcgcagcaaggtttctcttcactacaggctttcacaccaaaaaggttgttaggggaagcgcctcagactggtacgacgcactgtgcattctgctgcgccactctaagaacgtacggttctggttcgcccataacgtactctttaacgtgtccaacagattctctgaatatcttctggagtgccctagtgcagaagtgaggggggcattcgcaaagctgatagtgttcatcgcccacttcagtcttcaggacggcccttgcccctccccatttgcaagcccaggccctagctcccaggcgtacgacaatcttagcctctctgaccatcttctccgtgccgttctgaacctcttaaggcgcgaggtcagtgagcacggaaggcacctgcagcagtacttcaatttatttgtgatgtacgccaatctgggagtggcagaaaagacacagctcctcaagctgtccgtgccagcaacctttatgctcgtaagtctggatgaggggcctgggcctcctattaagtatcaatacgcagagttgggcaagctgtacagtgtagtgagccaattgatccgctgttgtaatgtgtcatccagaatgcaatctagtatcaatggaaacccacccttgcctaatccctttggcgatcccaatctgtcccagccaattatgccaattcaacagaatgtggccgatatcctgttcgtgaggacaagttatgttaagaaaatcattgaggattgcagcaactccgaagagactgtgaaactcctgagattctgttgctgggaaaaccctcagttttcttccacagtgctatcagagctgctgtggcaggtagcctacagttacacttacgaactccgtccatatcttgatctcctgttacagatcctgttaatcgaagacagctggcagacacaccgcatccacaacgccttgaaagggattcccgacgatcgagatgggctgttcgatactatccagagatctaaaaaccactaccagaaaagggcatatcagtgcatcaagtgtatggtggccttgttttccaactgccccgttgcttaccagattctgcagggaaacggcgacctgaagagaaaatggacatgggcagtagaatggctgggcgacgagttggaaaggagaccttatactggaaatcctcagtatacctacaataactggagtcccccagtgcagagcaatgagacgtccaacggttactttttggagcgctctcacagtgctcgcatgacgttggctaaggcctgtgaactctgccccgaggaagttaagaaggctacctctgtgcagcaaatcgaaatggaagaaagtaaggagccagacgaccaggatgctcctgacgagcatgaatcccctccccctgaagacgcccctctgtacccacactctcctggatcacagtatcaacaaaataaccacgtgcatggccagccctacactggacccgctgcccaccacatgaacaatccccagcgcacaggacagcgcgctcaggagaattacgagggatcagaggaagtctcccctcctcagacaaaagatcagta

SEQ ID NO: 32075 - DNA, 8754 bp, Artificial Sequence
  derived and/or modified sequence
gcggccgccttagcgcccggtgcttgggtcggcgccgggagcgaggagcgagctacttcaaagccaccaggcctggagcggggacagaggcggcgactaggggaaggtgaagccgtcgctgcaggaggaggagcaggaggaggtgacgcaggagaaacgcaccgcccggagcccgtctgagctcagcgagagccccagcctgaggggagaaggggaagagggccgtcgccggccaaggaggaggaggaggcgggcgcggcgaggagcgagttccggcgccggtgtgcagccttttggttgagacgcccgcagccccgagcccggccgccgcagcctttcgatacactttgttgccggtcacccccgggcctgggatgcacccagggtaggtctcgtcccgggaccgagccccaccgtcgcctggtgcctcccgcctccgtgtgccctggttgtgagaagacgtctgtgtcgtgcggttatgcaatggtctctgcaagatggtttattcttgaattggacctttttaagactgacaaatgctggtacttcatcttctataagtggactataatttcttttctcaagacaactacataagcagacaaaattgcaaagatctgccctgtgtcgagtatgacagccacgactcgtggctctccggtcggagggaatgacaaccagggccaggctcctgatggacagtctcagccccccctccaacagaatcagacttcatcgcctgattcttccaatgaaaattccccggcaactcccccagatgagcaaggtcaaggtgatgccccaccacagcttgaagatgaggaacctgcatttccacatactgacttggccaagttggatgacatgatcaacaggcctcgatgggtggttccagttttgccgaaaggggaattagaagtgcttttagaagctgctattgatcttagtaaaaagggccttgatgttaaaagtgaagcatgtcagcgatttttccgtgatgggctaacaatatcattcactaaaattcttacagatgaagcagtgagtggctggaagtttgaaattcataggtgtattattaacaatactcatcgtctggtggagctatgtgtggccaagttgtcccaagactggtttccacttttagaacttcttgccatggccttaaatcctcattgcaaattccatatctacaatggtacacgtccatgtgaatcagtttcctcaagtgttcagttgcctgaagatgaactctttgctcgttctccagatcctcgatcaccaaagggttggctagtggatcttctcaacaaatttggcactttaaatgggttccagattttgcatgatcgttttattaatggatcagcattaaacgttcaaataattgcagcccttattaaaccatttgggcaatgctatgagtttctcactcttcatacagtgaaaaagtactttcttccaataatagaaatggttccacagtttttagaaaacttaactgatgaagaactgaaaaaagaagcaaagaatgaagccaaaaatgatgctctttcaatgattattaaatctttgaagaatttagcttcaagggttccaggacaagaagaaactgttaaaaacttagaaatatttaggttaaaaatgatacttagattattgcaaatttcttctttcaatggaaagatgaatgcactgaatgaagttaataaggtgatatctagtgtatcatactatactcatcgacatggtaatcctgaggaggaagagtggctcacagctgaacgaatggcagaatggatacagcagaacaatatcttatccatagtgttgcgagatagtcttcatcagccacagtatgtagaaaagttagagaagattcttcgttttgtcatcaaagaaaaagctctgaccttacaggatcttgataatatctgggcagcacaggcagggaaacatgaagccattgtgaagaatgtacatgatctcctggcaaaattggcatgggatttttctcctgaacaacttgatcatctttttgattgttttaaggccagttggacaaatgcgagtaaaaagcaacgtgaaaagctacttgagctgatacgtcgtcttgcagaagatgataaagatggtgtgatggcacacaaagtgttgaaccttctgtggaatctggctcacagtgatgatgtgcctgtagatatcatggacctggctctcagtgcccacataaaaatactagattacagttgctcccaggaccgtgatacacaaaagatccaatggatagatcgctttatagaagaacttcgcacaaatgacaaatgggttattcccgcactgaaacaaattagagaaatttgtagtttgtttggtgaagcgcctcaaaatttgagtcaaactcagcgaagtccccatgtgttttatcgccatgacttaatcaatcaacttcaacacaatcatgccctagttactttggtagcagaaaaccttgcaacttacatggaaagcatgagactatatgctagagaccatgaagattatgacccacaaactgtgaggctgggaagtagatatagtcatgttcaagaagttcaagaacggcttaacttccttagatttttattgaaggatggtcagctgtggctatgtgctcctcaggcaaaacaaatatggaaatgcttagctgagaatgcagtttacctttgtgatcgtgaagcctgttttaagtggtattccaagttgatgggggatgaaccagacttagatcctgatattaataaggacttctttgaaagtaatgtgcttcagcttgatccttctctgttaactgaaaatggaatgaagtgttttgagcgattcttcaaagctgtgaattgtcgagaaggaaaactagtagcaaaaaggagagcctatatgatggatgacttggagttaataggattagattacctttggagggtcgtgattcagagtaatgatgatattgccagcagagctatagatctcctcaaagagatatacacgaaccttggtccaagactacaagtcaatcaggtggtgatccatgaagacttcattcagtcttgttttgatcgtctgaaggcttcctatgacacattgtgtgttttggatggtgacaaagacagtgttaattgtgcaagacaggaagctgttcgaatggttcgagtattaactgttttaagggaatatataaatgaatgtgacagtgattatcatgaggaaagaacaattctccctatgtcgagagcattccgcggtaaacacctctcttttgtagttcgatttccaaaccagggcagacaggttgatgacttggaggtatggtctcatacaaatgatacaattggttcagtacgacgatgtattctcaatcgtattaaagccaacgtagcccatacaaaaattgagctctttgtgggcggtgagctgatagatcctgcagatgatagaaagttgattggacaattaaacttaaaagataaatcgcttattacagccaaacttacacagataagttccaatatgccttcaagccctgatagctcttctgattcctccactggatctcctggaaaccatggtaatcattacagtgatggtcccaatccagaagtggaaagctgtttgcctggagtgataatgtcactgcatcccagatacatctcttttctttggcaagttgcagacttaggtagcagcctaaatatgccaccccttagagatggagcaagagtacttatgaaacttatgccgccagatagcacaacgatagaaaaattaagagctatttgtttagaccatgccaaacttggagaaagcagccttagtccatctcttgactcacttttctttggtccttcagcctcacaagtgctatatctaacagaggtagtctatgccttgttaatgcctgctggtgcacctctggctgatgattcctctgattttcagtttcacttcttgaaaagtggtggcctaccccttgtactgagtatgctaaccagaaataacttcctaccgaatgcagatatggaaactcgaaggggtgcctacctcaatgctcttaaaatagccaagcttttgctaactgccattggctatggtcatgttcgagctgtggcagaagcttgtcagccaggtgtagaaggtgtgaatcccatgacacagatcaaccaagttacccatgatcaagcagtggtgctacaaagtgcccttcagagcattcctaatccatcatccgagtgcatgcttagaaatgtgtcagttcgtcttgctcagcagatatctgatgaggcttcaagatatatgcctgatatttgtgtaattagagctatacaaaaaattatctgggcatcaggatgtgggtcgttacagctagtatttagcccaaatgaagaaatcactaaaatttatgagaagaccaatgcaggcaatgagccagacttggaagacgaacaggtttgctgtgaagcattggaagtgatgaccttatgttttgccttgattccaacagccttagatgctcttagtaaagaaaaggcttggcagacattcatcattgacttactattgcactgtcacagcaaaactgttcgtcaggtggcacaggagcagttctttttaatgtgcaccagatgttgcatgggacaccggcctctacttttcttcattactctactctttactgttttggggagcacagcaagagagagagctaaacactcaggcgactactttactcttttaagacaccttcttaattacgcttacaatagtaatattaatgtacccaatgctgaagttcttctcaataatgaaattgattggcttaaaagaattagggatgatgttaaaagaacaggagaaacgggtattgaagagacgatcttagagggccaccttggagtgacaaaggagttactggcctttcaaacttctgagaaaaaatttcatattggttgtgaaaaaggaggtgctaatctcattaaagaattaattgatgatttcatatttcctgcatccaatgtttacctacagtatatgagaaatggagagcttccagctgaacaggctattccggtctgtggttcaccacctacaattaatgctggttttgaattacttgtagcattagctgttggctgtgtgaggaatctcaaacaaatagtagattctttgactgaaatgtattacattggcacagcaataactacttgtgaagcacttactgagtgggaatatctgccacctgttggaccccgcccacccaaaggattcgtggggctgaaaaatgccggtgctacttgttacatgaattctgtgattcagcaactctacatgattccttccattaggaacggtattcttgccattgaaggcacaggtagtgatgtagatgatgatatgtctggggatgagaagcaggacaatgagagcaatgttgatcccagggatgatgtatttggatatcctcaacaatttgaagataaaccagcattaagtaaaactgaagatagaaaagagtacaacattggtgtcctaagacaccttcaggtcatctttggtcatttagctgcttctcgactgcaatactatgtgcccagaggattttggaaacagttcaggctttggggtgagcctgttaatctgcgtgaacaacacgatgctttagaattttttaattcattggtggatagtttagatgaagctttaaaagctttaggacatccagctatgctaagtaaagtcttaggaggttcctttgctgatcagaagatctgccaaggctgcccacataggtacgaatgtgaagaatcttttacgaccctaaacgtagacattagaaatcaccaaaatcttcttgattctttggaacagtatgtcaaaggagatttactagaaggtgcaaatgcatatcattgtgaaaaatgcaataaaaaggttgataccgtaaagcgcttgctgattaaaaaattacctcctgttcttgctatacaactaaagcgatttgactatgactgggaaagagaatgtgcaatcaagttcaatgattattttgaatttcctcgagagctggacatggaaccttacacagttgcaggtgtcgcaaagctggaaggggataatgtaaacccagagagtcagttgatacaacagagtgagcagtctgaaagtgagacagcaggaagcacaaaatacagacttgtgggtgtgctcgtacacagtggtcaagcgagtggggggcattattattcttacatcatccaaaggaatggtggagatggtgagagaaatcgctggtataaatttgatgatggtgatgtaacagaatgtaaaatggatgatgacgaagaaatgaaaaaccagtgttttggtggagagtacatgggagaagtgtttgatcacatgatgaagcgtatgtcatacaggcgccagaaaaggtggtggaatgcttatatacttttttatgaacgaatggacacaatagaccaagatgatgagttgataagatatatatcagagcttgctatcaccaccagacctcatcagattattatgccatcagccattgagagaagtgtacggaaacagaacgtacaattcatgcataaccgaatgcagtacagtatggagtattttcagtttatgaaaaaactgcttacatgtaatggcgtttacttaaaccctcctcccgggcaagatcacctgttgcctgaagcagaagaaatcactatgatcagtattcaacttgctgctaggttcctctttactacaggatttcacacaaagaaagtagtccgtggctctgccagtgattggtatgatgcattgtgtattctccttcgtcacagcaagaatgtacgtttttggtttgctcataacgtcctttttaatgtttcaaatcgcttctccgaataccttctggagtgccctagtgcagaagtgaggggtgcgtttgcaaaacttatagtctttattgcacatttttccttgcaagatgggccatgtccttcaccttttgcctctcctggaccttctagtcaggcttatgacaacttaagcttgagtgatcacttactaagagcagtactaaatctcttgagaagggaagtttcagagcatgggcgtcatttacagcagtatttcaacctgtttgtaatgtatgccaatttaggtgtggcagagaagacacagcttctgaaattgagtgtacctgctacttttatgcttgtgtctttagatgaaggtccaggtcctccaatcaaataccagtatgctgaattaggcaaattatactcagtagtgtcacagctgatccgctgttgcaatgtctcttcaagaatgcagtcttcaatcaatggtaatcctcctcttcccaatccttttggtgatcctaatttatcacaacctataatgccaattcagcagaatgtggcagacattttatttgtgagaacaagttatgtgaagaaaatcattgaagactgcagtaattcagaggaaaccgtcaaattgcttcgtttttgctgctgggagaatcctcagttctcatctactgtcctcagtgaacttctctggcaggttgcatattcctatacctatgaactgcggccctatttggatctgcttttgcaaatcttactgattgaggactcctggcaaactcacagaattcataatgcactgaaaggaattccagatgaccgagatgggctgtttgacacaatccagcgctctaagaatcactatcaaaaaagagcataccagtgtataaaatgtatggtagctctatttagtaactgtcctgttgcttaccaaatcctgcagggcaatggagatcttaaaagaaagtggacctgggcagtggaatggcttggagatgaacttgaaagaagaccatatactggcaatcctcagtacacttacaacaattggtctcccccagtgcaaagcaatgaaacgtccaatggttatttcttggagagatcacatagtgctaggatgacacttgcaaaagcttgtgaactctgtccagaggaggtaaaaaaagccaccagtgtgcagcagatagaaatggaagagagcaaagagccagatgaccaagatgctccagatgaacatgagtcgcctccacctgaagatgccccattgtacccccattcacctggatctcagtatcaacagaataaccatgtgcatggacagccatatacaggcccagcagcacatcacatgaacaaccctcagagaactggccaacgagcacaagaaaattatgaaggcagtgaagaagtatccccacctcaaaccaaggatcaatgaaatgcacataattaactggttccatcaagactgtgcacccaggccttacagtccaacctttttctgtgtctggctaatatttaaaactagaaaaactattcctaatcaacatggagtggagagtttattcactgtcttatctgcagaaatttgctgtcaatatataacccgcctgcagtggaaagtgtatagtgttttgtaataaatggcctgatgctaatgtgtaaatggcaaaggtgtatatagtatattaatgttgactgttaattcttaagcaagaaacttttttcttgatgagactcacagatctacacaaactacaaaagttaattttcttgttacacccactgcactctgcaaccagtgttgcctgcctcatggcagttggatcagctcctttacaaaaaa

SEQ ID NO: 32076 - protein, 2554 aa, Artificial Sequence
  derived and/or modified sequence
MTATTRGSPVGGNDNQGQAPDGQSQPPLQQNQTSSPDSSNENSPATPPDEQGQGDAPPQLEDEEPAFPHTDLAKLDDMINRPRWVVPVLPKGELEVLLEAAIDLSKKGLDVKSEACQRFFRDGLTISFTKILTDEAVSGWKFEIHRCIINNTHRLVELCVAKLSQDWFPLLELLAMALNPHCKFHIYNGTRPCESVSSSVQLPEDELFARSPDPRSPKGWLVDLLNKFGTLNGFQILHDRFINGSALNVQIIAALIKPFGQCYEFLTLHTVKKYFLPIIEMVPQFLENLTDEELKKEAKNEAKNDALSMIIKSLKNLASRVPGQEETVKNLEIFRLKMILRLLQISSFNGKMNALNEVNKVISSVSYYTHRHGNPEEEEWLTAERMAEWIQQNNILSIVLRDSLHQPQYVEKLEKILRFVIKEKALTLQDLDNIWAAQAGKHEAIVKNVHDLLAKLAWDFSPEQLDHLFDCFKASWTNASKKQREKLLELIRRLAEDDKDGVMAHKVLNLLWNLAHSDDVPVDIMDLALSAHIKILDYSCSQDRDTQKIQWIDRFIEELRTNDKWVIPALKQIREICSLFGEAPQNLSQTQRSPHVFYRHDLINQLQHNHALVTLVAENLATYMESMRLYARDHEDYDPQTVRLGSRYSHVQEVQERLNFLRFLLKDGQLWLCAPQAKQIWKCLAENAVYLCDREACFKWYSKLMGDEPDLDPDINKDFFESNVLQLDPSLLTENGMKCFERFFKAVNCREGKLVAKRRAYMMDDLELIGLDYLWRVVIQSNDDIASRAIDLLKEIYTNLGPRLQVNQVVIHEDFIQSCFDRLKASYDTLCVLDGDKDSVNCARQEAVRMVRVLTVLREYINECDSDYHEERTILPMSRAFRGKHLSFVVRFPNQGRQVDDLEVWSHTNDTIGSVRRCILNRIKANVAHTKIELFVGGELIDPADDRKLIGQLNLKDKSLITAKLTQISSNMPSSPDSSSDSSTGSPGNHGNHYSDGPNPEVESCLPGVIMSLHPRYISFLWQVADLGSSLNMPPLRDGARVLMKLMPPDSTTIEKLRAICLDHAKLGESSLSPSLDSLFFGPSASQVLYLTEVVYALLMPAGAPLADDSSDFQFHFLKSGGLPLVLSMLTRNNFLPNADMETRRGAYLNALKIAKLLLTAIGYGHVRAVAEACQPGVEGVNPMTQINQVTHDQAVVLQSALQSIPNPSSECMLRNVSVRLAQQISDEASRYMPDICVIRAIQKIIWASGCGSLQLVFSPNEEITKIYEKTNAGNEPDLEDEQVCCEALEVMTLCFALIPTALDALSKEKAWQTFIIDLLLHCHSKTVRQVAQEQFFLMCTRCCMGHRPLLFFITLLFTVLGSTARERAKHSGDYFTLLRHLLNYAYNSNINVPNAEVLLNNEIDWLKRIRDDVKRTGETGIEETILEGHLGVTKELLAFQTSEKKFHIGCEKGGANLIKELIDDFIFPASNVYLQYMRNGELPAEQAIPVCGSPPTINAGFELLVALAVGCVRNLKQIVDSLTEMYYIGTAITTCEALTEWEYLPPVGPRPPKGFVGLKNAGATCYMNSVIQQLYMIPSIRNGILAIEGTGSDVDDDMSGDEKQDNESNVDPRDDVFGYPQQFEDKPALSKTEDRKEYNIGVLRHLQVIFGHLAASRLQYYVPRGFWKQFRLWGEPVNLREQHDALEFFNSLVDSLDEALKALGHPAMLSKVLGGSFADQKICQGCPHRYECEESFTTLNVDIRNHQNLLDSLEQYVKGDLLEGANAYHCEKCNKKVDTVKRLLIKKLPPVLAIQLKRFDYDWERECAIKFNDYFEFPRELDMEPYTVAGVAKLEGDNVNPESQLIQQSEQSESETAGSTKYRLVGVLVHSGQASGGHYYSYIIQRNGGDGERNRWYKFDDGDVTECKMDDDEEMKNQCFGGEYMGEVFDHMMKRMSYRRQKRWWNAYILFYERMDTIDQDDELIRYISELAITTRPHQIIMPSAIERSVRKQNVQFMHNRMQYSMEYFQFMKKLLTCNGVYLNPPPGQDHLLPEAEEITMISIQLAARFLFTTGFHTKKVVRGSASDWYDALCILLRHSKNVRFWFAHNVLFNVSNRFSEYLLECPSAEVRGAFAKLIVFIAHFSLQDGPCPSPFASPGPSSQAYDNLSLSDHLLRAVLNLLRREVSEHGRHLQQYFNLFVMYANLGVAEKTQLLKLSVPATFMLVSLDEGPGPPIKYQYAELGKLYSVVSQLIRCCNVSSRMQSSINGNPPLPNPFGDPNLSQPIMPIQQNVADILFVRTSYVKKIIEDCSNSEETVKLLRFCCWENPQFSSTVLSELLWQVAYSYTYELRPYLDLLLQILLIEDSWQTHRIHNALKGIPDDRDGLFDTIQRSKNHYQKRAYQCIKCMVALFSNCPVAYQILQGNGDLKRKWTWAVEWLGDELERRPYTGNPQYTYNNWSPPVQSNETSNGYFLERSHSARMTLAKACELCPEEEPDDQDAPDEHESPPPEDAPLYPHSPGSQYQQNNHVHGQPYTGPAAHHMNNPQRTGQRAQENYEGSEEVSPPQTKDQ

SEQ ID NO: 32077 - DNA, 7665 bp, Artificial Sequence
  derived and/or modified sequence
atgaccgccaccaccagaggcagccccgtgggcggcaacgacaaccagggccaggcccccgacggccagagccagccccccctgcagcagaaccagaccagcagccccgacagcagcaacgagaacagccccgccaccccccccgacgagcagggccagggcgacgcccccccccagctggaggacgaggagcccgccttcccccacaccgacctggccaagctggacgacatgatcaacagacccagatgggtggtgcccgtgctgcccaagggcgagctggaggtgctgctggaggccgccatcgacctgagcaagaagggcctggacgtgaagagcgaggcctgccagagattcttcagagacggcctgaccatcagcttcaccaagatcctgaccgacgaggccgtgagcggctggaagttcgagatccacagatgcatcatcaacaacacccacagactggtggagctgtgcgtggccaagctgagccaggactggttccccctgctggagctgctggccatggccctgaacccccactgcaagttccacatctacaacggcaccagaccctgcgagagcgtgagcagcagcgtgcagctgcccgaggacgagctgttcgccagaagccccgaccccagaagccccaagggctggctggtggacctgctgaacaagttcggcaccctgaacggcttccagatcctgcacgacagattcatcaacggcagcgccctgaacgtgcagatcatcgccgccctgatcaagcccttcggccagtgctacgagttcctgaccctgcacaccgtgaagaagtacttcctgcccatcatcgagatggtgccccagttcctggagaacctgaccgacgaggagctgaagaaggaggccaagaacgaggccaagaacgacgccctgagcatgatcatcaagagcctgaagaacctggccagcagagtgcccggccaggaggagaccgtgaagaacctggagatcttcagactgaagatgatcctgagactgctgcagatcagcagcttcaacggcaagatgaacgccctgaacgaggtgaacaaggtgatcagcagcgtgagctactacacccacagacacggcaaccccgaggaggaggagtggctgaccgccgagagaatggccgagtggatccagcagaacaacatcctgagcatcgtgctgagagacagcctgcaccagccccagtacgtggagaagctggagaagatcctgagattcgtgatcaaggagaaggccctgaccctgcaggacctggacaacatctgggccgcccaggccggcaagcacgaggccatcgtgaagaacgtgcacgacctgctggccaagctggcctgggacttcagccccgagcagctggaccacctgttcgactgcttcaaggccagctggaccaacgccagcaagaagcagagagagaagctgctggagctgatcagaagactggccgaggacgacaaggacggcgtgatggcccacaaggtgctgaacctgctgtggaacctggcccacagcgacgacgtgcccgtggacatcatggacctggccctgagcgcccacatcaagatcctggactacagctgcagccaggacagagacacccagaagatccagtggatcgacagattcatcgaggagctgagaaccaacgacaagtgggtgatccccgccctgaagcagatcagagagatctgcagcctgttcggcgaggccccccagaacctgagccagacccagagaagcccccacgtgttctacagacacgacctgatcaaccagctgcagcacaaccacgccctggtgaccctggtggccgagaacctggccacctacatggagagcatgagactgtacgccagagaccacgaggactacgacccccagaccgtgagactgggcagcagatacagccacgtgcaggaggtgcaggagagactgaacttcctgagattcctgctgaaggacggccagctgtggctgtgcgccccccaggccaagcagatctggaagtgcctggccgagaacgccgtgtacctgtgcgacagagaggcctgcttcaagtggtacagcaagctgatgggcgacgagcccgacctggaccccgacatcaacaaggacttcttcgagagcaacgtgctgcagctggaccccagcctgctgaccgagaacggcatgaagtgcttcgagagattcttcaaggccgtgaactgcagagagggcaagctggtggccaagagaagagcctacatgatggacgacctggagctgatcggcctggactacctgtggagagtggtgatccagagcaacgacgacatcgccagcagagccatcgacctgctgaaggagatctacaccaacctgggccccagactgcaggtgaaccaggtggtgatccacgaggacttcatccagagctgcttcgacagactgaaggccagctacgacaccctgtgcgtgctggacggcgacaaggacagcgtgaactgcgccagacaggaggccgtgagaatggtgagagtgctgaccgtgctgagagagtacatcaacgagtgcgacagcgactaccacgaggagagaaccatcctgcccatgagcagagccttcagaggcaagcacctgagcttcgtggtgagattccccaaccagggcagacaggtggacgacctggaggtgtggagccacaccaacgacaccatcggcagcgtgagaagatgcatcctgaacagaatcaaggccaacgtggcccacaccaagatcgagctgttcgtgggcggcgagctgatcgaccccgccgacgacagaaagctgatcggccagctgaacctgaaggacaagagcctgatcaccgccaagctgacccagatcagcagcaacatgcccagcagccccgacagcagcagcgacagcagcaccggcagccccggcaaccacggcaaccactacagcgacggccccaaccccgaggtggagagctgcctgcccggcgtgatcatgagcctgcaccccagatacatcagcttcctgtggcaggtggccgacctgggcagcagcctgaacatgccccccctgagagacggcgccagagtgctgatgaagctgatgccccccgacagcaccaccatcgagaagctgagagccatctgcctggaccacgccaagctgggcgagagcagcctgagccccagcctggacagcctgttcttcggccccagcgccagccaggtgctgtacctgaccgaggtggtgtacgccctgctgatgcccgccggcgcccccctggccgacgacagcagcgacttccagttccacttcctgaagagcggcggcctgcccctggtgctgagcatgctgaccagaaacaacttcctgcccaacgccgacatggagaccagaagaggcgcctacctgaacgccctgaagatcgccaagctgctgctgaccgccatcggctacggccacgtgagagccgtggccgaggcctgccagcccggcgtggagggcgtgaaccccatgacccagatcaaccaggtgacccacgaccaggccgtggtgctgcagagcgccctgcagagcatccccaaccccagcagcgagtgcatgctgagaaacgtgagcgtgagactggcccagcagatcagcgacgaggccagcagatacatgcccgacatctgcgtgatcagagccatccagaagatcatctgggccagcggctgcggcagcctgcagctggtgttcagccccaacgaggagatcaccaagatctacgagaagaccaacgccggcaacgagcccgacctggaggacgagcaggtgtgctgcgaggccctggaggtgatgaccctgtgcttcgccctgatccccaccgccctggacgccctgagcaaggagaaggcctggcagaccttcatcatcgacctgctgctgcactgccacagcaagaccgtgagacaggtggcccaggagcagttcttcctgatgtgcaccagatgctgcatgggccacagacccctgctgttcttcatcaccctgctgttcaccgtgctgggcagcaccgccagagagagagccaagcacagcggcgactacttcaccctgctgagacacctgctgaactacgcctacaacagcaacatcaacgtgcccaacgccgaggtgctgctgaacaacgagatcgactggctgaagagaatcagagacgacgtgaagagaaccggcgagaccggcatcgaggagaccatcctggagggccacctgggcgtgaccaaggagctgctggccttccagaccagcgagaagaagttccacatcggctgcgagaagggcggcgccaacctgatcaaggagctgatcgacgacttcatcttccccgccagcaacgtgtacctgcagtacatgagaaacggcgagctgcccgccgagcaggccatccccgtgtgcggcagcccccccaccatcaacgccggcttcgagctgctggtggccctggccgtgggctgcgtgagaaacctgaagcagatcgtggacagcctgaccgagatgtactacatcggcaccgccatcaccacctgcgaggccctgaccgagtgggagtacctgccccccgtgggccccagaccccccaagggcttcgtgggcctgaagaacgccggcgccacctgctacatgaacagcgtgatccagcagctgtacatgatccccagcatcagaaacggcatcctggccatcgagggcaccggcagcgacgtggacgacgacatgagcggcgacgagaagcaggacaacgagagcaacgtggaccccagagacgacgtgttcggctacccccagcagttcgaggacaagcccgccctgagcaagaccgaggacagaaaggagtacaacatcggcgtgctgagacacctgcaggtgatcttcggccacctggccgccagcagactgcagtactacgtgcccagaggcttctggaagcagttcagactgtggggcgagcccgtgaacctgagagagcagcacgacgccctggagttcttcaacagcctggtggacagcctggacgaggccctgaaggccctgggccaccccgccatgctgagcaaggtgctgggcggcagcttcgccgaccagaagatctgccagggctgcccccacagatacgagtgcgaggagagcttcaccaccctgaacgtggacatcagaaaccaccagaacctgctggacagcctggagcagtacgtgaagggcgacctgctggagggcgccaacgcctaccactgcgagaagtgcaacaagaaggtggacaccgtgaagagactgctgatcaagaagctgccccccgtgctggccatccagctgaagagattcgactacgactgggagagagagtgcgccatcaagttcaacgactacttcgagttccccagagagctggacatggagccctacaccgtggccggcgtggccaagctggagggcgacaacgtgaaccccgagagccagctgatccagcagagcgagcagagcgagagcgagaccgccggcagcaccaagtacagactggtgggcgtgctggtgcacagcggccaggccagcggcggccactactacagctacatcatccagagaaacggcggcgacggcgagagaaacagatggtacaagttcgacgacggcgacgtgaccgagtgcaagatggacgacgacgaggagatgaagaaccagtgcttcggcggcgagtacatgggcgaggtgttcgaccacatgatgaagagaatgagctacagaagacagaagagatggtggaacgcctacatcctgttctacgagagaatggacaccatcgaccaggacgacgagctgatcagatacatcagcgagctggccatcaccaccagaccccaccagatcatcatgcccagcgccatcgagagaagcgtgagaaagcagaacgtgcagttcatgcacaacagaatgcagtacagcatggagtacttccagttcatgaagaagctgctgacctgcaacggcgtgtacctgaaccccccccccggccaggaccacctgctgcccgaggccgaggagatcaccatgatcagcatccagctggccgccagattcctgttcaccaccggcttccacaccaagaaggtggtgagaggcagcgccagcgactggtacgacgccctgtgcatcctgctgagacacagcaagaacgtgagattctggttcgcccacaacgtgctgttcaacgtgagcaacagattcagcgagtacctgctggagtgccccagcgccgaggtgagaggcgccttcgccaagctgatcgtgttcatcgcccacttcagcctgcaggacggcccctgccccagccccttcgccagccccggccccagcagccaggcctacgacaacctgagcctgagcgaccacctgctgagagccgtgctgaacctgctgagaagagaggtgagcgagcacggcagacacctgcagcagtacttcaacctgttcgtgatgtacgccaacctgggcgtggccgagaagacccagctgctgaagctgagcgtgcccgccaccttcatgctggtgagcctggacgagggccccggcccccccatcaagtaccagtacgccgagctgggcaagctgtacagcgtggtgagccagctgatcagatgctgcaacgtgagcagcagaatgcagagcagcatcaacggcaacccccccctgcccaaccccttcggcgaccccaacctgagccagcccatcatgcccatccagcagaacgtggccgacatcctgttcgtgagaaccagctacgtgaagaagatcatcgaggactgcagcaacagcgaggagaccgtgaagctgctgagattctgctgctgggagaacccccagttcagcagcaccgtgctgagcgagctgctgtggcaggtggcctacagctacacctacgagctgagaccctacctggacctgctgctgcagatcctgctgatcgaggacagctggcagacccacagaatccacaacgccctgaagggcatccccgacgacagagacggcctgttcgacaccatccagagaagcaagaaccactaccagaagagagcctaccagtgcatcaagtgcatggtggccctgttcagcaactgccccgtggcctaccagatcctgcagggcaacggcgacctgaagagaaagtggacctgggccgtggagtggctgggcgacgagctggagagaagaccctacaccggcaacccccagtacacctacaacaactggagcccccccgtgcagagcaacgagaccagcaacggctacttcctggagagaagccacagcgccagaatgaccctggccaaggcctgcgagctgtgccccgaggaggagcccgacgaccaggacgcccccgacgagcacgagagccccccccccgaggacgcccccctgtacccccacagccccggcagccagtaccagcagaacaaccacgtgcacggccagccctacaccggccccgccgcccaccacatgaacaacccccagagaaccggccagagagcccaggagaactacgagggcagcgaggaggtgagccccccccagaccaaggaccagtag

SEQ ID NO: 32078 - DNA, 7665 bp, Artificial Sequence
  derived and/or modified sequence
atgacagccaccactaggggttcaccagtaggcggcaacgacaatcagggtcaagcacctgatggtcagagtcagccgccgctccagcagaaccagaccagctcacccgacagctctaatgaaaactctcccgcaacaccccccgatgagcaagggcagggtgacgccccccctcaactggaggatgaagaacctgcgttcccacacactgatctcgcaaagctggacgatatgattaatcggcccaggtgggtggtgcctgtgctgcctaagggggagctggaggtgctgttagaagctgcaatcgacttatccaagaagggcctcgatgtcaagtcagaagcctgccaacgattcttccgggacgggctcacaatcagcttcacaaaaatattgacagacgaggctgtctcaggctggaagtttgagatacacagatgtatcattaacaacactcaccgtctggtcgaactgtgcgtggccaagctttcccaggattggttcccattgctggagcttttggctatggccctgaacccccattgtaagtttcatatttacaatggcacacgaccatgcgagtctgtgagctcctctgtgcagctgccagaagacgaattgtttgcgcgatcacccgatcccaggagtccgaaaggatggctggttgatttgttgaataagtttggtactcttaatggatttcagatcctgcatgatcgattcatcaatggctcggcactcaacgttcagattatagctgccctgatcaagccattcggtcagtgctacgagtttctgaccttacataccgtaaagaaatattttctgcccatcatcgaaatggtcccacagttcttagaaaatctcacagacgaggaactcaagaaggaggcaaagaatgaagcaaaaaacgacgctctgagcatgatcataaaaagtctcaaaaacctcgcatcacgagttccagggcaagaggagacagtgaagaatctcgaaatctttaggctcaagatgatactccgattgctccagataagttctttcaatggaaagatgaatgccctcaacgaggtcaataaagtgatctcgtccgtgtcctactacacacaccggcatggcaaccccgaggaagaggagtggctgacggcagaacgtatggctgaatggatccagcagaataatatcttgtcgattgtcctgcgcgattcactgcatcagccacagtatgttgagaagctcgagaagattttacgcttcgttatcaaggaaaaagcgctgacactgcaggacctggataacatctgggctgctcaggccgggaagcacgaggcaatcgtgaagaacgtacacgatctactggctaagctggcctgggacttttctcctgaacagctagaccatctctttgactgctttaaggcaagctggaccaatgccagcaagaagcagagggagaaattactggagctgatacgccgtttagctgaagatgataaggacggcgtcatggcgcacaaagtgctgaacctcctatggaatctggcacatagtgacgatgtgccagtggacattatggaccttgctttatccgcccatatcaagatcctagactactcttgcagtcaggaccgagacacccagaaaatccagtggattgatagattcatcgaagagctgcggacaaacgacaaatgggtgatcccggccctgaagcagatcagagaaatctgtagcctctttggcgaagccccgcagaatctcagccagacacagcgatctcctcatgtattttacaggcacgacttgatcaaccagctccagcataatcacgcactggtgacgctcgtggcagagaacttagctacctacatggagagtatgaggttgtacgcccgagatcatgaggactatgatccacagacagtgaggcttggttcacgttattcccacgtgcaagaagtgcaggaaagactcaattttctccggttccttctgaaagacggacagctctggctctgtgctccccaagctaagcagatctggaaatgtctggccgagaatgccgtgtacctttgcgatcgtgaggcgtgttttaagtggtatagcaagttgatgggggatgagcccgacttggacccagatatcaataaggactttttcgagtccaacgtgctacagctcgacccatctttgctaaccgaaaatgggatgaaatgctttgaaagattttttaaggcagtgaactgcagagaggggaaactggtggctaagcgacgcgcgtacatgatggatgacctagagctgatcgggctggactatctgtggcgcgtggttatccagtctaacgacgatatcgccagcagggccatcgatctactgaaagaaatatacacaaatctgggtcccagacttcaggttaatcaggtggtgattcacgaggacttcattcagagctgtttcgacagactcaaagccagctatgacacactgtgtgtgctggacggtgataaggacagcgttaactgtgcccgccaggaggcagtccggatggtgagggtcttgaccgtgctcagggagtatatcaatgagtgtgatagcgactatcacgaggagagaacaattctccccatgagccgcgcgtttcgcggcaaacatcttagctttgtcgttcggtttccgaatcagggccgccaagtggacgacctcgaggtttggagtcataccaatgacacaatcggctccgtcagacgatgcattttaaatagaattaaggcaaacgttgcccacacaaaaattgagctatttgtgggcggcgagctgatagaccccgccgacgacaggaagctgattggtcaactcaatctgaaggataagtctcttattaccgccaagctgacacagatatcaagtaacatgccatcttctcccgacagttcttccgatagcagcacaggatctcctgggaatcatggcaaccattacagcgacggaccaaatcccgaggtggagtcatgtctgccaggggtgatcatgagcttgcaccctagatacatttccttcctttggcaagtcgccgatctgggatcgtctctcaatatgccacctttaagagatggcgcccgagtgcttatgaagttgatgccccccgattcaacaaccatcgagaaacttagggcaatctgcctggatcacgccaaattaggggagagcagccttagtccatctcttgattccttgttcttcggcccatccgcaagtcaagttctgtacctgacagaggtagtctatgccctgttaatgccagcaggagcaccacttgctgatgactcaagtgattttcagttccattttctaaagtctggcggcttgccgctcgtcctttcaatgctgactcggaataattttcttccaaacgcagatatggagactagacgaggtgcttacctgaatgctctcaaaatcgctaagctcctgctcactgcaatcggttacggacatgtgagggccgtggccgaggcctgccagcccggggtcgagggcgtgaaccccatgacgcagatcaaccaggtcacgcacgatcaggccgtggtgctacagtcagctctgcaatccatcccaaaccccagtagtgagtgcatgcttagaaatgtctccgtcagattagcccagcagatttccgacgaggccagtcggtatatgccagacatttgtgtcatccgcgctattcagaagatcatctgggccagtggctgcgggtccctgcaacttgtgttctctcctaatgaagaaattaccaaaatttacgaaaagacgaacgcaggtaacgagccagatcttgaggatgagcaggtctgctgtgaagcccttgaggtgatgactttgtgctttgctctgatcccgacagcgttagatgctctcagcaaggaaaaggcttggcagacattcattatcgatctcctgttacattgccacagtaagacagtgaggcaggtcgcgcaggaacagttttttctaatgtgcacaagatgttgcatggggcaccgacccctgcttttcttcataaccttactgttcacggtcctcgggagcacagcccgcgagagagctaaacattcaggggactattttacgctgctccgtcacctgctcaattacgcttacaactcaaatataaacgttccaaatgccgaggttctcctcaataatgaaattgactggttaaaaagaattagggatgacgtcaagcgaacgggcgagacgggcattgaagagactattcttgaaggccacttaggcgtgaccaaagagttactcgctttccaaacaagcgagaagaagtttcacattggatgcgaaaaggggggggcaaaccttatcaaagagctaatagatgactttattttccctgcatccaatgtgtatttgcagtacatgagaaacggagaactccccgcagaacaggccatcccagtgtgtggtagtccccctactatcaacgcaggatttgaacttctcgtagccctggcagttggatgtgtcagaaatctgaagcagattgtcgatagtcttaccgagatgtactatatcggtactgccattacgacttgtgaggctctcacagaatgggaatacctgccaccggtgggcccccgcccaccaaaagggtttgttggcttaaagaatgccggcgccacctgttacatgaactccgtgatacaacaactttacatgattccttcgatcaggaatgggattttggctatagaagggactggctcagacgtcgacgacgacatgtctggcgatgagaagcaggacaacgagagtaatgtggatcctcgagacgacgtctttggataccctcagcaattcgaggacaaaccagctctgtctaagacagaggatcgaaaggaatataacataggggtcctacgccacctacaggttattttcggtcatttggccgcttcccgtctccagtattatgtgccccggggtttctggaaacagttcagactttggggagaaccggttaacttgagagagcagcacgacgccctagagttcttcaattccttagtcgatagcctcgacgaggccctgaaagccctaggccatcccgcaatgctgtctaaagtcctgggggggagctttgctgatcaaaagatatgccaaggatgcccacatagatacgagtgcgaggaaagcttcaccaccctcaacgtggacatccggaaccatcagaatctgttagacagcttagagcagtacgttaagggggacttgttggaaggcgccaacgcctatcactgcgagaaatgtaacaagaaagtggatacagtgaagcgccttctgatcaagaagcttcccccagtcctcgcgattcagctgaaacgctttgactatgattgggagcgggagtgcgcaatcaagttcaatgactattttgaattcccgagggaactggacatggagccatacaccgtggctggagtagctaaactcgaaggagacaacgttaatcctgagtctcagctgattcagcaaagtgagcagtctgaatccgaaacggccggatcaaccaaatatcgactggtaggcgtgctcgtgcattcgggacaggcatccgggggtcactactacagttatatcatacaaagaaacggaggcgacggcgagcgcaataggtggtacaagttcgatgatggggacgtcaccgaatgtaagatggatgacgatgaagaaatgaaaaatcagtgcttcggcggtgagtatatgggtgaggtgtttgaccacatgatgaagcgcatgtcatataggaggcagaaacgctggtggaatgcatatatacttttttacgagcgaatggatactatagaccaagatgacgaactcatccgttatatctccgagttagcaattactacacgcccccaccagattatcatgccaagcgctatagagcgaagtgtgcgcaaacagaatgtgcagttcatgcacaaccggatgcagtatagtatggaatattttcagtttatgaagaagctgctaacatgcaatggtgtgtacctgaacccccccccgggtcaggatcatttgctaccagaagccgaggagatcaccatgatatcaatacagctcgccgcaaggtttctatttacgactgggttccataccaaaaaagtggtccgcggttccgcgagcgattggtacgacgcattgtgcattctgctgcgccattcaaaaaatgtgcggttttggtttgctcataacgtcctgttcaatgtctcgaacagattctcagagtacctgctcgagtgtccttctgccgaagtgcggggcgcttttgctaagctgatagtgttcattgctcattttagccttcaggacggtccttgtccaagcccgtttgcaagcccaggccccagttctcaggcgtacgacaacttatccctctccgaccatttgttacgcgccgtgctgaacttgctgagacgggaggtctccgaacacggacgacatctgcagcagtactttaatctttttgtcatgtatgccaacctaggtgtggccgagaagacgcagctcttaaagctgagtgttccagccaccttcatgctcgttagtctcgatgaaggccccggcccccccatcaaataccagtacgccgagttggggaagctttactctgtggtgagtcagcttatccggtgctgcaacgtgtcctcccgcatgcaaagcagcatcaacgggaacccccctctacctaacccctttggtgatccgaacttgagtcagcctatcatgcctatccaacagaatgtggccgatatactattcgttaggactagctatgttaagaaaatcatcgaagactgtagcaacagcgaagagaccgtaaagctgctaaggttctgctgttgggagaacccccaattctccagtaccgtgctttccgagctactctggcaggtagcatattcctacacctatgaactccgtccttatctggacttactgcttcaaatactcctgatagaggactcctggcagactcaccgcattcataatgccctgaagggcattcctgacgatcgagacggcctgtttgatactatccagagatccaagaatcactaccagaagagggcttaccagtgtatcaaatgcatggtggcccttttctccaattgccctgtggcttaccaaattcttcaggggaatggcgaccttaagcggaaatggacttgggccgtggaatggctgggagatgaactcgagcggcggccatatacaggcaacccccaatacacatacaataattggagccctccagtgcagtccaatgagactagtaacggctacttcctggaaaggagtcactccgctcgcatgaccttagctaaggcctgtgaattgtgtcctgaggaagagccagacgaccaagacgcgcccgacgaacacgagtctcctcctcccgaggatgcgcccctgtaccctcacagcccaggatctcagtatcagcagaacaaccacgtgcatggtcagccgtataccgggcctgccgctcaccatatgaacaacccccagaggacaggccagagggcacaagagaactacgagggttccgaagaggtatctcccccccagaccaaagatcaatag

SEQ ID NO: 32079 - DNA, 7665 bp, Artificial Sequence
  derived and/or modified sequence
atgacagccaccacccggggcagccctgtgggcggcaatgacaaccagggccaggccccagatggccagagccagccccccctgcagcagaaccagaccagcagcccagacagcagcaatgaaaacagccctgccaccccaccagatgagcagggccagggagatgccccaccccagctggaggatgaggagcccgccttcccccacacagacctggccaagctggatgacatgatcaaccggccccgctgggtggtgcctgtgctgcccaagggggagctggaggtgctgctggaggccgccatcgacctgagcaagaagggcctggatgtgaagtctgaggcctgccagcgcttcttcagagatggcctgaccatctccttcaccaagatcctgacagatgaggccgtgtctggctggaagtttgagatccaccgctgcatcatcaacaacacccaccggctggtggagctgtgtgtggccaagctgagccaggactggttccccctgctggagctgctggccatggccctgaacccccactgcaagttccacatctacaacggcacccggccctgtgagagcgtgagcagctctgtgcagctgcctgaagatgagctgtttgcccggagcccagaccccaggagccccaagggctggctggtggacctgctgaacaagtttggcaccctgaatggcttccagatcctgcatgaccgcttcatcaatggaagtgccctgaatgtgcagatcatcgccgccctgatcaagcccttcggccagtgctatgagttcctgaccctgcacacagtgaagaagtacttcctgcccatcatcgagatggtgccccagttcctggagaacctgacagatgaggagctgaagaaggaggccaagaatgaggccaagaatgatgccctgtccatgatcatcaagagcctgaagaacctggccagccgggtgcccggccaggaggagaccgtgaagaacctggagatcttccggctgaagatgatcctgcggctgctgcagatcagcagcttcaacgggaagatgaatgccctgaatgaggtgaacaaggtgatcagctctgtgtcctactacacccaccgccacggcaaccctgaggaggaggagtggctgacagctgagaggatggccgagtggatccagcagaacaacatcctgagcatcgtgctgcgggacagcctgcaccagccccagtatgtggagaagctggagaagatcctgcgctttgtgatcaaggagaaggccctgaccctgcaggacctggacaacatctgggccgcccaggccggcaagcatgaggccatcgtgaagaatgtgcatgacctgctggccaagctggcctgggacttcagccctgagcagctggaccacctgtttgactgcttcaaggcctcctggaccaatgccagcaagaagcagcgggagaagctgctggagctgatccggcggctggccgaggatgacaaggatggagtgatggcccacaaggtgctgaacctgctgtggaacctggcccacagtgatgatgtgcctgtggacatcatggacctggccctgagcgcccacatcaagatcctggactacagctgcagccaggaccgggacacccagaagatccagtggattgaccgcttcatcgaggagctgcggaccaatgacaagtgggtgatcccagccctgaagcagatccgggagatctgcagcctgtttggagaggccccccagaacctgagccagacccagaggagcccccacgtgttctacagacatgacctgatcaaccagctgcagcacaaccacgccctggtgaccctggtggccgagaacctggccacctacatggagagcatgaggctgtatgcccgggaccatgaagattatgacccccagacagtgcggctgggcagccgctacagccacgtgcaggaggtgcaggagcggctgaacttcctgcgcttcctgctgaaggatggccagctgtggctgtgtgccccccaggccaagcagatctggaagtgcctggccgagaatgctgtgtacctgtgtgaccgggaggcctgcttcaagtggtacagcaagctgatgggagatgagccagacctggaccctgacatcaacaaggacttctttgagagcaatgtgctgcagctggaccccagcctgctgacagaaaatggcatgaagtgctttgagcgcttcttcaaggctgtgaactgccgggagggcaagctggtggccaagaggcgggcctacatgatggatgacctggagctgattggcctggactacctgtggagggtggtgatccagagcaatgatgacatcgccagccgggccatcgacctgctgaaggagatctacaccaacctgggcccccggctgcaggtgaaccaggtggtgattcatgaggacttcatccagagctgctttgaccggctgaaggccagctatgacaccctgtgtgtgctggatggagacaaggacagcgtgaactgtgcccggcaggaggccgtgaggatggtgcgggtgctgactgtgctgcgggagtacatcaatgaatgtgacagcgactaccacgaggagaggaccatcctgcccatgagccgggccttccggggcaagcacctgagctttgtggtgcgcttccccaaccagggccggcaggtggatgacctggaggtgtggagccacaccaatgacaccatcggctctgtgcggcgctgcatcctgaaccgcatcaaggccaacgtggcccacaccaagattgagctgtttgtgggcggggagctgattgatcctgcagatgacaggaagctgattggccagctgaacctgaaggacaagagcctcatcacagccaagctgacccagatcagcagcaacatgcccagcagcccagacagcagcagtgacagcagcacaggcagccctggcaaccacggcaaccactacagtgatggccccaaccctgaggtggagagctgcctgcccggggtcatcatgagcctgcacccccgctacatctccttcctgtggcaggtggccgacctgggcagcagcctgaacatgccacccctgagagatggagcccgggtgctgatgaagctgatgcccccagacagcaccaccatcgagaagctgcgggccatctgcctggaccacgccaagctgggggagagcagcctgagccccagcctggacagcctcttcttcggccccagcgccagccaggtgctgtacctgacagaggtggtgtatgccctgctgatgcctgctggggcccccctggctgatgacagcagtgacttccagttccacttcctgaagagcggcggcctgcccctggtgctgtccatgctgaccaggaacaacttcctgcccaatgctgacatggagacccggcggggggcctacctgaatgccctgaagatcgccaagctgctgctgacagccatcggctacggccacgtgcgggctgtggccgaggcctgccagcccggggtggagggcgtgaaccccatgacccagatcaaccaggtgacccatgaccaggccgtggtgctgcagagcgccctgcagagcatccccaaccccagcagcgagtgcatgctgagaaatgtgtctgtgcggctggcccagcagatcagtgatgaggccagccgctacatgccagacatctgtgtgatccgggccatccagaagatcatctgggccagcggctgcggcagcctgcagctggtgttcagccccaatgaggagatcaccaagatctatgagaagaccaatgctggaaatgaaccagacctggaggatgagcaggtgtgctgtgaggccctggaggtgatgaccctgtgctttgccctgatccccacagccctggatgccctgagcaaggagaaggcctggcagaccttcatcatcgacctgctgctgcactgccacagcaagacagtgcggcaggtggcccaggagcagttcttcctgatgtgcacccgctgctgcatgggccaccggcccctgctcttcttcatcaccctgctcttcaccgtgctgggcagcacagcccgggagcgggccaagcacagcggggactacttcaccctgctgcggcacctgctgaactatgcctacaacagcaacatcaacgtgcccaatgctgaggtgctgctgaacaatgaaattgactggctgaagaggatcagagatgatgtgaagaggactggagagaccggcatcgaggagaccatcctggagggccacctgggcgtgaccaaggagctgctggccttccagaccagcgagaagaagttccacatcggctgtgagaagggcggggccaacctgatcaaggagctgattgatgacttcatcttccctgccagcaatgtgtacctgcagtacatgagaaatggagagctgcctgctgagcaggccatccctgtgtgtggcagcccccccaccatcaatgccggctttgagctgctggtggccctggccgtgggctgtgtgaggaacctgaagcagatcgtggacagcctgacagagatgtactacatcggcacagccatcaccacctgtgaggccctgacagagtgggagtacctgccccctgtgggcccccggccccccaagggctttgtgggcctgaagaatgctggggccacctgctacatgaacagcgtcatccagcagctgtacatgatccccagcatcagaaatggcatcctggccatcgagggcactggaagtgatgtggatgatgacatgtctggagatgagaagcaggacaatgaaagcaatgtggaccccagagatgatgtgtttggctacccccagcagtttgaggacaagccagccctgagcaagacagaggacaggaaggagtacaacattggagtgctgcggcacctgcaggtgatcttcggccacctggccgccagccggctgcagtactacgtgccccggggcttctggaagcagttccggctgtggggcgagcctgtgaacctgcgggagcagcatgatgccctggagttcttcaacagcctggtggacagcctggatgaggccctgaaggccctgggccacccagccatgctgagcaaggtgctgggcggcagctttgctgaccagaagatctgccagggctgcccccacagatatgaatgtgaggagagcttcaccaccctgaatgtggacatccggaaccaccagaacctgctggacagcctggagcagtatgtgaagggggacctgctggagggcgccaatgcctaccactgtgagaagtgcaacaagaaggtggacacagtgaagaggctgctgatcaagaagctgccccctgtgctggccatccagctgaagagatttgattatgactgggagagagaatgtgccatcaagttcaatgactactttgagttcccccgggagctggacatggagccctacacagtggccggcgtggccaagctggagggggacaacgtgaaccctgagagccagctgatccagcagagcgagcagagcgagagcgagacagctggcagcaccaagtaccgcctggtgggcgtgctggtgcacagcggccaggccagcggcggccactactacagctacatcatccagagaaatggaggagatggagagaggaaccgctggtacaagtttgatgatggagatgtgacagagtgcaagatggatgatgatgaggagatgaagaaccagtgctttggaggagagtacatgggagaggtgtttgaccacatgatgaagaggatgagctaccgccggcagaagcgctggtggaatgcctacatcctcttctatgaaagaatggacaccatcgaccaggatgatgagctgatccgctacatcagcgagctggccatcaccacccggccccaccagatcatcatgcccagcgccatcgagaggtctgtgaggaagcagaatgtgcagttcatgcacaacaggatgcagtacagcatggagtacttccagttcatgaagaagctgctgacctgcaatggagtgtacctgaaccccccacctggccaggaccacctgctgcctgaggccgaggagatcaccatgatcagcatccagctggccgcccgcttcctgttcaccaccggcttccacaccaagaaggtggtgcggggcagcgccagtgactggtatgatgccctgtgcatcctgctgcggcacagcaagaatgtgcgcttctggtttgcccacaacgtgctcttcaacgtgagcaaccgcttcagcgagtacctgctggagtgccccagcgctgaggtgcggggggcctttgccaagctgattgtgttcatcgcccacttcagcctgcaggacggcccctgccccagcccctttgccagccctggccccagcagccaggcctatgacaacctgagcctgagtgaccacctgctgcgggctgtgctgaacctgctgcggcgggaggtgtctgaacatggccgccacctgcagcagtacttcaacctgtttgtgatgtatgccaacctgggcgtggccgagaagacccagctgctgaagctgtctgtgcctgccaccttcatgctggtgtccctggatgagggccctggcccccccatcaagtaccagtatgcagagctgggcaagctgtacagcgtggtgtcccagctgatccgctgctgcaatgtgagcagcaggatgcagagcagcatcaatggaaatccacccctgcccaacccctttggagaccccaacctgagccagcccatcatgcccatccagcagaatgtggccgacatcctgtttgtgaggaccagctatgtgaagaagatcatcgaggactgcagcaacagcgaggagaccgtgaagctgctgcgcttctgctgctgggagaacccccagttcagcagcacagtgctgtctgagctgctgtggcaggtggcctacagctacacctatgagctgcggccctacctggacctgctgctgcagatcctgctgattgaagattcctggcagacccaccgcatccacaatgccctgaagggcatcccagatgacagagatggcctgtttgacaccatccagaggagcaagaaccactaccagaagagggcctaccagtgcatcaagtgcatggtggccctcttcagcaactgccctgtggcctaccagatcctgcagggcaatggagacctgaagaggaagtggacctgggccgtggagtggctgggagatgagctggagcggcggccctacacaggcaacccccagtacacctacaacaactggagcccccctgtgcagagcaatgagaccagcaatggctacttcctggagaggagccacagcgccaggatgaccctggccaaggcctgtgagctgtgcccagaggaggagccagatgaccaggatgccccagatgagcacgagagccccccaccagaagatgcccccctgtacccccacagccctggcagccagtaccagcagaacaaccacgtgcacggccagccctacacaggccctgctgcccaccacatgaacaacccccagaggacaggccagagggcccaggagaactatgagggcagcgaggaggtgagccccccccagaccaaggaccagtag

SEQ ID NO: 32080 - DNA, 7665 bp, Artificial Sequence
  derived and/or modified sequence
atgaccgccaccacccggggcagccccgtgggcggcaacgacaaccaaggccaggcaccagacggccagtcgcaacccccccttcagcagaatcagactagctctccagacagttcaaatgaaaattctccagcaacaccgccagatgagcagggccagggcgacgcgcctccgcagcttgaagacgaagaacctgcatttccccataccgatctggcgaaactggacgacatgattaaccggccgaggtgggtagtgcctgtgctgccaaagggcgagctggaagtactgcttgaagccgctattgacctgtcgaaaaaggggctggacgtgaagtctgaggcttgtcaacgcttcttccgggacggactgaccatcagcttcaccaagatcctgacggacgaagcagttagcgggtggaaattcgaaattcacaggtgcatcataaacaatacgcaccgactcgtcgaattatgcgtggccaagctttcacaggattggtttccacttcttgaactgctggccatggcccttaacccacactgcaagtttcacatttataacggaacaagaccttgcgaatcagtgagttcttctgtgcaattgccagaggacgaactcttcgctcgcagtccggacccgcgttctcccaaaggatggttagtagatctgctcaataaattcggcacactcaacgggtttcagatccttcacgataggtttatcaacggctcagcgcttaacgtgcagataatcgctgctctgatcaagccttttggccagtgctatgagttccttaccctgcacacagtgaaaaagtactttcttcccatcatcgaaatggtgccccaatttctggagaacctgactgacgaagagctcaagaaggaggccaaaaacgaagcaaagaacgatgccctctccatgatcataaaatcactcaaaaatctcgcatcacgcgtccccggacaggaagaaaccgtcaaaaatcttgagatttttcgcctgaagatgatacttcgactgctccagatttcaagctttaacggaaagatgaatgccctaaacgaggttaataaggtgatcagctccgtgagctactatacacatcggcatgggaacccagaggaggaggagtggctcaccgcagagcggatggctgaatggatccagcagaacaacatcttatcaatcgtattacgggattctcttcaccaaccgcagtatgtggagaaactagagaaaatcttgaggtttgtaattaaggagaaggctctcaccttgcaggatttagataatatttgggccgcccaagccggaaagcacgaagctatcgttaagaacgtccacgacctgctggctaagttggcatgggatttctcccctgaacagttggatcatttgttcgattgcttcaaggcttcttggaccaatgcctccaagaagcagagagaaaaactgttagagcttatccgacgtctcgccgaagatgataaagacggagttatggcacacaaagtgcttaatctgttgtggaacttagcacacagcgacgacgttcccgtggacatcatggacttagcactctccgctcatattaaaattctagattacagttgttcacaggacagagacacccagaagattcagtggatagacaggtttatcgaggaattgcggacaaacgataagtgggtgattccagctctgaaacaaatcagagagatctgtagtctattcggggaggccccgcagaatctgtcccagacccagaggagtccacacgttttttatcggcacgacctgatcaatcagcttcagcacaatcacgctctcgtcacactcgttgctgagaacctggccacatacatggaatctatgcggttgtacgctagggatcatgaggattatgatccgcagaccgtcagactcggtagtcgctactcgcatgtccaggaggtgcaagagcgcctgaatttcctgcgcttcttgctgaaagacggacagctgtggttatgcgcgcctcaggcgaaacagatctggaaatgcctggccgagaatgccgtatatctgtgcgacagggaagcttgctttaaatggtattcgaaactgatgggggacgagcctgatttggatcctgacattaataaggatttttttgagagtaacgtactgcagcttgacccatctctcctcactgagaatggcatgaaatgcttcgagaggttctttaaagcagttaattgtcgagaaggtaagttagtagctaagcggcgcgcttatatgatggatgacctggagttaattggactggactacttgtggagggtggtgatccagtccaatgatgacatcgcctcacgtgcaatcgacctgctcaaagaaatctatactaatctgggccctcggttgcaggtgaaccaggtagtgattcatgaagactttatccaaagttgcttcgaccggttgaaggctagctacgatacactgtgtgtgctggacggcgacaaagacagtgtgaattgcgcccggcaggaggctgtcaggatggtacgagtgctgaccgtcctgagagagtatataaatgagtgtgacagtgactatcacgaggagagaaccattctgccgatgtcaagggccttccgaggcaagcacctgtcttttgttgttcgctttccaaatcaggggaggcaggtcgacgatttggaggtgtggtcccatacgaatgatacaatcgggagcgtcaggcgctgtatcttgaataggattaaggccaatgttgcccatacgaaaatagagctatttgtcggtggcgagctcattgaccctgccgatgacagaaaactgatcgggcagctgaacctcaaggacaagtcactgattacggcgaaacttacacagatttcttccaacatgcctagctcacccgactctagctccgactccagcacagggagcccaggaaatcatggaaatcactacagtgacggcccaaaccctgaggttgagtcctgcttgcctggggttataatgtctttgcacccgaggtacatttcatttctgtggcaagtagcggacctgggctcaagcctcaacatgcccccgcttcgagatggcgccagggtgctcatgaagctgatgccacctgacagtactaccattgagaaactgagggcaatttgtcttgatcacgcgaaacttggtgagagctccctgagtccctctttagacagcctgttctttggcccaagtgcctctcaggtactgtacctcactgaggtggtttacgcgctgttaatgcccgctggagctcctttggcagatgactcctccgactttcagtttcattttctgaagtcaggaggtttgccactggtgctgtccatgctcacgcgaaataatttcctgcccaatgctgacatggagacccgaagaggagcctatcttaatgccctaaaaatcgccaagctcctgttgaccgctataggctacggccatgtgcgcgccgttgcagaggcatgtcaacctggcgtggagggtgtcaaccccatgactcagatcaatcaggtgacccatgatcaggccgtcgtactgcagtctgcacttcagtctattcccaacccatccagcgagtgtatgctgcgcaacgtttctgttcgcttagcccagcagatctctgacgaagcttctagatacatgccagatatttgtgtgattcgagccatccagaaaattatttgggcttctggatgtgggtcacttcagctggttttctcccccaacgaagagattaccaaaatctacgagaagacaaatgccggcaatgagcccgacctcgaggacgaacaggtttgttgtgaagcactggaagtgatgaccctgtgctttgcactcatccccaccgccctggatgccctttcaaaggagaaagcatggcagacattcatcatagatctcctgttgcactgccattcaaaaaccgtgcggcaggtggcccaggagcagttcttcctcatgtgtacaagatgctgtatgggccaccggcctctccttttctttattactttgctgttcactgtcctcggctccacagcccgggagcgcgctaagcattccggcgactacttcaccttgcttcggcaccttcttaactacgcctacaactcgaatatcaacgttcctaatgcggaagtgctcctgaacaatgagatcgattggttgaaaaggatcagagacgacgtaaagcggaccggggaaaccggtatagaggaaacaattcttgagggccacctcggagtgactaaagagctgctggctttccaaacgagtgagaagaagttccatatcggctgcgagaaggggggtgccaatctgattaaggagttgattgatgactttatcttcccggcttcaaatgtatacctacaatacatgagaaacggcgagcttcctgccgagcaagccattccggtatgcggctctcccccgaccattaatgccggcttcgagctcttggtcgctctggctgtaggctgtgtcaggaacctgaaacaaatcgtcgattcacttactgaaatgtattacatcgggacagccataacgacttgtgaagccttaacagaatgggagtatttaccaccagtggggcccagaccgccgaagggcttcgtgggactgaagaacgcaggcgcgacttgctatatgaactctgtaatccagcaactgtacatgatccctagtatacggaacggaatcttggctatcgaagggactggcagcgatgtggatgatgacatgtcaggggacgaaaagcaggataatgaaagtaacgtggaccctagagacgatgtctttggatatcctcagcagttcgaagacaaacccgccttgtccaaaaccgaggaccggaaggagtacaatatcggcgtgctgaggcacctgcaggttatattcggccatcttgccgcatcaaggctgcagtactacgtgcctcgcggattttggaagcagtttcgcctctggggagaacctgtcaatttgcgtgaacagcatgatgcactcgagttttttaattctctagtggacagcctggacgaggccctcaaagcactgggccaccccgcgatgctgagcaaggttctgggcgggtcattcgccgatcaaaaaatctgccaaggctgtccacaccgttatgagtgcgaggagtcttttacgacgctcaatgtggacatacgtaaccatcagaatcttctcgattcacttgagcagtatgttaaaggagacctacttgagggcgccaacgcctatcactgtgaaaagtgcaacaaaaaggttgacactgtgaagagacttctcatcaagaagctgccccctgtgctggcaatacagctcaagagatttgattatgattgggaaagagagtgcgcaattaaattcaatgattattttgagttcccccgcgagctggacatggaaccttacactgttgccggggtcgctaagctggagggcgacaatgtcaaccccgagtcccaattgatccagcaatctgaacagtcagaatccgagacagcagggagtacgaagtacaggttggtgggcgtactcgtgcactccgggcaggcctccggcgggcactattactcctacattattcagagaaacgggggggacggcgagcggaatagatggtataagtttgatgacggcgatgtgactgaatgtaagatggatgatgatgaagaaatgaagaatcaatgctttggaggggaatacatgggggaggtgttcgatcacatgatgaagcggatgtcctatcggcgccagaagagatggtggaacgcctacatcctcttttatgaaagaatggacacaatcgaccaggatgatgagttaatccgatatatctccgagcttgccattacaacgcggccccaccagattataatgccaagtgccattgaacgcagtgtcagaaaacaaaacgtgcaatttatgcataaccgaatgcaatactccatggagtattttcaattcatgaagaagctgctgacatgtaatggcgtgtatcttaacccacccccagggcaggatcacctactccctgaggccgaagagatcaccatgatctctattcagctggccgctagattcctgttcacaacaggttttcacaccaaaaaagttgtgcggggatcagcgtccgactggtacgatgccttatgtatcctgctcaggcatagcaagaacgtccggttctggttcgctcataatgttctttttaacgtgtccaacagattctcggaatatcttctggagtgtcccagcgccgaagttcgcggcgctttcgcaaagcttattgtcttcattgcacatttcagcttgcaagacgggccatgccccagcccattcgcctccccaggtccttcgagtcaggcctacgataacttgtctctctctgaccatctgctccgtgccgtactgaatttacttagacgagaggtgtccgaacacgggcggcacctgcagcaatatttcaatcttttcgtaatgtatgcgaacctcggggttgctgaaaagacacagctcctgaagctatccgtgcctgcaacctttatgcttgtgtcccttgacgaggggcctggcccgcccatcaagtaccagtacgcggaactgggaaagttatattctgtggtgtcacagctcatccggtgttgcaatgttagtagcagaatgcagtctagtattaacggtaacccacccttaccgaatcctttcggcgaccctaatcttagccagccgataatgcccattcagcaaaacgtggctgacattctgtttgttcgaacaagctatgtgaagaagataatagaggactgctcaaattcagaggagaccgtgaagttactgcgcttttgttgctgggagaatcctcaatttagcagtaccgtcctgtccgaactcctgtggcaggtcgcctacagctatacatacgagcttaggccgtatctggacctgctgctgcaaatcttgctcatagaggatagctggcagacgcacaggatccacaacgcactcaagggaatccctgatgatcgcgatggactatttgatactattcagcggtcaaaaaaccactatcagaagagagcctatcagtgtataaagtgcatggtggcactgttctctaactgccccgtagcctatcagatcttgcagggaaatggtgatctcaaacgcaagtggacatgggcagtagaatggttgggcgacgagctcgaacgcagaccctacacagggaatcctcagtacacttacaacaactggtcccctcccgtgcagtccaacgaaacaagtaatggttacttcctggaacggtctcactcggccaggatgacactggccaaggcttgtgaactttgtccagaggaagaacccgacgatcaagacgcgcccgatgagcatgagtcgccacctccagaagacgcgcccctttatccccatagtccaggctcacagtatcagcaaaacaatcacgttcacgggcagccctacactggccccgcagcccatcatatgaacaacccacaaagaaccgggcaacgagcacaggagaactatgaaggctcggaagaggtttccccacctcaaacaaaggaccagtag

SEQ ID NO: 32081 - DNA, 7664 bp, Artificial Sequence
  derived and/or modified sequence
atgacagctaccacaagggggtccccagtgggaggcaatgataatcaaggccaagcccctgacggacaaagccagcctccactgcaacaaaaccagacctcatcacccgacagctctaatgaaaactcccctgcaacacctcctgacgagcaggggcagggagacgcgccaccacagctggaggacgaagagcctgctttccctcatactgatctcgccaagttagatgacatgattaacagacccaggtgggttgttcccgtgcttcctaaaggcgaactggaggtactgctggaggcagccatagatttgagtaagaaggggttagacgttaaaagtgaggcatgtcagcggttctttcgcgacgggctcaccatctctttcacaaagattctcacagatgaggccgtgtcaggctggaagttcgagatccataggtgcatcattaacaatacacaccggctagtggagctgtgtgtcgccaagctgtctcaggactggttcccattgctggagttactcgccatggccctgaacccacattgcaagtttcacatctacaatgggacgagaccttgcgagagcgtctcctcctccgtccagcttccggaagacgaactatttgcaaggagccctgatccacggagccctaagggctggctggtggatctgttgaacaagtttggtacgcttaatggatttcaaatcttgcatgataggttcatcaatggcagcgcactgaacgtgcagataattgccgcattgattaagcccttcggacaatgttatgaattccttactcttcataccgtgaagaagtattttctccccataatagaaatggttccacagttcctcgagaacctcaccgacgaggaattgaagaaggaggctaagaacgaggctaaaaatgacgcactctcgatgataattaagtctctgaagaatttagccagccgagtgccgggtcaggaagaaaccgtgaaaaacctggagatctttcggcttaagatgattctgagactactgcaaataagtagctttaacggtaagatgaatgccctgaatgaagtcaataaagtcatctcttccgtctcctattatactcatcgacacggcaatccagaagaggaggaatggttgacagccgagaggatggccgagtggatccagcagaacaatatcctgtctatcgtactgcgggattctcttcatcagcctcagtatgttgaaaaattagagaagatccttcgattcgtcatcaaagagaaagcactgaccctgcaggatctcgacaatatctgggcagcacaggcgggtaagcatgaagcaattgtgaagaacgtccacgatctcttagccaagctggcttgggatttctctccggaacagttagatcacctctttgattgcttcaaggcttcttggaccaatgcctcaaaaaagcaacgagaaaaactgctggaactcatccgtcgactagccgaggatgacaaagatggcgtgatggcccacaaggttcttaatttgctgtggaatcttgcccacagcgatgatgtgcccgtggacattatggacctcgctttaagcgctcacataaaaattctagactacagctgttcccaggacagggatactcaaaaaatccaatggatcgatcgcttcatcgaggaactcaggacaaacgataagtgggttattcctgctctgaagcaaatccgagaaatatgcagtcttttcggggaggccccacagaatctcagccagacgcagcgaagccctcatgttttctaccgacacgatctgattaaccagctgcagcacaaccatgctctcgtcactttggtcgctgagaatttagcaacctacatggaaagtatgcgcctgtatgcaagggatcatgaggattatgatccccagaccgtcagattgggaagccggtactctcacgtccaggaagtccaggagcgcctgaacttcctccgttttcttctgaaggatggtcagctctggttgtgcgctcctcaagcgaagcagatctggaagtgtttagccgagaacgctgtgtatctgtgcgaccgggaagcatgcttcaagtggtactctaagcttatgggcgacgaacccgacctcgacccagatatcaataaggacttttttgagtctaacgtgctccagctggatccttccctcctcaccgagaacggcatgaaatgcttcgaacggttcttcaaagccgtgaattgtagggaaggtaagctcgtcgcaaagcgcagagcatatatgatggacgaccttgaactcatcggcttagattatttgtggagagttgtgattcagtcaaatgacgacatcgctagtcgggctatcgatcttctgaaagagatctatacgaacttagggcctagactacaggtcaatcaggtggtcatccacgaagactttatccagtcttgtttcgaccgcctcaaggccagctatgacaccctatgcgtattagacggtgataaagacagtgtgaactgcgcacggcaggaagcagttaggatggtccgtgtcttgacagttctgcgcgagtacattaacgagtgtgacagcgactatcacgaggaacgcacaattctaccaatgtctcgggcttttcggggaaaacatctcagtttcgtcgtgagattccccaaccaggggagacaggtagacgatctggaagtgtggagccacacaaacgacaccatcggaagtgtgaggagatgcatacttaatcgtataaaggccaatgtagcccacacaaagatcgagctcttcgttgggggtgaactgatcgatccagctgacgatcgaaagcttatcggacagttgaatctaaaggacaagagcctgatcacagcaaagctgacccaaatttctagcaatatgcctagctcaccagactccagttcggatagctctacagggagtcctggcaaccacggtaatcattattccgacggccctaatcctgaagttgaatcttgcctgcctggtgtgattatgtcgctccaccccaggtacatctcatttctatggcaggttgctgacctcggaagttccctgaacatgcccccattaagggatggtgccagagtcctgatgaaacttatgcccccagatagcaccactatcgaaaagcttcgcgctatttgcctggaccatgcaaagctcggcgaatcaagcttgtcaccgagcttggactctctgttttttgggcctagcgcaagtcaggttctctatctgaccgaggtcgtgtacgcactactgatgccagctggtgctcctttagcggacgatagctccgactttcaatttcattttctaaagtctgggggtttaccccttgtactgagcatgttaacccggaataacttcctgccaaatgcagacatggagactaggcggggagcatatttgaacgcattgaaaatcgcgaagctgttattaacagcaatcgggtatggacatgtccgggctgtggcagaagcctgtcagcccggtgtcgaaggagttaacccaatgacccagatcaatcaggtaactcacgatcaagccgtggtgttgcagtcagcccttcagtctatccccaatcctagctcagagtgtatgttgagaaatgtgtctgtgcggttggcccaacaaattagcgacgaggcctccagatacatgcccgatatctgcgtgatccgagccatccagaagataatttgggcatcggggtgcggatctctacagctggtcttctcaccaaacgaggagatcactaagatatatgaaaaaaccaacgcaggcaacgagccagacctagaggacgagcaagtgtgctgcgaggcgttggaggttatgaccctctgttttgctctcatccccacagccctggacgcattgtctaaggagaaggcctggcaaactttcattatcgaccttcttctccactgccactccaagacagtcagacaggtggcccaggagcagttctttctcatgtgtactcggtgctgtatgggccaccgcccactgctgttcttcattacactcttgtttaccgtactcgggtctaccgcaagagaaagagcgaagcacagtggggattattttaccctcctgagacaccttcttaattacgcttacaactctaacatcaatgttccaaatgccgaagttttgttaaataatgaaatcgattggctaaagcgtattagggacgatgtcaagagaacaggagaaacgggtattgaggaaaccatccttgaggggcatctgggcgtaaccaaagagctcctggcatttcaaacctctgaaaagaagtttcacatcggatgcgaaaaaggtggcgctaatctgatcaaggaactgatcgatgattttatcttccctgccagtaatgtgtacttgcagtacatgagaaacggcgaactgcctgccgaacaagccatcccagtctgcgggagcccacctacaatcaatgccggatttgagctgctggttgcgttagcagttggttgcgtgcggaatttgaaacagattgtcgattccctgactgagatgtactacattggaacagcaatcacaacctgtgaagctctcacagagtgggagtatctacctcccgtgggacctagaccacctaaaggtttcgtcggtctcaagaacgccggagccacttgttatatgaattccgttatccagcagctatatatgatcccctcaattagaaatggcattctcgcaatagaagggactggctccgacgtcgacgatgatatgtcaggtgacgagaaacaggataacgagagcaacgtcgatccccgtgacgacgtctttggatacccacaacaattcgaagataagcctgcactgagcaagacagaagacagaaaggaatataacattggagttttgcgccatctgcaggtgatattcgggcacctggccgcatcgaggttgcagtattacgtgcctcgaggtttctggaagcagttccgtctctggggtgagcctgtgaacctgcgcgaacagcacgatgctctagagtttttcaacagtctcgtggattccctggatgaggccctgaaagccttagggcatccagccatgctgagtaaagtcctgggcggatcctttgctgaccagaaaatttgccaaggttgcccccataggtatgaatgcgaagagtctttcactaccttgaatgtagacattagaaatcaccagaatcttctagactctctagagcagtacgttaaaggcgacctgctggagggggctaacgcctaccactgcgaaaagtgtaacaaaaaagttgacaccgtaaaacggctcctgatcaaaaagctgcccccagtcctggctatccagctgaagcgcttcgactacgactgggaacgggaatgcgccatcaaattcaatgactactttgagtttccaagggaactggacatggagccttacaccgtagccggagttgccaagctggagggagacaatgtcaaccccgagtctcagttgattcaacagagcgaacaatcagagtccgagacggccggtagtacaaagtatagactggtgggcgtccttgtacattcgggccaagcttcaggcggacactactatagctatatcatccagcgtaacggaggagatggtgagcggaatcgatggtataaatttgacgatggcgacgtgacagagtgtaagatggatgatgatgaggaaatgaaaaatcagtgcttcggtggtgagtatatgggagaggtatttgatcacatgatgaagcgcatgtcctatcggaggcagaagagatggtggaacgcatacatcctgttctacgagcgcatggacaccattgaccaggacgacgagttaatccggtacatttcagaactggcaatcaccacccgccctcatcagattatcatgccctctgcaattgaacggagcgtccgcaagcagaacgtacagttcatgcataaccgcatgcagtacagcatggagtactttcagtttatgaagaaactattgacctgtaatggcgtgtatttaaacccacccccagggcaagaccatttgcttcctgaagcggaggaaatcaccatgatctccatccaattggccgctagatttctgttcacaacgggattccatactaagaaggtcgtcaggggttcggcgagtgactggtatgacgcgctttgtatcctcttgaggcactcgaaaaacgtccgcttttggtttgcccataacgttctttttaatgtgtctaacagattctctgaatacctgttggagtgcccttcggctgaagtgcgaggcgctttcgcgaagctgatagtgttcattgcccacttctccctccaagatgggccttgtccaagcccattcgcctcccccggtccctcgtctcaagcttatgataatctcagcctatcagatcacctcttaagggccgttctaaatttgctgaggcgggaagtttctgaacatggcagacacctgcagcagtatttcaacctcttcgtgatgtatgccaacctcggcgttgccgagaagacccagcttctgaagctcagtgtgccagcaaccttcatgttggtgtccttagacgagggtcctgggcctccaatcaaatatcagtatgccgagcttgggaaattgtactccgtggtgtcacagctcatccggtgttgcaatgtgagctcacgtatgcagagctcaatcaatggcaacccacccctgccaaacccctttggcgatccaaatctaagccagccaatcatgcctattcagcaaaacgttgccgatattcttttcgtgcggaccagctacgtgaagaaaattattgaggactgcagtaattctgaggagaccgtgaaactcctccgcttttgctgctgggagaatccacaatttagttcaaccgtgttgagcgaactgctgtggcaggtggcctatagctacacctacgagctgagaccctaccttgatctgctccttcaaatcctcttaattgaagactcatggcagacgcaccgcattcataacgctctgaagggtattcctgatgacagggatggattatttgataccatacagcgcagcaagaaccactatcaaaagcgggcataccagtgcatcaagtgtatggtagctttgttctccaattgccccgtcgcatatcagattctgcagggtaacggcgatctgaaacgaaagtggacctgggcagtagaatggttgggcgatgagttggagcgacgcccttacaccgggaatccacaatatacatataataactggtcccccccagtacaaagcaacgaaactagcaatggttactttctggagagaagccactccgccaggatgaccctcgcaaaagcatgcgagttgtgccccgaagaggaacccgatgatcaagatgcgcctgatgaacatgagagtccacctccagaagacgcgcctctgtacccacactctcctggcagtcagtaccaacagaacaaccacgtgcatggtcagccctatacggggccagctgctcatcatatgaataatccccagcgcacagggcagcgagctcaggagaactatgaaggaagtgaagaggtgtcacccccacagactaaagatcaata

SEQ ID NO: 32082 - DNA, 8371 bp, Artificial Sequence
  derived and/or modified sequence
gcggccgccttagcgcccggtgcttgggtcggcgccgggagcgaggagcgagctacttcaaagccaccaggcctggagcggggacagaggcggcgactaggggaaggtgaagccgtcgctgcaggaggaggagcaggaggaggtgacgcaggagaaacgcaccgcccggagcccgtctgagctcagcgagagccccagcctgaggggagaaggggaagagggccgtcgccggccaaggaggaggaggaggcgggcgcggcgaggagcgagttccggcgccggtgtgcagccttttggttgagacgcccgcagccccgagcccggccgccgcagcctttcgatacactttgttgccggtcacccccgggcctgggatgcacccagggtaggtctcgtcccgggaccgagccccaccgtcgcctggtgcctcccgcctccgtgtgccctggttgtgagaagacgtctgtgtcgtgcggttatgcaatggtctctgcaagatggtttattcttgaattggacctttttaagactgacaaatgctggtacttcatcttctataagtggactataatttcttttctcaagacaactacataagcagacaaaattgcaaagatctgccctgtgtcgagtatgacagccacgactcgtggctctccggtcggagggaatgacaaccagggccaggctcctgatggacagtctcagccccccctccaacagaatcagacttcatcgcctgattcttccaatgaaaattccccggcaactcccccagatgagcaaggtcaaggtgatgccccaccacagcttgaagatgaggaacctgcatttccacatactgacttggccaagttggatgacatgatcaacaggcctcgatgggtggttccagttttgccgaaaggggaattagaagtgcttttagaagctgctattgatcttagtaaaaagggccttgatgttaaaagtgaagcatgtcagcgatttttccgtgatgggctaacaatatcattcactaaaattcttacagatgaagcagtgagtggctggaagtttgaaattcataggtgtattattaacaatactcatcgtctggtggagctatgtgtggccaagttgtcccaagactggtttccacttttagaacttcttgccatggccttaaatcctcattgcaaattccatatctacaatggtacacgtccatgtgaatcagtttcctcaagtgttcagttgcctgaagatgaactctttgctcgttctccagatcctcgatcaccaaagggttggctagtggatcttctcaacaaatttggcactttaaatgggttccagattttgcatgatcgttttattaatggatcagcattaaacgttcaaataattgcagcccttattaaaccatttgggcaatgctatgagtttctcactcttcatacagtgaaaaagtactttcttccaataatagaaatggttccacagtttttagaaaacttaactgatgaagaactgaaaaaagaagcaaagaatgaagccaaaaatgatgctctttcaatgattattaaatctttgaagaatttagcttcaagggttccaggacaagaagaaactgttaaaaacttagaaatatttaggttaaaaatgatacttagattattgcaaatttcttctttcaatggaaagatgaatgcactgaatgaagttaataaggtgatatctagtgtatcatactatactcatcgacatggtaatcctgaggaggaagagtggctcacagctgaacgaatggcagaatggatacagcagaacaatatcttatccatagtgttgcgagatagtcttcatcagccacagtatgtagaaaagttagagaagattcttcgttttgtcatcaaagaaaaagctctgaccttacaggatcttgataatatctgggcagcacaggcagggaaacatgaagccattgtgaagaatgtacatgatctcctggcaaaattggcatgggatttttctcctgaacaacttgatcatctttttgattgttttaaggccagttggacaaatgcgagtaaaaagcaacgtgaaaagctacttgagctgatacgtcgtcttgcagaagatgataaagatggtgtgatggcacacaaagtgttgaaccttctgtggaatctggctcacagtgatgatgtgcctgtagatatcatggacctggctctcagtgcccacataaaaatactagattacagttgctcccaggaccgtgatacacaaaagatccaatggatagatcgctttatagaagaacttcgcacaaatgacaaatgggttattcccgcactgaaacaaattagagaaatttgtagtttgtttggtgaagcgcctcaaaatttgagtcaaactcagcgaagtccccatgtgttttatcgccatgacttaatcaatcaacttcaacacaatcatgccctagttactttggtagcagaaaaccttgcaacttacatggaaagcatgagactatatgctagagaccatgaagattatgacccacaaactgtgaggctgggaagtagatatagtcatgttcaagaagttcaagaacggcttaacttccttagatttttattgaaggatggtcagctgtggctatgtgctcctcaggcaaaacaaatatggaaatgcttagctgagaatgcagtttacctttgtgatcgtgaagcctgttttaagtggtattccaagttgatgggggatgaaccagacttagatcctgatattaataaggacttctttgaaagtaatgtgcttcagcttgatccttctctgttaactgaaaatggaatgaagtgttttgagcgattcttcaaagctgtgaattgtcgagaaggaaaactagtagcaaaaaggagagcctatatgatggatgacttggagttaataggattagattacctttggagggtcgtgattcagagtaatgatgatattgccagcagagctatagatctcctcaaagagatatacacgaaccttggtccaagactacaagtcaatcaggtggtgatccatgaagacttcattcagtcttgttttgatcgtctgaaggcttcctatgacacattgtgtgttttggatggtgacaaagacagtgttaattgtgcaagacaggaagctgttcgaatggttcgagtattaactgttttaagggaatatataaatgaatgtgacagtgattatcatgaggaaagaacaattctccctatgtcgagagcattccgcggtaaacacctctcttttgtagttcgatttccaaaccagggcagacaggttgatgacttggaggtatggtctcatacaaatgatacaattggttcagtacgacgatgtattctcaatcgtattaaagccaacgtagcccatacaaaaattgagctctttgtgggcggtgagctgatagatcctgcagatgatagaaagttgattggacaattaaacttaaaagataaatcgcttattacagccaaacttacacagataagttccaatatgccttcaagccctgatagctcttctgattcctccactggatctcctggaaaccatggtaatcattacagtgatggtcccaatccagaagtggaaagctgtttgcctggagtgataatgtcactgcatcccagatacatctcttttctttggcaagttgcagacttaggtagcagcctaaatatgccaccccttagagatggagcaagagtacttatgaaacttatgccgccagatagcacaacgatagaaaaattaagagctatttgtttagaccatgccaaacttggagaaagcagccttagtccatctcttgactcacttttctttggtccttcagcctcacaagtgctatatctaacagaggtagtctatgccttgttaatgcctgctggtgcacctctggctgatgattcctctgattttcagtttcacttcttgaaaagtggtggcctaccccttgtactgagtatgctaaccagaaataacttcctaccgaatgcagatatggaaactcgaaggggtgcctacctcaatgctcttaaaatagccaagcttttgctaactgccattggctatggtcatgttcgagctgtggcagaagcttgtcagccaggtgtagaaggtgtgaatcccatgacacagatcaaccaagttacccatgatcaagcagtggtgctacaaagtgcccttcagagcattcctaatccatcatccgagtgcatgcttagaaatgtgtcagttcgtcttgctcagcagatatctgatgaggcttcaagatatatgcctgatatttgtgtaattagagctatacaaaaaattatctgggcatcaggatgtgggtcgttacagctagtatttagcccaaatgaagaaatcactaaaatttatgagaagaccaatgcaggcaatgagccagacttggaagacgaacaggtttgctgtgaagcattggaagtgatgaccttatgttttgccttgattccaacagccttagatgctcttagtaaagaaaaggcttggcagacattcatcattgacttactattgcactgtcacagcaaaactgttcgtcaggtggcacaggagcagttctttttaatgtgcaccagatgttgcatgggacaccggcctctacttttcttcattactctactctttactgttttggggagcacagcaagagagagagctaaacactcaggcgactactttactcttttaagacaccttcttaattacgcttacaatagtaatattaatgtacccaatgctgaagttcttctcaataatgaaattgattggcttaaaagaattagggatgatgttaaaagaacaggagaaacgggtattgaagagacgatcttagagggccaccttggagtgacaaaggagttactggcctttcaaacttctgagaaaaaatttcatattggttgtgaaaaaggaggtgctaatctcattaaagaattaattgatgatttcatatttcctgcatccaatgtttacctacagtatatgagaaatggagagcttccagctgaacaggctattccggtctgtggttcaccacctacaattaatgctggttttgaattacttgtagcattagctgttggctgtgtgaggaatctcaaacaaatagtagattctttgactgaaatgtattacattggcacagcaataactacttgtgaagcacttactgagtgggaatatctgccacctgttggaccccgcccacccaaaggattcgtggggctgaaaaatgccggtgctacttgttacatgaattctgtgattcagcaactctacatgattccttccattaggaacggtattcttgccattgaaggcacaggtagtgatgtagatgatgatatgtctggggatgagaagcaggacaatgagagcaatgttgatcccagggatgatgtatttggatatcctcaacaatttgaagataaaccagcattaagtaaaactgaagatagaaaagagtacaacattggtgtcctaagacaccttcaggtcatctttggtcatttagctgcttctcgactgcaatactatgtgcccagaggattttggaaacagttcaggctttggggtgagcctgttaatctgcgtgaacaacacgatgctttagaattttttaattcattggtggatagtttagatgaagctttaaaagctttaggacatccagctatgctaagtaaagtcttaggaggttcctttgctgatcagaagatctgccaaggctgcccacataggtacgaatgtgaagaatcttttacgaccctaaacgtagacattagaaatcaccaaaatcttcttgattctttggaacagtatgtcaaaggagatttactagaaggtgcaaatgcatatcattgtgaaaaatgcaataaaaaggttgataccgtaaagcgcttgctgattaaaaaattacctcctgttcttgctatacaactaaagcgatttgactatgactgggaaagagaatgtgcaatcaagttcaatgattattttgaatttcctcgagagctggacatggaaccttacacagttgcaggtgtcgcaaagctggaaggggataatgtaaacccagagagtcagttgatacaacagagtgagcagtctgaaagtgagacagcaggaagcacaaaatacagacttgtgggtgtgctcgtacacagtggtcaagcgagtggggggcattattattcttacatcatccaaaggaatggtggagatggtgagagaaatcgctggtataaatttgatgatggtgatgtaacagaatgtaaaatggatgatgacgaagaaatgaaaaaccagtgttttggtggagagtacatgggagaagtgtttgatcacatgatgaagcgtatgtcatacaggcgccagaaaaggtggtggaatgcttatatacttttttatgaacgaatggacacaatagaccaagatgatgagttgataagatatatatcagagcttgctatcaccaccagacctcatcagattattatgccatcagccattgagagaagtgtacggaaacagaacgtacaattcatgcataaccgaatgcagtacagtatggagtattttcagtttatgaaaaaactgcttacatgtaatggcgtttacttaaaccctcctcccgggcaagatcacctgttgcctgaagcagaagaaatcactatgatcagtattcaacttgctgctaggttcctctttactacaggatttcacacaaagaaagtagtccgtggctctgccagtgattggtatgatgcattgtgtattctccttcgtcacagcaagaatgtacgtttttggtttgctcataacgtcctttttaatgtttcaaatcgcttctccgaataccttctggagtgccctagtgcagaagtgaggggtgcgtttgcaaaacttatagtctttattgcacatttttccttgcaagatgggccatgtccttcaccttttgcctctcctggaccttctagtcaggcttatgacaacttaagcttgagtgatcacttactaagagcagtactaaatctcttgagaagggaagtttcagagcatgggcgtcatttacagcagtatttcaacctgtttgtaatgtatgccaatttaggtgtggcagagaagacacagcttctgaaattgagtgtacctgctacttttatgcttgtgtctttagatgaaggtccaggtcctccaatcaaataccagtatgctgaattaggcaaattatactcagtagtgtcacagctgatccgctgttgcaatgtctcttcaagaatgcagtcttcaatcaatggtaatcctcctcttcccaatccttttggtgatcctaatttatcacaacctataatgccaattcagcagaatgtggcagacattttatttgtgagaacaagttatgtgaagaaaatcattgaagactgcagtaattcagaggaaaccgtcaaattgcttcgtttttgctgctgggagaatcctcagttctcatctactgtcctcagtgaacttctctggcaggttgcatattcctatacctatgaactgcggccctatttggatctgcttttgcaaatcttactgattgaggactcctggcaaactcacagaattcataatgcactgaaaggaattccagatgaccgagatgggctgtttgacacaatccagcgctctaagaatcactatcaaaaaagagcataccagtgtataaaatgtatggtagctctatttagtaactgtcctgttgcttaccaaatcctgcagggcaatggagatcttaaaagaaagtggacctgggcagtggaatggcttggagatgaacttgaaagaagaccatatactggcaatcctcagtacacttacaacaattggtctcccccagtgcaaagcaatgaaacgtccaatggttatttcttggagagatcacatagtgctaggatgacacttgcaaaagcttgtgaactctgtccagaggaggagccagatgaccaagatgctccagatgaacatgagtcgcctccacctgaagatgccccattgtacccccattcacctggatctcagtatcaacagaataaccatgtgcatggacagccatatacaggcccagcagcacatcacatgaacaaccctcagagaactggccaacgagcacaagaaaattatgaaggcagtgaagaagtatccccacctcaaaccaaggatcaatgaaatgcacataattaactggttccatcaagactgtgcacccaggccttacagtccaacctttttctgtgtctgg

SEQ ID NO: 32083 - protein, 485 aa, Artificial Sequence
  derived and/or modified sequence
METNESTEGSRSRSRSLDIQPSSEGLGPTSEPFPSSDDSPRSALAAATAAAAAAASAAAATAAFTTAKAAALSTKTPAPCSEFMEPSSDPSLLGEPCAGPGFTHNIAHGSLGFEPVYVSCIAQDTCTTTDHSSNPGPVPGSSSGPVLGSSSGAGHGSGSGSGPGCGSVPGSGSGPGPGSGPGSGPGHGSGSHPGPASGPGPDTGPDSELSPCIPPGFRNLVADRVPNYTSWSQHCPWEPQKQPPWEFLQVLEPGARGLWKPPDIKGKLMVCYETLPRGQCLLYNWEEERATNHLDQVPSMQDGSESFFFRHGHRGLLTMQLKSPMPSSTTQKDSYQPPGNVYWPLRGKREAMLEMLLQHQICKEVQAEQEPTRKLFEVESVTHHDYRMELAQAGTPAPTKPHDYRQEQPETFWIQRAPQLPGVSNIRTLDTPFRKNCSFSTPVPLSLGKLLPYEPENYPYQLGEISSLPCPGGRLGGGGGRMTPF

SEQ ID NO: 32084 - protein, 426 aa, Artificial Sequence
  derived and/or modified sequence
METNESTEGSRSRSRSLDIQPSSEGLGPTSEPFPSSDDSPRSALAAATAAAAAAASAAAATAAFTTAKAAALSTKTPAPCSEFMEPSSDPSLLGEPCAGPGFTHNIAHGSLGFEPVYVSCIAQDTCTTTDHSSNPGPVPGSSSGPVLGSSSGAGHGSGSGSGPGCGSVPGSGSGPGPGSGPGSGPGHGSGSHPGPASGPGPDTGPDSELSPCIPPGFRNLVADRVPNYTSWSQHCPWEPQKQPPWEFLQVLEPGARGLWKPPDIKGKLMVCYETLPRGQCLLYNWEEERATNHLDQVPSMQDGSESFFFRHGHRGLLTMQLKSPMPSSTTQKDSYQPPGNVYWPLRGKREAMLEMLLQHQICKEVQAEQEPTRKLFEVESVTHHDYRMELAQAGTPAPTKPHDYRQEQPETFWIQRAPQLPVCEGD

SEQ ID NO: 32085 - protein, 272 aa, Artificial Sequence
  derived and/or modified sequence
MEEEAIASLPGEETEDMDFLSGLELADLLDPRQPDWHLDPGLSSPGPLSSSGGGSDSGGLWRGDDDDEAAAAEMQRFSDLLQRLLNGIGGCSSSSDSGSAEKRRRKSPGGGGGGGSGNDNNQAATKSPRKAAAAAARLNRLKKKEYVMGLESRVRGLAAENQELRAENRELGKRVQALQEESRYLRAVLANETGLARLLSRLSGVGLRLTTSLFRDSPAGDHDYALPVGKQKQDLLEEDDSAGGVCLHVDKDKVSVEFCSACARKASSSLKM

SEQ ID NO: 32086 - protein, 354 aa, Artificial Sequence
  derived and/or modified sequence
MRHSLTKLLAASGSNSPTRSESPEPAATCSLPSDLTRAAAGEEETAAAGSPGRKQQFGDEGELEAGRGSRGGVAVRAPSPEEMEEEAIASLPGEETEDMDFLSGLELADLLDPRQPDWHLDPGLSSPGPLSSSGGGSDSGGLWRGDDDDEAAAAEMQRFSDLLQRLLNGIGGCSSSSDSGSAEKRRRKSPGGGGGGGSGNDNNQAATKSPRKAAAAAARLNRLKKKEYVMGLESRVRGLAAENQELRAENRELGKRVQALQEESRYLRAVLANETGLARLLSRLSGVGLRLTTSLFRDSPAGDHDYALPVGKQKQDLLEEDDSAGGVCLHVDKDKVSVEFCSACARKASSSLKM

SEQ ID NO: 32087 - DNA, 2952 bp, Artificial Sequence
  derived and/or modified sequence
ggcgcggtcgagtcatcgcagggcctcaccgcttcgttctcccgtccctccccgcgccttggctcgactagccaagtgaggcgggaggcgactcggacctttccctgcatttcgtttcggccagtgccggggctacccgccctggggcctgggatccttggggcccgtgagccactcttagcggccggggctaccgcggcccgccgtggccctcatgaggcatagctgaccaagctgctggcagcctcgggcagcaactccccaacccgcagtgagagcccggagccggctgcaacttgttcgctgccctctgacctgacccgggctgcagcgggggaggaggagacggcggcggcgatctcccggccgcaagcagcagtttggcgacgaaggagagttggaagccgggagggggagccgcggcggcgtggccgtgcgcgcgccctcccccgaggagatggaggaggaggcgatcgccagcctcccgggggaagagacggaggatatggactttctgtctgggctggaactggcggatctcctggaccccaggcaaccggactggcacctggaccccgggcttagctcgccggggcctctctcctcgtctggcggaggctcggatagcggcggcctgtggagaggggacgatgacgatgaggccgcggctgctgaaatgcagcgcttctctgacctgctgcaaaggctgttaaacggtatcggaggctgcagcagcagcagtgacagtggcagcgccgaaaagaggcggagaaagtccccaggaggaggcggcggtggcggcagcggtaacgacaacaaccaggcggcgacaaagagtccccggaaggcggcggcggccgctgcccgccttaatcgactgaagaagaaggagtacgtgatggggctggagagtcgagtccggggtctggcagccgagaaccaggagctgcgggccgagaatcgggagctgggcaaacgcgtacaggcactgcaggaggagagtcgctacctacgggcagtcttagccaacgagactggactggctcgcttgctgagccggctgagcggcgtgggactgcggctgaccacctcgctcttcagagactcgcccgccggtgaccacgactacgctctgccagtgggaaagcagaagcaggacctgctggaagaggacgactcggcgggaggagtctgtctccatgtggacaaggataaggtgtcggtggagttctgctcggcgtgcgcccggaaggcgtcgtcttctcttaaaatgtagggtcaagtaatctgctctttatccgcgtttacccctttcaactcccttacaccatgtcaaacttaccttagtgggacatcttcaccggacacatttcagaggagagaaaaaaagtaatattgaatcttaaagtgtttagctaaaagcatgaatgtgacacagtaaccaactcctaatgataacatgtgactattaaatctctctgacagtttcttttttaggtgatttccttcctgccaggctccgttgtaggggttacagaacagtcgttcccgcctcacaacctgtggatacagctgttggggcagaagagacgggaccagctgctggccacatttcctgctttattttaaaaggtagtataagaatgaggaaaaagaggtaatatcagggcttctgctgttttttatttttaacatgttcataattaaaaagtattttccagcagtccaaagatgtaagttatcttacacataatatgttttattttgttatttggttatgaaaatggaatccttgttcttgcacaactgtaaatgttttgttgctagataatacgatttgagacctgaattggtctttggtttccagtgcatcacagcatattttgtaaaatcatgtactactgcacttgagcatgaatgggtagtagccaaactcacaaattggagtgatgaacctgcttatacctaagggcaggagcaagcccctcacaatgcagctgcatgggtttttagtgcctactgaattatatatatatatacatatatatatatatatataaaccaaaagtagttggaaagattatttgaaatgactaactttgtgctatctttatgaaatatgttaaatgtagcttttttgaaacagaagccttgaattgaaatttaactaatacttgaacattttgtatatatttctttgtatataattttgtgcagtaccaatgacaaaaatatggtgtcataataaaaccaggtttgttgatcttttagttatgggctcaaagaatttattcatctctaacatgatattggaaaataatggatgaaaataggaaaaatgattgttaatgctgactgtgggtcttaaaaggttctggaaagcagtaagttcatttttctaaaaactataacattctgttggagtattttcttccttacgtcaatacttttcctgcattatttgaaattgtgggctggggagaaacagtagtcaaagctttctgaattgagatactttgaaattccaagtgtagatttttagaatgtcattttataaatggccgtttttggaattacttgataagaacttttgaaaatggaaggattagtatggcctatttttaaagctgctttgttaggttccttatgttttattaactgtcttttctcagtttccatttcatttttttttttctagttttggtgacttagtgattttgtcattttttacatcaacttcatggtcttgtttttacatggtaattgcatgtacttaggatctatctaataggggctttaaataaatttggtcatatttatgtgtaagcacattttactgtaaatgtttgggtttctgaatttaaacagatctgtttatttcagtatgtagtaaacaatatcttaaagtgtccgattcactacttgttaattaaaaaagttatgattaatgtg

SEQ ID NO: 32088 - DNA, 819 bp, Artificial Sequence
  derived and/or modified sequence
atggaagaggaggctattgctagtctccccggagaggaaaccgaggacatggatttcctgagtggactcgagctcgcagacctcctcgacccacgccagcccgactggcacttggacccagggctctcttccccgggacctctgtcatcttccggcggagggtcagactcaggaggactgtggagaggggatgacgacgacgaggccgccgcggctgagatgcaaagatttagcgacctgctgcaaaggcttctcaacggcatagggggctgtagcagctctagcgactccggatccgcggaaaaacggaggcgtaagtcgcccggtggcggcggtgggggtggttccggaaacgacaacaatcaggctgccaccaagagcccccggaaggcagccgctgcggcggcacgtttgaaccgtctcaagaagaaagaatacgttatgggcctcgagagtcgcgtgcgggggctcgccgccgaaaaccaggagctccgcgccgagaatcgggagctcggcaagcgagtgcaggctctgcaggaagaaagtcgctacctcagagcagtgctcgcgaacgagacgggcttggcccggctgttgagtaggctctccggagtgggtctgagactcaccacttctttgttcagagacagccctgctggcgatcatgattacgcgttgccagtggggaaacagaagcaagaccttttggaggaagatgactccgctggcggagtgtgcttacatgtagacaaggataaggtgagtgtcgagttttgcagtgcctgcgcacgcaaagcctcctccagtctcaagatgtag

SEQ ID NO: 32089 - DNA, 1065 bp, Artificial Sequence
  derived and/or modified sequence
atgcgtcactcactcacgaaactgctggctgctagcggtagtaattcccccacgcggagcgaatctcctgagcccgccgcaacctgtagcctcccgtccgatctcacacgcgctgctgcgggagaggaggagaccgccgctgccgggagcccagggcggaaacagcagttcggggacgagggggaattagaggctggccggggaagccgaggtggagtggccgtcagagccccttcaccagaggagatggaagaggaggcaatagcctccctgcctggcgaagagaccgaggacatggactttttgagcggccttgagctcgcagatttgctggaccctagacagcctgattggcacttggacccggggcttagctcacctggcccgctgagctcaagtgggggaggatccgactctggtggcctttggagaggcgatgacgacgatgaggctgccgcggcagagatgcagaggtttagcgacctccttcagagactgctcaacgggatcggcggctgttcatcttcctctgactctggttctgctgaaaaacgtaggaggaaatccccggggggaggcggggggggaggcagcggcaacgataataaccaggcggctaccaagtcacccagaaaggccgcagccgccgcggcccggttgaatcgactgaaaaagaaggaatacgtgatggggctggaaagtcgcgtgcgggggttagctgctgagaaccaggagctgagggctgagaacagagagttgggaaagcgcgttcaggccctgcaagaggagagcagataccttagagcggttctggccaacgaaacaggtctagccagactgctgtcccggttgtccggtgttgggctgcgccttacaaccagcttgttcagggacagtcctgccggagatcacgactatgccctcccggttggtaaacagaaacaagacctgctagaggaggatgattccgctggtggcgtctgcctccatgtggataaagacaaggtttccgtcgaattttgttccgcatgcgctagaaaagcgagtagctctctgaagatgtag

SEQ ID NO: 32090 - DNA, 1065 bp, Artificial Sequence
  derived and/or modified sequence
atgagacacagcctgactaagctgctggccgcttcaggcagtaattcacccacacggtcagaatctccagagcccgctgcaacttgcagcttaccgagtgatttaacaagagccgccgcaggggaagaggagactgcagccgcgggcagcccgggccgtaagcagcaattcggggacgagggggaacttgaagccgggcgtgggagccggggtggtgtagccgtgagggctccttcccctgaagaaatggaggaggaggccattgctagtcttccgggtgaggagactgaagatatggacttcctgtctggcctggagctggctgaccttctggaccctcggcagccggattggcatctggaccctggcctctcctccccgggaccactgtcgagctccgggggtgggagtgacagtggtggtctctggaggggggatgacgacgacgaggccgcggccgccgagatgcagagattttcagacctcctgcagcgcttgctaaatggtataggagggtgttcgtcctcttccgactcaggcagtgcagagaagcgacgtagaaagtcacctggtggagggggaggaggcggatcggggaacgacaacaatcaggctgccacaaagagtcctagaaaagcagcagcagctgccgcacggcttaacagactcaaaaagaaggagtacgtaatgggtctcgagagccgggtccgcggcttggctgccgaaaatcaggagctgagagccgaaaaccgtgagttagggaagcgcgtgcaagctctgcaggaggaatcacgctatctgcgagccgtgctggcaaatgaaaccggcctcgcccgcttattgtctcgcctaagcggagtgggactgagattaactacgtctctttttcgggattccccagccggcgaccatgactacgctctgcctgtgggcaagcaaaagcaggacttattagaagaagacgatagtgcggggggtgtctgcctgcacgttgacaaagataaagtgtccgtggaattctgttccgcctgcgctcgtaaggcttcaagctcccttaagatgtag

SEQ ID NO: 32091 - DNA, 819 bp, Artificial Sequence
  derived and/or modified sequence
atggaggaggaggccatcgccagcctgcccggggaggagacagaggacatggacttcctgagcggcctggagctggccgacctgctggacccccggcagcctgactggcacctggaccccggcctgagcagccctggccccctgagcagcagcggcggcggcagtgacagcggcggcctgtggagaggagatgatgatgatgaagctgctgctgctgagatgcagcgcttcagtgacctgctgcagaggctgctgaatggcatcggcggctgcagcagcagcagtgacagcggcagcgctgagaagagaagaaggaagagccctgggggcggcggcggcggcggcagcggaaatgacaacaaccaggccgccaccaagagccccaggaaggctgctgctgctgctgcccggctgaaccggctgaagaagaaggagtatgtgatgggcctggagagccgggtgcggggcctggccgctgagaaccaggagctgcgggcagaaaatcgggagctgggcaagagggtgcaggccctgcaggaggagagccgctacctgcgggctgtgctggccaatgaaacaggcctggcccggctgctgagccggctgtctggagtgggcctgcggctgaccaccagcctcttccgggacagccctgctggggaccatgactatgccctgcctgtgggcaagcagaagcaggacctgctggaggaggatgattctgctgggggcgtgtgcctgcacgtggacaaggacaaggtgtctgtggagttctgcagcgcctgtgccaggaaggccagcagcagcctgaagatgtag

SEQ ID NO: 32092 - DNA, 1065 bp, Artificial Sequence
  derived and/or modified sequence
atgaggcacagcctgaccaagctgctggccgccagcggcagcaacagccccaccaggtctgagagccctgagcctgctgccacctgcagcctgcccagcgacctgaccagggctgctgctggggaggaggagacagctgctgctggcagccctggcaggaagcagcagtttggagatgaaggagagctggaggccggccggggcagcagaggaggagtggccgtgcgggcccccagccctgaggagatggaggaggaggccatcgccagcctgcccggggaggagacagaggacatggacttcctgagcggcctggagctggccgacctgctggacccccggcagcctgactggcacctggaccccggcctgagcagccctggccccctgagcagcagcggcggcggcagtgacagcggcggcctgtggagaggagatgatgatgatgaagctgctgctgctgagatgcagcgcttcagtgacctgctgcagaggctgctgaatggcatcggcggctgcagcagcagcagtgacagcggcagcgctgagaagagaagaaggaagagccctgggggcggcggcggcggcggcagcggaaatgacaacaaccaggccgccaccaagagccccaggaaggctgctgctgctgctgcccggctgaaccggctgaagaagaaggagtatgtgatgggcctggagagccgggtgcggggcctggccgctgagaaccaggagctgcgggcagaaaatcgggagctgggcaagagggtgcaggccctgcaggaggagagccgctacctgcgggctgtgctggccaatgaaacaggcctggcccggctgctgagccggctgtctggagtgggcctgcggctgaccaccagcctcttccgggacagccctgctggggaccatgactatgccctgcctgtgggcaagcagaagcaggacctgctggaggaggatgattctgctgggggcgtgtgcctgcacgtggacaaggacaaggtgtctgtggagttctgcagcgcctgtgccaggaaggccagcagcagcctgaagatgtag

SEQ ID NO: 32093 - DNA, 819 bp, Artificial Sequence
  derived and/or modified sequence
atggaggaggaggccatcgccagcctgcccggcgaggagaccgaggatatggacttcttatccggattagaactggcggatctgctcgatccaaggcagcccgactggcacctcgacccgggactgagttcccccggccctctgtcttctagcgggggaggctcagactcagggggtctttggcggggtgacgacgacgacgaagcggccgctgctgagatgcaacggttcagcgacctcctacagcgtttgctcaacggcatcggcggatgctccagctcctcagacagtggctcggcagaaaagagacgcaggaagtcccccgggggcgggggaggtggaggctcgggcaacgacaataaccaggcagcaactaagtcacctaggaaagctgccgccgcggctgcgcgtcttaatcggctgaaaaagaaagaatacgtcatggggctcgagtcacgagtccgaggcctggccgctgaaaatcaagagttgcgggcggagaatcgcgagctgggtaaacgggtccaggctttgcaggaggagtcaagatatcttagagccgtgcttgcaaacgaaacaggcctggcacgacttctttctcgactcagcggtgtggggctaagactaaccacttcgctgtttcgcgacagcccagcaggggaccacgattatgccttgcctgtcggaaagcagaagcaggacttactggaagaggatgactctgccggcggcgtttgcctccacgtggacaaggacaaagtctctgtagagttctgttctgcctgcgcacgcaaggcctccagtagcctcaagatgtag

SEQ ID NO: 32094 - DNA, 1065 bp, Artificial Sequence
  derived and/or modified sequence
atgcggcacagcctgaccaagctgctggccgccagcggcagcaactcccccaccagatctgagagccccgagcccgctgcgacgtgcagcttaccatcggacctgaccagagccgctgccggtgaagaggagacggccgccgctggatcgcccggcagaaaacagcaatttggcgatgagggcgagctggaggccggtagggggtccaggggtggcgttgcagtgcgagcgccctcacccgaggaaatggaagaagaggcaatagcttctctccccggtgaagagactgaagatatggacttcctctctgggctagagttggcggacctactggatccaaggcagcctgattggcacttggaccctgggctatcttcacccgggccactatctagctcaggaggcggatccgacagtggcggcctatggcgcggagatgatgatgatgaggctgcagctgccgagatgcagaggttttctgacttactgcagcgcctgctcaacggcatcggtggatgtagctcctccagtgattccggatctgcagagaagaggcggcgcaagtcaccggggggagggggcggcggcggaagtggaaatgataataaccaggccgcgacaaagagcccgcggaaagctgcagccgccgcggcgcggcttaatcggctcaaaaagaaggagtatgtgatgggtctggagtctcgcgtcagagggcttgcagctgagaatcaggaactgcgagccgaaaaccgagagctaggaaaacgcgttcaggctctacaggaagaatcccggtatctgcgggccgtgctggcgaacgagacgggcttggctcgcctcttaagccgcctgtctggagtcggcctccgcctaaccacttcactcttcagggactcccccgccggagatcacgactatgcgctgcctgtaggaaagcagaagcaggacctgctggaagaggacgacagtgcgggcggtgtctgcctgcacgtggacaaggacaaagtgtcggtggagttttgctccgcttgtgcccggaaggcttcgtcttcactcaaaatgtag

SEQ ID NO: 32095 - DNA, 1065 bp, Artificial Sequence
  derived and/or modified sequence
atgcggcacagcctgaccaagctgctggccgccagcggcagcaactctccaacaagatccgagtctcccgagcctgccgctacctgcagtctgccctctgacttgacacgagccgcggcgggcgaagaagagactgctgctgcgggaagtcctgggcgcaagcagcagtttggggatgaaggggagctggaagctggaaggggtagcaggggtggcgtggctgttagggcccctagccccgaagagatggaagaggaggcaattgctagcctgcccggcgaggaaacggaggatatggattttctgagcggcctggagctggccgatctgctcgacccccgtcagcctgattggcacctagaccctgggctctctagccctggtcccctgtcatcaagtggaggcggctctgactccgggggtctctggaggggtgacgatgacgacgaagcagcagcagcagagatgcaaaggttctccgacctactccaaagactacttaacggaattggtggttgctctagttcgtcagattctggctctgccgagaagcgccggcggaaatcccctgggggaggagggggcggaggcagcgggaacgataacaaccaagccgcaactaagagtcctagaaaagcagctgcagctgccgctcggctcaataggctgaagaagaaggagtatgtgatgggcttagaatctagggtgcgtggattagccgctgagaaccaagagctcagagccgagaacagagagctgggcaagcgcgttcaggccctccaagaggagtcacgatatctgagagccgtgctggcgaatgagacagggctggcacgactgctctctcgcctgtccggggttggcctgagactgaccacatccctgttccgcgattccccggctggggatcacgactacgccttacccgtgggaaaacagaagcaggatttactagaggaggacgattcagctgggggcgtctgcctccacgtggataaggataaggtgtccgtcgagttttgttccgcctgtgcccgtaaggctagtagttcactcaaaatgtag

SEQ ID NO: 32096 - DNA, 819 bp, Artificial Sequence
  derived and/or modified sequence
atggaggaggaggccattgcctccctgcctggcgaagagacagaggacatggacttcctatcagggctcgagctggctgatcttctagatcctagacagccagattggcatctggaccccggactaagctcacctggccctctctcttcgtcaggcggtgggtccgattcaggtggtctgtggagaggggacgatgacgatgaagccgcagcagccgagatgcagcgttttagcgatctgctgcaacgactgttgaacggaatcggaggatgttcatcctcgagcgatagtggaagtgccgagaaaaggagacgtaagagtcccggaggcggtggtgggggtggtagcggcaacgataataaccaagcagctaccaaatccccacgaaaagccgctgcggcagctgccaggctgaaccgactgaagaaaaaagagtatgtaatgggcctggagagccgggtgagaggcctcgctgccgaaaatcaggaactgagggccgagaatagggaactgggcaaaagggttcaggccctgcaggaggagagcagatatctgagggcagtgttggcaaatgaaacaggacttgcacgtcttttaagccgcctgagcggggttgggttacggctgaccacatcactatttcgggattctcctgccggtgatcacgattatgccctgccggtggggaaacagaaacaggacctactcgaggaagatgactccgccggtggggtttgcttgcatgttgacaaagataaagtgagtgtggagttctgttcggcctgcgcgagaaaagcaagcagcagtctgaaaatgtag

SEQ ID NO: 32097 - DNA, 1065 bp, Artificial Sequence
  derived and/or modified sequence
atgagacacagcctcacaaaactcctcgccgcatcaggaagtaatagcccaactaggagcgaatctcccgagccagccgcaacatgcagtcttccctcagatctgactcgcgcagcggctggcgaggaagaaaccgccgctgcgggatcccccggaagaaaacagcaattcggggacgaaggcgaactggaagcgggaagaggctcaaggggcggagtggctgtgagagccccatcacccgaggagatggaagaagaggccattgcatccttacctggggaagagacagaggacatggacttcctgtcaggtttagagcttgctgatctgcttgatccacggcagcccgattggcacctggatccagggctgtccagtccaggccctcttagctcctccgggggtggcagcgacagcggagggctctggaggggggatgatgatgacgaagccgctgctgctgagatgcaacgcttcagtgacttattgcagaggctgttgaacggaatcggtgggtgctcttcatcctccgactccggctcagccgagaaaagacgccgaaagagccctggaggcggtgggggtggagggtctggtaatgataacaatcaggctgcaacaaaaagcccaaggaaggccgcagccgcagccgcacggctgaacagactgaaaaaaaaggaatacgtgatgggcctggaatcgagagtgaggggacttgcagccgaaaaccaggaattacgggctgaaaaccgcgagctggggaaaagagtacaagccctgcaggaagagtctcgttatctgagagctgttttggccaacgagacaggcctggccagacttttatcaaggctgtccggcgtaggattacggttaaccacctctcttttccgcgattcccctgcaggggatcatgattacgccttaccggtcgggaaacagaagcaagatctgctggaggaggacgacagcgctgggggtgtttgcctgcacgttgacaaggataaggtaagcgtggagttctgcagcgcctgcgctaggaaggcctcgtcgtcattgaaaatgtag

SEQ ID NO: 32098 - DNA, 1065 bp, Artificial Sequence
  derived and/or modified sequence
atgcgccactccctgaccaagctccttgcagccagcggaagcaatagccctacgcggagtgaaagtccagagcctgccgcaacttgctcactgccctccgatctaacaagagctgcagctggagaggaagaaacagccgcagccggttccccaggtagaaaacagcaattcggagacgagggtgagctggaggctggaagaggcagccggggaggcgtcgcagtacgggctccctcccccgaggagatggaggaagaggccattgctagcctgccaggcgaagagacagaggacatggacttcctctccgggctggaactggcagatctgctggaccctcgtcagccagactggcacctggatcccggattgtccagccctgggcctctgtcatcaagcgggggaggtagcgatagtggaggcttatggagaggggatgatgatgacgaagctgccgctgctgaaatgcagagattctctgacttgctgcaaaggctcctgaacggcatcggcggttgctcttcatcatcagactccggatctgcagagaagcgcaggaggaaatctccgggagggggaggcggagggggatctggtaacgacaacaaccaggcagccaccaaatcaccacgcaaggcagcggctgcggctgctagactgaatagactgaagaagaaagaatacgtgatggggctggagagcagggtgagagggctggctgcggagaatcaggagcttagggcagaaaacagggaattgggaaagagagtgcaggcgttgcaagaggaatcccgttatctgagagccgtgcttgccaatgagacaggactggcgagactgctgtcgcgcttaagtggagttggtttgcgtctcacaacatccctattcagggattccccagctggcgaccatgactacgcgctgcctgtaggcaaacaaaagcaggatttactagaggaagatgattcagccggaggcgtgtgtttacacgtggataaggataaagtaagtgtggagttctgttccgcatgtgctcggaaggccagttctagcctgaagatgtag

SEQ ID NO: 32099 - DNA, 3868 bp, Artificial Sequence
  derived and/or modified sequence
gccgtgcgcgcgccctcccccgaggagatggaggaggaggcgatcgccagcctcccgggggaagagacggaggatatggactttctgtctgggctggaactggcggatctcctggaccccaggcaaccggactggcacctggaccccgggcttagctcgccggggcctctctcctcgtctggcggaggctcggatagcggcggcctgtggagaggggacgatgacgatgaggccgcggctgctgaaatgcagcgcttctctgacctgctgcaaaggctgttaaacggtatcggaggctgcagcagcagcagtgacagtggcagcgccgaaaagaggcggagaaagtccccaggaggaggcggcggtggcggcagcggtaacgacaacaaccaggcggcgacaaagagtccccggaaggcggcggcggccgctgcccgccttaatcgactgaagaagaaggagtacgtgatggggctggagagtcgagtccggggtctggcagccgagaaccaggagctgcgggccgagaatcgggagctgggcaaacgcgtacaggcactgcaggaggagagtcgctacctacgggcagtcttagccaacgagactggactggctcgcttgctgagccggctgagcggcgtgggactgcggctgaccacctcgctcttcagagactcgcccgccggtgaccacgactacgctctgccggtgggaaagcagaagcaggacctgctggaagaggacgactcggcgggaggagtctgtctccatgtggacaaggataaggtgtcggtggagttctgctcggcgtgcgcccggaaggcgtcgtcttctcttaaaatgtagggtcaagtaatctgctctttatccgcgtttacccctttcaactcccttacaccatgtcaaacttaccttagtgggacatcttcaccggacacatttcagaggagagaaaaaaagtaatattgaatcttaaagtgtttagctaaaagcatgaatgtgacacagtaaccaactcctaatgataacatgtgactattaaatctctctgacagtttcttttttaggtgatttccttcctgccaggctccgttgtaggggttacagaacagtcgttcccgcctcacaacctgtggatacagctgttggggcagaagagacgggaccagctgctggccacatttcctgctttattttaaaaggtagtataagaaatgaggaaaaagaggtaatatcagggcttctgctgttttttatttttaacatgttcataattaaaaagtattttccagcagtccaaagatgtaagttatcttacacataaaatgttttattttgttatttggttatgaaaatggaatccttgttcttgcacaactgtaaatgttttgttgctagataatacgatttgagacctgaattggtctttggtttccagtgcatcacagcatattttgtaaaatcatctactactgcacttgagcatgaatgggtagtagccaaactcacaaattggagtgatgaacctgcttatacctaagggcaggagcaagcccctcacaatgcagctgcatgggtttttagtgcctactgaattatatatatatatacatatatatatatatatataaaccaaaagtagttggaaagattatttgaaatgactaatttgtgctatctttatgaaatatgttaaatgtagcttttttgaaacagaagccttgaattgaaatttaactaatacttgaacattttgtatatatttctttgtatataattttgtgcagtaccaatgacaaaaatatggtgtcataataaaaccaggtttgttgatcttttagttatgggctcaaagaatttattcatctctaacatgatattggaaaataatggatgaaaataggaaaaatgattgttaatgctgactgtgggtcttaaaaggttctggaaagcagtaagttcatttttctaaaaactataacattctgttggagtattttcttccttacgtcaatacttttcctgcattatttgaaattgtgggctggggagaaacagtagtcaaagctttctgaattgagatactttgaaattccaagtgtagatttttagaatgtcattttataaatggcagtttttggaattacttgataagaacttttgaaaatggaaggattagtatggcctatttttaaagctgctttgttaggttccttatgttttattaactgtcttttctcagtttccatttcatttttttttttctagttttggtgacttagtgattttgtcattttttacatcaacttcatggtcttgtttttacatggtaattgcatgtacttaggatctatctaataggggctttaaataaatttggtcatatttatgtgtaagcacattttactgtaaatgtttgggtttctgaatttaaacagatctgtttatttcagtatgtagtaaacaatatcttaaagtgtccgattcactacttgttaattaaaaaagttatgattaatgtgaaactgttgtcttactatttttagaaaattgtgttctggatgattagcacatggataaaggagatttctggaatataaaatggattgtttttgaaatttctaggtttggctctatttactgtaatggttgaaaacaatttagtatttgggtgacccttttgtttttcttctaaatgtgcctctggtaaaatacagaactagactaaagatgtagctttttaatatttgtcttttgatggtggcaggagttcatacattaattgaactaacacatcatattttgacctactatttctatcatattgacttactgtttctgcacttctttgaccagacttatcttaaaaagtccacttttgttaaaatgtagtcacacctctgatataatccaacaagaagtgttcaaaatattttaaatatttgtgcattttataatcactaaattaatctctctctcttctctttgaacagcttagcagtgtctgcaaaaacgaatcttttcctacaacctgttaactgactggactgttggtaacaaagtaattgtgagaaccatgtcggtcaaaaatttggcatctgctgaaaaaaatgaatgccattttcaagttcccaaattacttctatactgatttcactttccagaaatggagatatgaaaagattctctggaatccttgaaagacttaatagagatacatgagactaagttaatcttggaacaaaattatactttttttgtctttcatgggagtgatactcagttattgcatatctttacaaaattgtaacctttggagaattacagtatttcatcaagaaattagagtttttacataatcaagagcatattctatggaattaacatttagtggactagaattacataagcaggccatcagtgatcacaaggcatatgagtttgtatttatttcctggaacatgagagctaatttggagtacagacagacaccctgctgagtagaatataaaagttaatgtaaagttctgaactataaagagtagtccttttaaatagatgcattgatttgtatatctttgaaaaagttgattatgattaaatgtgtgggtagttaattacaatttagggtaacaaccaggatgtatggattcttgaggttttggcttcttgagctttctcttgagtacttgatactgttttctgaatattttgaggtttctaattaatggtatgctagtttctactgttttatataaaaatttatctagtgttgtataaggactttagtattgtggatgatgggagtggctttttgtggcatatggttgttttaattgaaatattttttcagtttattacaagtgtg

SEQ ID NO: 32100 - DNA, 4329 bp, Artificial Sequence
  derived and/or modified sequence
ggcgcggtcgagtcatcgcagggcctcaccgcttcgttctcccgtccctccccgcgccttggcgcggggggtcgactagccaagtgaggcgggaggcgactcggacctttccctgcatttcgtttcggccagtgccgggggctacccgccctggggcctgggatccttggggcccgtgaggcccactcttagcggccggggcctaccgcggcccgccgctggccctcatgaggcatagcctgaccaagctgctggcagcctcgggcagcaactccccaacccgcagtgagagcccggagccggctgcaacttgttcgctgccctctgacctgacccgggctgcagcgggggaggaggagacggcggcggccggatctcccggccgcaagcagcagtttggcgacgaaggagagttggaagccgggagggggagccgcggcggcgtggccgtgcgcgcgccctcccccgaggagatggaggaggaggcgatcgccagcctcccgggggaagagacggaggatatggactttctgtctgggctggaactggcggatctcctggaccccaggcaaccggactggcacctggaccccgggcttagctcgccggggcctctctcctcgtctggcggaggctcggatagcggcggcctgtggagaggggacgatgacgatgaggccgcggctgctgaaatgcagcgcttctctgacctgctgcaaaggctgttaaacggtatcggaggctgcagcagcagcagtgacagtggcagcgccgaaaagaggcggagaaagtccccaggaggaggcggcggtggcggcagcggtaacgacaacaaccaggcggcgacaaagagtccccggaaggcggcggcggccgctgcccgccttaatcgactgaagaagaaggagtacgtgatggggctggagagtcgagtccggggtctggcagccgagaaccaggagctgcgggccgagaatcgggagctgggcaaacgcgtacaggcactgcaggaggagagtcgctacctacgggcagtcttagccaacgagactggactggctcgcttgctgagccggctgagcggcgtgggactgcggctgaccacctcgctcttcagagactcgcccgccggtgaccacgactacgctctgccggtgggaaagcagaagcaggacctgctggaagaggacgactcggcgggaggagtctgtctccatgtggacaaggataaggtgtcggtggagttctgctcggcgtgcgcccggaaggcgtcgtcttctcttaaaatgtagggtcaagtaatctgctctttatccgcgtttacccctttcaactcccttacaccatgtcaaacttaccttagtgggacatcttcaccggacacatttcagaggagagaaaaaaagtaatattgaatcttaaagtgtttagctaaaagcatgaatgtgacacagtaaccaactcctaatgataacatgtgactattaaatctctctgacagtttcttttttaggtgatttccttcctgccaggctccgttgtaggggttacagaacagtcgttcccgcctcacaacctgtggatacagctgttggggcagaagagacgggaccagctgctggccacatttcctgctttattttaaaaggtagtataagaaatgaggaaaaagaggtaatatcagggcttctgctgttttttatttttaacatgttcataattaaaaagtattttccagcagtccaaagatgtaagttatcttacacataaaatgttttattttgttatttggttatgaaaatggaatccttgttcttgcacaactgtaaatgttttgttgctagataatacgatttgagacctgaattggtctttggtttccagtgcatcacagcatattttgtaaaatcatctactactgcacttgagcatgaatgggtagtagccaaactcacaaattggagtgatgaacctgcttatacctaagggcaggagcaagcccctcacaatgcagctgcatgggtttttagtgcctactgaattatatatatatatacatatatatatatatatataaaccaaaagtagttggaaagattatttgaaatgactaatttgtgctatctttatgaaatatgttaaatgtagcttttttgaaacagaagccttgaattgaaatttaactaatacttgaacattttgtatatatttctttgtatataattttgtgcagtaccaatgacaaaaatatggtgtcataataaaaccaggtttgttgatcttttagttatgggctcaaagaatttattcatctctaacatgatattggaaaataatggatgaaaataggaaaaatgattgttaatgctgactgtgggtcttaaaaggttctggaaagcagtaagttcatttttctaaaaactataacattctgttggagtattttcttccttacgtcaatacttttcctgcattatttgaaattgtgggctggggagaaacagtagtcaaagctttctgaattgagatactttgaaattccaagtgtagatttttagaatgtcattttataaatggcagtttttggaattacttgataagaacttttgaaaatggaaggattagtatggcctatttttaaagctgctttgttaggttccttatgttttattaactgtcttttctcagtttccatttcatttttttttttctagttttggtgacttagtgattttgtcattttttacatcaacttcatggtcttgtttttacatggtaattgcatgtacttaggatctatctaataggggctttaaataaatttggtcatatttatgtgtaagcacattttactgtaaatgtttgggtttctgaatttaaacagatctgtttatttcagtatgtagtaaacaatatcttaaagtgtccgattcactacttgttaattaaaaaagttatgattaatgtgaaactgttgtcttactatttttagaaaattgtgttctggatgattagcacatggataaaggagatttctggaatataaaatggattgtttttgaaatttctaggtttggctctatttactgtaatggttgaaaacaatttagtatttgggtgacccttttgtttttcttctaaatgtgcctctggtaaaatacagaactagactaaagatgtagctttttaatatttgtcttttgatggtggcaggagttcatacattaattgaactaacacatcatattttgacctactatttctatcatattgacttactgtttctgcacttctttgaccagacttatcttaaaaagtccacttttgttaaaatgtagtcacacctctgatataatccaacaagaagtgttcaaaatattttaaatatttgtgcattttataatcactaaattaatctctctctcttctctttgaacagcttagcagtgtctgcaaaaacgaatcttttcctacaacctgttaactgactggactgttggtaacaaagtaattgtgagaaccatgtcggtcaaaaatttggcatctgctgaaaaaaatgaatgccattttcaagttcccaaattacttctatactgatttcactttccagaaatggagatatgaaaagattctctggaatccttgaaagacttaatagagatacatgagactaagttaatcttggaacaaaattatactttttttgtctttcatgggagtgatactcagttattgcatatctttacaaaattgtaacctttggagaattacagtatttcatcaagaaattagagtttttacataatcaagagcatattctatggaattaacatttagtggactagaattacataagcaggccatcagtgatcacaaggcatatgagtttgtatttatttcctggaacatgagagctaatttggagtacagacagacaccctgctgagtagaatataaaagttaatgtaaagttctgaactataaagagtagtccttttaaatagatgcattgatttgtatatctttgaaaaagttgattatgattaaatgtgtgggtagttaattacaatttagggtaacaaccaggatgtatggattcttgaggttttggcttcttgagctttctcttgagtacttgatactgttttctgaatattttgaggtttctaattaatggtatgctagtttctactgttttatataaaaatttatctagtgttgtataaggactttagtattgtggatgatgggagtggctttttgtggcatatggttgttttaattgaaatattttttcagtttattacaagtgtgaaaaaacactcaaaa

SEQ ID NO: 32101 - DNA, 4037 bp, Artificial Sequence
  derived and/or modified sequence
ggcgcggtcgagtcatcgcagggcctcaccgcttcgttctcccgtccctccccgcgccttggcgcggggggtcgactagccaagtgaggcgggaggcgactcggacctttccctgcatttcgtttcggccagtgccgggggctacccgccctggggcctgggatccttggggcccgtgaggcccactcttagcggccggggcctaccgcggcccgccgctggccctcatgaggcatagcctgaccaagctgctggcagcctcgggcagcaactccccaacccgcagtgagagcccggagccggctgcaacttgttcgctgccctctgacctgacccgggctgcagcgggggaggaggagacggcggcggccggatctcccggccgcaagcagcagtttggcgacgaaggagagttggaagccgggagggggagccgcggcggcgtggccgtgcgcgcgccctcccccgaggagatggaggaggaggcgatcgccagcctcccgggggaagagacggaggatatggactttctgtctgggctggaactggcggatctcctggaccccaggcaaccggactggcacctggaccccgggcttagctcgccggggcctctctcctcgtctggcggaggctcggatagcggcggcctgtggagaggggacgatgacgatgaggccgcggctgctgaaatgcagcgcttctctgacctgctgcaaaggctgttaaacggtatcggaggctgcagcagcagcagtgacagtggcagcgccgaaaagaggcggagaaagtccccaggaggaggcggcggtggcggcagcggtaacgacaacaaccaggcggcgacaaagagtccccggaaggcggcggcggccgctgcccgccttaatcgactgaagaagaaggagtacgtgatggggctggagagtcgagtccggggtctggcagccgagaaccaggagctgcgggccgagaatcgggagctgggcaaacgcgtacaggcactgcaggaggagagtcgctacctacgggcagtcttagccaacgagactggactggctcgcttgctgagccggctgagcggcgtgggactgcggctgaccacctcgctcttcagagactcgcccgccggtgaccacgactacgctctgccggtgggaaagcagaagcaggacctgctggaagaggacgactcggcgggaggagtctgtctccatgtggacaaggataaggtgtcggtggagttctgctcggcgtgcgcccggaaggcgtcgtcttctcttaaaatgtagggtcaagtaatctgctctttatccgcgtttacccctttcaactcccttacaccatgtcaaacttaccttagtgggacatcttcaccggacacatttcagaggagagaaaaaaagtaatattgaatcttaaagtgtttagctaaaagcatgaatgtgacacagtaaccaactcctaatgataacatgtgactattaaatctctctgacagtttcttttttaggtgatttccttcctgccaggctccgttgtaggggttacagaacagtcgttcccgcctcacaacctggtaaggatccatctcttcccgtaacgctcatgctctgctgctttgtctactttaatgggcaacatctcagtttgtgtgtgtgtgatttttttttttttttctgttttggaaggtgggagggaaatctaatttgggccctgtccaccctggaaacagacttgtgctggtcaagaatgtatttaagatgcctcttctggttgaaatagctattaatgtgtccccttattcagacttgcgtgtacctagctcttctgtccccagtgtggacatggccttggatgacatcggttccaactgtacactgaaacctgcttatagagagacagtttggagacagtgaaacaggtgaagttgaatggaagttccgagttgtacaaggtgcaaattggaattccgattttagggcaacttttcagaggttgacagttaagtatttggggcatgcacaaatgtgatagttattttgctggaggtgacaggtatctcttaaatatcaacaatgccttttagttttcagtatgagatatagaaacagtctataatggagtaacattttaatgtctcaccattagagaagttggaaattaacatacatatgagactcctgcgttttagttaattggagaataagaatggctaatgtttctttgaggaccagcagtgattaccctatcactgagattgaataaattgttgaacatctttatttttgttgtattaaaattttaggttaaatttatatatgtatgattagatattgaaggttgtgaaatgtgaatgaaaacgtgtaaagtgaggcttcacaaagaatcttattctctgtgtttcaaaagtatttgtcctattttaaaataattttttaaattgagtggttctggccacttaaatgacacgattggtactattttcctaaggtgggatttattcccttgaatctattaaccagttgtataaattgaattatggtgtccttcagtgtaagaggcattaagaaattctttgtgaaacatcactgcttgataaagtatatacgtatttagcatccttgtttttctttgtgctaaagtggatacagctgttggggcagaagagacgggaccagctgctggccacatttcctgctttattttaaaaggtagtataagaaatgaggaaaaagaggtaatatcagggcttctgctgttttttatttttaacatgttcataattaaaaagtattttccagcagtccaaagatgtaagttatcttacacataaaatgttttattttgttatttggttatgaaaatggaatccttgttcttgcacaactgtaaatgttttgttgctagataatacgatttgagacctgaattggtctttggtttccagtgcatcacagcatattttgtaaaatcatctactactgcacttgagcatgaatgggtagtagccaaactcacaaattggagtgatgaacctgcttatacctaagggcaggagcaagcccctcacaatgcagctgcatgggtttttagtgcctactgaattatatatatatatacatatatatatatatatataaaccaaaagtagttggaaagattatttgaaatgactaatttgtgctatctttatgaaatatgttaaatgtagcttttttgaaacagaagccttgaattgaaatttaactaatacttgaacattttgtatatatttctttgtatataattttgtgcagtaccaatgacaaaaatatggtgtcataataaaaccaggtttgttgatcttttagttatgggctcaaagaatttattcatctctaacatgatattggaaaataatggatgaaaataggaaaaatgattgttaatgctgactgtgggtcttaaaaggttctggaaagcagtaagttcatttttctaaaaactataacattctgttggagtattttcttccttacgtcaatacttttcctgcattatttgaaattgtgggctggggagaaacagtagtcaaagctttctgaattgagatactttgaaattccaagtgtagatttttagaatgtcattttataaatggcagtttttggaattacttgataagaacttttgaaaatggaaggattagtatggcctatttttaaagctgctttgttaggttccttatgttttattaactgtcttttctcagtttccatttcatttttttttttctagttttggtgacttagtgattttgtcattttttacatcaacttcatggtcttgtttttacatggtaattgcatgtacttaggatctatctaataggggctttaaataaatttggtcatatttatgtgtaagcacattttactgtaaatgtttgggtttctgaatttaaacagatctgtttatttcagtatgtagtaaacaatatcttaaagtgtccgattcactacttgttaattaaaaaagttatgattaatgtgaaa

SEQ ID NO: 32102 - DNA, 819 bp, Artificial Sequence
  derived and/or modified sequence
atggaggaggaggccatcgccagcctgcccggcgaggagaccgaggacatggacttcctgagcggcctggagctggccgacctgctggaccccagacagcccgactggcacctggaccccggcctgagcagccccggccccctgagcagcagcggcggcggcagcgacagcggcggcctgtggagaggcgacgacgacgacgaggccgccgccgccgagatgcagagattcagcgacctgctgcagagactgctgaacggcatcggcggctgcagcagcagcagcgacagcggcagcgccgagaagagaagaagaaagagccccggcggcggcggcggcggcggcagcggcaacgacaacaaccaggccgccaccaagagccccagaaaggccgccgccgccgccgccagactgaacagactgaagaagaaggagtacgtgatgggcctggagagcagagtgagaggcctggccgccgagaaccaggagctgagagccgagaacagagagctgggcaagagagtgcaggccctgcaggaggagagcagatacctgagagccgtgctggccaacgagaccggcctggccagactgctgagcagactgagcggcgtgggcctgagactgaccaccagcctgttcagagacagccccgccggcgaccacgactacgccctgcccgtgggcaagcagaagcaggacctgctggaggaggacgacagcgccggcggcgtgtgcctgcacgtggacaaggacaaggtgagcgtggagttctgcagcgcctgcgccagaaaggccagcagcagcctgaagatgtag

SEQ ID NO: 32103 - DNA, 1065 bp, Artificial Sequence
  derived and/or modified sequence
atgagacacagcctgaccaagctgctggccgccagcggcagcaacagccccaccagaagcgagagccccgagcccgccgccacctgcagcctgcccagcgacctgaccagagccgccgccggcgaggaggagaccgccgccgccggcagccccggcagaaagcagcagttcggcgacgagggcgagctggaggccggcagaggcagcagaggcggcgtggccgtgagagcccccagccccgaggagatggaggaggaggccatcgccagcctgcccggcgaggagaccgaggacatggacttcctgagcggcctggagctggccgacctgctggaccccagacagcccgactggcacctggaccccggcctgagcagccccggccccctgagcagcagcggcggcggcagcgacagcggcggcctgtggagaggcgacgacgacgacgaggccgccgccgccgagatgcagagattcagcgacctgctgcagagactgctgaacggcatcggcggctgcagcagcagcagcgacagcggcagcgccgagaagagaagaagaaagagccccggcggcggcggcggcggcggcagcggcaacgacaacaaccaggccgccaccaagagccccagaaaggccgccgccgccgccgccagactgaacagactgaagaagaaggagtacgtgatgggcctggagagcagagtgagaggcctggccgccgagaaccaggagctgagagccgagaacagagagctgggcaagagagtgcaggccctgcaggaggagagcagatacctgagagccgtgctggccaacgagaccggcctggccagactgctgagcagactgagcggcgtgggcctgagactgaccaccagcctgttcagagacagccccgccggcgaccacgactacgccctgcccgtgggcaagcagaagcaggacctgctggaggaggacgacagcgccggcggcgtgtgcctgcacgtggacaaggacaaggtgagcgtggagttctgcagcgcctgcgccagaaaggccagcagcagcctgaagatgtag

SEQ ID NO: 32104 - protein, 620 aa, Artificial Sequence
  derived and/or modified sequence
MRGPNSGTEKGRLVIPEKQGFDFLCMPVFHPRFKREFIQEPAKNRPGPQTRSDLLLSGRDWNTLIVGKLSPWIRPDSKVEKIRRNSEAAMLQELNFGAYLGLPAFLLPLNQEDNTNLARVLTNHIHTGHHSSMFWMRVPLVAPEDLRDDIIENAPTTHTEEYSGEEKTWMWWHNFRTLCDYSKRIAVALEIGADLPSNHVIDRWLGEPIKAAILPTSIFLTNKKGFPVLSKMHQRLIFRLLKLEVQFIITGTNHHSEKEFCSYLQYLEYLSQNRPPPNAYELFAKGYEDYLQSPLQPLMDNLESQTYEVFEKDPIKYSQYQQAIYKCLLDRVPEEEKDTNVQVLMVLGAGRGPLVNASLRAAKQADRRIKLYAVEKNPNAVVTLENWQFEEWGSQVTVVSSDMREWVAPEKADIIVSELLGSFADNELSPECLDGAQHFLKDDGVSIPGEYTSFLAPISSSKLYNEVRACREKDRDPEAQFEMPYVVRLHNFHQLSAPQPCFTFSHPNRDPMIDNNRYCTLEFPVEVNTVLHGFAGYFETVLYQDITLSIRPETHSPGMFSWFPILFPIKQPITVREGQTICVRFWRCSNSKKVWYEWAVTAPVCSAIHNPTGRSYTIGL

SEQ ID NO: 32105 - DNA, 1863 bp, Artificial Sequence
  derived and/or modified sequence
atgagaggccccaacagcggcaccgagaagggcagactggtgatccccgagaagcagggcttcgacttcctgtgcatgcccgtgttccaccccagattcaagagagagttcatccaggagcccgccaagaacagacccggcccccagaccagaagcgacctgctgctgagcggcagagactggaacaccctgatcgtgggcaagctgagcccctggatcagacccgacagcaaggtggagaagatcagaagaaacagcgaggccgccatgctgcaggagctgaacttcggcgcctacctgggcctgcccgccttcctgctgcccctgaaccaggaggacaacaccaacctggccagagtgctgaccaaccacatccacaccggccaccacagcagcatgttctggatgagagtgcccctggtggcccccgaggacctgagagacgacatcatcgagaacgcccccaccacccacaccgaggagtacagcggcgaggagaagacctggatgtggtggcacaacttcagaaccctgtgcgactacagcaagagaatcgccgtggccctggagatcggcgccgacctgcccagcaaccacgtgatcgacagatggctgggcgagcccatcaaggccgccatcctgcccaccagcatcttcctgaccaacaagaagggcttccccgtgctgagcaagatgcaccagagactgatcttcagactgctgaagctggaggtgcagttcatcatcaccggcaccaaccaccacagcgagaaggagttctgcagctacctgcagtacctggagtacctgagccagaacagacccccccccaacgcctacgagctgttcgccaagggctacgaggactacctgcagagccccctgcagcccctgatggacaacctggagagccagacctacgaggtgttcgagaaggaccccatcaagtacagccagtaccagcaggccatctacaagtgcctgctggacagagtgcccgaggaggagaaggacaccaacgtgcaggtgctgatggtgctgggcgccggcagaggccccctggtgaacgccagcctgagagccgccaagcaggccgacagaagaatcaagctgtacgccgtggagaagaaccccaacgccgtggtgaccctggagaactggcagttcgaggagtggggcagccaggtgaccgtggtgagcagcgacatgagagagtgggtggcccccgagaaggccgacatcatcgtgagcgagctgctgggcagcttcgccgacaacgagctgagccccgagtgcctggacggcgcccagcacttcctgaaggacgacggcgtgagcatccccggcgagtacaccagcttcctggcccccatcagcagcagcaagctgtacaacgaggtgagagcctgcagagagaaggacagagaccccgaggcccagttcgagatgccctacgtggtgagactgcacaacttccaccagctgagcgccccccagccctgcttcaccttcagccaccccaacagagaccccatgatcgacaacaacagatactgcaccctggagttccccgtggaggtgaacaccgtgctgcacggcttcgccggctacttcgagaccgtgctgtaccaggacatcaccctgagcatcagacccgagacccacagccccggcatgttcagctggttccccatcctgttccccatcaagcagcccatcaccgtgagagagggccagaccatctgcgtgagattctggagatgcagcaacagcaagaaggtgtggtacgagtgggccgtgaccgcccccgtgtgcagcgccatccacaaccccaccggcagaagctacaccatcggcctgtag

SEQ ID NO: 32106 - DNA, 1863 bp, Artificial Sequence
  derived and/or modified sequence
atgcgcgggcccaattctggcacggagaaaggacgtttagtcatccctgagaagcagggattcgacttcctgtgcatgcccgtgtttcatccccgatttaaaagagagtttatccaagaacctgctaaaaaccggccaggcccacagaccagatccgatctgctgctcagtggccgggactggaatacgctcattgttgggaaactgtcaccctggatacggccagacagcaaggtggaaaagatcaggagaaacagcgaggccgcgatgttacaggagctcaacttcggcgcatatctgggtctgcctgccttcctgctgcctttaaaccaagaggacaataccaacctggctagggtactgacaaatcacatacatacagggcaccacagcagtatgttctggatgcgcgtgccactggtggcgcccgaggatcttcgcgacgatattatcgagaacgccccgacaacccacacagaagagtactctggagaagaaaagacctggatgtggtggcacaatttccgcacgttatgtgactatagcaagaggattgccgtcgcactggaaattggcgctgatcttccatccaatcatgtcatcgacaggtggctgggagaaccaataaaggcagcgatactgccaacctcaatcttcctgaccaacaaaaagggattcccagttctgtctaaaatgcaccagagacttattttcaggctacttaaactagaagtccagttcatcatcactggaacgaatcatcattccgagaaagagttctgctcttacctacaatatttagaatacctgtcgcagaatcggccaccccccaatgcctatgaactgtttgctaaaggatatgaagactatctgcaatctcccctacagcctcttatggataacctggagtcccagacgtatgaggtattcgaaaaggatccaataaagtactctcagtatcagcaagccatctataagtgtcttctcgatagggtaccagaagaggaaaaggacactaatgtgcaagtgctgatggtgctgggtgcaggccgaggccccctcgtaaacgctagcctgagagccgctaagcaggcagatcggaggattaaactgtacgcggtggagaaaaatcctaatgccgtggtgaccctagaaaactggcagttcgaggagtggggcagccaggtaactgtggtatcgagtgatatgagagagtgggtggctcctgaaaaggctgacataatagtctctgagctcctcggctcctttgctgacaatgaactatccccggaatgcttggatggggctcagcatttccttaaggacgatggagtctcgatccctggcgagtatacctcttttttagcccccatcagctcttccaagctgtacaatgaggtacgtgcctgccgtgagaaagacagggacccggaagcacagtttgaaatgccttacgttgttcggctgcacaactttcaccagctgtcagccccgcagccctgcttcactttttcgcatcccaacagagaccccatgattgataacaatcgttactgcactcttgaatttccagtcgaagtcaatactgtgctgcacggcttcgcaggttatttcgaaaccgttctgtatcaggatatcacgttatccatcagacccgaaacacattcccccggtatgttttcatggttcccgatactgtttcccattaaacaaccgataaccgtcagagagggtcagacaatttgtgtacgcttctggagatgttcaaatagcaaaaaggtgtggtacgagtgggcagttacggccccagtatgttctgcgatccacaatccgacgggcaggagttacacaatcggactgtag

SEQ ID NO: 32107 - DNA, 1863 bp, Artificial Sequence
  derived and/or modified sequence
atgaggggccccaacagcggcacagagaagggccgcctggtgattcctgagaagcagggctttgacttcctgtgcatgcctgtgttccacccccgcttcaagcgggagttcatccaggagcccgccaagaaccggcccggcccccagaccaggagtgacctgctgctgagcggccgggactggaacaccctgattgtgggcaagctgagcccctggatccggccagacagcaaggtggagaagatcagaagaaacagcgaggccgccatgctgcaggagctgaactttggagcctacctgggcctgcctgccttcctgctgcccctgaaccaggaggacaacaccaacctggcccgggtgctgaccaaccacatccacacaggccaccacagctccatgttctggatgagggtgcccctggtggcccctgaggacctgagagatgacatcattgaaaatgcccccaccacccacacagaggagtacagcggggaggagaagacctggatgtggtggcacaacttccgcaccctgtgtgactacagcaagagaattgctgtggccctggagattggagctgacctgcccagcaaccacgtgattgaccgctggctgggggagcccatcaaggccgccatcctgcccaccagcatcttcctgaccaacaagaagggcttccctgtgctgagcaagatgcaccagaggctcatcttccggctgctgaagctggaggtgcagttcatcatcaccggcaccaaccaccacagcgagaaggagttctgcagctacctgcagtacctggagtacctgagccagaacagacctcctccaaatgcctatgagctgtttgccaagggctatgaggactacctgcagagccccctgcagcccctgatggacaacctggagagccagacctatgaggtgtttgagaaggaccccatcaagtacagccagtaccagcaggccatctacaagtgcctgctggacagagtgcctgaggaggagaaggacaccaacgtgcaggtgctgatggtgctgggcgccggccggggccccctggtgaatgccagcctgcgggccgccaagcaggccgaccggcgcatcaagctgtatgctgtggagaagaaccccaatgctgtggtgaccctggagaactggcagtttgaggagtggggcagccaggtgacagtggtgtccagtgacatgagggagtgggtggcccctgagaaggctgacatcatcgtgtctgagctgctgggcagctttgctgacaatgagctgagcccagaatgtctggatggagcccagcacttcctgaaggatgatggagtgtccatccctggagagtacaccagcttcctggcccccatcagcagcagcaagctgtacaatgaggtgcgggcctgccgggagaaggaccgggaccctgaggcccagtttgagatgccctacgtggtgcggctgcacaacttccaccagctgagcgccccccagccctgcttcaccttcagccaccccaacagagaccccatgattgacaacaaccgctactgcaccctggagttccctgtggaggtgaacacagtgctgcacggctttgctggctactttgagaccgtgctgtaccaggacatcaccctgagcatccggcctgagacccacagccctggcatgttctcctggttccccatcctcttccccatcaagcagcccatcaccgtgcgggagggccagaccatctgtgtgcgcttctggcgctgcagcaacagcaagaaggtgtggtatgagtgggccgtgacagcccctgtgtgcagcgccatccacaaccccaccggccgcagctacaccatcggcctgtag

SEQ ID NO: 32108 - DNA, 2418 bp, Artificial Sequence
  derived and/or modified sequence
agtatcaaggaatcccggcgtggacagcgcgaggagaaagatggcggcgatggcggtcgggggtgctggtgggagccgcgtgtccagcgggagggacctgaattgcgtccccgaaatagctgacacactaggggctgtggccaagcaggggtgagggccggacctccacgagcggaatgcggggtccgaactcggggacggagaagggcagactagtcatcccggagaagcaggggtttgatttcctctgcatgcctgtcttccatccgcgtttcaagagggagttcattcaggaacctgctaagaatcggcccggtccccagacacgatcagacctactgctgtcaggaagggactggaatacgctaattgtgggaaagctttctccatggattcgtccagactcaaaagtggagaagattcgcaggaactccgaggcggccatgttacaggagctgaattttggtgcatatttgggtcttccagctttcctgctgccccttaatcaggaagataacaccaacctggccagagttttgaccaaccacatccacactggccatcactcttccatgttctggatgcgggtacccttggtggcaccagaggacctgagagatgatataattgagaatgcaccaactacacacacagaggagtacagtggggaggagaaaacgtggatgtggtggcacaacttccggactttgtgtgactatagtaagaggattgcagtggctcttgaaattggggctgacctcccatctaatcatgtcattgatcgctggcttggggagcccatcaaagcagccattctccccactagcattttcctgaccaataagaagggatttcctgttctttctaagatgcaccagaggctcatcttccggctcctcaagttggaggtgcagttcatcatcacaggcaccaaccaccactcagagaaggagttctgctcctacctccaatacctggaatacttaagccagaaccgtcctccacctaatgcctatgaactctttgccaagggctatgaagactatctgcagtccccgcttcagccactgatggacaatctggaatctcagacatatgaagtgtttgaaaaggaccccatcaaatactctcagtaccagcaggccatctataaatgtctgctagaccgagtaccagaagaggagaaggataccaatgtccaggtactgatggtgctgggagcaggacggggacccctggtgaacgcttccctgcgggcagccaagcaggccgaccggcggataaagctgtatgctgtggagaaaaacccaaatgccgtggtgacgctagagaactggcagtttgaagaatggggaagccaagtgaccgtagtctcatcagacatgagggaatgggtggctccagagaaagcagacatcattgtcagtgagcttctgggctcatttgctgacaatgaattgtcgcctgagtgcctggatggagcccagcacttcctaaaagatgatggtgtgagcatccccggggagtacacttcctttctggctcccatctcttcctccaagctgtacaatgaggtccgagcctgtagggagaaggaccgtgaccctgaggcccagtttgagatgccttatgtggtacggctgcacaacttccaccagctctctgcaccccagccctgtttcaccttcagccatcccaacagagatcctatgattgacaacaaccgctattgcaccttggaatttcctgtggaggtgaacacagtactacatggctttgccggctactttgagactgtgctttatcaggacatcactctgagtatccgtccagagactcactctcctgggatgttctcatggtttcccatcctcttccctattaagcagcccataacggtacgtgaaggccaaaccatctgtgtgcgtttctggcgatgcagcaattccaagaaggtgtggtatgagtgggctgtgacagcaccagtctgttctgctattcataaccccacaggccgctcatataccattggcctctagccctgcgtgccaagtgtccagagccttggaagcagcttcaggttctgctcctgtagtacagaaggtgcagtacatctatgggctgtgattccccttgcccatcagagaggagcatttcaatctgctttcctgccttacatcaaggtgggcaagggattataattaattgcagggctcaagccaccaatctatgaagacctcaggccagggggtgaggaattagtgctggatttgaagctacgcactcagcctcaagaactccctggaatatccctgagaacatggggtttgaacggattttcagcctttttctgttcttgttttgatggttttgtgtaagaggaaatacaaataaagttatagccctttactgcacgac

SEQ ID NO: 32109 - DNA, 1863 bp, Artificial Sequence
  derived and/or modified sequence
atgcggggccccaacagcggcaccgagaagggccggctggtgatccccgaaaagcagggctttgattttctgtgcatgcctgtctttcacccacggtttaaacgagaattcattcaggaaccagcaaagaacagacccggccctcagacgcggtccgatctgcttctcagtggcagggactggaacaccttaatagtggggaaactctccccatggattagacccgattctaaagtggaaaagataaggaggaactctgaagctgctatgcttcaggagctgaatttcggggcctacctcggactccccgcatttctgctgccactgaaccaggaagacaacaccaaccttgccagagtactgaccaaccacattcacacaggacatcacagctctatgttctggatgcgggtccctctggtggctcccgaggaccttcgagatgatatcatcgagaacgctccaaccacccacacagaagaatatagcggagaagagaaaacatggatgtggtggcacaatttccgcactctctgcgattacagtaaaagaattgccgtcgcactggagataggagctgatctgcccagtaaccacgtgatcgaccggtggttaggcgaacctataaaggcagctattctcccaaccagtatttttctgaccaataagaagggattcccagtgttgagcaagatgcaccaacgcttaatcttccgcctgctgaagctggaagtgcaattcatcatcaccgggacgaaccatcactctgagaaagagttttgtagttacctccaatatcttgagtacctctcacagaaccggccaccccccaacgcctatgagctgtttgcaaagggctatgaggactatttacagagccccctgcagcctctcatggacaaccttgagagtcagacatatgaagttttcgaaaaagaccctatcaagtacagccagtaccagcaggcaatctacaagtgtttattagacagagtgcccgaggaagagaaggataccaacgtgcaggtactcatggtgttgggggctggacggggccccttggttaacgcttcactacgtgccgcgaaacaagctgatcggcggatcaagctgtacgccgtggagaagaatcccaatgccgtcgtcacactagagaattggcagtttgaggaatggggatcccaggtgaccgttgtgtcctccgatatgcgagagtgggtggcccccgaaaaggctgatatcatagtgagcgaactcctgggctcattcgctgataacgagctgtccccagaatgtcttgacggcgcccagcatttcctcaaggatgatggtgttagtattccaggagagtatactagcttcctcgcccctattagttcttcaaagctgtacaatgaagttagagcatgcagggagaaggaccgcgaccctgaagctcagttcgaaatgccttatgtggtgcgcctgcacaattttcatcagctttccgctccacagccatgttttactttctcccatccaaaccgtgaccctatgatcgacaataaccggtattgtactctggagttccctgtggaggtgaacacggtgctgcacggctttgccggttacttcgagactgtgttgtaccaagatatcaccctcagtattcgacccgagacccacagtcctggaatgttcagctggttcccaatcctgtttccaatcaaacaacctattacagtgagagagggacagactatatgtgtgaggttctggcggtgttccaattctaagaaggtctggtatgagtgggctgtcactgcgccagtttgctcagcaattcataacccaaccgggagatcttacacgatcggtttgtag

SEQ ID NO: 32110 - DNA, 1863 bp, Artificial Sequence
  derived and/or modified sequence
atgcgtggccctaactcaggaacagaaaagggccgactggtgatccccgaaaaacaaggattcgatttcctgtgtatgcccgtgttccacccacgattcaagagagaattcattcaggaacctgctaaaaaccgacctggacctcaaacccgcagtgacttgttgctaagtgggagagactggaatactctgattgttggtaagcttagcccatggatcagacctgatagtaaggtggaaaagatcaggcgtaattccgaggccgcaatgctccaagagctgaactttggggcttacctgggattacccgcattcttgctgcccctcaaccaggaggataatacgaatttagccagagtcctgacgaaccatatccatacaggacaccattctagtatgttctggatgcgcgtgccacttgtggctccggaagacctcagggacgatattattgaaaacgccccaacaactcacactgaggagtattcaggagaagagaaaacgtggatgtggtggcacaactttcggacgctgtgcgactatagtaaacgcattgctgtggccctcgaaattggtgccgatttgccgtccaatcatgttattgatagatggttgggggagcctatcaaagctgcgattttgcctacttccatcttcctgaccaataaaaaggggttccctgttttatctaagatgcatcagaggttaatctttcgtttacttaagctcgaagtacaattcataatcaccgggacaaaccatcattccgaaaaggaattctgcagttacctccagtacctcgagtatctgtctcagaatcgccctcctcccaacgcttacgagctgtttgccaagggctacgaggactacctccaaagtcctctgcagcctctcatggataacctcgaatcacagacttacgaagtatttgaaaaggaccccatcaagtattctcaatatcagcaggcaatttacaagtgtctcctcgatcgagttcctgaggaagaaaaagacaccaacgttcaagtgctgatggtacttggggctggaagaggacctctggtgaatgcatctctgagagcagccaaacaggcggaccgccgaatcaagctatatgccgtcgagaaaaaccctaacgcagtggtgacgctggagaactggcagtttgaggagtggggttcccaggtgactgttgtgtcctctgatatgcgggaatgggtggcccctgagaaagctgatattatcgtcagcgagctgctcggttcatttgcggataacgaactctctcctgaatgcctggacggggcacaacacttcctgaaggacgacggagtctcaatacccggtgagtacacttccttcttggctcccatcagcagcagtaagctctacaacgaggtacgagcctgtcgcgagaaggacagggaccccgaggcccagtttgaaatgccctacgtcgtccggctacataacttccatcagttatctgccccacaaccctgcttcacgttctcccaccctaacagagacccaatgatcgacaataatagatactgcactctggaatttcccgtggaggtgaacactgtgttacacgggttcgcaggctactttgagacagtcctctatcaggacataacactttcaatacgtcctgagacccactcacctggtatgttctcgtggttcccgattctgttccctataaagcaaccgataacggtgagagagggccaaaccatctgtgtgagattctggagatgctccaattcgaaaaaagtctggtatgagtgggccgtaaccgccccagtgtgcagcgcaattcataaccctacaggaaggtcatacacgatagggctctag

SEQ ID NO: 32111 - DNA, 1933 bp, Artificial Sequence
  derived and/or modified sequence
agaaagatggcggcgatggcggtcgggggtgctggtgggagccgcgtgtccagcgggagggacctgaattgcgtccccgaaatagctgacacactaggggctgtggccaagcaggggtgagggccggacctccacgagcggaatgcggggtccgaactcggggacggagaagggcagactagtcatcccggagaagcagggactggaatacgctaattgtgggaaagctttctccatggattcgtccagactcaaaagtggagaagattcgcaggaactccgaggcggccatgttacaggagctgaattttggtgcatatttgggtcttccagctttcctgctgccccttaatcaggaagataacaccaacctggccagagttttgaccaaccacatccacactggccatcactcttccatgttctggatgcgggtacccttggtggcaccagaggacctgagagatgatataattgagaatgcaccaactacacacacagaggagtacagtggggaggagaaaacgtggatgtggtggcacaacttccggactttgtgtgactatagtaagaggattgcagtggctcttgaaattggggctgacctcccatctaatcatgtcattgatcgctggcttggggagcccatcaaagcagccattctccccactagcattttcctgaccaataagaagggatttcctgttctttctaagatgcaccagaggctcatcttccggctcctcaagttggaggtgcagttcatcatcacaggcaccaaccaccactcagagaaggagttctgctcctacctccaatacctggaatacttaagccagaaccgtcctccacctaatgcctatgaactctttgccaagggctatgaagactatctgcagtccccgcttcagccactgatggacaatctggaatctcagacatatgaagtgtttgaaaaggaccccatcaaatactctcagtaccagcaggccatctataaatgtctgctagaccgagtaccagaagaggagaaggataccaatgtccaggtactgatggtgctgggagcaggacggggacccctggtgaacgcttccctgcgggcagccaagcaggccgaccggcggataaagctgtatgctgtggagaaaaacccaaatgccgtggtgacgctagagaactggcagtttgaagaatggggaagccaagtgaccgtagtctcatcagacatgagggaatgggtggctccagagaaagcagacatcattgtcagtgagcttctgggctcatttgctgacaatgaattgtcgcctgagtgcctggatggagcccagcacttcctaaaagatgatggtgtgagcatccccggggagtacacttcctttctggctcccatctcttcctccaagctgtacaatgaggtccgagcctgtagggagaaggaccgtgaccctgaggcccagtttgagatgccttatgtggtacggctgcacaacttccaccagctctctgcaccccagccctgtttcaccttcagccatcccaacagagatcctatgattgacaacaaccgctattgcaccttggaatttcctgtggaggtgaacacagtactacatggctttgccggctactttgagactgtgctttatcaggacatcactctgagtatccgtccagagactcactctcctgggatgttctcatggtttcccatcctcttccctattaagcagcccataacggtacgtgaaggccaaaccatctgtgtgcgtttctggcgatgcagcaattccaagaaggtgtggtatgagtgggctgtgacagcaccagtctgttctgctattcataaccccacaggccgctcatataccattggcctctagccctgcgtgccaagtgtccagagccttggaagcagcttcaggttctg

SEQ ID NO: 32112 - protein, 208 aa, Artificial Sequence
  derived and/or modified sequence
MEKCSVGGLELTEQTPALLGNMAMATSLMDIGDSFGHPACPLVSRSRNSPVEDDDDDDDVVFIESIQPPSISAPAIADQRNFIFASSKNEKPQGNYSVIPPSSRDLASQKGNISETIVIDDEEDIETNGGAEKKSSCFIEWGLPGTKNKTNDLDFSTSSLSRSKTKTGVRPFNPGRMNVAGDLFQNGEFATHHSPEMHLQRRLMSFFQ

SEQ ID NO: 32113 - DNA, 627 bp, Artificial Sequence
  derived and/or modified sequence
atggagaagtgcagcgtgggcggcctggagctgaccgagcagacccccgccctgctgggcaacatggccatggccaccagcctgatggacatcggcgacagcttcggccaccccgcctgccccctggtgagcagaagcagaaacagccccgtggaggacgacgacgacgacgacgacgtggtgttcatcgagagcatccagccccccagcatcagcgcccccgccatcgccgaccagagaaacttcatcttcgccagcagcaagaacgagaagccccagggcaactacagcgtgatcccccccagcagcagagacctggccagccagaagggcaacatcagcgagaccatcgtgatcgacgacgaggaggacatcgagaccaacggcggcgccgagaagaagagcagctgcttcatcgagtggggcctgcccggcaccaagaacaagaccaacgacctggacttcagcaccagcagcctgagcagaagcaagaccaagaccggcgtgagacccttcaaccccggcagaatgaacgtggccggcgacctgttccagaacggcgagttcgccacccaccacagccccgagatgcacctgcagagaagactgatgagcttcttccagtag

SEQ ID NO: 32114 - DNA, 627 bp, Artificial Sequence
  derived and/or modified sequence
atggagaaatgcagcgttggcggtctcgagctcactgaacagactcccgcccttctgggaaacatggcaatggcaacctctctcatggacatcggcgacagctttggacaccctgcttgccccctggttagcaggtcacggaactctccagtagaggatgacgatgacgacgacgacgtcgtgttcatcgaaagcattcagccccccagcattagcgccccagctatcgccgatcagcggaatttcatctttgcaagtagcaagaatgagaaaccacagggcaactacagtgtcatcccgccctcatctcgtgacctggccagccagaagggtaacatttctgaaaccatcgtaatcgatgatgaggaagacatagagaccaatggtggcgctgaaaaaaaaagttcttgttttatagaatgggggctgcccgggacaaagaacaagaccaacgaccttgactttagcacaagttcattaagtcgctctaagactaagactggcgttaggccgttcaaccctggcaggatgaatgtggccggggacttattccaaaacggtgagtttgccactcatcattccccagagatgcacttgcaacgccggcttatgtcattcttccaatag

SEQ ID NO: 32115 - DNA, 627 bp, Artificial Sequence
  derived and/or modified sequence
atggagaagtgcagcgtgggcggcctggagctgacagagcagaccccagccctgctgggcaacatggccatggccaccagcctgatggacattggagacagctttggccacccagcctgccccctggtgagccgcagcaggaacagccctgtggaggatgatgatgatgatgatgatgtggtgttcatcgagagcatccagccccccagcatcagcgccccagccatcgctgaccagaggaacttcatctttgccagcagcaagaatgagaagccccagggcaactacagcgtcatcccccccagcagccgggacctggccagccagaagggcaacatcagcgagaccatcgtgattgatgatgaagaagatattgagaccaacggcggcgctgagaagaagagcagctgcttcatcgagtggggcctgcccggcaccaagaacaagaccaatgacctggacttcagcaccagcagcctgagccgcagcaagaccaagacaggagtgcggcccttcaaccctggccgcatgaatgtggccggggacctcttccagaatggagaatttgccacccaccacagccctgagatgcacctgcagaggcggctgatgtccttcttccagtag

SEQ ID NO: 32116 - DNA, 627 bp, Artificial Sequence
  derived and/or modified sequence
atggagaagtgcagcgtgggcggcctggagctgaccgagcagaccccagcattgctcggtaatatggctatggcaacatctctgatggatatcggggactcattcggccatcccgcttgtccactggtctcaaggtcccggaactcgccagtcgaagatgacgatgatgatgacgacgtagtgtttattgagagcattcagcctcccagcatttctgcgccggctatcgccgaccagcgaaactttatctttgcatcttcaaagaacgaaaagccacagggcaactactccgtgatccccccctcatcacgggacctcgccagccagaagggaaacatctctgaaaccatagtgatcgacgatgaagaagatattgaaactaatggtggagctgagaaaaagtcttcttgcttcattgagtgggggttgcctgggaccaagaataaaacaaatgacctggactttagcacctcctctctgtcacggagtaagacaaagaccggagtgcgtccatttaatccagggcgtatgaatgttgccggagaccttttccaaaatggcgaatttgcaacacaccactctcctgagatgcatctgcagaggcggttaatgtccttcttccagtag

SEQ ID NO: 32117 - DNA, 627 bp, Artificial Sequence
  derived and/or modified sequence
atggaaaagtgctccgtcggaggactggagctcaccgagcaaacaccagcactgctgggcaatatggcaatggctacatccctcatggacattggcgatagtttcgggcaccctgcatgcccgttagtgtcccggtcccgcaactcgcctgtggaggacgacgatgatgacgacgacgtcgtttttatagaatcaatccagcctcctagcattagtgccccagctattgcggatcagcggaacttcatctttgcaagttccaaaaacgaaaagcctcaggggaactactcagtgattccgccatcttccagggatctagcttcacagaagggcaacatatcagagacaatcgtcatagacgatgaagaagacattgaaaccaacggcggtgccgagaaaaaatccagttgcttcatcgagtgggggctgcccggtacgaaaaacaaaacaaacgatctcgattttagcactagtagcctgtctaggagtaagacaaaaaccggcgtccgacccttcaaccccggtcgtatgaatgtggcaggcgatctattccaaaatggggagtttgccacacatcactctcctgaaatgcacctgcagaggcggctgatgagttttttccagtag

SEQ ID NO: 32118 - DNA, 1092 bp, Artificial Sequence
  derived and/or modified sequence
gctgagagtgggggtggctgggagcagcgcagcctccggaggaggaggcggaggccgaggaccaggaatcaccttcaagcctatgtcgtgaggctttggcagaaattaagaaggaaatatctccattgttcattggcatggaaaaatgttcagtgggaggattagagttgactgaacagactcctgctttattagggaatatggccatggcaactagtctcatggacataggggattcatttggtcatccagcttgtcctttagtcagtagatctaggaactcaccagtggaagatgatgatgatgatgatgatgttgtgtttattgaatctatacaacctccttcaatttctgctccagcaatagctgatcaaagaaacttcatatttgcatcatcaaaaaatgaaaagcctcaaggaaattattctgtaattcctccttcttcaagagatttggcatctcagaaaggaaatataagtgagacaattgttattgatgatgaagaggacatagaaacaaatggaggagcagagaaaaagtcttcctgttttatcgaatggggacttcctggaactaaaaacaaaaccaacgatttggatttctccacttccagtctttcaagaagtaagaccaagactggagtaagaccttttaaccctggtagaatgaatgtggcaggagacttatttcagaatggagaatttgcaactcatcatagtcctgagatgcatctacaaagaaggctaatgtcattcttccagtagaatcaagcaaatccttccaagaattttatagtacatcttgtttgtctccctgtgaaaacaactggaatcttaaaaaaggagtttttaataagtcaagatgtacaatttgtagtaaattagcagaggtctggatttttatacctaagttgttgtttaggctaacagtgataattttaacttttaagtgctattatgtactctttcatctacataatgcacgtgttctggatgtataacatgaagctgaaaggaagaataaggatatgttagaactatcttatgggatattttataaataaaattccatttgcatagcatggaaagtaca

SEQ ID NO: 32119 - protein, 382 aa, Artificial Sequence
  derived and/or modified sequence
MEKCSVGGLELTEQTPALLGNMAMATSLMDIGDSFGHPACPLVSRSRNSPVEDDDDDDDVVFIESIQPPSISAPAIADQRNFIFASSKNEKPQGNYSVIPPSSRDLASQKGNISETIVIDDEEDIETNGGAEKKSSCFIEWGLPGTKNKTNDLDFSTSSLSRSKTKTGVRPFNPGRMNVAGDLFQNGEFATHHSPDSWISQSASFPSNQKQPGVDSLSPVALLRKQNFQPTAQQQLTKPAKITCANCKKPLQKGQTAYQRKGSAHLFCSTTCLSSFSHKRTQNTRSIICKKDASTKKANVILPVESSKSFQEFYSTSCLSPCENNWNLKKGVFNKSRCTICSKLAEVWIFIPKLLFRLTVIILTFKCYYVLFHLHNARVLDV

SEQ ID NO: 32120 - DNA, 1149 bp, Artificial Sequence
  derived and/or modified sequence
atggagaagtgcagcgtgggcggcctggagctgaccgagcagacccccgccctgctgggcaacatggccatggccaccagcctgatggacatcggcgacagcttcggccaccccgcctgccccctggtgagcagaagcagaaacagccccgtggaggacgacgacgacgacgacgacgtggtgttcatcgagagcatccagccccccagcatcagcgcccccgccatcgccgaccagagaaacttcatcttcgccagcagcaagaacgagaagccccagggcaactacagcgtgatcccccccagcagcagagacctggccagccagaagggcaacatcagcgagaccatcgtgatcgacgacgaggaggacatcgagaccaacggcggcgccgagaagaagagcagctgcttcatcgagtggggcctgcccggcaccaagaacaagaccaacgacctggacttcagcaccagcagcctgagcagaagcaagaccaagaccggcgtgagacccttcaaccccggcagaatgaacgtggccggcgacctgttccagaacggcgagttcgccacccaccacagccccgacagctggatcagccagagcgccagcttccccagcaaccagaagcagcccggcgtggacagcctgagccccgtggccctgctgagaaagcagaacttccagcccaccgcccagcagcagctgaccaagcccgccaagatcacctgcgccaactgcaagaagcccctgcagaagggccagaccgcctaccagagaaagggcagcgcccacctgttctgcagcaccacctgcctgagcagcttcagccacaagagaacccagaacaccagaagcatcatctgcaagaaggacgccagcaccaagaaggccaacgtgatcctgcccgtggagagcagcaagagcttccaggagttctacagcaccagctgcctgagcccctgcgagaacaactggaacctgaagaagggcgtgttcaacaagagcagatgcaccatctgcagcaagctggccgaggtgtggatcttcatccccaagctgctgttcagactgaccgtgatcatcctgaccttcaagtgctactacgtgctgttccacctgcacaacgccagagtgctggacgtgtag

SEQ ID NO: 32121 - DNA, 1149 bp, Artificial Sequence
  derived and/or modified sequence
atggagaaatgcagcgtcggaggcctggaactgacagagcaaacacccgcactcttaggaaatatggccatggccactagtctaatggatattggagactcatttggtcatcccgcctgtccactggtgagtcgcagtagaaattcccccgtggaagacgacgacgacgatgacgatgtggttttcattgagtctatccaacccccatcaatctcagcccctgccatagccgaccagcgaaattttatattcgcatcctctaagaatgagaagccccaaggtaactactctgttattccgccatcttcaagagatttagcaagccagaaggggaacatttcagaaacaatcgtgattgacgatgaggaggacatcgagacaaatgggggcgccgagaaaaaatcatcctgcttcattgagtggggtctaccagggactaagaataagactaacgacctcgatttcagcacttctagtcttagtaggtctaagacaaagactggggtacgtcccttcaatcctggtcgtatgaacgtggctggagacttgtttcagaacggagagttcgcaactcaccactccccagatagctggattagccagtctgccagcttcccctctaaccagaaacaaccaggcgtcgactccctgtccccagtcgcactgttgcggaaacagaattttcagccaaccgcacagcagcaacttaccaaacccgctaagataacttgcgcaaactgcaaaaagcctctacagaaagggcagacggcctaccagagaaaaggttccgcacatctgttttgtagcactacctgtctctccagcttctctcataagaggacccagaacaccagatcgattatctgcaaaaaggacgcctcaaccaagaaggccaatgtgatcctgcctgttgagtccagcaaatcttttcaggaattctacagcacaagctgcctgagcccatgcgagaataactggaacctcaaaaagggtgtcttcaataaatccaggtgtactatttgctctaagctggccgaggtgtggatattcattccaaagctgctttttaggcttactgtcatcattctcacatttaaatgctattacgtactgttccatctccataacgcacgagtgctcgacgtgtag

SEQ ID NO: 32122 - DNA, 1149 bp, Artificial Sequence
  derived and/or modified sequence
atggagaagtgcagcgtgggcggcctggagctgacagagcagaccccagccctgctgggcaacatggccatggccaccagcctgatggacattggagacagctttggccacccagcctgccccctggtgagccgcagcaggaacagccctgtggaggatgatgatgatgatgatgatgtggtgttcatcgagagcatccagccccccagcatcagcgccccagccatcgctgaccagaggaacttcatctttgccagcagcaagaatgagaagccccagggcaactacagcgtcatcccccccagcagccgggacctggccagccagaagggcaacatcagcgagaccatcgtgattgatgatgaagaagatattgagaccaacggcggcgctgagaagaagagcagctgcttcatcgagtggggcctgcccggcaccaagaacaagaccaatgacctggacttcagcaccagcagcctgagccgcagcaagaccaagacaggagtgcggcccttcaaccctggccgcatgaatgtggccggggacctcttccagaatggagaatttgccacccaccacagcccagacagctggatcagccagagcgccagcttccccagcaaccagaagcagcccggggtggacagcctgagccctgtggccctgctgaggaagcagaacttccagcccacagcccagcagcagctgaccaagccagccaagatcacctgtgccaactgcaagaagcccctgcagaagggccagacagcctaccagaggaaaggaagtgcccacctgttctgcagcaccacctgcctgagcagcttcagccacaagaggacccagaacaccaggagcatcatctgcaagaaggatgccagcaccaagaaggccaacgtcatcctgcctgtggagagcagcaagagcttccaggagttctacagcaccagctgcctgagcccctgtgagaacaactggaacctgaagaagggcgtcttcaacaagagccgctgcaccatctgcagcaagctggccgaggtgtggatcttcatccccaagctgctcttccggctgaccgtcatcatcctgaccttcaagtgctactacgtgctcttccacctgcacaatgcccgggtgctggatgtgtag

SEQ ID NO: 32123 - DNA, 1149 bp, Artificial Sequence
  derived and/or modified sequence
atggagaagtgcagcgtgggcggcctggagctgaccgagcagacccctgccctcttaggcaacatggctatggctacgtcactaatggatattggagattcctttgggcatccggcatgtcccttagtgagcagaagccgcaactcacccgtggaggatgacgacgacgacgacgatgtggttttcatcgagtccatccagccgccttctatctcagcccccgcgattgccgaccaacgcaacttcatcttcgcgtcaagtaagaacgagaagccccaaggaaattattcagtcattcctccttcgagcagagaccttgcttcccagaaggggaatatctccgagactattgtgattgatgatgaggaagacattgagaccaatggtggagcagagaagaaaagtagctgtttcatagaatggggactgccgggcacgaagaataagaccaatgacctggacttctcaacatcctctctctcccgttctaaaactaaaacaggggttcggccatttaatcctggccgcatgaatgtggctggcgacctctttcagaacggcgagttcgcgacccaccactctcctgacagctggatttcacagagcgcatctttccccagcaatcagaagcagcccggggtggactccctgagcccggtcgctctcctcagaaagcagaatttccagcccacggcacaacagcagctgaccaaacctgctaaaataacatgtgcgaactgcaagaaacccctacaaaaagggcagactgcttaccagcgcaagggttcagctcacctgttttgtagcaccacctgccttagctcattctctcataagcgtacacagaacacgcgtagtatcatatgtaaaaaggacgcctctactaagaaagcaaatgtgatccttccagttgagtcctccaaaagtttccaggagttttactcaacctcgtgtctgtccccttgcgaaaataactggaacctcaagaaaggcgttttcaacaagagcaggtgtactatctgctcaaagctcgccgaagtgtggatcttcatacctaagctgctgtttcgactgactgtcataatcctgaccttcaagtgctattatgtcctgttccaccttcacaacgcccgagtcctggacgtctag

SEQ ID NO: 32124 - DNA, 1149 bp, Artificial Sequence
  derived and/or modified sequence
atggaaaagtgctcagtgggtggcctcgagctcaccgaacaaacccctgccctcctgggcaatatggccatggctacaagtctcatggatatcggcgattcctttggtcatcccgcatgtccgttggtgtcaaggagccggaattcacccgtagaagatgacgatgatgacgatgatgtggtctttatcgagagtatccaaccaccatctatctccgcacctgctattgctgatcagagaaacttcatctttgccagcagtaaaaatgagaaaccgcaaggtaattacagtgttatacctccttcctctcgggacctcgcatcacaaaagggcaacattagtgagaccatcgtgatagatgacgaggaggacatagagaccaacgggggagccgaaaagaagagcagttgcttcatagagtggggtctgcctgggactaagaataagacgaacgacttggatttttccacttcatcactcagtaggtctaaaactaaaactggcgtgcgacccttcaaccccggacggatgaacgtagccggtgacctgttccagaacggtgagtttgccactcatcacagccccgacagctggatttcacagagtgcctcctttccgtctaaccagaagcagccaggggttgattccctatcgcctgtggctttactcagaaaacaaaactttcagcctacagcccagcagcaactgaccaagccggctaagatcacctgcgcaaattgtaagaaacccctccagaaaggccagacagcgtaccagcgcaaaggtagcgcacacctgttctgctctacaacctgcctctcgagtttctctcacaagaggacacagaacactcggtcaattatctgtaagaaggacgcctcaacaaagaaggctaacgtgatccttccggttgagagcagcaagtcattccaggagttttacagcacctcctgtctgagcccctgtgaaaacaattggaacctgaagaaaggtgtcttcaacaagagccgctgtacaatttgctccaagctagcggaagtgtggatattcatcccaaaactattattccggctcactgtgatcatactcactttcaagtgctactacgtattattccacctgcataatgctagagtcttggatgtgtag

SEQ ID NO: 32125 - DNA, 1382 bp, Artificial Sequence
  derived and/or modified sequence
tttccagtccagggccgctgagagtgggggtggctgggagcagcgcagcctccggaggaggaggcggaggccgaggaccaggaatcaccttcaagcctatgtcgtgaggctttggcagaaattaagaaggaaatatctccattgttcattggcatggaaaaatgttcagtgggaggattagagttgactgaacagactcctgctttattagggaatatggccatggcaactagtctcatggacataggggattcatttggtcatccagcttgtcctttagtcagtagatctaggaactcaccagtggaagatgatgatgatgatgatgatgttgtgtttattgaatctatacaacctccttcaatttctgctccagcaatagctgatcaaagaaacttcatatttgcatcatcaaaaaatgaaaagcctcaaggaaattattctgtaattcctccttcttcaagagatttggcatctcagaaaggaaatataagtgagacaattgttattgatgatgaagaggacatagaaacaaatggaggagcagagaaaaagtcttcctgttttatcgaatggggacttcctggaactaaaaacaaaaccaacgatttggatttctccacttccagtctttcaagaagtaagaccaagactggagtaagaccttttaaccctggtagaatgaatgtggcaggagacttatttcagaatggagaatttgcaactcatcatagtcctgattcttggatctcccagtcagcttcatttcccagtaatcagaaacagccaggggtggattctttatcaccagtggccttacttcgtaagcagaatttccagcctacagcccaacaacaacttactaaaccagctaaaatcacttgtgcaaattgcaaaaagcctttacagaagggacagacagcttatcaacgaaaaggatcagctcacctcttttgctctaccacctgcctttcttccttctctcataaacgtactcaaaacacacgaagcataatatgtaaaaaagatgcatctacaaagaaggctaatgtcattcttccagtagaatcaagcaaatccttccaagaattttatagtacatcttgtttgtctccctgtgaaaacaactggaatcttaaaaaaggagtttttaataagtcaagatgtacaatttgtagtaaattagcagaggtctggatttttatacctaagttgttgtttaggctaacagtgataattttaacttttaagtgctattatgtactctttcatctacataatgcacgtgttctggatgtataacatgaagctgaaaggaagaataaggatatgttagaactatcttatgggatattttataaataaaattccatttgcatagc

SEQ ID NO: 32126 - protein, 147 aa, Artificial Sequence
  derived and/or modified sequence
MGSQGSGGVPLVQAPYTVLLLPLGTSRQDPGAQSFFLWLRRMQALEREQDALWQGLELLQHGQAWFEDHLREAQRQQLHLGALGENFLTDLHSEPGRPPLAQIQKVNICLQNLIHEKLSRQQKGVTQPKEEMAQRGCTKGPRGPTRV

SEQ ID NO: 32127 - protein, 178 aa, Artificial Sequence
  derived and/or modified sequence
MGSQGSGGVPLVQAPYTVLLLPLGTSRQDPGAQSFFLWLRRMQALEREQDALWQGLELLQHGQAWFEDHLREAQRQQLHLGALGENFLTDLHSEPGRPPLAQIQKVNICLQNLIHEKFSPSPLNKASSCTTQDSKERRREQNLWQQQELSRQQKGVTQPKEEMAQRGCTKGPRGPTRV

SEQ ID NO: 32128 - protein, 148 aa, Artificial Sequence
  derived and/or modified sequence
MGSQGSGGVPLVQAPYTVLLLPLGTSRQDPGAQSFFLWLRRMQALEREQDALWQGLELLQHGQAWFEDHLREAQRQQLHLGALGENFLTDLHSEPGRPPLAQIQKVNICLQNLIHEKELSRQQKGVTQPKEEMAQRGCTKGPRGPTRV

SEQ ID NO: 32129 - DNA, 444 bp, Artificial Sequence
  derived and/or modified sequence
atgggcagccagggcagcggcggcgtgcccctggtgcaggccccctacaccgtgctgctgctgcccctgggcaccagcagacaggaccccggcgcccagagcttcttcctgtggctgagaagaatgcaggccctggagagagagcaggacgccctgtggcagggcctggagctgctgcagcacggccaggcctggttcgaggaccacctgagagaggcccagagacagcagctgcacctgggcgccctgggcgagaacttcctgaccgacctgcacagcgagcccggcagaccccccctggcccagatccagaaggtgaacatctgcctgcagaacctgatccacgagaagctgagcagacagcagaagggcgtgacccagcccaaggaggagatggcccagagaggctgcaccaagggccccagaggccccaccagagtgtag

SEQ ID NO: 32130 - DNA, 537 bp, Artificial Sequence
  derived and/or modified sequence
atgggcagccagggcagcggcggcgtgcccctggtgcaggccccctacaccgtgctgctgctgcccctgggcaccagcagacaggaccccggcgcccagagcttcttcctgtggctgagaagaatgcaggccctggagagagagcaggacgccctgtggcagggcctggagctgctgcagcacggccaggcctggttcgaggaccacctgagagaggcccagagacagcagctgcacctgggcgccctgggcgagaacttcctgaccgacctgcacagcgagcccggcagaccccccctggcccagatccagaaggtgaacatctgcctgcagaacctgatccacgagaagttcagccccagccccctgaacaaggccagcagctgcaccacccaggacagcaaggagagaagaagagagcagaacctgtggcagcagcaggagctgagcagacagcagaagggcgtgacccagcccaaggaggagatggcccagagaggctgcaccaagggccccagaggccccaccagagtgtag

SEQ ID NO: 32131 - DNA, 447 bp, Artificial Sequence
  derived and/or modified sequence
atgggcagccagggcagcggcggcgtgcccctggtgcaggccccctacaccgtgctgctgctgcccctgggcaccagcagacaggaccccggcgcccagagcttcttcctgtggctgagaagaatgcaggccctggagagagagcaggacgccctgtggcagggcctggagctgctgcagcacggccaggcctggttcgaggaccacctgagagaggcccagagacagcagctgcacctgggcgccctgggcgagaacttcctgaccgacctgcacagcgagcccggcagaccccccctggcccagatccagaaggtgaacatctgcctgcagaacctgatccacgagaaggagctgagcagacagcagaagggcgtgacccagcccaaggaggagatggcccagagaggctgcaccaagggccccagaggccccaccagagtgtag

SEQ ID NO: 32132 - DNA, 444 bp, Artificial Sequence
  derived and/or modified sequence
atggggagccagggctcagggggagtccccctggtccaggcaccttataccgtgctgctgttacccctgggaacgagccgccaggaccctggtgctcagtctttcttcttgtggctgcgccgtatgcaggctctggagagggaacaagacgctctgtggcagggtctcgagctcttgcagcacgggcaagcctggtttgaagaccacctgagagaggcgcagcgccagcagctgcatctgggagccttaggtgagaacttccttaccgatctacactctgagcccggcagaccacccctggcccagatccagaaggtcaacatttgtttacagaacctcatacacgaaaaactgtcacgacaacagaagggagtgacgcagcccaaggaggaaatggcacaacggggctgcaccaaaggccctcgaggacccactagggtgtag

SEQ ID NO: 32133 - DNA, 537 bp, Artificial Sequence
  derived and/or modified sequence
atgggcagccaggggtctggaggcgtccccttggtgcaggccccatacacagtgctacttctgcctcttggcacaagccgccaagatcccggtgcgcagagcttctttttatggctgaggaggatgcaagcactggagagagagcaggatgccctatggcaaggactggaacttcttcagcacgggcaggcatggtttgaggatcacctgcgcgaagcccagaggcagcagctgcacctgggggccttaggcgagaactttctgactgatctccacagcgagcccggacggccccccttagcgcagatacaaaaggtgaacatatgtctgcaaaacctcatccacgaaaagttttccccttcccctttgaacaaggcttcaagctgtactacccaggactctaaagagcggaggcgcgaacaaaatctgtggcagcaacaggaactgtctcgacagcaaaaaggcgttacccagccaaaggaagagatggcccagcggggctgcactaaaggccctagaggcccaactagagtgtag

SEQ ID NO: 32134 - DNA, 444 bp, Artificial Sequence
  derived and/or modified sequence
atggggtcccaggggagcggcggtgtgcccctggttcaagccccatatacagttctgttgctgcctctgggcacaagcagacaggaccctggcgcacaatctttctttctctggctaagaaggatgcaggcgctggagagagagcaggacgcactttggcagggcctcgagcttctgcagcacggccaagcctggtttgaagatcacctccgcgaggcacagcgccagcagctgcatttgggcgctctgggggagaacttcttgacggacctgcacagcgagcccggcaggcctcctctggcccagatccagaaagtgaatatatgcctgcaaaacttgatacacgaaaagctgagccgccagcagaagggtgtcacacagcccaaagaagagatggctcagcggggctgcacgaaaggccctagaggcccaactcgcgtttag

SEQ ID NO: 32135 - DNA, 447 bp, Artificial Sequence
  derived and/or modified sequence
atgggatctcagggctcaggaggagtgccacttgtgcaagcgccgtacaccgtgctactcctcccgctgggaacaagtcgccaggacccaggagcacagtccttcttcttatggctcaggcggatgcaagctttagaacgagagcaagatgccctatggcaagggttagagctcctgcagcacgggcaggcttggttcgaggatcatctgcgcgaagcgcagagacagcaactgcacctcggagccctgggagaaaacttcctcactgacctgcactccgagcccggaaggcctccactggcacaaattcaaaaggtcaacatttgtctgcaaaatctgatccatgagaaggagctgagtagacagcagaagggcgtgacccaaccgaaagaagagatggcccagagaggatgcaccaaagggcctcgggggcctactcgtgtgtag

SEQ ID NO: 32136 - DNA, 444 bp, Artificial Sequence
  derived and/or modified sequence
atgggctcccaggggtcaggcggcgtgcctctggtgcaggccccttacacggttttactgctcccgctgggtacgagcagacaggaccctggggcgcagtccttcttcctgtggctccgccggatgcaagcattagagagagagcaggatgcactctggcaggggcttgagctcctccaacacggccaggcctggtttgaggatcatctgagagaggcacaaagacaacaacttcatttgggagcactgggcgaaaatttccttacggacctccatagcgaaccaggtcgcccacccctggcacagattcagaaggtgaatatttgcttgcagaacctgatccatgagaagctctccagacagcaaaaaggagtcactcaacccaaagaggagatggcgcagcgcggctgtactaaggggcctaggggaccgactcgcgtctag

SEQ ID NO: 32137 - DNA, 444 bp, Artificial Sequence
  derived and/or modified sequence
atgggaagtcaggggagcgggggagtaccattagtgcaggcgccttatactgtactgctcttacccttgggcaccagccggcaggacccgggcgctcagagcttttttctgtggctgcgccgcatgcaggcgctggagcgtgaacaagacgctttgtggcagggcctcgaattgctgcagcacggccaggcttggtttgaagatcacctccgagaggctcagaggcaacagttgcacttaggggccctcggtgagaatttcttgaccgaccttcatagcgagcctggcagacctcccctggcacagattcagaaagtgaatatttgccttcagaatctgatccatgaaaaacttagtcggcaacaaaagggcgtgacgcaacccaaggaggaaatggcccaacgcgggtgtacaaaagggcccaggggccctaccagggtctag

SEQ ID NO: 32138 - DNA, 444 bp, Artificial Sequence
  derived and/or modified sequence
atgggaagccagggctcgggaggggtgcccctagtgcaagcaccctacaccgttctcttgctgcctttggggaccagtcgacaagatcctggggcacagagcttttttctatggctccgccgcatgcaggcgctcgagagggagcaggacgccctgtggcagggcctggagctgctccagcatggccaggcttggttcgaagaccacttaagggaagcacagcgccagcaactccacctgggggccctcggtgaaaactttcttaccgacctgcatagcgagccaggccgacctcccctcgcgcagatccagaaagtgaatatctgcctgcaaaatctgatccacgagaagctgtccagacagcagaaaggagtgacccagcctaaggaggaaatggcgcagcggggttgcactaaaggaccacgaggccccactcgcgtctag

SEQ ID NO: 32139 - DNA, 537 bp, Artificial Sequence
  derived and/or modified sequence
atgggaagccagggcagcgggggcgtgcccctcgtccaggctccttatactgtgctcttactccctctcggaacttccaggcaagatccaggggcacagtccttctttctgtggcttaggagaatgcaggccctggagcgtgagcaggatgcgctgtggcaaggcctggaattgctgcaacatggacaagcttggttcgaagatcaccttagggaagctcagcggcaacagcttcatcttggcgcgttgggcgaaaattttttgactgacctccacagcgaaccagggcggcctccactcgcccagatacaaaaggtgaatatctgcctacaaaatctaattcatgaaaaattttcgccctctccactcaacaaagcttctagttgcaccactcaggactccaaggaacgccgccgggagcagaatctgtggcagcagcaggaactgagtcgtcagcagaagggggtgacacagccaaaagaggagatggcacagagaggatgtacgaagggaccccggggcccaacaagggtctag

SEQ ID NO: 32140 - DNA, 537 bp, Artificial Sequence
  derived and/or modified sequence
atgggttcccagggctcaggaggcgttcctctggtgcaggccccttacactgtgctgctgctcccactgggaactagccgccaggaccccggagcacagtctttctttctgtggctacgcagaatgcaggctctcgaacgggaacaggatgcactctggcagggcctggagctccttcagcacgggcaggcgtggttcgaagaccatctgcgggaggcccagaggcagcagcttcacctaggcgcccttggcgagaactttctgaccgatctccactcagagccagggcgcccacctcttgcccagatccagaaagttaacatttgcctccagaatcttatccacgagaaattttcgccctccccactgaacaaagcttcgtcttgtaccacacaagactctaaggaaagacgccgcgaacagaacctatggcagcagcaggaactgtcaagacagcagaaaggcgttacccaaccgaaggaggagatggcccaacgtgggtgtactaaaggacccagagggcccactagagtatag

SEQ ID NO: 32141 - DNA, 537 bp, Artificial Sequence
  derived and/or modified sequence
atgggatcccaaggatctggtggtgtccctcttgtacaagccccatacactgttctgctactgccactggggacatctcgtcaagaccctggagcacagagttttttcctctggctacgccggatgcaggctctggagagagaacaggatgcgttgtggcagggcctggagctgctgcagcatgggcaagcctggtttgaggatcatctccgggaggcccaaagacaacagctgcacctcggtgctttgggtgaaaacttccttacagatctccattctgaacccggacgtcctccgctggcccaaatacagaaagtgaatatatgtctgcagaacttaattcatgaaaaattctctccttcccccttgaataaggcatcatcctgtacgactcaggacagtaaagagcggcgccgggaacagaatttatggcagcagcaggaacttagccggcagcagaaaggcgtaacccagcctaaggaagaaatggctcagcgtggatgtaccaaaggcccacggggcccaacacgagtttag

SEQ ID NO: 32142 - DNA, 444 bp, Artificial Sequence
  derived and/or modified sequence
atggggtcacaggggtcagggggcgtaccactggtgcaggcgccgtacactgtgctgctactgcctttggggacatcccgtcaagacccaggcgcccaatctttctttctctggctgcggcggatgcaggcactagaaagagaacaagacgccctttggcaggggctcgagctgcttcagcatggtcaagcctggttcgaggaccatttgcgggaagcccaacggcagcagctacatctgggggctctcggcgagaacttcttgacagacctccattccgaacccggcagaccgcctctggcacagatccagaaagttaatatctgtttgcagaacctgatccatgagaagctgtcacgtcagcagaagggcgtaacacagcccaaggaagagatggcgcaacgcggatgcaccaagggcccccgaggacctactagggtgtag

SEQ ID NO: 32143 - DNA, 537 bp, Artificial Sequence
  derived and/or modified sequence
atggggtctcaggggtcaggaggcgtgccacttgtgcaggctccctatactgtcctgctgctgccgttaggcacgagtaggcaggacccaggggcacaaagcttctttctctggcttcggcgaatgcaggcactggagcgagagcaagacgcgctttggcagggcttggagctgctacaacacggccaggcctggttcgaggaccatctcagagaagcacagagacaacagctacatctgggcgcgctcggcgagaatttcctgacggatctccactccgagcccggaagaccacctctggcccagatccagaaggtgaatatttgtcttcagaacttgattcacgagaaattctcgccctcgccactgaataaggccagctcgtgtactacacaggactcgaaggagcgacgccgggagcagaatttgtggcagcagcaggagttgagtaggcagcaaaagggggtaactcagcccaaggaagagatggcccagcgcggttgtactaaggggccacggggtcctactcgcgtctag

SEQ ID NO: 32144 - DNA, 447 bp, Artificial Sequence
  derived and/or modified sequence
atgggctcacagggatctggtggcgtgcctctggttcaggctccatatactgtcctcttactgccgctggggactagccgacaagaccccggcgcgcagtcatttttcctctggctcagaagaatgcaagcactggaacgagagcaagatgcactctggcaaggattggagttgctacaacacgggcaagcatggttcgaagatcatttgagagaggcgcaacgccagcagcttcacctgggggcgctaggagagaactttttgactgacttacacagcgagccaggtagacctcctctcgctcaaattcagaaagtgaatatttgcctgcagaacttgattcacgaaaaggagctctctaggcagcaaaagggtgtcacccaacctaaagaggagatggctcagagagggtgcaccaaagggccccgtggccctactcgggtgtag

SEQ ID NO: 32145 - DNA, 447 bp, Artificial Sequence
  derived and/or modified sequence
atgggctcccagggaagcggcggggtgcccctagtccaagctccttatactgttctgctgctcccattgggaaccagccggcaggatcccggagctcaatccttctttctctggctccggcggatgcaggccctggagcgggagcaggatgctttgtggcagggtctcgagctcctccagcatgggcaagcatggttcgaagaccacctgcgcgaggcacaacgtcagcagctgcacttaggcgctctcggcgaaaattttttgaccgacttacacagcgagccaggcagaccgccactcgcacaaattcagaaggtcaatatatgcctgcagaatctcatacacgaaaaggagctgagcagacagcaaaaaggggtgacccaacccaaggaggagatggcccagagaggatgcacaaagggcccaaggggccccactagagtgtag

SEQ ID NO: 32146 - DNA, 447 bp, Artificial Sequence
  derived and/or modified sequence
atgggcagccaaggttctggaggggtgcctctggtacaggcaccctacactgtcctgcttcttccgcttggtacttcccgacaggatcccggggcccagtcttttttcctgtggcttagacgaatgcaagcactggagagagaacaggacgcactttggcagggactcgagctacttcagcatgggcaggcatggttcgaggatcatctcagggaagctcagcgacagcagctgcatctgggagctctaggggagaattttctcaccgatcttcacagtgaaccgggtaggcccccattagcacaaattcagaaggtcaacatctgtctccagaaccttatacatgagaaagaactcagccgtcaacagaaaggcgtgacacagcccaaggaggaaatggcacaaagaggatgcactaagggtcctcgcggaccaacccgcgtgtag

SEQ ID NO: 32147 - DNA, 447 bp, Artificial Sequence
  derived and/or modified sequence
atggggtcccaggggtcagggggtgtgccgctcgtccaagccccctataccgtgctgctgctgcccttgggcaccagccgacaggatcctggagcccaatcatttttcctgtggcttaggagaatgcaggcgctggagagggaacaagatgccctctggcagggcttagagttgttgcagcacggacaggcttggttcgaggatcacctgagagaggctcaaagacaacaactacatctgggcgcactaggcgaaaatttcctgacagatctgcatagcgagcctggacggccacctcttgcccagatacagaaggtaaacatatgcctacaaaacctaattcacgaaaaagaactgagccgacagcagaagggcgtcacacagcccaaggaggagatggctcagagggggtgcacaaagggcccacgggggccaacacgcgtgtag

SEQ ID NO: 32148 - DNA, 447 bp, Artificial Sequence
  derived and/or modified sequence
atggggagccagggaagcgggggggtgcccctagtacaggcaccttacactgttctgcttctgcctctcgggacctcacgacaggatcccggtgctcagtctttttttctttggctaaggcgcatgcaggcgttggagcgagagcaagatgccctatggcagggtcttgagctgcttcagcacggacaagcctggtttgaggaccaccttagagaggctcagcggcagcaactccaccttggagccctgggcgagaactttttaacagatttacacagcgaaccgggaaggcccccattggcacaaatacagaaggtcaatatttgtttgcagaatctgattcatgaaaaagagctgagccgacagcagaaaggtgttactcagccaaaggaggaaatggcccagcgaggatgcacaaagggcccccgggggcctacacgtgtgtag

SEQ ID NO: 32149 - DNA, 444 bp, Artificial Sequence
  derived and/or modified sequence
atgggcagccagggcagcggcggcgtgcccctggtgcaggccccctacacagtgctgctgctgcccctgggcaccagccggcaggaccccggggcccagagcttcttcctgtggctgcggaggatgcaggccctggagcgggagcaggatgccctgtggcagggcctggagctgctgcagcacggccaggcctggtttgaggaccacctgcgggaggcccagaggcagcagctgcacctgggcgccctgggggagaacttcctgacagacctgcacagcgagcccggccggccccccctggcccagatccagaaggtgaacatctgcctgcagaacctgattcatgagaagctgagccggcagcagaagggcgtgacccagcccaaggaggagatggcccagaggggctgcaccaagggcccccggggccccaccagggtgtag

SEQ ID NO: 32150 - DNA, 537 bp, Artificial Sequence
  derived and/or modified sequence
atgggcagccagggcagcggcggcgtgcccctggtgcaggccccctacacagtgctgctgctgcccctgggcaccagccggcaggaccccggggcccagagcttcttcctgtggctgcggaggatgcaggccctggagcgggagcaggatgccctgtggcagggcctggagctgctgcagcacggccaggcctggtttgaggaccacctgcgggaggcccagaggcagcagctgcacctgggcgccctgggggagaacttcctgacagacctgcacagcgagcccggccggccccccctggcccagatccagaaggtgaacatctgcctgcagaacctgattcatgagaagttcagccccagccccctgaacaaggccagcagctgcaccacccaggacagcaaggagcggcggcgggagcagaacctgtggcagcagcaggagctgagccggcagcagaagggcgtgacccagcccaaggaggagatggcccagaggggctgcaccaagggcccccggggccccaccagggtgtag

SEQ ID NO: 32151 - DNA, 447 bp, Artificial Sequence
  derived and/or modified sequence
atgggcagccagggcagcggcggcgtgcccctggtgcaggccccctacacagtgctgctgctgcccctgggcaccagccggcaggaccccggggcccagagcttcttcctgtggctgcggaggatgcaggccctggagcgggagcaggatgccctgtggcagggcctggagctgctgcagcacggccaggcctggtttgaggaccacctgcgggaggcccagaggcagcagctgcacctgggcgccctgggggagaacttcctgacagacctgcacagcgagcccggccggccccccctggcccagatccagaaggtgaacatctgcctgcagaacctgattcatgagaaggagctgagccggcagcagaagggcgtgacccagcccaaggaggagatggcccagaggggctgcaccaagggcccccggggccccaccagggtgtag

SEQ ID NO: 32152 - DNA, 444 bp, Artificial Sequence
  derived and/or modified sequence
atgggcagccagggcagcggcggcgtgcccctggtgcaggccccctatacggtcttgctccttcccttaggcacgtcccgtcaggatcccggcgcccagtctttcttcttgtggctgcgaaggatgcaagcactcgagagggaacaggacgccctgtggcagggcctggagctgctgcagcatggccaggcttggtttgaagatcatcttagagaggcgcagcgccagcaactgcatctcggggccctcggggagaatttcttaacagacctacacagcgagcccggaaggcccccgctggcacaaattcagaaagtgaatatttgtttgcagaatctcattcatgaaaaattatccaggcagcagaaaggcgtgacgcaacctaaggaagagatggcacagcgaggctgcactaaagggccaaggggcccaacaagagtgtag

SEQ ID NO: 32153 - DNA, 537 bp, Artificial Sequence
  derived and/or modified sequence
atgggcagccagggcagcggcggcgtgcccctggtgcaggccccctacacagttttgcttctccctctcgggaccagtaggcaggatcctggtgcccagtccttcttcctctggcttagaagaatgcaggcactggaacgggaacaggatgccctgtggcaaggcctagagctgctgcaacacggacaagcctggttcgaagatcacctgagggaggcccagcgccagcagctgcatcttggagccctcggggagaattttctgacagatctccatagcgagccaggtcgccctccactggctcagatccagaaagtgaatatctgtctgcagaatctcatccacgaaaaattttctccatcccctctcaataaagcttcaagctgcaccactcaggattccaaagagagacggcgcgagcagaacctgtggcagcagcaggaattgtcccgccagcagaagggggttacccagccaaaagaggaaatggctcagaggggatgtacaaagggccctcgggggccaacaagagtgtag

SEQ ID NO: 32154 - DNA, 444 bp, Artificial Sequence
  derived and/or modified sequence
atgggcagccagggcagcggcggcgtgcccctggtgcaggccccctatacggtgctgctgctccccctgggcacatcccgacaggatcctggtgcccaatcattcttcctttggcttaggagaatgcaggccctcgagcgggaacaggacgctttgtggcagggcttggagttactgcagcacgggcaggcttggtttgaagaccaccttagggaggcacaacgtcagcagctgcatctaggagcgttgggggaaaacttcttaacagatctccactcagagccgggccgaccccccttagctcagattcagaaagtgaacatttgtttgcagaacctcattcatgagaagctatcccgtcagcagaagggggtcacccagcccaaggaggaaatggcccagcgcggatgcactaaaggcccaagggggccaaccagggtttag

SEQ ID NO: 32155 - DNA, 447 bp, Artificial Sequence
  derived and/or modified sequence
atgggcagccagggcagcggcggcgtgcccctggtgcaggccccctatacagtacttctcttgccactcgggacaagtcgccaggacccaggtgcacagagcttctttctatggcttcggagaatgcaagccctggaacgcgagcaggatgcgttatggcagggcctggaattgcttcagcacgggcaagcgtggtttgaggaccacttgcgggaggcccagcgtcagcagctgcatctgggcgctctcggggagaacttcctcaccgatttacactctgagcccggtagacctcctctggctcagatccagaaagtaaatatctgccttcagaatctgatccacgaaaaagaactgagcaggcagcagaagggtgtgacccagccaaaagaagagatggcccagcgtggatgtacgaagggcccacgcgggcccactagggtctag

SEQ ID NO: 32156 - DNA, 444 bp, Artificial Sequence
  derived and/or modified sequence
atgggcagccagggcagcggcggcgtgcccctggtgcaggccccctatacagtactgctgcttccgctgggaaccagcagacaggatcccggggcccaatctttcttcctgtggctgaggcggatgcaggctttggaaagggaacaggacgccctgtggcaggggctagagttgctccagcatggccaggcctggttcgaagaccatctgcgcgaggcacaacgtcagcagttacacctgggagccctgggggagaatttccttaccgacttgcactccgagccaggtcggcccccgctcgcccagatccagaaggtgaacatctgcttgcagaacctcattcatgagaagctctctcggcagcagaagggggtcacccagcctaaagaggagatggcccagagaggctgcaccaaaggccccaggggacctacccgagtctag

SEQ ID NO: 32157 - DNA, 444 bp, Artificial Sequence
  derived and/or modified sequence
atgggcagccagggcagcggcggcgtgcccctggtgcaggccccctatactgtgcttcttctgccattagggacaagtaggcaggatcctggggctcagtccttttttttgtggctgagaaggatgcaggccttggagcgcgagcaagacgcgctgtggcaggggctagagctcctgcaacacggccaagcttggttcgaagaccatctgcgtgaagctcaacggcaacagctgcacctgggagctcttggggagaacttcttgaccgacctgcacagcgagcctggtcggcctcccttggcccaaatacagaaggtgaacatctgtcttcaaaatctaatacacgaaaagctgagcaggcaacaaaagggcgtgacacagcccaaggaagaaatggctcaacgaggatgcaccaaggggccccgggggccgacacgggtctag

SEQ ID NO: 32158 - DNA, 444 bp, Artificial Sequence
  derived and/or modified sequence
atgggcagccagggcagcggcggcgtgcccctggtgcaggccccctataccgtcctgttgctgcccctgggaacctcgcggcaggatcccggggcccaaagcttctttctgtggctcagacggatgcaagcgctcgaacgcgaacaggacgccttatggcagggtttggagctgttgcagcacggacaggcttggtttgaagatcacctgagagaagcacagcggcagcagctgcatctcggagctctgggtgaaaactttctgaccgatctgcacagcgaaccaggtagacctccacttgctcagattcaaaaagtgaacatatgtctgcagaacctcatccacgagaagctgagtaggcaacagaagggagtgacacaaccaaaagaggagatggcccaacgggggtgcactaaaggcccaaggggccccacccgcgtgtag

SEQ ID NO: 32159 - DNA, 537 bp, Artificial Sequence
  derived and/or modified sequence
atgggcagccagggcagcggcggcgtgcccctggtgcaggccccctatactgtgctgctccttcccctggggacgtctcggcaggacccaggagcgcaatctttctttttgtggctcaggcggatgcaagcactagagcgcgaacaggatgccctgtggcagggtctggaactcctgcagcacggacaggcttggttcgaggaccacttgcgagaggctcagcgtcaacagctgcacctgggggccttaggcgagaacttcctgactgatctccacagtgagccaggaagacctccgctggcccagattcagaaggtaaatatctgccttcagaaccttatccacgagaaattctccccctcaccgctaaataaggcctcatcttgtacaacgcaggattcaaaggaacgccggagagagcagaatctatggcaacaacaggaactcagccggcagcagaagggcgtgacgcaaccgaaggaagagatggcacaacggggttgtactaaggggccccgcggacctacgcgagtgtag

SEQ ID NO: 32160 - DNA, 537 bp, Artificial Sequence
  derived and/or modified sequence
atgggcagccagggcagcggcggcgtgcccctggtgcaggccccctatactgtgctgctcctaccactgggcacttcccggcaggatcccggggcccaaagtttttttctgtggttgaggcgtatgcaagcgctggagcgcgaacaagatgccctgtggcagggtttggagctgctgcagcatggacaggcctggtttgaggatcacctgcgggaggctcagcgccaacagttacacctaggcgccctcggagagaattttctcactgacttgcacagcgaacctgggaggcctccactggcccagatccagaaagtgaatatttgtctccagaatctaattcacgagaaatttagcccaagcccactgaataaggcatcgtcatgcactacacaggacagtaaggagcgccggagggaacagaacctttggcagcagcaagaactttcaagacaacaaaaaggggtcacccagcccaaagaggaaatggctcagcggggatgcaccaaggggccgcgagggccaaccagggtctag

SEQ ID NO: 32161 - DNA, 537 bp, Artificial Sequence
  derived and/or modified sequence
atgggcagccagggcagcggcggcgtgcccctggtgcaggccccctataccgtgctacttctgccactggggacatctagacaggaccccggagcccaaagcttctttttgtggctgcgtaggatgcaggctttggaaagagaacaggacgctctgtggcagggcttggagctcctccaacatggtcaagcctggtttgaagaccatctaagagaagcccagcggcagcagctacacctgggtgctttgggggagaacttcctgaccgacctgcactcagaacccggccgtccgcctttagcacaaatccagaaagtcaacatttgtctccagaatctcatccatgaaaagttcagcccctccccactcaacaaagccagttcatgtaccacccaagatagcaaggagagacgaagagaacagaatctgtggcaacagcaagagctctctcgacaacagaaaggcgtgacacagcctaaagaggagatggcacagaggggctgcacaaaaggtccacgcggtccaaccagggtgtag

SEQ ID NO: 32162 - DNA, 444 bp, Artificial Sequence
  derived and/or modified sequence
atgggcagccagggcagcggcggcgtgcccctggtgcaggccccctacacagtacttctactgcccctgggaacctccagacaggaccccggtgcccagtctttctttctctggctgcgtagaatgcaagccctagaaagagagcaggatgcgttgtggcagggtctcgaactactgcagcacggccaggcctggttcgaagatcacctccgagaagcccaacgccaacaattgcaccttggcgctttaggagagaattttctgacggatcttcactcagaacccgggcgtcctccgttggctcaaatccagaaggttaatatttgtttgcagaacttgattcatgaaaagttgtcgagacaacagaagggagtaacacagcccaaagaagagatggcccagaggggttgtaccaaaggtcctaggggacccactcgggtatag

SEQ ID NO: 32163 - DNA, 537 bp, Artificial Sequence
  derived and/or modified sequence
atgggcagccagggcagcggcggcgtgcccctggtgcaggccccctataccgtcctccttttaccactgggaacttcaagacaggacccgggcgctcagagcttcttcctatggttacgccgcatgcaagccctggagcgcgagcaggacgccctctggcaaggccttgaactgctccagcatggccaggcgtggttcgaagaccatttgagagaagcccaacgccaacagctgcacctaggagccctgggagagaactttctcactgatctccatagcgagcctgggaggccaccgctcgctcagattcaaaaagtgaatatctgccttcagaatctgattcatgagaagtttagtccctcgcctctgaataaagccagctcctgtactacccaggactctaaggagcggcgacgcgaacagaacctgtggcagcagcaagaattaagtagacagcagaagggtgtgacccagccaaaggaggaaatggcgcagcggggatgcaccaaagggccgcgaggccctacgcgtgtgtag

SEQ ID NO: 32164 - DNA, 447 bp, Artificial Sequence
  derived and/or modified sequence
atgggcagccagggcagcggcggcgtgcccctggtgcaggccccctataccgtcctgttgttgccattagggactagccgtcaggatccaggggcgcagtctttcttcttatggttgagacggatgcaggccctggaacgagaacaagacgccctttggcagggccttgagttgttgcagcacggccaggcgtggtttgaagatcacctgagagaggcacagagacagcaacttcatctgggtgctttgggcgagaacttcctcactgacctccacagtgaaccgggccggcctcccctcgcccaaattcagaaggtgaacatctgtctgcagaacctgatccacgagaaggagttgagcaggcagcagaagggggtaactcagcccaaggaagagatggctcagagaggatgtactaaaggccctcgggggcccactcgtgtgtag

SEQ ID NO: 32165 - DNA, 447 bp, Artificial Sequence
  derived and/or modified sequence
atgggcagccagggcagcggcggcgtgcccctggtgcaggccccctatacagtgctgctgttaccacttggcacatcaagacaggatccaggcgcccaatcctttttcctttggctaaggaggatgcaagctctagaacgggaacaggatgccttgtggcagggtttagaactcctgcagcacggacaggcttggttcgaagaccatcttcgcgaggcccagagacagcagctccacctaggcgcactgggggagaactttctcactgatcttcatagcgaaccggggcgtccacctctggctcagattcagaaggtgaacatatgcctgcaaaacctgatacatgagaaggagttgagtaggcagcagaagggggtgacccaaccaaaggaagagatggcccagagggggtgcacgaaagggccgcgtggcccaacgcgggtgtag

SEQ ID NO: 32166 - DNA, 447 bp, Artificial Sequence
  derived and/or modified sequence
atgggcagccagggcagcggcggcgtgcccctggtgcaggccccctatactgtccttttactgcccttgggcacttcgcggcaggaccctggcgcccagtccttctttctgtggctccgccgaatgcaggctctggagcgcgaacaagacgccctctggcagggcttagagctgttgcagcacggtcaagcatggttcgaggaccacctgagggaggcccagcgccagcagctgcacctgggagcacttggggagaacttcctgaccgatttgcatagcgagcctgggagaccaccgctagctcagattcagaaggtaaacatctgcctgcagaacctgattcacgagaaggagctttcccggcaacaaaaaggcgtgacgcaacccaaggaggaaatggcccagcgtggatgcacaaagggacctcgcggcccaacccgggtctag

SEQ ID NO: 32167 - DNA, 447 bp, Artificial Sequence
  derived and/or modified sequence
atgggcagccagggcagcggcggcgtgcccctggtgcaggccccctacaccgtcttactactgcccttggggacatctcggcaggatcctggcgcccagagcttctttctgtggctccgacggatgcaggcgctcgagcgggaacaagatgcactatggcaagggctggagttgcttcagcacgggcaggcttggttcgaagaccatctacgagaagcacagcggcaacagttgcacctgggggcactgggagaaaatttcctaactgacctccacagcgagccagggcgcccgcctctggctcagatccagaaagtgaatatctgtctgcagaatctgattcatgagaaagagctgtcaaggcagcaaaagggtgtgacccaaccaaaagaggagatggcccagcgtggctgcacaaaggggcctcggggccccaccagagtctag

SEQ ID NO: 32168 - DNA, 447 bp, Artificial Sequence
  derived and/or modified sequence
atgggcagccagggcagcggcggcgtgcccctggtgcaggccccctataccgtactgcttttaccactcggtacaagccggcaggatcctggggcccaatctttctttctgtggctcaggaggatgcaagctcttgaacgcgaacaagacgctctgtggcagggcctggagctgctgcagcatgggcaagcttggtttgaggatcacctgcgagaggcccaacgtcagcaactgcacctgggagccctcggggagaattttcttaccgacttgcacagcgagccaggccggcccccactggctcaaatacagaaggtgaatatatgcttacagaatctgatccacgagaaggaattgtcacgccagcagaaaggggttacacaaccgaaggaggaaatggctcagagaggctgcacaaaaggaccacggggccctaccagagtgtag

SEQ ID NO: 32169 - DNA, 444 bp, Artificial Sequence
  derived and/or modified sequence
atggggtcccagggcagcggtggagtccccctggtccaggcaccttataccgtgctcctgcttcctctgggaacaagccggcaggaccctggagctcagtccttctttctttggctccggaggatgcaggcgttggagcgcgaacaggacgctctctggcaagggttggagcttctgcagcacggtcaggcttggtttgaggatcatctgagagaggctcagcgacagcagctgcacctcggggctttaggggaaaatttcctcaccgacctccactctgaacccggaagacctccactggcacagatccagaaggtgaacatctgtctacagaaccttatacacgagaaactgagcaggcaacagaagggggtgactcagccaaaagaagaaatggcccagcggggatgtaccaagggcccaagaggacctacgcgggtgtag

SEQ ID NO: 32170 - DNA, 537 bp, Artificial Sequence
  derived and/or modified sequence
atgggctcacagggcagtggcggagtcccgcttgtacaggctccgtataccgtactcttactgccattgggaactagccgccaggacccaggcgctcagtcattcttcttgtggttgagacggatgcaggcgctggagcgggagcaggatgctctctggcaaggccttgagctcctgcagcatgggcaggcatggttcgaagatcatttgcgggaagctcagcgacagcagcttcacctcggcgctctgggcgaaaacttcttgacggacctgcattctgaaccaggaaggccgccactggcccaaatccaaaaggtcaatatttgtctgcaaaatttgattcacgagaaattttcacctagtccactcaacaaggctagcagctgtaccacccaggactccaaggaaaggcgaagggagcaaaacctgtggcaacaacaggagctaagtcgccagcagaaaggcgttactcaacccaaggaggagatggcacagaggggttgtaccaaggggcctcgcggtcccactcgagtatag

SEQ ID NO: 32171 - DNA, 444 bp, Artificial Sequence
  derived and/or modified sequence
atgggctcacagggttcgggaggcgtccccctggttcaagccccttacacagtcctcctcctgcctctggggacttcaagacaggaccctggcgcacagtcttttttcctttggctcaggaggatgcaggctctggagcgagagcaagacgctttatggcagggactggagcttctgcagcacggtcaggcttggttcgaggaccacctgcgggaggcacaaaggcagcagctccacctcggggcactgggggagaacttcctgactgatctccattctgagccagggagaccccctctagctcaaatacaaaaggtgaatatttgcctgcagaacctgattcacgaaaaactttccaggcagcagaaaggggtcacgcagcccaaagaggaaatggcacagcgagggtgtacaaagggccctcgcggacccactcgggtttag

SEQ ID NO: 32172 - DNA, 447 bp, Artificial Sequence
  derived and/or modified sequence
atgggctcacaggggtccggaggtgtgccgctggtccaggcgccttacactgtcctcctcctgccattaggaacctcaaggcaggatcccggtgcgcagagcttcttcctctggctgcgccgtatgcaagcactggaaagggaacaggacgccctgtggcagggacttgagcttttgcagcacggacaagcctggtttgaggatcatctgcgagaagcccagagacaacagttgcatctcggagccttgggagagaacttcctgaccgacctgcacagcgagcccggacggcctccactagcacagattcagaaggtaaatatatgcttacagaatctcattcacgagaaggagctgagtcgccagcagaaaggggtcacacagccgaaagaggagatggctcaaagaggctgcacaaagggccctcgcggacccacccgggtctag

SEQ ID NO: 32173 - DNA, 444 bp, Artificial Sequence
  derived and/or modified sequence
atgggtagccaggggtccggcggtgtcccgctggtgcaggcaccgtatacggtgctcctcctcccactcggaacctcaagacaggatcccggagctcagtccttctttttgtggcttagacgaatgcaagcccttgaacgcgaacaggatgcgctctggcaaggcttggaactcctgcaacacggccaggcctggtttgaggaccacttaagagaggcccagcgccaacagctccatcttggcgctctgggcgaaaactttctaactgacctgcattcggagcccggaagaccacccttagctcagattcagaaggttaatatctgcctccagaacttgattcacgaaaaattgtcccgacagcaaaaaggggtgacacagcccaaagaggaaatggcccagcgagggtgtacgaaaggacccagggggcctacccgggtgtag

SEQ ID NO: 32174 - DNA, 444 bp, Artificial Sequence
  derived and/or modified sequence
atgggcagtcaggggtctgggggtgtgccattggtgcaagcaccctacaccgtgctgctgctgcccctgggaacctctagacaggaccccggagcccagtcattttttctgtggcttcgcagaatgcaagctttagaaagagaacaggatgccctttggcaaggcttagagctgctgcagcatgggcaggcctggtttgaggaccacttgagggaagcgcagagacaacagctgcacctcggtgctctgggcgagaattttttgaccgatttacatagcgaacctggacgccctcctctggcacagatacagaaagttaacatctgcttacagaacctgatacacgaaaagctgagccgtcagcagaaaggcgtcacccagccaaaagaggaaatggctcagcgcggttgtactaagggaccaagggggcctacacgggtttag

SEQ ID NO: 32175 - DNA, 444 bp, Artificial Sequence
  derived and/or modified sequence
atgggatcacagggatctggaggagttcctctggtgcaagccccatatacagtgcttctgttacctttgggtactagccgtcaagaccccggagctcaatctttctttctttggcttaggcggatgcaggccctggagcgggagcaggatgcactctggcaggggctcgagttgttacaacatggacaggcttggttcgaggatcatctgcgcgaggcccagaggcagcagctgcatttgggggctctgggtgaaaacttcttaacggatctccactctgagcccggaagacctcctctggcccagattcaaaaggtcaatatctgtcttcagaacctgatccatgaaaaactctcacgccagcaaaagggggtgacacaaccgaaagaagagatggcccagcgcggatgcaccaaaggcccacgcggaccaacaagggtgtag

SEQ ID NO: 32176 - DNA, 537 bp, Artificial Sequence
  derived and/or modified sequence
atggggtcacaaggctcaggcggtgttcccctcgtgcaagctccctacactgttttgttgctcccattgggaacctcccgtcaggatccaggcgcacaaagtttcttcctgtggctgagacggatgcaggctttggaaagagagcaagacgcactctggcagggtctcgagctgctgcagcacggccaagcttggttcgaagatcacttgcgcgaggcccaacgccaacagctgcacctgggcgcactgggcgagaactttttgaccgacttgcactcagagccaggccgtcctccgctcgcacagattcaaaaagttaatatctgtctgcagaacctcatccatgagaagttttctccttctcctttaaacaaggcctccagttgtaccactcaggattctaaggaaagaagaagggaacagaacctttggcagcagcaggagttgtccagacagcagaagggcgtgactcagccaaaggaagagatggcccaacgcggatgcaccaagggacccagaggaccgactcgggtgtag

SEQ ID NO: 32177 - DNA, 537 bp, Artificial Sequence
  derived and/or modified sequence
atggggagccaaggcagtggcggagtgcccctggtgcaggcaccatacacggtactcttgctccccctagggacatcaaggcaagatcctggggctcagtccttctttctgtggctacggagaatgcaggcactggaacgagaacaggatgccctgtggcagggcctggagttactgcagcatggacaggcctggttcgaggaccacctccgcgaagctcaaagacaacaactgcatctaggggcactcggcgaaaatttccttaccgacctgcatagcgagccagggagaccaccgctcgcccagatccaaaaggtgaacatatgtctgcagaatctaattcatgaaaagttcagcccatccccgttaaacaaggcctcttcttgtacaacacaggattcaaaagagcgacgacgggagcaaaacctgtggcagcagcaggagctgtctcgtcaacagaagggagtaacacagccaaaggaggagatggctcagcggggatgcacgaaaggtcctcgcggacccacaagagtgtag

SEQ ID NO: 32178 - DNA, 537 bp, Artificial Sequence
  derived and/or modified sequence
atgggctcccaaggcagcggtggagttcccctggtgcaagcgccatatacagtgctactcctacccctcggtacttccaggcaggacccgggagcacaatccttctttttatggctcagacggatgcaggcgctcgagcgagagcaagatgctttgtggcagggacttgaacttcttcaacatggacaggcgtggttcgaggaccatctgcgggaagcacagcgacagcagctgcaccttggtgcccttggagagaactttttgaccgacttacactcagagcccggtcggccacccttagcgcagatacaaaaggttaacatatgtttacagaacctgatccatgaaaagtttagtccatcgcctctgaataaggcaagtagctgcacgactcaggatagcaaggaacgcaggcgcgagcagaacctctggcaacagcaagagctgtcccgtcagcagaagggggtcacccagcctaaggaggagatggcgcagagggggtgtacgaaaggaccaaggggcccaactagggtctag

SEQ ID NO: 32179 - DNA, 444 bp, Artificial Sequence
  derived and/or modified sequence
atgggttcccagggcagtggcggagtgccgcttgtgcaggccccatatactgtccttctgctacccctcgggaccagtcgtcaagaccccggtgctcaatcattcttcctatggctccgcagaatgcaagccttggaaagagagcaggatgcactctggcaaggcttggagttactccagcacggccaagcatggttcgaagatcatctccgggaagcccagcgtcaacaactgcaccttggggctcttggggagaactttctcactgatctccacagcgaacccggtcgtcccccactagcccagattcaaaaggtgaacatctgcctgcaaaaccttatccatgagaagctgtcacggcagcaaaagggggttacacagcccaaagaagagatggcccagcgcggttgtacaaaaggccctagagggcctactcgcgtttag

SEQ ID NO: 32180 - DNA, 537 bp, Artificial Sequence
  derived and/or modified sequence
atgggctcccaggggagtggaggagtccctttggtgcaagccccatacaccgttttgctactccccctgggcacgtcacgtcaggatcccggtgcccaatccttttttctgtggctacggagaatgcaagcccttgaaagagaacaggacgccctgtggcagggcctggaacttcttcagcacgggcaagcatggttcgaagatcatctgcgggaagctcagcgccagcagctgcacctgggtgctctcggggagaactttttgacggatctgcactccgagcccggtcggcctccgctcgcccaaatccagaaagtgaatatttgcctccagaatctgatccacgagaagttctcccctagtccgctgaacaaggcctcttcgtgcactactcaagacagcaaagagcggagacgcgagcaaaacttatggcagcaacaggaattatctcgccaacagaagggcgtgacgcagcccaaggaagagatggcccagagaggatgtacaaaaggtcctcgaggaccaactcgagtctag

SEQ ID NO: 32181 - DNA, 447 bp, Artificial Sequence
  derived and/or modified sequence
atggggtcccagggctctggaggggttcccctcgtccaggccccttacacggtcttactgctgcccctgggtaccagcagacaggatcccggagcacagtcttttttcctctggctgcgcaggatgcaggccctggaaagggagcaggacgcgttgtggcaagggctggaacttctccagcacgggcaagcttggtttgaggaccacctgagggaggcccagaggcaacaactccatttgggagctctaggagaaaactttctcaccgacctgcactctgagccgggacggcctccactcgctcaaattcaaaaagtaaatatatgtttgcaaaacctgatccacgaaaaggagctgagtagacaacagaagggggtaactcaacctaaagaagagatggcccagaggggctgcaccaagggaccccgaggacccactcgagtgtag

SEQ ID NO: 32182 - DNA, 447 bp, Artificial Sequence
  derived and/or modified sequence
atggggtctcagggaagcggcggagttccattagtgcaggccccatatactgttctgctcttgcctctggggacaagtcggcaggatcctggcgcacagtcattctttttatggctccgccgaatgcaagccctagaacgagagcaggatgcactatggcaggggctcgagctactgcagcacgggcaggcctggtttgaggatcatctgcgcgaggctcaacgtcagcaactgcatctgggcgctctaggggagaactttttgactgatctacattccgaacccggacgccctccccttgcccagatccagaaggtaaacatctgccttcagaacttaatccacgagaaggagctgtctagacagcagaagggtgtaacccagcccaaagaagagatggcacagcgcggatgtactaaggggcctcggggtcccacccgggtttag

SEQ ID NO: 32183 - DNA, 447 bp, Artificial Sequence
  derived and/or modified sequence
atggggagtcagggctccgggggtgtaccactggtgcaagcaccctataccgtcctattgttacccctgggcaccagcaggcaagatcctggtgcccagtctttctttttatggctccggagaatgcaggcactcgaaagagagcaagacgcgctgtggcagggactcgaattattgcagcatggccaggcctggttcgaggatcacttaagagaggcgcaacggcagcaacttcacctgggcgctctcggtgagaattttctgactgacctccacagtgaacccggtcgccctccactggctcagatccagaaggtgaacatctgcctccagaacttaatccatgagaaagaactttcacgtcagcagaagggggtaacacagccaaaagaggagatggcccagcgaggttgtacaaagggccctaggggcccaacacgagtttag

SEQ ID NO: 32184 - DNA, 447 bp, Artificial Sequence
  derived and/or modified sequence
atggggtctcagggctcaggaggcgttccccttgtgcaagccccttacacagtcttattactgccactgggaacttcccggcaggaccctggcgctcaatctttttttctatggcttcgaagaatgcaggccctggagagggagcaagacgcgctctggcaaggcctagaactcctacagcatggccaagcctggttcgaagaccacctccgcgaggcccaacggcagcagctgcatctgggggcactaggtgagaatttcttgacagatttgcactcagaaccgggaaggccgccacttgctcagatccagaaggtcaatatctgcctacagaatttaatacatgaaaaggaactcagtcgtcagcagaaaggcgtgactcagccaaaggaagagatggcacaaaggggttgcactaagggtccgaggggccctaccagagtgtag

SEQ ID NO: 32185 - DNA, 447 bp, Artificial Sequence
  derived and/or modified sequence
atgggctcacagggatctgggggtgtgccactcgtgcaggccccatacacagtactgctgctgccactcggcacctcaaggcaagacccgggagctcaatcattttttctttggctgcgtcgcatgcaagctctcgagcgagaacaagacgccctgtggcaagggctggagctgcttcagcacggccaggcttggtttgaggaccatctgcgcgaggcccagcgtcagcaactgcatttaggcgctttgggtgagaattttctgaccgacttgcattccgaaccagggaggcccccattggcccagatccagaaagtcaatatctgcctgcagaatctaattcatgagaaggaacttagcagacagcagaagggagtcactcaaccgaaggaagagatggcccagagggggtgcaccaaaggacccagagggcctaccagggtgtag

SEQ ID NO: 32186 - DNA, 1021 bp, Artificial Sequence
  derived and/or modified sequence
cggattctaccccaggatacttcatgagaacgaaccccttcagagaggccctacaaaacagattagagggaagacagaggggtccaagggagatggtctctcttctcaagtaggaacaccccagcctcagacagacacagcaggaaggggcctgagaggctgacagaggcaggatgggtgcaaggcaggggtggaggggagggaccagcccgggctgcaccagtgggagtggctccacccttcccacctcagagccatggggagccagggctctggcggggtgcccttggtgcaggctccctacacagtcctgctgctgccgctggggacaagccgccaagacccaggggcccagagcttcttcctttggctacgcaggatgcaggctctggagagagaacaggatgccctgtggcagggtctggagctgctacagcatggccaggcctggtttgaagaccatctgagggaggcacagcgacagcagctgcatctaggggcccttggtgagaattttctaacagatttacactcagagcctggtcgccccccgttagcccagattcaaaaggtgaacatctgtttgcagaatctgattcatgagaagttgtcaaggcagcagaaaggagtcacccagccaaaggaggagatggctcagcggggctgcaccaaggggccaagaggccctacccgtgtctaaaccctcctctcactcccctaagcctggtgaaagagtcagaagccccaggctcctttttctgtttcttaactcaacagctaaaaaatggctccaggtagtgagtcaatgaagttcagacatgttggtgtaaagtttctcctctgctcctgaaaacttcatcttcttggtgtctcatgtcctcattctcccctatatgacatgcaaaaacgatctttctttgaaatccctctgggaagaagacatgtttattgaaactgtccttcagccttaaatacaaaaataaaactgaaactgctccagaaagcagctttctccaaaaat

SEQ ID NO: 32187 - DNA, 916 bp, Artificial Sequence
  derived and/or modified sequence
ggagggaccagcccgggctgcaccagtgggagtggctccacccttcccacctcagagccatggggagccagggctctggcggggtgcccttggtgcaggctccctacacagtcctgctgctgccgctggggacaagccgccaagacccaggggcccagagcttcttcctttggctacgcaggatgcaggctctggagagagaacaggatgccctgtggcagggtctggagctgctacagcatggccaggcctggtttgaagaccatctgagggaggcacagcgacagcagctgcatctaggggcccttggtgagaattttctaacagatttacactcagagcctggtcgccccccgttagcccagattcaaaaggtgaacatctgtttgcagaatctgattcatgagaagttctccccaagtccactgaacaaggctagttcctgcaccacccaggattcaaaggaaagacgaagggagcagaacttgtggcagcaacaggagttgtcaaggcagcagaaaggagtcacccagccaaaggaggagatggctcagcggggctgcaccaaggggccaagaggccctacccgtgtctaaaccctcctctcactcccctaagcctggtgaaagagtcagaagccccaggctcctttttctgtttcttaactcaacagctaaaaaatggctccaggtagtgagtcaatgaagttcagacatgttggtgtaaagtttctcctctgctcctgaaaacttcatcttcttggtgtctcatgtcctcattctcccctatatgacatgcaaaaacgatctttctttgaaatccctctgggaagaagcatgtttattgaaactgtccttcagccttaaatacaaaaataaaactgaaactgctccagaaagcagctttctccaaaaat

SEQ ID NO: 32188 - DNA, 1020 bp, Artificial Sequence
  derived and/or modified sequence
cggattctaccccaggatacttcatgagaacgaaccccttcagagaggccctacaaaacagattagagggaagacagaggggtccaagggagatggtctctcttctcaagtaggaacaccccagcctcagacagacacagcaggaaggggcctgagaggctgacagaggcaggatgggtgcaaggcaggggtggaggggagggaccagcccgggctgcaccagtgggagtggctccacccttcccacctcagagccatggggagccagggctctggcggggtgcccttggtgcaggctccctacacagtcctgctgctgccgctggggacaagccgccaagacccaggggcccagagcttcttcctttggctacgcaggatgcaggctctggagagagaacaggatgccctgtggcagggtctggagctgctacagcatggccaggcctggtttgaagaccatctgagggaggcacagcgacagcagctgcatctaggggcccttggtgagaattttctaacagatttacactcagagcctggtcgccccccgttagcccagattcaaaaggtgaacatctgtttgcagaatctgattcatgagaagttgtcaaggcagcagaaaggagtcacccagccaaaggaggagatggctcagcggggctgcaccaaggggccaagaggccctacccgtgtctaaaccctcctctcactcccctaagcctggtgaaagagtcagaagccccaggctcctttttctgtttcttaactcaacagctaaaaaatggctccaggtagtgagtcaatgaagttcagacatgttggtgtaaagtttctcctctgctcctgaaaacttcatcttcttggtgtctcatgtcctcattctcccctatatgacatgcaaaaacgatctttctttgaaatccctctgggaagaagcatgtttattgaaactgtccttcagccttaaatacaaaaataaaactgaaactgctccagaaagcagctttctccaaaaat

SEQ ID NO: 32189 - DNA, 820 bp, Artificial Sequence
  derived and/or modified sequence
ggagggaccagcccgggctgcaccagtgggagtggctccacccttcccacctcagagccatggggagccagggctctggcggggtgcccttggtgcaggctccctacacagtcctgctgctgccgctggggacaagccgccaagacccaggggcccagagcttcttcctttggctacgcaggatgcaggctctggagagagaacaggatgccctgtggcagggtctggagctgctacagcatggccaggcctggtttgaagaccatctgagggaggcacagcgacagcagctgcatctaggggcccttggtgagaattttctaacagatttacactcagagcctggtcgccccccgttagcccagattcaaaaggtgaacatctgtttgcagaatctgattcatgagaaggagttgtcaaggcagcagaaaggagtcacccagccaaaggaggagatggctcagcggggctgcaccaaggggccaagaggccctacccgtgtctaaaccctcctctcactcccctaagcctggtgaaagagtcagaagccccaggctcctttttctgtttcttaactcaacagctaaaaaatggctccaggtagtgagtcaatgaagttcagacatgttggtgtaaagtttctcctctgctcctgaaaacttcatcttcttggtgtctcatgtcctcattctcccctatatgacatgcaaaaacgatctttctttgaaatccctctgggaagaagcatgtttattgaaactgtccttcagccttaaatacaaaaataaaactgaaactgctccagaaagcagctttctcc

SEQ ID NO: 32190 - DNA, 917 bp, Artificial Sequence
  derived and/or modified sequence
ggagggaccagcccgggctgcaccagtgggagtggctccacccttcccacctcagagccatggggagccagggctctggcggggtgcccttggtgcaggctccctacacagtcctgctgctgccgctggggacaagccgccaagacccaggggcccagagcttcttcctttggctacgcaggatgcaggctctggagagagaacaggatgccctgtggcagggtctggagctgctacagcatggccaggcctggtttgaagaccatctgagggaggcacagcgacagcagctgcatctaggggcccttggtgagaattttctaacagatttacactcagagcctggtcgccccccgttagcccagattcaaaaggtgaacatctgtttgcagaatctgattcatgagaagttctccccaagtccactgaacaaggctagttcctgcaccacccaggattcaaaggaaagacgaagggagcagaacttgtggcagcaacaggagttgtcaaggcagcagaaaggagtcacccagccaaaggaggagatggctcagcggggctgcaccaaggggccaagaggccctacccgtgtctaaaccctcctctcactcccctaagcctggtgaaagagtcagaagccccaggctcctttttctgtttcttaactcaacagctaaaaaatggctccaggtagtgagtcaatgaagttcagacatgttggtgtaaagtttctcctctgctcctgaaaacttcatcttcttggtgtctcatgtcctcattctcccctatatgacatgcaaaaacgatctttctttgaaatccctctgggaagaagacatgtttattgaaactgtccttcagccttaaatacaaaaataaaactgaaactgctccagaaagcagctttctccaaaaat

SEQ ID NO: 32191 - DNA, 821 bp, Artificial Sequence
  derived and/or modified sequence
ggagggaccagcccgggctgcaccagtgggagtggctccacccttcccacctcagagccatggggagccagggctctggcggggtgcccttggtgcaggctccctacacagtcctgctgctgccgctggggacaagccgccaagacccaggggcccagagcttcttcctttggctacgcaggatgcaggctctggagagagaacaggatgccctgtggcagggtctggagctgctacagcatggccaggcctggtttgaagaccatctgagggaggcacagcgacagcagctgcatctaggggcccttggtgagaattttctaacagatttacactcagagcctggtcgccccccgttagcccagattcaaaaggtgaacatctgtttgcagaatctgattcatgagaaggagttgtcaaggcagcagaaaggagtcacccagccaaaggaggagatggctcagcggggctgcaccaaggggccaagaggccctacccgtgtctaaaccctcctctcactcccctaagcctggtgaaagagtcagaagccccaggctcctttttctgtttcttaactcaacagctaaaaaatggctccaggtagtgagtcaatgaagttcagacatgttggtgtaaagtttctcctctgctcctgaaaacttcatcttcttggtgtctcatgtcctcattctcccctatatgacatgcaaaaacgatctttctttgaaatccctctgggaagaagacatgtttattgaaactgtccttcagccttaaatacaaaaataaaactgaaactgctccagaaagcagctttctcc

SEQ ID NO: 32192 - protein, 251 aa, Artificial Sequence
  derived and/or modified sequence
MEEGPLPGGLPSPEDAMVTELLSPEGPFASENIGLKAPVKYEEDEFHVFKEAYLGPADPKEPVLHAFNPALGADCKGQVKAKLAGGDSDGGELLGEYPGIPELSALEDVALLQAPQPPACNVHFLSSLLPAHRSPAVLPLGAWVLEGASHPGVRMIPVEIKEAGGTTTSNNPEEATLQNLLAQESCCKFPSSQELEDASCCSLKKDSNPMVICQLKGGTQMLCIDNSRTRELKALHLVPQYQDQNNYLQSA

SEQ ID NO: 32193 - DNA, 756 bp, Artificial Sequence
  derived and/or modified sequence
atggaagaggggccccttcctggaggtctgcccagtccagaggacgccatggtgactgagctgcttagccccgaaggtccattcgccagcgagaatatcggcctgaaagcccctgtcaaatacgaggaggatgagtttcatgtctttaaggaggcttacctaggaccagctgatcccaaagagccggtgcttcatgccttcaatcccgccctgggcgcagactgcaaaggtcaggtaaaggctaaactagcgggtggcgattcggacggtggcgagctcctaggggagtacccaggcattcccgaactctctgctttagaagacgttgcactgttgcaggcccctcagccacccgcctgtaacgtgcattttctgtcatcattactgcctgcacacagatctccagccgtcttaccactcggtgcttgggttctggaaggggcttcccatccgggcgtcagaatgattcccgtcgaaatcaaagaggcaggaggcacaacaacgagtaacaaccccgaagaggcgaccctacaaaacctcctagcacaggagagttgctgtaaatttccctcctctcaagagctggaagatgcgtcctgttgctcactgaagaaggattctaaccccatggtcatctgccagctgaaaggcggcacacaaatgctgtgtattgacaattccagaacaagagagctgaaggctcttcacctggtgcctcagtaccaagaccaaaacaactatctacaaagtgcttag

SEQ ID NO: 32194 - DNA, 921 bp, Artificial Sequence
  derived and/or modified sequence
atggaggaaggtccactgcccgggggactgccaagccctgaggatgctatggttacagaactgctgtcccccgaggggccgtttgcgagtgaaaacatcggcctgaaggcacctgtcaaatatgaagaggatgaattccatgtttttaaggaggcttacctgggccctgcagacccaaaggagcccgtgcttcacgcatttaatccagcgctgggagctgactgtaaagggcaggtgaaggccaaactggcaggaggggacagcgatgggggggaactcttaggagagtaccctggcatccctgagctgtccgccctcgaggacgtcgctctgcttcaggcaccacagccgccagcatgtaatgtgcactttctgtcgtctctccttcccgcccacagatccccagcagtgctcccgctaggtgcatgggtgctggagggggctagccatcccggtgttcgcatgattccggtcgagatcaaagaggcgggcggcacaacaaccagtaacaatccagaggaagccacactgcagaatctactggctcaagagtcatgttgcaaattcccctccagccaggagctggaagacgccagttgttgctcgctaaagaaagactccaaccctatggtgatatgccagctgaagggaggcactcaaatgctgtgtatcgacaactcaagaacccgagagctgaaagcccttcatctagtccctcagtatcaggaccaaaataactatctgcagtctgatgtcccaaagccaatgactgcgctggtcgggagatttctgcccgctagcacaaagctaaacctgattacacagcagctcgagggagccctaccatctgtggtgaatgggtctgcctttccttctgggagtacacttccggggccccccaaaatcactctcgcggggtag

SEQ ID NO: 32195 - DNA, 756 bp, Artificial Sequence
  derived and/or modified sequence
atggaggagggccccctgcccggcggcctgcccagcccagaagatgccatggtgacagagctgctgagccctgagggcccctttgcctctgaaaatattggcctgaaggcccctgtgaagtatgaagaagatgagttccacgtgttcaaggaggcctacctgggccctgctgaccccaaggagcctgtgctgcacgccttcaacccagccctgggcgctgactgcaagggccaggtgaaggccaagctggccggcggggacagtgatggaggagagctgctgggggagtacccaggcatccctgagctgagcgccctggaggatgtggccctgctgcaggccccccagcccccagcctgcaatgtgcacttcctgagcagcctgctgcctgcccacaggagccctgctgtgctgcccctgggcgcctgggtgctggagggcgccagccaccctggggtgaggatgatccctgtggagatcaaggaggccggcggcaccaccaccagcaacaaccctgaggaggccaccctgcagaacctgctggcccaggagagctgctgcaagttccccagcagccaggagctggaggatgccagctgctgcagcctgaagaaggacagcaaccccatggtgatctgccagctgaagggcggcacccagatgctgtgcatcgacaacagcaggacccgggagctgaaggccctgcacctggtgccccagtaccaggaccagaacaactacctgcagagcgcctag

SEQ ID NO: 32196 - DNA, 921 bp, Artificial Sequence
  derived and/or modified sequence
atggaggagggccccctgcccggcggcctgcccagcccagaagatgccatggtgacagagctgctgagccctgagggcccctttgcctctgaaaatattggcctgaaggcccctgtgaagtatgaagaagatgagttccacgtgttcaaggaggcctacctgggccctgctgaccccaaggagcctgtgctgcacgccttcaacccagccctgggcgctgactgcaagggccaggtgaaggccaagctggccggcggggacagtgatggaggagagctgctgggggagtacccaggcatccctgagctgagcgccctggaggatgtggccctgctgcaggccccccagcccccagcctgcaatgtgcacttcctgagcagcctgctgcctgcccacaggagccctgctgtgctgcccctgggcgcctgggtgctggagggcgccagccaccctggggtgaggatgatccctgtggagatcaaggaggccggcggcaccaccaccagcaacaaccctgaggaggccaccctgcagaacctgctggcccaggagagctgctgcaagttccccagcagccaggagctggaggatgccagctgctgcagcctgaagaaggacagcaaccccatggtgatctgccagctgaagggcggcacccagatgctgtgcatcgacaacagcaggacccgggagctgaaggccctgcacctggtgccccagtaccaggaccagaacaactacctgcagagtgatgtgcccaagcccatgacagccctggtgggccgcttcctgcctgccagcaccaagctgaacctgatcacccagcagctggagggcgccctgcccagcgtggtgaatggcagcgccttccccagcggcagcaccctgcccggcccccccaagatcaccctggccggctag

SEQ ID NO: 32197 - DNA, 3495 bp, Artificial Sequence
  derived and/or modified sequence
acgccccatcccgctcgctccacgctgcggcagccccggcggccccaggtgcgcggcccccgccatcccgccccgccgccctgcgccatggaggagggccctctgccgggcgggctgcccagccccgaggatgcgatggtgacggagctcttaagccccgagggtccgttcgcttcggagaacatcggcctgaaggcccccgtgaagtacgaggaggacgagttccacgtcttcaaagaagcgtacctgggcccggcggaccccaaggaacccgtcctgcacgcgttcaaccccgcgctgggcgccgactgcaagggccaggtcaaggcgaagctcgcggggggcgacagcgacggcggggagctcctcggggagtaccccgggatcccagagctcagcgcgctggaggacgtcgcgctcctgcaggccccgcagccgcccgcctgcaacgtgcacttcctgtcctcgctgctacccgcgcaccgcagcccggcggtgttgcccctgggcgcctgggtcctggaaggagcctcccacccgggcgtccgcatgatcccagttgaaatcaaggaagcaggtggtactactacaagtaataatccggaagaagcaactttgcagaatcttcttgctcaggaatcctgttgcaagttcccatcgtcccaggaactagaggatgcctcctgctgttctcttaagaaagattccaacccaatggtgatatgccaattgaaagggggcacacaaatgctatgtatagacaattctagaacaagagaactaaaagcactccatttggttcctcagtatcaagatcaaaataattatctacagtcagcttgagggagccttaccatcggtagtcaacgggtctgctttcccctcgggatcaactcttccaggaccaccaaaaataactttggctgggtaaggattagaagcaatacattgtcactctaatgtaataatttaagagactcttggatacgttcacgattttcttctatactataaaatgagcttcactgcacaccttcatgacttctgagaaatgtttttaccatcagcaatgccactaacggtgttgctgtctgtgtctggtttcactggggctgcaaaggctgctggaaagtctggcccataacctgcatctgtccctgtcctcctgtccgctgtcctatgttggtgtttctgaggcttgttgccatttatagctctttgtcttcattccatgttgattcaaactgtactggcctctcttttttgctgtcgtccgtggaaataatggtgtggcagccatgcagcatgaacggggggctgcagagtgccctccagctgcctccgcccgctgccttccatgctgagttggctcgagctctatggcaggtgctaatgcatgatctgtcttcacatctccaggtggacataggctgcacttatctgggacctcatcttgctatttcttgcctgtcttgtgtttataatcttgctatttcttgcctgtcttgtgtttataattgttgctaattaaactaatcagctggttgaaattatcaggttaacatttatgtattaacagtggtttgggcaaccctctccattcgttgagccctgtagttgattatggagatcagcatattcctgcctccaagaggtgtttgtttgtttgtttgttttttcttgttttttgtttgtttgtttgttttgtttttttgagacggactcttgctctgtcacccaggctggaatacaatggcatgatctctgctcactgcaacctccgcctcctgggttcaagcaattctccttcctcagcctcccgagtagctgggaccacaggcgcataccactataccaggctaatttttgtattttttagtagagactgggttttaccatgttggccaggctggtcttgaaatactgacctcagatgatccgcccatctcagcctcccaaagtgctgggattacaggcgtgcccggcctgcctgcaggagttctttgggcccacagtctaaggcaaacacataccctgggcctgagagacagcagtcaaacaccttacaggatacagcccgcagcctccagtgctttccaggctcctgcagagttctgccatcgggcatggcttcgtgatggccttggtaagtgtgaggagagtggtttggggctggaatgaaaggccgtgaatctggaaacacactggaaccgatcaacgctatcagccctcatggtcgctgaagggcgttggttgctcctgggcaccgctgcttcagtttctgcagtggctctttcagctgttgtaattctgtgcctaggctgttgacaacttttgctgagttggacagaataagactgtgggccatgctgcttgcttcactctctgggtgtgatggatcggtgagggtgcagttgctatgattgtaattggtcatctcatcatggctgttaacatttctggaccaaacaaaaatgacttcagctacttccagattctgctgatacattacacaggatgatctaaaaggctacagttctgaagatactcatctttcttgtaatctgggggcatctggtcaatagtattgcctctgtgctgtattgtgtctagaacattcaaggacatttgatacttctcatactttaattgcgtgctctcccagttgcagcaccctctgaggcttctatgtgttgcagccgatgggcatttgcacagagcagcagtcatgacagcgttttcagggcagctatttctccttttcccccttttcctctcccccggcttcccattctcctcctcctccttcctcttctcgtcccctcctcctcctctttgttctcctccccctgctcttcttcctctctccttttcctccttctgtgtctatactagattattttcaatcagtcacatgtttttctttattttgaatgttacaaaatatttctctattgtaaacggtgtgccaggaaaaacatgagatgtgtatttgtattttttatgcacataattacttaatccaatgcctctccacttaattgggcctgatgatttttatctcgacatctgcaatactgatgatatactggaatctctaccaatttatttttggtggtaagaaagcagtcagagaacgttttgctggttatttcattccgtgtgagttcccaaccaagactgtcagcccagtgtggttcagccatatctaacctatagaggccatagaagcagttcagcttaggctggaggccagcaggctgagtgtgcgagctgacccgatggtcatttgttagggttggggggtgaactggctaacttattaactagcttatcatattaataaaaactctttaatacaaatccttgtcctgacactctgtagctttaataatcctattaccaatctggtaataaatgtgaattctgacacattgttgatgctactggttttagtaacataatgaacatcataataaagaatattcaagagtc

SEQ ID NO: 32198 - DNA, 1235 bp, Artificial Sequence
  derived and/or modified sequence
atcccgctcgctccacgctgcggcagccccggcggccccaggtgcgcggcccccgccatcccgccccgccgccctgcgccatggaggagggccctctgccgggcgggctgcccagccccgaggatgcgatggtgacggagctcttaagccccgagggtccgttcgcttcggagaacatcggcctgaaggcccccgtgaagtacgaggaggacgagttccacgtcttcaaagaagcgtacctgggcccggcggaccccaaggaacccgtcctgcacgcgttcaaccccgcgctgggcgccgactgcaagggccaggtcaaggcgaagctcgcggggggcgacagcgacggcggggagctcctcggggagtaccccgggatcccagagctcagcgcgctggaggacgtcgcgctcctgcaggccccgcagccgcccgcctgcaacgtgcacttcctgtcctcgctgctacccgcgcaccgcagcccggcggtgttgcccctgggcgcctgggtcctggaaggagcctcccacccgggcgtccgcatgatcccagttgaaatcaaggaagcaggtggtactactacaagtaataatccggaagaagcaactttgcagaatcttcttgctcaggaatcctgttgcaagttcccatcgtcccaggaactagaggatgcctcctgctgttctcttaagaaagattccaacccaatggtgatatgccaattgaaagggggcacacaaatgctatgtatagacaattctagaacaagagaactaaaagcactccatttggttcctcagtatcaagatcaaaataattatctacagtcagatgtccctaaaccaatgactgctttagtagggagatttttgccagcatcaacaaaattaaatctcattacacaacaacttgagggagccttaccatcggtagtcaacgggtctgctttcccctcgggatcaactcttccaggaccaccaaaaataactttggctgggtaaggattagaagcaatacattgtcactctaatgtaataatttaagagactcttggatacgttcacgattttcttctatactataaaatgagcttcactgcacaccttcatgacttctgagaaatgtttttaccatcagcaatgccactaacggtgttgctgtctgtgtctggtttcactggggctgcaaaggctgctggaaagtctggcccataacctgcatctgtccctgtcctc

SEQ ID NO: 32199 - DNA, 756 bp, Artificial Sequence
  derived and/or modified sequence
atggaggagggccccctgcccggcggcctgcccagccccgaggacgccatggttaccgaactccttagccccgaagggccttttgcgtcagaaaatatcggcttgaaagccccagtaaagtatgaggaagacgagtttcacgttttcaaggaggcatacttgggtccagccgaccctaaggaaccagtgcttcatgcattcaaccccgccctgggcgcagactgcaaaggccaggtcaaggccaaactggcgggtggcgacagcgacgggggggagctgctgggtgagtacccgggaatccccgagttgagcgccctggaggatgtcgctctccttcaggccccccagccacccgcatgtaatgtacattttctcagcagtctgctgccggcacatcgatcccctgcagtgctgcccctaggagcctgggtactcgagggtgccagtcacccaggcgtgagaatgatccccgttgagattaaggaagccggcggaacaacaacatcaaacaacccggaggaggcgaccctgcagaatctattagcgcaggaaagctgttgcaagttccccagcagtcaagagttagaggatgccagctgctgttccctgaagaaggacagcaacccaatggtcatttgccagctaaaaggaggcacccagatgctctgcatcgacaattcccgcacgagagagttgaaggcactgcatttggtgccacaatatcaggatcagaataactacctgcagagcgcatag

SEQ ID NO: 32200 - DNA, 921 bp, Artificial Sequence
  derived and/or modified sequence
atggaggagggccccctgcccggcggcctgcccagccccgaggacgccatggttacagagctgctgtctcctgaggggccgttcgcgtcagagaacattgggctcaaggccccagttaaatacgaagaagacgagttccatgtctttaaagaggcctacctaggccccgctgacccaaaggagcctgtcctgcacgcatttaatcctgcccttggtgctgactgtaaaggacaggtgaaagcaaagctagctggaggtgatagtgacggaggagagctcttgggagaataccccgggatccccgagctgagcgctctagaagacgttgccctgcttcaggccccacagccacccgcatgtaacgtgcatttcctctcatccctactcccagcacatcgaagccctgccgtgctgccccttggagcttgggtgttggagggggcaagccaccctggggttcgaatgattcccgtcgaaattaaagaggcggggggaacaacaacatccaacaatcctgaagaagctactctgcagaacttacttgcccaggaaagctgctgtaagtttcctagttcccaggaactagaggacgcatcctgctgcagtctgaaaaaggactctaatcccatggtcatctgccagctgaaagggggtacccagatgctatgcatcgataactcccgcacaagagagctaaaagccctccacctggtccctcagtaccaggatcaaaacaattacctacaatccgacgtgcctaaacccatgactgccttagtcggccgcttcctgcctgcttctacaaaactgaaccttattactcagcaactggaaggagccctgcctagcgtcgtaaatgggtcagcctttccctctgggtcaaccctgcctgggccccccaagatcactctggcggggtag

SEQ ID NO: 32201 - DNA, 756 bp, Artificial Sequence
  derived and/or modified sequence
atggaagaggggcctctgccaggtgggctaccctcgcccgaggacgcaatggtgacagagctgctgagtccagaggggccttttgcgagtgaaaatatcgggctaaaggccccagtaaagtacgaggaggacgagttccatgttttcaaagaggcctatttggggccagctgaccctaaggaacctgtcttacacgcattcaatccagcgctcggagcagactgcaaaggccaggtcaaggccaaactcgcgggaggggacagtgatggtggcgaattgctgggcgaatatccaggcattcctgaactgtcagcccttgaggatgtcgcattgctccaggcccctcagccacccgcttgcaacgtgcatttcttatcctcactcctccctgctcataggtctccagctgtgctgccactgggtgcttgggttctggaaggtgcatctcaccctggcgtccggatgattcccgtagagataaaggaggcgggaggcaccactaccagcaacaaccccgaggaggccaccctgcagaacctgttagcccaggagtcctgctgcaagttcccctcaagccaggagctggaggacgcctcttgctgctccctgaaaaaggactccaaccctatggtcatttgccagctcaaaggtgggactcagatgctctgcatcgataacagcagaacacgcgagctgaaagcactacatctggtgcctcagtatcaagaccagaacaactacctgcaaagcgcctag

SEQ ID NO: 32202 - DNA, 921 bp, Artificial Sequence
  derived and/or modified sequence
atggaagaggggcctttaccaggtggactgcctagccccgaggatgccatggtgacagagctgctatccccggagggaccattcgcttccgaaaatatcggattaaaggccccagtgaaatacgaagaagatgagtttcacgtgttcaaagaggcatatttaggccctgcagaccctaaagagccggtgttgcatgcctttaatcctgctctgggcgcagactgcaaaggccaggtgaaggctaaactggcaggaggagactctgacggcggagagcttctgggagaataccccggtattcccgagctttcagccttggaagacgttgcgctgctccaagccccacagccaccggcatgtaatgtacacttcctgtccagtcttttacccgctcaccgtagtccagcggttctacccttaggcgcatgggtgctagagggtgcatctcatcccggagtgcggatgattcccgtagagatcaaagaagccggtgggaccacaaccagcaataatccagaagaggctacactgcagaacctgttagcccaagagtcatgttgtaaattccccagttcacaggaactggaggacgcgagctgctgctcactgaaaaaagattccaatcccatggtcatctgtcaactgaagggtggcactcagatgctctgcatcgacaattcacgcactagggagctgaaggctctacacttagtcccccaatatcaggaccagaataattacctgcagtctgatgttcccaaacccatgaccgctctggtcggcaggttcctgcctgcgtctacaaagttaaacctgatcacccagcagttagagggcgctctgcctagcgtcgtgaacggcagcgccttccctagcgggtctaccctgccgggacccccaaagattacactggccggatag

SEQ ID NO: 32203 - DNA, 756 bp, Artificial Sequence
  derived and/or modified sequence
atggaggagggccccctgcccggcggcctgcccagccccgaggacgccatggtgaccgagctgctgagccccgagggccccttcgccagcgagaacatcggcctgaaggcccccgtgaagtacgaggaggacgagttccacgtgttcaaggaggcctacctgggccccgccgaccccaaggagcccgtgctgcacgccttcaaccccgccctgggcgccgactgcaagggccaggtgaaggccaagctggccggcggcgacagcgacggcggcgagctgctgggcgagtaccccggcatccccgagctgagcgccctggaggacgtggccctgctgcaggccccccagccccccgcctgcaacgtgcacttcctgagcagcctgctgcccgcccacagaagccccgccgtgctgcccctgggcgcctgggtgctggagggcgccagccaccccggcgtgagaatgatccccgtggagatcaaggaggccggcggcaccaccaccagcaacaaccccgaggaggccaccctgcagaacctgctggcccaggagagctgctgcaagttccccagcagccaggagctggaggacgccagctgctgcagcctgaagaaggacagcaaccccatggtgatctgccagctgaagggcggcacccagatgctgtgcatcgacaacagcagaaccagagagctgaaggccctgcacctggtgccccagtaccaggaccagaacaactacctgcagagcgcctag

SEQ ID NO: 32204 - DNA, 921 bp, Artificial Sequence
  derived and/or modified sequence
atggaggagggccccctgcccggcggcctgcccagccccgaggacgccatggtgaccgagctgctgagccccgagggccccttcgccagcgagaacatcggcctgaaggcccccgtgaagtacgaggaggacgagttccacgtgttcaaggaggcctacctgggccccgccgaccccaaggagcccgtgctgcacgccttcaaccccgccctgggcgccgactgcaagggccaggtgaaggccaagctggccggcggcgacagcgacggcggcgagctgctgggcgagtaccccggcatccccgagctgagcgccctggaggacgtggccctgctgcaggccccccagccccccgcctgcaacgtgcacttcctgagcagcctgctgcccgcccacagaagccccgccgtgctgcccctgggcgcctgggtgctggagggcgccagccaccccggcgtgagaatgatccccgtggagatcaaggaggccggcggcaccaccaccagcaacaaccccgaggaggccaccctgcagaacctgctggcccaggagagctgctgcaagttccccagcagccaggagctggaggacgccagctgctgcagcctgaagaaggacagcaaccccatggtgatctgccagctgaagggcggcacccagatgctgtgcatcgacaacagcagaaccagagagctgaaggccctgcacctggtgccccagtaccaggaccagaacaactacctgcagagcgacgtgcccaagcccatgaccgccctggtgggcagattcctgcccgccagcaccaagctgaacctgatcacccagcagctggagggcgccctgcccagcgtggtgaacggcagcgccttccccagcggcagcaccctgcccggcccccccaagatcaccctggccggctag

SEQ ID NO: 32205 - protein, 194 aa, Artificial Sequence
  derived and/or modified sequence
MTMRHNWTPDLSPLWVLLLCAHVVTLLVRATPVSQTTTAATASVRSTKDPCPSQPPVFPAAKQCPALEVTWPEVEVPLNGTLSLSCVACSRFPNFSILYWLGNGSFIEHLPGRLWEGSTSRERGSTGTQLCKALVLEQLTPALHSTNFSCVLVDPEQVVQRHVVLAQLWAGLRATLPPTQEALPSSHSSPQQQG

SEQ ID NO: 32206 - DNA, 585 bp, Artificial Sequence
  derived and/or modified sequence
atgaccatgaggcataattggacacccgaccttagtcctctctgggtgttattgctttgcgcacacgtggtgacgcttctcgtccgggctaccccagtgtcccagacaaccaccgcagctacagcaagtgtgcgatctacaaaggatccttgtccgtcacagccccctgtattcccggctgccaaacagtgccctgccttagaggtcacttggcctgaggtagaagtacccctcaacgggaccttgtcactgtcatgtgtggcctgctctcgcttccccaatttttctatcctttactggttaggtaatggctcattcatcgagcatctccctggaaggctctgggagggatcgacttcccgcgaacggggtagcacaggcacgcagctgtgtaaggctctggtcctggagcagctgacaccagccctgcattccactaatttctcctgcgtactggtcgacccagagcaagttgtgcagcgccacgtcgtcctggctcagctatgggccggtttgcgagccactctgcctcctactcaggaagcactgcctagctcacattcatctcctcagcagcaaggttag

SEQ ID NO: 32207 - DNA, 585 bp, Artificial Sequence
  derived and/or modified sequence
atgactatgcggcacaactggacgcctgatctgtcacccttgtgggttctgctgttgtgcgcacatgttgtgaccctgttggtcagggccacaccagttagtcagacaaccacagcagctactgcgtcagtaaggtccaccaaggacccctgccccagccagcctcctgtgtttcctgctgctaagcaatgtccggctctagaagtcacatggcccgaagttgaagttccgcttaatgggacactctccctgtcctgtgtcgcctgttctcgcttcccaaattttagcatcctctactggctcgggaacggctcgtttattgaacaccttcctggacgtctgtgggagggctcgacatcccgcgagagaggttcaacagggacgcaactgtgcaaggctttggtgctggagcagctgactcccgctctgcacagcaccaacttctcttgcgtgctggtggatccagagcaggtggtgcaacggcatgtggtcctggcacagctctgggccggacttagagcaaccctgcccccaacccaggaggccctgccttcatcgcatagctcccctcagcagcagggttag

SEQ ID NO: 32208 - DNA, 585 bp, Artificial Sequence
  derived and/or modified sequence
atgactatgcgacataattggacccccgatctttctcctctctgggtgctgctgctttgtgcccatgtggtgactctgctcgttcgggctacacccgtgagtcaaaccaccactgccgctaccgccagtgtgaggtccactaaagatccttgcccttcacagcccccagtgttccctgccgctaagcagtgccccgctttagaggtcacatggccggaagtggaggttcctttaaatgggactctgtccctcagttgtgtagcctgtagcaggttccctaattttagcatcctctactggcttgggaatggctccttcattgaacacttgccaggccgattgtgggagggcagtacatcccgcgagaggggctctaccggtacccagctttgcaaggctttggtgctggaacagctcacaccagccctgcatagtactaatttctcgtgtgtgctggtcgatccggaacaggtcgtacagaggcatgtggtgctggcccagctctgggcaggactcagagcaacactgcccccaacccaggaagcattgccaagctctcactcatccccccaacagcagggatag

SEQ ID NO: 32209 - DNA, 585 bp, Artificial Sequence
  derived and/or modified sequence
atgactatgagacataattggaccccggatctgtcccccctatgggtcctactgctttgcgcacacgtcgtgactctcctagtaagggcgaccccagtgagtcagacaacaacagcagcaacggcctccgtgcgatcaacaaaagacccctgcccttctcagccccctgtgttccccgctgccaaacagtgccctgctttagaagtcacctggccagaggtggaagtgcctctcaacggtactctttccctttcctgtgtggcctgttctcgctttccaaattttagcatcttgtactggcttggtaacggcagtttcatcgagcacctgcccggtcggctgtgggaggggtctacttcgagggagaggggatcaaccggtacacagctctgtaaagctctggttttagaacagctgacccctgccctgcatagcactaatttcagctgcgtattggtagatccggaacaggtggttcagcgacacgtggttttagcccagctatgggctggattaagagccaccctgccccctactcaagaggccctgccctctagtcatagctccccccagcagcaggggtag

SEQ ID NO: 32210 - DNA, 2172 bp, Artificial Sequence
  derived and/or modified sequence
gccagaggggctaggatgagagacagagggtgtgatggtgggtgctgggagatgtagccgaccttggggctggtggctgggggagtgggtagcctgggaaaggccaggatgtggacggactggtatggcattgagcctgaagtggtccaacttggggttccccagtgcctaggaaagttgtccccttgaatgtcagtgtgaaggtgaaggaggaagcagatgcctgttcatatggaaacaaagacctggctgtgaagaggggaggcggacaccaaagtcctgacacttgggcgggacagaattgatctgtgagagactcatctagttcataccctaggtgaccctgggggtggcatgggggtagattagagatcccagtctggtatcctctggagagtaggagtcccaggagctgaaggtttctggccactgaactttggctaaagcagaggtgtcacagctgctcaagattccctggttaaaaagtgaaagtgaaatagagggtcggggcagtgctttcccagaaggattgctcggcatcctgcccttcccagaagcagctctggtgctgaagagagcactgcctccctgtgtgactgggtgagtccatattctctctttgggtctcaattttgccttccctaatgaaggggtaagattggactaggtaagcatcttacaaccatttgtggtcatgagagctggggtggggaaggattgtcacttgacccccccagctctgtttctaagtgctgaaagagctccaggctatgctacgggaggagaagccagctactgaggaaaagccagctactgagaaaaagcgggagtggtttaccattctcctcccccacctttcaccagagaagaggacgttgtcacagataaagagccaggctcaccagctcctgacgcatgcatcatgaccatgagacacaactggacaccagacctcagccctttgtgggtcctgctcctgtgtgcccacgtcgtcactctcctggtcagagccacacctgtctcgcagaccaccacagctgccactgcctcagttagaagcacaaaggacccctgcccctcccagcccccagtgttcccagcagctaagcagtgtccagcattggaagtgacctggccagaggtggaagtgccactgaatggaacgctgagcttatcctgtgtggcctgcagccgcttccccaacttcagcatcctctactggctgggcaatggttccttcattgagcacctcccaggccgactgtgggaggggagcaccagccgggaacgtgggagcacaggtacgcagctgtgcaaggccttggtgctggagcagctgacccctgccctgcacagcaccaacttctcctgtgtgctcgtggaccctgaacaggttgtccagcgtcacgtcgtcctggcccagctctgggctgggctgagggcaaccttgccccccacccaagaagccctgccctccagccacagcagtccacagcagcagggttaagactcagcacagggccagcagcagcacaaccttgaccagagcttgggtcctacctgtctacctggagtgaacagtccctgactgcctgtaggctgcgtggatgcgcaacacaccccctccttctctgctttgggtcccttctctcaccaaattcaaactccattcccacctacctagaaaatcacagcctccttataatgcctcctcctcctgccattctctctccacctatccattagccttcctaacgtcctactcctcacactgctctactgctcagaaaccaccaagactgttgatgccttagccttgcactccagggccctacctgcatttcccacatgactttctggaagcctcccaactattcttgcttttcccagacagctcccactcccatgtctctgctcatttagtcccgtcttcctcaccgccccagcaggggaacgctcaagcctggttgaaatgctgcctcttcagtgaagtcatcctctttcagctctggccgcattctgcagacttcctatcttcgtgctgtatgttttttttttcccccttcactctaatggactgttccagggaagggatgggggcagcagctgcttcggatccacactgtatctgtgtcatccccacatgggtcctcataaaggattattcaatgg

SEQ ID NO: 32211 - DNA, 585 bp, Artificial Sequence
  derived and/or modified sequence
atgactatgaggcacaactggactcccgatctctcccctctctgggtgttgttgttgtgcgcgcacgtcgtcacattgctcgtgcgcgctacccccgtgtcccagacaacaaccgccgcaacagcctcagtccggagcacaaaggacccttgcccttcacagcccccagtattcccggcagctaaacagtgcccagctctggaagtgacttggcccgaagtagaggtgcctctgaacggcaccttatctttatcctgtgtcgcctgcagccggtttcctaacttctccatactgtactggctcggtaacggctcatttatagaacatctgcccggtcgactgtgggagggcagcacatctcgtgaaaggggaagtacgggcacccagctttgtaaggcactcgtgttggagcagttgactccagccctgcatagcactaacttctcctgcgttctcgtggatccagagcaggtggtgcaacgccatgtagtgctagcccaactctgggccggtctaagagcgacactccccccaacacaggaagcgctgccctcatcgcacagctcaccacagcaacaggggtag

SEQ ID NO: 32212 - DNA, 585 bp, Artificial Sequence
  derived and/or modified sequence
atgaccatgagacacaactggaccccagatttgtcacccctttgggtgctgctcctgtgtgcacacgtggtgacactgctggtgagggcaactcctgtttcgcagacgacgacggctgctacagcctccgtcaggtccacaaaggatccgtgtcccagccagccgcctgtattccccgcagccaagcagtgtcccgcactcgaggtgacttggccagaagtggaggtaccgttgaatgggaccctctcgctcagttgcgtagcttgtagtaggttcccgaatttcagcatcttgtactggttagggaacggtagttttatcgaacatctgcccggtagactgtgggaaggcagtaccagccgggagcgagggagcactggtacccaactctgtaaagctcttgtcctggagcagcttacaccggctctgcattcgaccaacttcagctgcgttctggtagaccccgaacaggtggtgcagcgccatgttgtcctcgctcagctgtgggctggtctgcgagccacactcccacccactcaggaggccctgccatccagccactcttctcctcagcaacagggctag

SEQ ID NO: 32213 - DNA, 585 bp, Artificial Sequence
  derived and/or modified sequence
atgaccatgcgacacaactggacccccgacctttcccccctatgggtcctgctgttgtgtgcacatgttgtcaccctactcgtgcgagctacccccgtgtcccaaacaacgactgccgccactgccagcgtacgttccacgaaagatccctgtccctctcagcctcccgttttcccggccgctaaacaatgcccagctctcgaggtgacatggcctgaggtcgaagtcccgctgaacggcactcttagtctttcttgtgtggcgtgctctagattcccgaatttttcaattctttactggctggggaatggatcattcatcgaacacctgcctgggagactgtgggagggcagcacatcccgggagaggggctccactggaacacagctgtgtaaggccctagtcctggaacaactgaccccagcgctacacagtactaacttttcctgtgtccttgtcgatcctgaacaagtggtgcaaagacacgtcgtattagcacagttatgggccggattgcgtgctaccctcccgccgacccaagaggcactcccatctagccattctagtcctcagcagcaaggctag

SEQ ID NO: 32214 - DNA, 585 bp, Artificial Sequence
  derived and/or modified sequence
atgaccatgagacataattggacacccgacctttctcccctatgggtgctattgctatgtgcccacgtagtgactctgttggtgagagcaactcctgtctcccagactaccactgcagctaccgctagcgtcagaagcactaaagatccatgccctagtcagcctcctgtttttccagccgccaagcagtgtcccgctctagaggttacttggccggaagtagaggtgcccctgaacggcacactgagccttagttgtgtagcttgtagcagatttccgaacttttcaattctgtactggctcgggaacggatccttcatagaacatttaccgggccggctgtgggagggctctaccagtagggaaaggggatctacaggaactcaattatgcaaagccttggtcttggagcagctcacacctgcactgcactcaaccaatttctcatgtgttctcgtagaccctgaacaggttgtgcagagacacgtcgtgttagctcagctgtgggctggacttcgcgcaacccttcctcctacacaagaggcactgcccagttctcatagttccccccagcagcaaggatag

SEQ ID NO: 32215 - DNA, 585 bp, Artificial Sequence
  derived and/or modified sequence
atgaccatgcgccataactggactcccgatctgagcccgctttgggtgctcctactatgcgcccacgttgtaacacttctggtgagggccactccggtgtcacaaactactactgccgccaccgccagcgtgaggtctacgaaagatccatgtccttcacaaccccctgtgttccctgccgccaagcagtgcccagccctagaagtcacatggcccgaggtggaggtccccctgaacgggacgctttctctcagctgcgtcgcttgtagccgattccccaatttttctatcctatactggttaggaaatggttccttcattgagcatttgcccggaagattgtgggaaggctctactagtcgtgaacgtggctctaccggtacacaactgtgcaaagcactcgtactcgaacagctcacccccgcattacattcaactaacttcagctgtgtgcttgttgaccccgaacaagttgttcagaggcacgtcgttttggcccagctatgggctggcttaagggcaacactgcccccaacacaggaagcactgccctcatctcactcctcaccgcagcaacaaggatag

SEQ ID NO: 32216 - DNA, 585 bp, Artificial Sequence
  derived and/or modified sequence
atgacaatgcgccacaattggacaccagaccttagccctctatgggtgctgctcctctgcgctcatgttgtgacactgctcgtacgggcgactcctgtatcccagacaacaaccgccgctaccgccagcgtaagatctacaaaagacccttgtccttcacagccgcctgtgttccccgccgccaaacagtgcccagcactagaggtaacatggcccgaggtggaggtgccacttaacggcacactgagtctatcttgcgtggcatgcagccgcttccctaacttcagcatcctttactggctgggcaatggcagctttatcgagcatctacccgggagattgtgggaagggtccacttcaagggaacgaggctctaccgggacccaattgtgcaaggcactcgtacttgagcagctgacgccagcgctgcattcaactaactttagttgtgtattggttgacccggaacaggtcgtgcagagacacgtcgtcctggctcagctgtgggcgggactgcgggctacattacccccaactcaggaagccttgcctagctcacattcttctccccagcaacaaggatag

SEQ ID NO: 32217 - DNA, 585 bp, Artificial Sequence
  derived and/or modified sequence
atgacaatgagacataattggacccccgatctgtctcctttgtgggtactgttgctgtgtgcacatgtggtaactctacttgtccgcgcgactcccgtgtcacagactactaccgcagctacagccagcgtacgctctactaaggacccttgcccttcccaacctccagtatttccagcagctaagcaatgtcctgccctcgaagtcacctggcccgaagttgaggttccattaaatggcacccttagtttatcatgcgtagcttgttcacgattcccaaacttttccattctctactggttaggtaacggctccttcatagagcatctccccggccgactgtgggaggggtccacatctagggagaggggcagtacaggaacccaactgtgcaaggctttagtgctggagcagcttacccctgcccttcactccacaaactttagttgcgtgcttgtcgatccagagcaagtggtgcagagacacgtggttctcgcacaactttgggccggcctgcgagcaactctgccgccaacccaggaggccctcccctcaagccatagctcccctcaacagcaaggatag

SEQ ID NO: 32218 - DNA, 585 bp, Artificial Sequence
  derived and/or modified sequence
atgacaatgaggcacaactggacacccgacctgagccccttatgggttttactgctgtgcgctcacgtggtaacccttctcgtccgcgcaacacccgtgagtcagaccaccaccgccgctacagcgtctgtccggagcacaaaagacccgtgtccaagtcagccaccagttttcccagcagccaaacagtgccccgctttggaagttacatggcctgaggtggaggtccctcttaacggcacactttccttgagctgcgttgcttgtagtcggttcccgaacttcagcattttgtactggttaggcaacggtagcttcatcgaacaccttcccggccgcctttgggaggggagtaccagccgcgaacgcgggagcactggaactcaactatgcaaggccctcgtgctggaacagctcactcctgctctgcactccactaacttctcctgcgtgctcgtggaccctgaacaagtggtgcaaagacatgttgtgctcgcccagctctgggctggattacgcgcaacactgcctcccacacaggaagccctgccctcgtcccactcttccccccagcagcaaggctag

SEQ ID NO: 32219 - DNA, 585 bp, Artificial Sequence
  derived and/or modified sequence
atgactatgcgtcacaactggactcccgatctttcacccttgtgggtcctgctgctgtgtgctcatgtcgtcacattactagtgagagcaactcccgtttcccagactaccacagctgccactgcaagcgtaaggagtactaaagacccctgcccatcccaacctccagtgtttcccgctgcaaagcaatgtccagctttggaagtgacttggcccgaggtcgaggtcccacttaatggaactctcagcctaagttgtgtggcatgttcccgcttccctaatttttccattttatattggctgggtaacgggtcttttatcgagcacttgccagggcgattgtgggaaggctctacgtctcgcgagcggggctctactgggactcaactgtgtaaggcactggtcttggagcagcttacaccagctttgcactcaactaacttctcctgtgtccttgtcgaccccgaacaggtagtacagcgacatgtcgtccttgctcaactgtgggcagggctgcgggctactcttccccctacacaagaagcgctcccaagctctcattcatctcctcagcagcagggctag

SEQ ID NO: 32220 - DNA, 585 bp, Artificial Sequence
  derived and/or modified sequence
atgaccatgcgccacaactggacccctgatctctctcctctgtgggtcctactcttgtgcgctcacgtggtgaccctgctggtcagagccacacctgtgagccaaacgactactgctgctacagcctccgtccggtccaccaaagatccctgtccgtctcagccacctgttttcccagccgccaagcaatgccctgccctagaagtcacatggccagaggtcgaagtccctcttaatggaaccctgagcctatcctgcgtagcctgttcccggtttccaaactttagcattctttattggctcgggaacggatccttcatagaacatttaccgggccggctgtgggagggctctaccagtagggaaaggggatctacaggaactcaattatgcaaagccttggtcttggagcagctcacacctgcactgcactcaaccaatttctcatgtgttctcgtagaccctgaacaggttgtgcagagacacgtcgtgttagctcagctgtgggctggacttcgcgcaacccttcctcctacacaagaggcactgcccagttctcatagttccccccagcagcaaggatag

SEQ ID NO: 32221 - DNA, 585 bp, Artificial Sequence
  derived and/or modified sequence
atgactatgagacataactggacaccagatctgagccctctgtgggtcctgctgctgtgcgcccacgtcgtcaccctcctcgtgcgagccacccctgtgagccagaccaccaccgccgcaaccgcctcagtccgttctaccaaagacccatgcccttcacaacctccagtttttccagctgctaaacagtgccccgctcttgaggtgacttggccagaagtagaagtgccactgaacggcacccttagtctgtcttgcgttgcctgtagcaggttccccaatttttctatcctatactggttaggaaatggttccttcattgagcatttgcccggaagattgtgggaaggctctactagtcgtgaacgtggctctaccggtacacaactgtgcaaagcactcgtactcgaacagctcacccccgcattacattcaactaacttcagctgtgtgcttgttgaccccgaacaagttgttcagaggcacgtcgttttggcccagctatgggctggcttaagggcaacactgcccccaacacaggaagcactgccctcatctcactcctcaccgcagcaacaaggatag

SEQ ID NO: 32222 - DNA, 585 bp, Artificial Sequence
  derived and/or modified sequence
atgaccatgcgacacaattggacccctgacttaagtcccttgtgggtgctccttttgtgcgcacatgtggtgaccctcctggttcgagctacccctgtgagtcagacaactaccgccgctaccgcatctgtgagatccaccaaggatccctgccctagccagccaccagtgttcccggccgctaagcaatgtcctgccctggaggtaacatggccagaagtagaagtcccgctgaacggcaccctgtcactgtcttgcgttgcctgttctcgtttccctaatttctctattctgtactggctcggtaacggaagcttcatcgaacatttgcccggacggctctgggagggatctacatcccgggaacgtggaagcacaggaacacagttatgtaaggcactggttctggaacagctaacacctgccctgcactccaccaacttttcttgcgtgttagtcgatcccgaacaggtcgtgcagcggcacgtcgtgcttgctcagctttgggccggcctacgcgccacactccccccgactcaagaagccctgccgtctagccattcgagcccccaacagcaggggtag

SEQ ID NO: 32223 - DNA, 585 bp, Artificial Sequence
  derived and/or modified sequence
atgacaatgagacataattggacccccgatctgtctcctttgtgggtactgttgctgtgtgcacatgtggtaactctacttgtccgcgcgactcccgtgtcacagactactaccgcagctacagccagcgtacgctctactaaggacccttgcccttcccaacctccagtatttccagcagctaagcaatgtcctgccctcgaagtcacctggcccgaagttgaggttccattaaatggcacccttagtttatcatgcgtagcttgttcacgattcccaaacttttccattctctactggctcggaaatggctcattcattgaacatctacccggacgtctgtgggaggggagtacaagtagggaacggggtagtacaggaactcagctctgcaaggccctggtgctggagcaactgactcccgcactacactccaccaacttttcatgtgtacttgtggaccccgagcaagtcgtgcagaggcacgtggtactcgcacagctctgggccggccttcgtgcgaccctgcctcccacgcaggaagccctcccaagctctcattcttcaccacaacaacagggttag

SEQ ID NO: 32224 - DNA, 585 bp, Artificial Sequence
  derived and/or modified sequence
atgacaatgagacataattggacaccggatcttagcccattatgggtgctgctgttgtgcgcacacgtcgttacactactagttagagccacaccagtctcccagaccacgaccgccgctaccgcgtcagtccggagcaccaaggacccatgtccatcacagcctcctgttttcccagctgcaaagcaatgtcccgcattagaagtcacctggcctgaagtcgaggtccccctgaatggaaccttgagcttgtcctgtgtcgcctgttctcgctttccgaacttttccatactttactggttaggcaacggaagcttcatcgagcacctccctggacggttatgggaaggctccacgagccgagaaagaggcagtactggcacccagttgtgtaaggcgctggttctagaacagttgacacccgctcttcactctaccaatttctcttgcgtccttgtcgaccctgagcaggttgtacagcgacatgttgtcctcgcccagctctgggccgggctcagggccaccttaccccccacccaggaggcactgccaagctcacattcaagcccacagcagcaaggatag

SEQ ID NO: 32225 - DNA, 1201 bp, Artificial Sequence
  derived and/or modified sequence
atcctgcccttcccagaagcagctctggtgctgaagagagcactgcctccctgtgtgactgggtgagtccatattctctctttgggtctcaattttgccttccctaatgaaggggtaagattggactaggtaagcatcttacaaccatttgtggtcatgagagctggggtggggaaggattgtcacttgacccccccagctctgtttctaagtgctgaaagagctccaggctatgctacgggaggagaagccagctactgaggaaaagccagctactgagaaaaagcgggagtggtttaccattctcctcccccacctttcaccagagaagaggacgttgtcacagataaagagccaggctcaccagctcctgacgcatgcatcatgaccatgagacacaactggacaccagacctcagccctttgtgggtcctgctcctgtgtgcccacgtcgtcactctcctggtcagagccacacctgtctcgcagaccaccacagctgccactgcctcagttagaagcacaaaggacccctgcccctcccagcccccagtgttcccagcagctaagcagtgtccagcattggaagtgacctggccagaggtggaagtgccactgaatggaacgctgagcttatcctgtgtggcctgcagccgcttccccaacttcagcatcctctactggctgggcaatggttccttcattgagcacctcccaggccgactgtgggaggggagcaccagccgggaacgtgggagcacaggtacgcagctgtgcaaggccttggtgctggagcagctgacccctgccctgcacagcaccaacttctcctgtgtgctcgtggaccctgaacaggttgtccagcgtcacgtcgtcctggcccagctctgggctgggctgagggcaaccttgccccccacccaagaagccctgccctccagccacagcagtccacagcagcagggttaagactcagcacagggccagcagcagcacaaccttgaccagagcttgggtcctacctgtctacctggagtgaacagtccctgactgcctgcttcagttccactcccaggaactttgcctgtcccacgagggagtatgggagagagggactgccacacagaagctgaagacaacacctgcttcaggggaacacaggcgcttgaaaaagaaaagagagaacagcccataatgctcc

SEQ ID NO: 32226 - DNA, 1354 bp, Artificial Sequence
  derived and/or modified sequence
aagcagctctggtgctgaagagagcactgcctccctgtgtgactggagaagaggacgttgtcacagataaagagccaggctcaccagctcctgacgcatgcatcatgaccatgagacacaactggacaccagacctcagccctttgtgggtcctgctcctgtgtgcccacgtcgtcactctcctggtcagagccacacctgtctcgcagaccaccacagctgccactgcctcagttagaagcacaaaggacccctgcccctcccagcccccagtgttcccagcagctaagcagtgtccagcattggaagtgacctggccagaggtggaagtgccactgaatggaacgctgagcttatcctgtgtggcctgcagccgcttccccaacttcagcatcctctactggctgggcaatggttccttcattgagcacctcccaggccgactgtgggaggggagcaccagccgggaacgtgggagcacaggtacgcagctgtgcaaggccttggtgctggagcagctgacccctgccctgcacagcaccaacttctcctgtgtgctcgtggaccctgaacaggttgtccagcgtcacgtcgtcctggcccagctctgggctgggctgagggcaaccttgccccccacccaagaagccctgccctccagccacagcagtccacagcagcagggttaagactcagcacagggccagcagcagcacaaccttgaccagagcttgggtcctacctgtctacctggagtgaacagtccctgactgcctgtaggctgcgtggatgcgcaacacaccccctccttctctgctttgggtcccttctctcaccaaattcaaactccattcccacctacctagaaaatcacagcctccttataatgcctcctcctcctgccattctctctccacctatccattagccttcctaacgtcctactcctcacactgctctactgctcagaaaccaccaagactgttgatgccttagccttgcactccagggccctacctgcatttcccacatgactttctggaagcctcccaactattcttgcttttcccagacagctcccactcccatgtctctgctcatttagtcccgtcttcctcaccgccccagcaggggaacgctcaagcctggttgaaatgctgcctcttcagtgaagtcatcctctttcagctctggccgcattctgcagacttcctatcttcgtgctgtatgttttttttttcccccttcactctaatggactgttccagggaagggatgggggcagcagctgcttcggatccacactgtatctgtgtcatccccacatgggtcctcataaaggattattcaatgg

SEQ ID NO: 32227 - DNA, 585 bp, Artificial Sequence
  derived and/or modified sequence
atgaccatgagacacaactggacccccgacctgagccccctgtgggtgctgctgctgtgcgcccacgtggtgaccctgctggtgagagccacccccgtgagccagaccaccaccgccgccaccgccagcgtgagaagcaccaaggacccctgccccagccagccccccgtgttccccgccgccaagcagtgccccgccctggaggtgacctggcccgaggtggaggtgcccctgaacggcaccctgagcctgagctgcgtggcctgcagcagattccccaacttcagcatcctgtactggctgggcaacggcagcttcatcgagcacctgcccggcagactgtgggagggcagcaccagcagagagagaggcagcaccggcacccagctgtgcaaggccctggtgctggagcagctgacccccgccctgcacagcaccaacttcagctgcgtgctggtggaccccgagcaggtggtgcagagacacgtggtgctggcccagctgtgggccggcctgagagccaccctgccccccacccaggaggccctgcccagcagccacagcagcccccagcagcagggctag

SEQ ID NO: 32228 - DNA, 585 bp, Artificial Sequence
  derived and/or modified sequence
atgacgatgcgacacaattggacaccagatctctctccactctgggtgttactactctgcgcccacgtggtgacccttcttgtgagggccacccccgtttcacagacaactaccgccgctactgcgtccgtgcggagtaccaaagacccctgccctagtcagcctcccgttttcccggcagcaaagcagtgcccagcactggaagtgacctggccagaagtcgaagtgcccctgaatgggactctgtccctcagttgcgtggcttgttcccggtttcccaatttcagcatcttgtactggcttggtaacggatcatttatcgagcatcttccaggacggttgtgggaaggatcaacaagccgagaacgtggctcaaccgggacccaactgtgtaaggctttggtgctggagcagcttactccagctttgcactctacaaacttctcttgcgtactggttgatccagagcaagtcgttcagagacacgttgtgctggcgcagttatgggcagggctcagagcaactctgccccccactcaggaggccctcccctcttcccactcgtcacctcagcagcagggttag

SEQ ID NO: 32229 - DNA, 1606 bp, Artificial Sequence
  derived and/or modified sequence
tttcctgtggtgggttcacacgcagctagacacagctaacttgagtcttggagctcctagagggaagcttctggaaaggaaggctcttcaggacctcttaggagccagtgcctaggaaagttgtccccttgaatgtcagtgtgaaggtgaaggaggaagcagatgcctgttcatatggaaacaaagacctggctgtgaagaggggaggcggacaccaaagtcctgacacttgggcgggacagaattgatctaagcagctctggtgctgaagagagcactgcctccctgtgtgactggagaagaggacgttgtcacagataaagagccaggctcaccagctcctgacgcatgcatcatgaccatgagacacaactggacaccagacctcagccctttgtgggtcctgctcctgtgtgcccacgtcgtcactctcctggtcagagccacacctgtctcgcagaccaccacagctgccactgcctcagttagaagcacaaaggacccctgcccctcccagcccccagtgttcccagcagctaagcagtgtccagcattggaagtgacctggccagaggtggaagtgccactgaatggaacgctgagcttatcctgtgtggcctgcagccgcttccccaacttcagcatcctctactggctgggcaatggttccttcattgagcacctcccaggccgactgtgggaggggagcaccagccgggaacgtgggagcacaggtacgcagctgtgcaaggccttggtgctggagcagctgacccctgccctgcacagcaccaacttctcctgtgtgctcgtggaccctgaacaggttgtccagcgtcacgtcgtcctggcccagctctgggctgggctgagggcaaccttgccccccacccaagaagccctgccctccagccacagcagtccacagcagcagggttaagactcagcacagggccagcagcagcacaaccttgaccagagcttgggtcctacctgtctacctggagtgaacagtccctgactgcctgtaggctgcgtggatgcgcaacacaccccctccttctctgctttgggtcccttctctcaccaaattcaaactccattcccacctacctagaaaatcacagcctccttataatgcctcctcctcctgccattctctctccacctatccattagccttcctaacgtcctactcctcacactgctctactgctcagaaaccaccaagactgttgatgccttagccttgcactccagggccctacctgcatttcccacatgactttctggaagcctcccaactattcttgcttttcccagacagctcccactcccatgtctctgctcatttagtcccgtcttcctcaccgccccagcaggggaacgctcaagcctggttgaaatgctgcctcttcagtgaagtcatcctctttcagctctggccgcattctgcagacttcctatcttcgtgctgtatgttttttttttcccccttcactctaatggactgttccagggaagggatgggggcagcagctgcttcggatccacactgtatctgtgtcatccccacatgggtcctcataaaggattattcaatgga

SEQ ID NO: 32230 - DNA, 585 bp, Artificial Sequence
  derived and/or modified sequence
atgaccatgagacacaattggaccccggacttaagtccgttgtgggtcctgctcctttgtgctcatgtcgtgaccctgcttgttagagccacacccgtctctcagaccaccacggccgctaccgcaagcgtaagaagcacgaaggacccctgtccaagccaaccgccggtgtttcctgcggcaaaacagtgtcccgccttagaggtgacatggcccgaggtcgaggtgccccttaacggtaccctttccctatcttgtgtggcctgctctcgttttcctaatttctctattctgtattggcttggcaatggatctttcatcgagcatctacctggacgcctgtgggaaggaagcacgtctagggaaaggggatcaacaggtacacagctgtgtaaagcactggtgctggaacagttgacacccgcattacattccactaacttttcgtgtgtgttggttgacccggagcaagtcgtgcaacgccatgtggttctcgcacaactttgggccggtttaagggcgacccttccaccaactcaggaggctctgccatcctcacatagcagccctcagcagcagggctag

SEQ ID NO: 32231 - DNA, 585 bp, Artificial Sequence
  derived and/or modified sequence
atgacaatgaggcacaattggactcctgatttgagtccgctttgggtgctcctcctgtgcgcccacgtcgtcacactgctggtgagagccacaccagtctcccaaacaaccactgccgccaccgctagtgtcagatctaccaaagacccatgcccatctcagccacctgtgttcccggccgccaagcaatgcccagcactggaggtcacatggcccgaagtagaagtgccacttaacggcacactctcgcttagctgtgtggcctgtagcagatttcctaatttcagcatactttactggctcgggaatggatctttcatcgaacatctgccaggacgcctgtgggagggatcaacgagcagggaacgtggttcgaccggcacacagctgtgcaaggctctggttctggaacaactgactccggccttgcatagcactaacttttcatgtgtgttggtggatcctgagcaggtggtgcagaggcatgtggtgttagcacaactctgggctgggctgagggccaccttaccccctacacaggaggccttaccttcgtctcactcctccccgcagcaacaaggatag

SEQ ID NO: 32232 - DNA, 585 bp, Artificial Sequence
  derived and/or modified sequence
atgaccatgcgccacaattggacgcccgacctgagcccactttgggtccttcttctgtgtgcccacgtcgttaccctgctggttagagccacacctgtaagtcagactaccacagcggccacagccagcgtccggagtaccaaagatccctgcccttcccagccccctgtgtttccagccgcgaaacagtgtcctgcgctagaggtgacctggcccgaagtagaggtcccacttaacggaactctaagcctgtcatgtgttgcctgcagccggttcccgaattttagtattctttattggctgggtaacggcagctttatcgagcaccttcccgggcgactttgggagggatccacgagccgggagaggggctctactggcacacaactgtgtaaggctctggttctggagcaactgactccggctctccatagcacaaatttctcatgtgtgttagtcgacccggagcaggtggtccaacgacatgtcgtgttggcccaactgtgggcaggtctaagagcaacgttgccccctactcaggaagcattgccctcatcccattctagtccccagcaacagggatag

SEQ ID NO: 32233 - DNA, 585 bp, Artificial Sequence
  derived and/or modified sequence
atgaccatgcgccataattggacaccagacctgagtccattatgggtgctactcctgtgcgctcacgtcgtgaccctccttgtgcgcgccacacctgtgtcccagactacaacggccgccacagcctctgtacggagcaccaaagacccttgcccctcccagcctccagtgttcccagcagctaagcaatgcccagcactggaagtgacttggcctgaagtcgaggtcccactgaacggtacactctccctgtcgtgtgtggcatgctctcggttccccaatttctccatcctatattggttagggaatggtagcttcatcgaacacctgcccggcagattatgggagggctctaccagcagggagagaggatctacgggaactcaactgtgcaaagccctggtgctagagcagctaacccctgctctgcactctacaaacttttcttgcgtgctggtggatcctgagcaggtggtacagcgacatgttgtgctggcccagctatgggccggcctgagggctacactgccccccacccaggaagccctcccatccagtcacagctccccacaacagcaaggatag

SEQ ID NO: 32234 - DNA, 585 bp, Artificial Sequence
  derived and/or modified sequence
atgacaatgaggcataattggacaccagacttatcaccactctgggttttgctcctgtgtgcacacgtggtcaccctgctagtccgtgctactccggtgtcacagaccacaaccgccgctacagcctccgttagatctactaaagatccatgtccttctcagcctcccgtgtttcctgcagccaagcagtgtcccgcactcgaggtgacttggcccgaagtggaagtgcctcttaacggcacgctcagtcttagctgcgttgcctgtagtcgttttccgaatttctccattttatattggctgggaaacggctcattcatcgaacatttaccaggccgcctctgggaggggtccacctctcgggaacgagggtccactgggacccagctctgcaaagctctcgtgctggaacaattgactcctgcactgcactccacaaacttttcctgtgtcctggtagatcctgaacaggtcgtgcaacgccacgtggttctggcccagttatgggctggcctcagagccacactcccacctactcaggaagccttgccaagttcccactcttcaccgcagcagcagggttag

SEQ ID NO: 32235 - DNA, 585 bp, Artificial Sequence
  derived and/or modified sequence
atgaccatgaggcacaactggaccccagacctgagccccctgtgggtgctgctgctgtgtgcccacgtggtgaccctgctggtgcgggccacccctgtgtcccagaccaccacagctgccacagcctctgtgcgcagcaccaaggacccctgccccagccagccccctgtgtttcctgctgccaagcagtgcccagccctggaggtgacctggccagaggtggaggtgcccctgaatggcaccctgagcctgagctgtgtggcctgcagccgcttccccaacttcagcatcctgtactggctgggcaatggcagcttcatcgagcacctgcccggccgcctgtgggagggcagcaccagccgggagcggggcagcacaggcacccagctgtgcaaggccctggtgctggagcagctgaccccagccctgcacagcaccaacttcagctgtgtgctggtggaccctgagcaggtggtgcagagacatgtggtgctggcccagctgtgggccggcctgcgggccaccctgccccccacccaggaggccctgcccagcagccacagcagcccccagcagcagggctag

SEQ ID NO: 32236 - DNA, 585 bp, Artificial Sequence
  derived and/or modified sequence
atgaccatgcggcacaactggacccccgacctgagccccctgtgggtccttttgctctgcgcacatgtggtcaccctgctggttagggctacacccgtttctcagactaccacagccgctactgctagcgtccgatcgacaaaggatccgtgtcctagccagccccccgtcttccctgccgccaaacagtgtccagcgctggaagtgacgtggccagaagtggaggtcccgttaaacggaacactaagcctgtcttgcgtggcatgcagtagattcccaaacttctccattctctattggctgggaaacggctctttcatcgaacatcttcccggccgcctttgggagggatctacatcaagggaaaggggtagcaccgggactcaactttgtaaggcacttgttttggagcaattgactccggcactccactccactaatttctcctgtgtactggtggaccccgaacaggtcgtccagaggcatgtagtgcttgctcaactctgggctgggctcagggctacactcccgccaacgcaagaggccctgcctagctctcactcctcaccgcagcagcaaggttag

SEQ ID NO: 32237 - DNA, 585 bp, Artificial Sequence
  derived and/or modified sequence
atgaccatgcggcacaactggacccccgacctgagccccctgtgggttctgctgctgtgcgcacacgtggtgaccttgctggtaagagctacacccgtgtctcagaccacaacggcagctactgctagtgttcgcagcacaaaagacccatgccctagtcaacccccggtttttcccgccgctaagcagtgtcccgcattagaagttacttggccagaggtggaagttccgctcaatggcacactcagtctgtcctgcgtggcctgctctagattcccaaactttagtatactctattggctggggaatggctccttcatcgagcaccttcccgggagactgtgggaaggctcaacttcgcgagagcgcggctctacaggcacccagctctgtaaggcactcgtactggaacagctgactcctgctttacatagtaccaatttcagctgtgtgcttgtagatcctgagcaagtggtccagagacacgtggtgctggcacagctttgggccggcctgcgcgctaccctcccacctactcaggaagccttaccgagctcccacagcagcccccagcagcaagggtag

SEQ ID NO: 32238 - DNA, 585 bp, Artificial Sequence
  derived and/or modified sequence
atgaccatgcggcacaactggacccccgacctgagccccctgtgggtgctgctgctctgtgcccacgtggtgacattattggtgcgcgccaccccggtatctcagaccaccactgcggccaccgcgagcgtccggagcaccaaagatccatgcccctcacagcctcctgtgtttccagctgcaaagcagtgcccagccctcgaggtgacatggcccgaagttgaagtgcccctgaatgggacactatcacttagttgcgtcgcttgttctcggtttccaaatttctccatcctttattggcttgggaacggttccttcattgaacacttaccagggcggctctgggagggatctacgagtcgcgagcggggcagcactggaacccaactctgcaaggcactggtgcttgagcagcttactccagctctccatagcacaaacttttcttgtgtactggtggatccagaacaagtggttcagcggcacgtcgtgctggcacagctttgggccggactacgcgcaactctgccaccgactcaggaagctttaccatcgagccactcctctccccagcagcaaggttag

SEQ ID NO: 32239 - DNA, 585 bp, Artificial Sequence
  derived and/or modified sequence
atgaccatgcggcacaactggacccccgacctgagccccctgtgggtgctgctgctctgcgcacatgtggtgaccctgctagtgcgtgccacccccgtgtcacagaccactacagctgctactgccagcgtccgctcaaccaaagacccgtgcccttcacagccacccgtcttcccagctgccaagcaatgtcccgccctggaggtgacgtggcccgaggtggaggttccccttaatggtactctcagcttgagctgcgtcgcttgcagtcgtttcccaaatttcagtatcttgtactggttgggtaacggatcctttatcgagcacctgcctggacggctttgggagggatctacatcgcgagagagaggctcaaccggtactcagctgtgtaaggcgttagtgcttgaacagctgacaccagcacttcattcaacaaattttagttgtgtgctggtggacccggagcaagtggtgcagaggcacgtggtactcgcacagctgtgggccggcctgcgggctacgctgcccccaacccaggaggcacttcctagcagccactcttctccacaacaacaaggctag

SEQ ID NO: 32240 - DNA, 585 bp, Artificial Sequence
  derived and/or modified sequence
atgaccatgcggcacaactggacccccgacctgagccccctgtgggtacttttgctctgtgcacatgtggtgacactgcttgtacgggccactcctgtctcgcaaaccacgactgcagcgactgcctctgtgcggtctacgaaagacccttgtccgtcccaaccgccggtgttccctgccgccaagcaatgcccggccctggaagttacatggccagaggtggaggtgccactgaatggcactttgtccctgtcttgtgtggcatgtagtagattccccaactttagcattttatattggttaggaaatgggtctttcatcgagcacctccctggaagattgtgggagggctctacaagccgagaacgggggtcaacagggactcagctgtgtaaagcgctggtgctggaacagcttacaccagcactgcacagtactaatttctcatgtgtactggtagacccggaacaggtcgtgcagcgacacgtggtgttagctcaactgtgggcggggctgcgagccactttacccccaactcaggaggccctgcccagttcccattcctctccccagcagcagggttag

SEQ ID NO: 32241 - DNA, 1788 bp, Artificial Sequence
  derived and/or modified sequence
acctcagacatgcagctcctgtccacacttaatatatgcatgcattggatcacccagccctggtctttctgcctccatggataactgcatgaccctgagagaaaacctccttagatttagcatcctaggttcctcacacgcctcaccctgaatcctggccctcccgcagccccagcgccatttgtcccatcagtgacaagattcatattctgatgtagactctgttgccagagccagtgttgagccagtccgcctcttccccgggaagtgcctgcccttccctcctgttagggttggctctcgagcttgtgtgccagttcctgggttggccgtgagagttctacagacaaggaggaagtgctctcggtgtatttcctgtggtgggttcacacgcagctagacacagctaacttgagtcttggagctcctagagggaagcttctggaaaggaaggctcttcaggacctcttaggagccagagaagaggacgttgtcacagataaagagccaggctcaccagctcctgacgcatgcatcatgaccatgagacacaactggacaccagacctcagccctttgtgggtcctgctcctgtgtgcccacgtcgtcactctcctggtcagagccacacctgtctcgcagaccaccacagctgccactgcctcagttagaagcacaaaggacccctgcccctcccagcccccagtgttcccagcagctaagcagtgtccagcattggaagtgacctggccagaggtggaagtgccactgaatggaacgctgagcttatcctgtgtggcctgcagccgcttccccaacttcagcatcctctactggctgggcaatggttccttcattgagcacctcccaggccgactgtgggaggggagcaccagccgggaacgtgggagcacaggtacgcagctgtgcaaggccttggtgctggagcagctgacccctgccctgcacagcaccaacttctcctgtgtgctcgtggaccctgaacaggttgtccagcgtcacgtcgtcctggcccagctctgggctgggctgagggcaaccttgccccccacccaagaagccctgccctccagccacagcagtccacagcagcagggttaagactcagcacagggccagcagcagcacaaccttgaccagagcttgggtcctacctgtctacctggagtgaacagtccctgactgcctgtaggctgcgtggatgcgcaacacaccccctccttctctgctttgggtcccttctctcaccaaattcaaactccattcccacctacctagaaaatcacagcctccttataatgcctcctcctcctgccattctctctccacctatccattagccttcctaacgtcctactcctcacactgctctactgctcagaaaccaccaagactgttgatgccttagccttgcactccagggccctacctgcatttcccacatgactttctggaagcctcccaactattcttgcttttcccagacagctcccactcccatgtctctgctcatttagtcccgtcttcctcaccgccccagcaggggaacgctcaagcctggttgaaatgctgcctcttcagtgaagtcatcctctttcagctctggccgcattctgcagacttcctatcttcgtgctgtatgttttttttttcccccttcactctaatggactgttccagggaagggatgggggcagcagctgcttcggatccacactgtatctgtgtcatccccacatgggtcctcataaaggattattcaatgga

SEQ ID NO: 32242 - DNA, 1549 bp, Artificial Sequence
  derived and/or modified sequence
gaggaagtgctctcggtgtatttcctgtggtgggttcacacgcagctagacacagctaacttgagtcttggagctcctagagggaagcttctggaaaggaaggctcttcaggacctcttaggagccagtgtgaaggtgaaggaggaagcagatgcctgttcatatggaaacaaagacctggctgtgaagaggggaggcggacaccaaagtcctgacacttgggcgggacagaattgatctagaagaggacgttgtcacagataaagagccaggctcaccagctcctgacgcatgcatcatgaccatgagacacaactggacaccagacctcagccctttgtgggtcctgctcctgtgtgcccacgtcgtcactctcctggtcagagccacacctgtctcgcagaccaccacagctgccactgcctcagttagaagcacaaaggacccctgcccctcccagcccccagtgttcccagcagctaagcagtgtccagcattggaagtgacctggccagaggtggaagtgccactgaatggaacgctgagcttatcctgtgtggcctgcagccgcttccccaacttcagcatcctctactggctgggcaatggttccttcattgagcacctcccaggccgactgtgggaggggagcaccagccgggaacgtgggagcacaggtacgcagctgtgcaaggccttggtgctggagcagctgacccctgccctgcacagcaccaacttctcctgtgtgctcgtggaccctgaacaggttgtccagcgtcacgtcgtcctggcccagctctgggctgggctgagggcaaccttgccccccacccaagaagccctgccctccagccacagcagtccacagcagcagggttaagactcagcacagggccagcagcagcacaaccttgaccagagcttgggtcctacctgtctacctggagtgaacagtccctgactgcctgtaggctgcgtggatgcgcaacacaccccctccttctctgctttgggtcccttctctcaccaaattcaaactccattcccacctacctagaaaatcacagcctccttataatgcctcctcctcctgccattctctctccacctatccattagccttcctaacgtcctactcctcacactgctctactgctcagaaaccaccaagactgttgatgccttagccttgcactccagggccctacctgcatttcccacatgactttctggaagcctcccaactattcttgcttttcccagacagctcccactcccatgtctctgctcatttagtcccgtcttcctcaccgccccagcaggggaacgctcaagcctggttgaaatgctgcctcttcagtgaagtcatcctctttcagctctggccgcattctgcagacttcctatcttcgtgctgtatgttttttttttcccccttcactctaatggactgttccagggaagggatgggggcagcagctgcttcggatccacactgtatctgtgtcatccccacatgggtcctcataaaggattattcaatgga

SEQ ID NO: 32243 - DNA, 585 bp, Artificial Sequence
  derived and/or modified sequence
atgaccatgcggcacaactggacccccgacctgagccccctgtgggtgctcctgctgtgtgcacatgtggtcacactgctggtaagggccactcctgtctcacagactacaacagccgccacagcgagcgtccgcagcacaaaagacccgtgtcccagccagccccctgtgtttccagctgccaaacaatgtcccgccctcgaggtgacttggcccgaagtagaggttccactcaacggcaccctgagcctctcttgcgtcgcttgctctcgctttcctaatttcagcatcctctactggctgggcaacggcagtttcattgaacaccttccaggcagactctgggagggttcgaccagtcgcgagcgcggttccacgggcactcagctgtgcaaggcactggtgctggagcaactgacgcctgcactgcacagtacaaacttctcttgtgtgcttgtagaccccgagcaggtggtgcagcggcatgtggtgctcgcccagctatgggcagggttgcgggctacattgccccccactcaagaggcactgccaagtagtcattcaagcccccagcagcaaggatag

SEQ ID NO: 32244 - RNA, 585 nt, Artificial Sequence
  derived and/or modified sequence
augaccaugcgacacaacuggacccccgaccuuuccccccuauggguccugcuguugugugcacauguugucacccuacucgugcgagcuacccccgugucccaaacaacgacugccgccacugccagcguacguuccacgaaagaucccugucccucucagccucccguuuucccggccgcuaaacaaugcccagcucucgaggugacauggccugaggucgaagucccgcugaacggcacucuuagucuuucuuguguggcgugcucuagauucccgaauuuuucaauucuuuacuggcuggggaauggaucauucaucgaacaccugccugggagacugugggagggcagcacaucccgggagaggggcuccacuggaacacagcuguguaaggcccuaguccuggaacaacugaccccagcgcuacacaguacuaacuuuuccuguguccuugucgauccugaacaaguggugcaaagacacgucguauuagcacaguuaugggccggauugcgugcuacccucccgccgacccaagaggcacucccaucuagccauucuaguccucagcagcaaggcuag

SEQ ID NO: 32245 - RNA, 585 nt, Artificial Sequence
  derived and/or modified sequence
augaccaugagacauaauuggacacccgaccuuucuccccuaugggugcuauugcuaugugcccacguagugacucuguuggugagagcaacuccugucucccagacuaccacugcagcuaccgcuagcgucagaagcacuaaagauccaugcccuagucagccuccuguuuuuccagccgccaagcagugucccgcucuagagguuacuuggccggaaguagaggugccccugaacggcacacugagccuuaguuguguagcuuguagcagauuuccgaacuuuucaauucuguacuggcucgggaacggauccuucauagaacauuuaccgggccggcugugggagggcucuaccaguagggaaaggggaucuacaggaacucaauuaugcaaagccuuggucuuggagcagcucacaccugcacugcacucaaccaauuucucauguguucucguagacccugaacagguugugcagagacacgucguguuagcucagcugugggcuggacuucgcgcaacccuuccuccuacacaagaggcacugcccaguucucauaguuccccccagcagcaaggauag

SEQ ID NO: 32246 - RNA, 585 nt, Artificial Sequence
  derived and/or modified sequence
augaccaugcgccauaacuggacucccgaucugagcccgcuuugggugcuccuacuaugcgcccacguuguaacacuucuggugagggccacuccggugucacaaacuacuacugccgccaccgccagcgugaggucuacgaaagauccauguccuucacaacccccuguguucccugccgccaagcagugcccagcccuagaagucacauggcccgagguggaggucccccugaacgggacgcuuucucucagcugcgucgcuuguagccgauuccccaauuuuucuauccuauacugguuaggaaaugguuccuucauugagcauuugcccggaagauugugggaaggcucuacuagucgugaacguggcucuaccgguacacaacugugcaaagcacucguacucgaacagcucacccccgcauuacauucaacuaacuucagcugugugcuuguugaccccgaacaaguuguucagaggcacgucguuuuggcccagcuaugggcuggcuuaagggcaacacugcccccaacacaggaagcacugcccucaucucacuccucaccgcagcaacaaggauag

SEQ ID NO: 32247 - RNA, 585 nt, Artificial Sequence
  derived and/or modified sequence
augacaaugcgccacaauuggacaccagaccuuagcccucuaugggugcugcuccucugcgcucauguugugacacugcucguacgggcgacuccuguaucccagacaacaaccgccgcuaccgccagcguaagaucuacaaaagacccuuguccuucacagccgccuguguuccccgccgccaaacagugcccagcacuagagguaacauggcccgagguggaggugccacuuaacggcacacugagucuaucuugcguggcaugcagccgcuucccuaacuucagcauccuuuacuggcugggcaauggcagcuuuaucgagcaucuacccgggagauugugggaaggguccacuucaagggaacgaggcucuaccgggacccaauugugcaaggcacucguacuugagcagcugacgccagcgcugcauucaacuaacuuuaguuguguauugguugacccggaacaggucgugcagagacacgucguccuggcucagcugugggcgggacugcgggcuacauuacccccaacucaggaagccuugccuagcucacauucuucuccccagcaacaaggauag

SEQ ID NO: 32248 - RNA, 585 nt, Artificial Sequence
  derived and/or modified sequence
augacaaugagacauaauuggacccccgaucugucuccuuuguggguacuguugcugugugcacaugugguaacucuacuuguccgcgcgacucccgugucacagacuacuaccgcagcuacagccagcguacgcucuacuaaggacccuugcccuucccaaccuccaguauuuccagcagcuaagcaauguccugcccucgaagucaccuggcccgaaguugagguuccauuaaauggcacccuuaguuuaucaugcguagcuuguucacgauucccaaacuuuuccauucucuacugguuagguaacggcuccuucauagagcaucuccccggccgacugugggagggguccacaucuagggagaggggcaguacaggaacccaacugugcaaggcuuuagugcuggagcagcuuaccccugcccuucacuccacaaacuuuaguugcgugcuugucgauccagagcaaguggugcagagacacgugguucucgcacaacuuugggccggccugcgagcaacucugccgccaacccaggaggcccuccccucaagccauagcuccccucaacagcaaggauag

SEQ ID NO: 32249 - RNA, 585 nt, Artificial Sequence
  derived and/or modified sequence
augacaaugaggcacaacuggacacccgaccugagccccuuauggguuuuacugcugugcgcucacgugguaacccuucucguccgcgcaacacccgugagucagaccaccaccgccgcuacagcgucuguccggagcacaaaagacccguguccaagucagccaccaguuuucccagcagccaaacagugccccgcuuuggaaguuacauggccugagguggaggucccucuuaacggcacacuuuccuugagcugcguugcuuguagucgguucccgaacuucagcauuuuguacugguuaggcaacgguagcuucaucgaacaccuucccggccgccuuugggaggggaguaccagccgcgaacgcgggagcacuggaacucaacuaugcaaggcccucgugcuggaacagcucacuccugcucugcacuccacuaacuucuccugcgugcucguggacccugaacaaguggugcaaagacauguugugcucgcccagcucugggcuggauuacgcgcaacacugccucccacacaggaagcccugcccucgucccacucuuccccccagcagcaaggcuag

SEQ ID NO: 32250 - RNA, 585 nt, Artificial Sequence
  derived and/or modified sequence
augacuaugcgucacaacuggacucccgaucuuucacccuuguggguccugcugcugugugcucaugucgucacauuacuagugagagcaacucccguuucccagacuaccacagcugccacugcaagcguaaggaguacuaaagaccccugcccaucccaaccuccaguguuucccgcugcaaagcaauguccagcuuuggaagugacuuggcccgaggucgaggucccacuuaauggaacucucagccuaaguuguguggcauguucccgcuucccuaauuuuuccauuuuauauuggcuggguaacgggucuuuuaucgagcacuugccagggcgauugugggaaggcucuacgucucgcgagcggggcucuacugggacucaacuguguaaggcacuggucuuggagcagcuuacaccagcuuugcacucaacuaacuucuccuguguccuugucgaccccgaacagguaguacagcgacaugucguccuugcucaacugugggcagggcugcgggcuacucuucccccuacacaagaagcgcucccaagcucucauucaucuccucagcagcagggcuag

SEQ ID NO: 32251 - RNA, 585 nt, Artificial Sequence
  derived and/or modified sequence
augaccaugcgccacaacuggaccccugaucucucuccucuguggguccuacucuugugcgcucacguggugacccugcuggucagagccacaccugugagccaaacgacuacugcugcuacagccuccguccgguccaccaaagaucccuguccgucucagccaccuguuuucccagccgccaagcaaugcccugcccuagaagucacauggccagaggucgaagucccucuuaauggaacccugagccuauccugcguagccuguucccgguuuccaaacuuuagcauucuuuauuggcucgggaacggauccuucauagaacauuuaccgggccggcugugggagggcucuaccaguagggaaaggggaucuacaggaacucaauuaugcaaagccuuggucuuggagcagcucacaccugcacugcacucaaccaauuucucauguguucucguagacccugaacagguugugcagagacacgucguguuagcucagcugugggcuggacuucgcgcaacccuuccuccuacacaagaggcacugcccaguucucauaguuccccccagcagcaaggauag

SEQ ID NO: 32252 - RNA, 585 nt, Artificial Sequence
  derived and/or modified sequence
augacuaugagacauaacuggacaccagaucugagcccucuguggguccugcugcugugcgcccacgucgucacccuccucgugcgagccaccccugugagccagaccaccaccgccgcaaccgccucaguccguucuaccaaagacccaugcccuucacaaccuccaguuuuuccagcugcuaaacagugccccgcucuugaggugacuuggccagaaguagaagugccacugaacggcacccuuagucugucuugcguugccuguagcagguuccccaauuuuucuauccuauacugguuaggaaaugguuccuucauugagcauuugcccggaagauugugggaaggcucuacuagucgugaacguggcucuaccgguacacaacugugcaaagcacucguacucgaacagcucacccccgcauuacauucaacuaacuucagcugugugcuuguugaccccgaacaaguuguucagaggcacgucguuuuggcccagcuaugggcuggcuuaagggcaacacugcccccaacacaggaagcacugcccucaucucacuccucaccgcagcaacaaggauag

SEQ ID NO: 32253 - RNA, 585 nt, Artificial Sequence
  derived and/or modified sequence
augaccaugcgacacaauuggaccccugacuuaagucccuugugggugcuccuuuugugcgcacauguggugacccuccugguucgagcuaccccugugagucagacaacuaccgccgcuaccgcaucugugagauccaccaaggaucccugcccuagccagccaccaguguucccggccgcuaagcaauguccugcccuggagguaacauggccagaaguagaagucccgcugaacggcacccugucacugucuugcguugccuguucucguuucccuaauuucucuauucuguacuggcucgguaacggaagcuucaucgaacauuugcccggacggcucugggagggaucuacaucccgggaacguggaagcacaggaacacaguuauguaaggcacugguucuggaacagcuaacaccugcccugcacuccaccaacuuuucuugcguguuagucgaucccgaacaggucgugcagcggcacgucgugcuugcucagcuuugggccggccuacgcgccacacuccccccgacucaagaagcccugccgucuagccauucgagcccccaacagcagggguag

SEQ ID NO: 32254 - RNA, 585 nt, Artificial Sequence
  derived and/or modified sequence
augacaaugagacauaauuggacccccgaucugucuccuuuguggguacuguugcugugugcacaugugguaacucuacuuguccgcgcgacucccgugucacagacuacuaccgcagcuacagccagcguacgcucuacuaaggacccuugcccuucccaaccuccaguauuuccagcagcuaagcaauguccugcccucgaagucaccuggcccgaaguugagguuccauuaaauggcacccuuaguuuaucaugcguagcuuguucacgauucccaaacuuuuccauucucuacuggcucggaaauggcucauucauugaacaucuacccggacgucugugggaggggaguacaaguagggaacgggguaguacaggaacucagcucugcaaggcccuggugcuggagcaacugacucccgcacuacacuccaccaacuuuucauguguacuuguggaccccgagcaagucgugcagaggcacgugguacucgcacagcucugggccggccuucgugcgacccugccucccacgcaggaagcccucccaagcucucauucuucaccacaacaacaggguuag

SEQ ID NO: 32255 - RNA, 585 nt, Artificial Sequence
  derived and/or modified sequence
augacaaugagacauaauuggacaccggaucuuagcccauuaugggugcugcuguugugcgcacacgucguuacacuacuaguuagagccacaccagucucccagaccacgaccgccgcuaccgcgucaguccggagcaccaaggacccauguccaucacagccuccuguuuucccagcugcaaagcaaugucccgcauuagaagucaccuggccugaagucgaggucccccugaauggaaccuugagcuuguccugugucgccuguucucgcuuuccgaacuuuuccauacuuuacugguuaggcaacggaagcuucaucgagcaccucccuggacgguuaugggaaggcuccacgagccgagaaagaggcaguacuggcacccaguuguguaaggcgcugguucuagaacaguugacacccgcucuucacucuaccaauuucucuugcguccuugucgacccugagcagguuguacagcgacauguuguccucgcccagcucugggccgggcucagggccaccuuaccccccacccaggaggcacugccaagcucacauucaagcccacagcagcaaggauag

SEQ ID NO: 32256 - protein, 368 aa, Artificial Sequence
  derived and/or modified sequence
MSGAPTAGAALMLCAATAVLLSAQGGPVQSKSPRFASWDEMNVLAHGLLQLGQGLREHAERTRSQLSALERRLSACGSACQGTEGSTDLPLAPESRVDPEVLHSLQTQLKAQNSRIQQLFHKVAQQQRHLEKQHLRIQHLQSQFGLLDHKHLDHEVAKPARRKRLPEMAQPVDPAHNVSRLHHGGWTVIQRRHDGSVDFNRPWEAYKAGFGDPHGEFWLGLEKVHSITGDRNSRLAVQLRDWDGNAELLQFSVHLGGEDTAYSLQLTAPVAGQLGATTVPPSGLSVPFSTWDQDHDLRRDKNCAKSLSGGWWFGTCSHSNLNGQYFRSIPQQRQKLKKGIFWKTWRGRYYPLQATTMLIQPMAAEAAS

SEQ ID NO: 32257 - DNA, 1107 bp, Artificial Sequence
  derived and/or modified sequence
atgagtggggcacctaccgccggagccgcacttatgctgtgtgcagcaacagctgtgcttctgtccgctcaggggggtccagtgcagtctaaaagtccgcgctttgcgtcgtgggatgagatgaatgtgctggcccacggactcctgcagttgggccaaggactgcgcgagcatgccgaacggacacgcagtcagctgtccgcacttgaaaggaggttgtctgcctgtggaagtgcctgccagggtactgagggcagtacagatctgccactcgcgccagagagccgcgtggatcctgaggtgctgcatagtctccagacacagctgaaggcccagaattctcgaatccagcagctcttccataaagtggctcaacaacagcgacatttggagaaacagcatctgcgcatccagcatctgcagagccaatttggcttgttagaccacaagcacctggaccacgaagtggccaagcctgccagaaggaagcgactccctgaaatggcccaacctgtggatcccgctcacaacgtgtcaagattgcaccacgggggctggaccgtcattcagagacgccatgacggttcagttgattttaataggccatgggaagcgtataaggccggcttcggggaccctcatggtgaattttggttgggtttggagaaggtgcacagtattacgggtgatcgcaactcacgccttgcagtgcagctcagagattgggacggcaacgccgagcttctgcagtttagcgtacatctaggtggcgaagatactgcttactcactccagctgacagctccagtagcaggccagttgggagctaccaccgtacctccttcgggactttccgtacctttttctacttgggatcaggaccacgatttgagacgtgacaaaaattgtgccaaatccctctccggtggttggtggttcggcacttgctctcattccaatctgaacgggcaatatttcagatcgattccgcagcagaggcaaaagctgaagaagggcatattctggaagacatggagaggtcggtattatcccttacaggcgaccaccatgctcatccagcctatggcagcagaggccgcctcctag

SEQ ID NO: 32258 - DNA, 1107 bp, Artificial Sequence
  derived and/or modified sequence
atgtctggggcccccacagctggagctgccctgatgctgtgtgccgccacagctgtgctgctgagcgcccagggcggccctgtgcagagcaagagccccaggtttgcctcctgggatgagatgaatgtgctggcccacggcctgctgcagctgggccagggcctgcgggagcacgccgagaggaccaggagccagctgagcgccctggagcggcggctgagcgcctgtggcagcgcctgccagggcacagagggcagcacagacctgcccctggcccctgagagccgggtggaccctgaggtgctgcacagcctgcagacccagctgaaggcccagaacagccgcatccagcagctgttccacaaggtggcccagcagcagaggcacctggagaagcagcacctgcgcatccagcacctgcagagccagtttggcctgctggaccacaagcacctggaccacgaggtggccaagccagcccggaggaagaggctgcctgagatggcccagcctgtggaccctgcccacaacgtgtcccggctgcaccacggcggctggacagtcatccagaggagacatgatggctctgtggacttcaaccggccctgggaggcctacaaggccggctttggagacccccacggggagttctggctgggcctggagaaggtgcacagcatcaccggggacaggaacagccggctggccgtgcagctgcgggactgggatggaaatgctgagctgctgcagttctctgtgcacctgggcggggaggacacagcctacagcctgcagctgacagcccctgtggccggccagctgggcgccaccaccgtgccccccagcggcctgtctgtgcccttcagcacctgggaccaggaccatgacctgcggcgggacaagaactgtgccaagagcctgagcggcggctggtggtttggcacctgcagccacagcaacctgaatggccagtacttccgcagcatcccccagcagaggcagaagctgaagaagggcatcttctggaagacctggaggggccgctactaccccctgcaggccaccaccatgctgatccagcccatggctgctgaggccgccagctag

SEQ ID NO: 32259 - DNA, 1107 bp, Artificial Sequence
  derived and/or modified sequence
atgagcggcgcccccaccgccggcgccgccctgatgctgtgcgccgcaacagcagtgctcctgtccgcccaaggcgggcctgtgcaatccaagagtcctcggtttgcctcatgggacgaaatgaatgtactcgcccatggcctgcttcaactgggccaggggctccgcgagcacgctgagcgtactcgctcacagctgagcgcattggaacgtcggctcagcgcctgtggatcggcttgtcagggcactgaaggctccaccgatctcccactcgctcctgagtcccgggtcgacccagaagtgttgcacagcttgcagacgcaattgaaggcacagaactcacggatccagcagctctttcataaagtcgctcaacagcagaggcacctggaaaagcagcatcttaggattcagcatctgcagagccagtttgggttgttagatcacaagcatcttgaccacgaggtggcaaaacccgcccggaggaaaagacttcctgagatggcccagccggtggaccccgctcacaatgtgtcaaggttgcaccatggaggctggacagtgatacaacgtcgccacgacggatcggttgacttcaacaggccttgggaggcctataaagccggctttggtgaccctcatggagagttctggctgggcctggaaaaggtccatagtatcaccggagatcggaatagcagactggcggttcaactcagggattgggatgggaacgctgagttattgcagttttccgtgcacttggggggcgaggacacagcctacagcctccagcttacagcccccgtcgctgggcaattaggtgcaaccaccgttcctccaagtgggctctctgtcccattttccacctgggatcaagatcacgacttgcgtcgcgataagaactgcgccaagtccctgagcggtgggtggtggttcggcacctgcagccacagcaacttgaacgggcagtacttccggagcatacctcagcagcgccagaaacttaagaaaggaatattctggaaaacctggagagggagatactatccccttcaggctacaacaatgcttattcagcctatggccgctgaggccgcctcttag

SEQ ID NO: 32260 - DNA, 1107 bp, Artificial Sequence
  derived and/or modified sequence
atgtctggcgctcctaccgccggagcggctttaatgctgtgcgcagccacagcagtcctgctgtccgcccaggggggtcccgtccagagcaagtctccgagattcgcctcatgggacgagatgaacgttctcgcccatggtctcctgcaattgggacaggggcttcgggagcatgcagaacggacccgatctcagctgtccgccctggaacggagactgagcgcctgtgggtcagcctgtcaagggactgagggatcgactgatctgcctctggccccagagagccgagtggaccccgaggtgctgcacagtcttcagacccagctcaaggcccagaattcacgcattcagcagctctttcataaggtggcccagcagcaaaggcatctcgagaaacagcacttgcgcatacaacaccttcagtctcagttcggccttctcgatcacaagcaccttgatcacgaggtggctaagcctgcgcgtcgcaaacgactgcctgaaatggcccagccggtggacccagctcacaatgtgtctcgacttcaccatggcggttggacggtgatccagaggagacacgacggctcagtagacttcaaccgtccctgggaagcatacaaggccggtttcggcgatccacacggggaattttggctgggcctggagaaagtacactccatcaccggagaccgcaactcacggttggctgttcaacttagagactgggacgggaatgcagagctcttgcaattctctgtccacctgggaggcgaggacacagcctactccttacagctcactgcgccagtggcaggtcaactgggggcaactaccgttccaccaagcggtctgagcgtgccgtttagtacatgggaccaggatcacgacctgagacgagataagaattgcgccaagagcctgtccggcggttggtggttcggcacctgtagtcacagcaatctgaacggtcaatattttagatcaataccccagcagaggcaaaaactcaagaagggaatattttggaaaacttggcgcggtagatactacccacttcaagccaccacaatgcttatccagcccatggcggctgaggcagcttcttag

SEQ ID NO: 32261 - DNA, 1789 bp, Artificial Sequence
  derived and/or modified sequence
ataaaaaccgtcctcgggcgcggcggggagaagccgagctgagcggatcctcacacgactgtgatccgattctttccagcggcttctgcaaccaagcgggtcttacccccggtcctccgcgtctccagtcctcgcacctggaaccccaacgtccccgagagtccccgaatccccgctcccaggctacctaagaggatgagcggtgctccgacggccggggcagccctgatgctctgcgccgccaccgccgtgctactgagcgctcagggcggacccgtgcagtccaagtcgccgcgctttgcgtcctgggacgagatgaatgtcctggcgcacggactcctgcagctcggccaggggctgcgcgaacacgcggagcgcacccgcagtcagctgagcgcgctggagcggcgcctgagcgcgtgcgggtccgcctgtcagggaaccgaggggtccaccgacctcccgttagcccctgagagccgggtggaccctgaggtccttcacagcctgcagacacaactcaaggctcagaacagcaggatccagcaactcttccacaaggtggcccagcagcagcggcacctggagaagcagcacctgcgaattcagcatctgcaaagccagtttggcctcctggaccacaagcacctagaccatgaggtggccaagcctgcccgaagaaagaggctgcccgagatggcccagccagttgacccggctcacaatgtcagccgcctgcaccatggaggctggacagtaattcagaggcgccacgatggctcagtggacttcaaccggccctgggaagcctacaaggcggggtttggggatccccacggcgagttctggctgggtctggagaaggtgcatagcatcacgggggaccgcaacagccgcctggccgtgcagctgcgggactgggatggcaacgccgagttgctgcagttctccgtgcacctgggtggcgaggacacggcctatagcctgcagctcactgcacccgtggccggccagctgggcgccaccaccgtcccacccagcggcctctccgtacccttctccacttgggaccaggatcacgacctccgcagggacaagaactgcgccaagagcctctctggaggctggtggtttggcacctgcagccattccaacctcaacggccagtacttccgctccatcccacagcagcggcagaagcttaagaagggaatcttctggaagacctggcggggccgctactacccgctgcaggccaccaccatgttgatccagcccatggcagcagaggcagcctcctagcgtcctggctgggcctggtcccaggcccacgaaagacggtgactcttggctctgcccgaggatgtggccgttccctgcctgggcaggggctccaaggaggggccatctggaaacttgtggacagagaagaagaccacgactggagaagccccctttctgagtgcaggggggctgcatgcgttgcctcctgagatcgaggctgcaggatatgctcagactctagaggcgtggaccaaggggcatggagcttcactccttgctggccagggagttggggactcagagggaccacttggggccagccagactggcctcaatggcggactcagtcacattgactgacggggaccagggcttgtgtgggtcgagagcgccctcatggtgctggtgctgttgtgtgtaggtcccctggggacacaagcaggcgccaatggtatctgggcggagctcacagagttcttggaataaaagcaacctcagaacactt

SEQ ID NO: 32262 - DNA, 1107 bp, Artificial Sequence
  derived and/or modified sequence
atgagcggcgcccccaccgccggcgccgccctgatgctgtgcgccgccaccgccgtgctgctgagcgcccagggcggccccgtgcagagcaagagccccagattcgccagctgggacgagatgaacgtgctggcccacggcctgctgcagctgggccagggcctgagagagcacgccgagagaaccagaagccagctgagcgccctggagagaagactgagcgcctgcggcagcgcctgccagggcaccgagggcagcaccgacctgcccctggcccccgagagcagagtggaccccgaggtgctgcacagcctgcagacccagctgaaggcccagaacagcagaatccagcagctgttccacaaggtggcccagcagcagagacacctggagaagcagcacctgagaatccagcacctgcagagccagttcggcctgctggaccacaagcacctggaccacgaggtggccaagcccgccagaagaaagagactgcccgagatggcccagcccgtggaccccgcccacaacgtgagcagactgcaccacggcggctggaccgtgatccagagaagacacgacggcagcgtggacttcaacagaccctgggaggcctacaaggccggcttcggcgacccccacggcgagttctggctgggcctggagaaggtgcacagcatcaccggcgacagaaacagcagactggccgtgcagctgagagactgggacggcaacgccgagctgctgcagttcagcgtgcacctgggcggcgaggacaccgcctacagcctgcagctgaccgcccccgtggccggccagctgggcgccaccaccgtgccccccagcggcctgagcgtgcccttcagcacctgggaccaggaccacgacctgagaagagacaagaactgcgccaagagcctgagcggcggctggtggttcggcacctgcagccacagcaacctgaacggccagtacttcagaagcatcccccagcagagacagaagctgaagaagggcatcttctggaagacctggagaggcagatactaccccctgcaggccaccaccatgctgatccagcccatggccgccgaggccgccagctag

SEQ ID NO: 32263 - protein, 563 aa, Artificial Sequence
  derived and/or modified sequence
MNPLFGPNLFLLQQEQQGLAGPLGDSLGGDHFAGGGDLPPAPLSPAGPAAYSPPGPGPAPPAAMALRNDLGSNINVLKTLNLRFRCFLAKVHELERRNRLLEKQLQQALEEGKQGRRGLGRRDQAVQTGFVSPIRPLGLQLGARPAAVCSPSARVLGSPARSPAGPLAPSAASLSSSSTSTSTTYSSSARFMPGTIWSFSHARRLGPGLEPTLVQGPGLSWVHPDGVGVQIDTITPEIRALYNVLAKVKRERDEYKRRWEEEYTVRIQLQDRVNELQEEAQEADACQEELALKVEQLKAELVVFKGLMSNNLSELDTKIQEKAMKVDMDICRRIDITAKLCDVAQQRNCEDMIQMFQKKLVPSMGGRKRERKAAVEEDTSLSESEGPRQPDGDEEESTALSINEEMQRMLNQLREYDFEDDCDSLTWEETEETLLLWEDFSGYAMAAAEAQGEQQEDSLEKVIKDTESLFKTREKEYQETIDQIELELATAKNDMNRHLHEYMEMCSMKRGLDVQMETCRRLITQSGDRKSPAFTAVPLSDPPPPPSEAEDSDRDVSSDSSMR

SEQ ID NO: 32264 - protein, 256 aa, Artificial Sequence
  derived and/or modified sequence
MSNNLSELDTKIQEKAMKVDMDICRRIDITAKLCDVAQQRNCEDMIQMFQKKLVPSMGGRKRERKAAVEEDTSLSESEGPRQPDGDEEESTALSINEEMQRMLNQLREYDFEDDCDSLTWEETEETLLLWEDFSGYAMAAAEAQGEQQEDSLEKVIKDTESLFKTREKEYQETIDQIELELATAKNDMNRHLHEYMEMCSMKRGLDVQMETCRRLITQSGDRKSPAFTAVPLSDPPPPPSEAEDSDRDVSSDSSMR

SEQ ID NO: 32265 - DNA, 1692 bp, Artificial Sequence
  derived and/or modified sequence
atgaaccccctgttcggccccaacctgttcctgctgcagcaggagcagcagggcctggccggccccctgggcgacagcctgggcggcgaccacttcgccggcggcggcgacctgccccccgcccccctgagccccgccggccccgccgcctacagcccccccggccccggccccgccccccccgccgccatggccctgagaaacgacctgggcagcaacatcaacgtgctgaagaccctgaacctgagattcagatgcttcctggccaaggtgcacgagctggagagaagaaacagactgctggagaagcagctgcagcaggccctggaggagggcaagcagggcagaagaggcctgggcagaagagaccaggccgtgcagaccggcttcgtgagccccatcagacccctgggcctgcagctgggcgccagacccgccgccgtgtgcagccccagcgccagagtgctgggcagccccgccagaagccccgccggccccctggcccccagcgccgccagcctgagcagcagcagcaccagcaccagcaccacctacagcagcagcgccagattcatgcccggcaccatctggagcttcagccacgccagaagactgggccccggcctggagcccaccctggtgcagggccccggcctgagctgggtgcaccccgacggcgtgggcgtgcagatcgacaccatcacccccgagatcagagccctgtacaacgtgctggccaaggtgaagagagagagagacgagtacaagagaagatgggaggaggagtacaccgtgagaatccagctgcaggacagagtgaacgagctgcaggaggaggcccaggaggccgacgcctgccaggaggagctggccctgaaggtggagcagctgaaggccgagctggtggtgttcaagggcctgatgagcaacaacctgagcgagctggacaccaagatccaggagaaggccatgaaggtggacatggacatctgcagaagaatcgacatcaccgccaagctgtgcgacgtggcccagcagagaaactgcgaggacatgatccagatgttccagaagaagctggtgcccagcatgggcggcagaaagagagagagaaaggccgccgtggaggaggacaccagcctgagcgagagcgagggccccagacagcccgacggcgacgaggaggagagcaccgccctgagcatcaacgaggagatgcagagaatgctgaaccagctgagagagtacgacttcgaggacgactgcgacagcctgacctgggaggagaccgaggagaccctgctgctgtgggaggacttcagcggctacgccatggccgccgccgaggcccagggcgagcagcaggaggacagcctggagaaggtgatcaaggacaccgagagcctgttcaagaccagagagaaggagtaccaggagaccatcgaccagatcgagctggagctggccaccgccaagaacgacatgaacagacacctgcacgagtacatggagatgtgcagcatgaagagaggcctggacgtgcagatggagacctgcagaagactgatcacccagagcggcgacagaaagagccccgccttcaccgccgtgcccctgagcgaccccccccccccccccagcgaggccgaggacagcgacagagacgtgagcagcgacagcagcatgagatag

SEQ ID NO: 32266 - DNA, 2680 bp, Artificial Sequence
  derived and/or modified sequence
cctgctcctgcaccggtctgcatctcccagcagaaggcgcagccatgaatccgttattcggccccaacctcttcctcctgcagcaggagcagcagggcctggccgggccactgggggactcactgggaggcgaccacttcgccgggggaggagacttgcccccggcgcctctctcgccggccggccctgctgcctactcgccgcccgggccgggcccggccccgcctgccgccatggccctccgcaatgacctgggctccaacatcaacgtgctcaagaccctgaacctccggttccgctgcttcctggccaaggtgcatgagctggagcgccggaaccggctgttggagaagcaactgcagcaagcgctggaggagggtaagcagggccggcggggcctgggtcgtcgcgaccaggcagtgcagaccggcttcgtcagccccatccggcccctggggctgcagctgggcgcccggccggccgctgtctgcagcccttcggcgcgcgtgctgggctcgcccgcgcgctccccggccggccccctcgcgccctccgcggccagcctctcgtcgtcctccacctccacctccaccacctattcctcgtcggcccgcttcatgcccggcaccatctggtcgttctcgcacgcccgccggctcgggccgggactggagcccactctggtgcaagggcctggcttgtcgtgggtgcacccggatggggtgggcgtccagatcgacaccatcacgcccgagatccgcgctctctacaacgtgctggccaaagtgaagcgggagcgggacgagtacaagcggaggtgggaagaggagtacacggtgcggatccagctgcaagaccgtgtaaatgagctccaggaggaagcccaggaggctgatgcctgccaggaggagctggcactgaaggtggaacagttgaaggctgagctggtggtcttcaaggggctcatgagtaacaacctgtcggagctggacaccaagatccaggagaaagccatgaaggtggatatggacatctgccgccgcatcgacatcaccgccaagctctgcgatgtggctcagcagcgcaactgcgaggacatgatccagatgttccagaagaagctggtcccatccatgggggggcggaagcgggagcgcaaggctgccgtcgaggaggacacctccctgtcggagagtgaggggccccgccagcccgatggggatgaggaggagagcacagccctcagcatcaacgaggagatgcagcgcatgctcaaccagctgagggagtatgattttgaggacgactgtgacagcctgacttgggaggagactgaggagaccctgctgctttgggaggatttctcaggctatgccatggcagctgcagaggcccagggagagcagcaggaagatagcctggagaaggtgattaaagatacggagtccctgttcaaaacccgggagaaggagtatcaggagaccattgaccagatagagctggagttggccacggccaagaacgacatgaaccggcacctgcacgagtacatggagatgtgcagcatgaagcgcggcctggacgtgcagatggagacctgccgccggctcatcacccagtctggagaccgaaagtctcctgctttcactgcggtcccgcttagcgacccgccgccgccgccaagcgaggctgaggactccgatcgcgatgtctcatctgacagctccatgagatagagacctgcctcccccttgcacccgaggccctcgcagcagggagctcagcgaggcagagggtggggctgcacagaggggaacatcagctgcagctctgcaccaggccggtccctggggactggggcgctcctccctcaggctttctccctcagtcttggcttctccagggctctggggtgtctggagctaggcttggccctaccattctggggccatttccaccacagttggggctctcctgccttcacgcgtgggtgtctgctacttccccatctttaaaatgctgccagagcgattgcggcccctcaccttgtccacgtatcaggaatgtgaatgtgggacctttcctccatccctgttgtccggagccagctcactgtcttccacactggtgctaactggcccaggcactggagtggaatagaatgcagctggaggctacgcatggcctctgcagcacacgcagctggagagggcttctgtccctgtcagcggcagagggcgttggggctggccggggcaccttgtccctgctatggtccacgtgctcacgctgtccacctgccaggtggagtgtatgtggctgtggccctccctcgtggaggtgccgtgctttaaagaggccttagtgcccgggatgggcacagtgttttgaagggaggtgggagctcttgctctcctggtcactgcagaatgacagagaaggtgaagctccatgcatgtgtgcgcgggtgtatgtgcgctcagggtctctgtttaagtatcagctaaagatgtgcttcctccgtgtctgtcatacactgagaccaacaggctacagtgtccctgattcttggaaaagcctggagaagctggggagatgcggttcacaatgcctcggtataggaggctgtgttgagctgacattcaaatggattctttaataataatgaaactggcgagta

SEQ ID NO: 32267 - DNA, 1692 bp, Artificial Sequence
  derived and/or modified sequence
atgaacccactatttgggccgaatctctttctcttgcaacaggagcagcaggggctggcagggcccctgggcgactcattgggcggagatcacttcgctggcggcggagatctgcctcccgctccgttgagtccagccggaccggcagcatattctccaccagggcctggcccagccccccccgctgccatggccctccgcaacgacttgggatctaatattaatgtcctgaagacccttaatctgcggtttcggtgttttctggcaaaagtccacgaactggaacgcaggaatcgactgctggaaaagcaactacagcaggcactagaggaggggaaacagggccgccgagggctcggacggcgagaccaggccgtgcagaccgggtttgtcagccccatcagacccttaggtctccagcttggggccagaccagcagctgtctgtagtcccagcgccagggtgctgggaagccctgctagatctcctgccggccctttagccccttcagccgcgtcgctctccagctcctccactagcacgtccacaacctacagttcaagtgctcgctttatgcctgggacgatctggtctttttctcacgcccggaggctgggtcctggcctcgaaccgacactggtccagggaccgggactctcctgggtgcaccctgacggtgtgggcgtccagattgacactattacacccgagatccgagctttgtataacgttttggccaaagtgaaaagagaaagagatgaatacaaacgccgatgggaggaagagtataccgtgagaattcagctccaagatagagtgaatgaactgcaagaagaggcccaagaggctgacgcctgccaagaagaactggccctaaaagtagagcagttgaaggctgaacttgtggtgttcaaaggattaatgtccaacaacctgagcgaactcgacacaaagattcaggagaaagccatgaaagtggacatggatatttgtcggaggatcgatattacggctaagctatgcgatgtggcgcagcagaggaactgcgaagacatgatccagatgttccagaagaagctggtgccgtccatgggagggcggaagagagagcgaaaagcggccgtggaagaggacactagtctgtctgaaagtgagggcccacggcagcctgacggagatgaggaggaatccaccgctctgagtatcaatgaggagatgcagcggatgctcaatcaactcagagaatacgatttcgaagacgattgcgactcgctcacttgggaggagaccgaggaaacactgctgttgtgggaggatttcagcgggtacgcaatggcggctgccgaagcgcagggtgaacagcaagaggacagcttggagaaagtcattaaggataccgagtccttgttcaaaacacgtgaaaaggagtaccaagagaccatcgaccaaatcgagctggagctggccacagcaaagaatgatatgaaccgccacctgcacgagtacatggagatgtgttcaatgaagcggggtcttgatgtgcagatggagacgtgtcggaggcttatcacccagtctggagatagaaagtcccctgcttttacagccgtaccactatccgatcctccgccgccccccagtgaagctgaggacagtgaccgagatgtcagttccgacagtagtatgagatag

SEQ ID NO: 32268 - DNA, 1692 bp, Artificial Sequence
  derived and/or modified sequence
atgaaccccctgtttggccccaacctcttcctgctgcagcaggagcagcagggcctggccggccccctgggggacagcctgggcggggaccactttgctgggggcggggacctgcccccagcccccctgagccctgctggccctgctgcctacagccccccaggccctggccctgcccccccagctgccatggccctgagaaatgacctgggcagcaacatcaacgtgctgaagaccctgaacctgcgcttccgctgcttcctggccaaggtgcatgagctggagaggaggaaccggctgctggagaagcagctgcagcaggccctggaggagggcaagcagggccggcggggcctgggcagaagagaccaggccgtgcagacaggctttgtgagccccatccggcccctgggcctgcagctgggcgcccggcctgctgctgtgtgcagccccagcgcccgggtgctgggcagccctgcccggagccctgctggccccctggcccccagcgctgccagcctgagcagcagcagcaccagcaccagcaccacctacagcagcagcgcccgcttcatgcctggcaccatctggagcttcagccacgcccggcggctgggccctggcctggagcccaccctggtgcagggccctggcctgtcctgggtgcacccagatggagtgggcgtgcagattgacaccatcaccccagagatccgggccctgtacaacgtgctggccaaggtgaagcgggagagagatgagtacaagaggcgctgggaggaggagtacacagtgcgcatccagctgcaggacagagtgaatgagctgcaggaggaggcccaggaggctgatgcctgccaggaggagctggccctgaaggtggagcagctgaaggccgagctggtggtgttcaagggcctgatgagcaacaacctgtctgagctggacaccaagatccaggagaaggccatgaaggtggacatggacatctgcagaagaattgacatcacagccaagctgtgtgatgtggcccagcagaggaactgtgaggacatgatccagatgttccagaagaagctggtgcccagcatgggcggcaggaagcgggagaggaaggctgctgtggaggaggacaccagcctgtctgagagcgagggcccccggcagccagatggagatgaggaggagagcacagccctgagcatcaatgaggagatgcagaggatgctgaaccagctgcgggagtatgactttgaagatgactgtgacagcctgacctgggaggagacagaggagaccctgctgctgtgggaggacttcagcggctacgccatggctgctgctgaggcccagggcgagcagcaggaggacagcctggagaaggtgatcaaggacacagagagcctcttcaagacccgggagaaggagtaccaggagaccatcgaccagatcgagctggagctggccacagccaagaatgacatgaacagacacctgcacgagtacatggagatgtgcagcatgaagaggggcctggatgtgcagatggagacctgccggcggctcatcacccagagcggggacaggaagagccctgccttcaccgctgtgcccctgagtgaccccccacctcctccttctgaggccgaggacagcgacagagatgtgtccagtgacagctccatgaggtag

SEQ ID NO: 32269 - DNA, 1692 bp, Artificial Sequence
  derived and/or modified sequence
atgaaccccctgttcggccccaacctgttcctgctgcagcaggagcagcaaggccttgctggtccccttggcgactccctggggggtgaccatttcgccggaggaggtgacctcccacctgctcctctctcccctgccgggcccgccgcttactcaccacctgggccaggacccgcgccacctgccgccatggcattacgcaacgatctcggcagcaacatcaacgtgctgaagacactgaatctgcgttttcggtgtttcctcgcgaaagtgcacgagctcgaacggcggaacagattactcgaaaagcaacttcaacaagctctcgaggagggcaagcagggcagacgaggacttggccgaagggaccaggccgtgcaaaccggtttcgtgtctcccatccggcctttgggtttacagctcggggccagacctgccgctgtatgctccccgagtgcccgagtcctcggaagtccggcaagatcgccagccgggccgcttgcccctagcgccgcttccctatcctcaagtagtacttccacttccacgacttattccagctctgcacggtttatgcccggcactatctggagctttagtcatgcacgccggcttgggcccggactcgaacctaccctcgtacagggccccgggctttcctgggtgcaccctgatggtgtgggcgttcagatagacacgattactcctgaaattcgtgcattatacaacgtgttggctaaagtgaagcgggaaagggatgaatataagcgaagatgggaggaagaatacacagtgcgcatccagctgcaggatagagtgaatgaactgcaggaagaagctcaggaggcagacgcctgccaagaggagctggccctgaaagttgagcaacttaaggccgagctggtcgtctttaaagggctcatgagtaacaacctgagcgaactcgataccaagatccaggaaaaagcaatgaaggtcgatatggacatctgtaggcggatcgacatcaccgctaagctgtgcgatgtcgcccaacagcgaaactgcgaagacatgattcagatgtttcagaaaaagcttgtcccgagtatgggaggccggaagagggaacggaaggctgccgtcgaagaggacacgagcctgtccgaatccgagggccctaggcaacccgatggggacgaggaggagagcactgccctttccattaacgaagagatgcagaggatgctgaatcagctcagagaatatgattttgaagacgactgtgacagcctgacttgggaggagactgaagaaacactgcttctttgggaggacttctctggctatgcgatggccgccgccgaggctcagggtgagcagcaagaagactcattagagaaggtcattaaagatactgagagtctctttaagacaagagaaaaggaatatcaggagacaattgaccaaattgagctcgagctagcaaccgccaaaaatgatatgaaccgacatctgcacgaatatatggaaatgtgctcaatgaagaggggacttgatgtccagatggaaacctgtcggagactcattacacaatctggagataggaaatcccccgctttcacagcagttccactctcagacccacctccccccccatctgaagccgaggattcggacagggatgtgagcagcgacagctcgatgaggtag

SEQ ID NO: 32270 - DNA, 1692 bp, Artificial Sequence
  derived and/or modified sequence
atgaacccattatttggccctaacctctttctcctgcagcaggagcagcaggggctggccggacctctgggcgactccctgggaggtgaccacttcgcaggagggggagatctgccacctgcccctctgtctccagccggaccagccgcttactcacctcccggacctgggcctgctccaccagcagccatggcgctgaggaatgacctggggtctaacattaacgtgctgaaaaccctgaatctcagatttaggtgtttcctggcgaaggtccacgagctcgagaggaggaaccgcctgctggagaaacagctgcagcaggccttagaggaaggcaagcaagggcgacggggacttggacgcagggatcaggcagtacagacaggattcgtcagccccataagacccctgggtctgcagctgggagctcggccagcagcggtgtgctcaccttccgctagggtgctgggatctcccgctcggagtccagctgggccactggcgccttccgccgcatcactgtctagctcctccacctcaactagcaccacatactcctcctcagccaggttcatgcccggaacgatttggagctttagccacgcccgacgcctgggtccagggttggagcccacactggtgcaaggcccagggctttcatgggtgcatcctgacggagtcggtgtgcagatcgacaccatcacaccagagatccgggctctctataatgtcttggcaaaggtgaaacgagagcgggacgaatacaaaagaagatgggaagaggagtatacagtgaggattcaactgcaagatagagttaatgaactgcaagaagaagctcaggaggctgatgcgtgccaagaagagcttgccctcaaggtagagcagcttaaggcggagctagtggtgtttaaaggcctcatgtctaataatctgtcagagctagacactaagatccaggaaaaagctatgaaggttgacatggatatatgtcgaaggatagacattaccgctaaactgtgtgatgtggcccagcagcgtaactgcgaggacatgattcagatgtttcagaagaaattagtgccttccatggggggacgtaaaagggaaagaaaagccgcagttgaagaggataccagtctctcagagtccgaaggccctaggcaacctgacggagacgaggaagaatccaccgcgttgtccatcaatgaggagatgcaacgcatgttaaaccagctccgggagtacgactttgaggatgattgcgatagtcttacctgggaagagaccgaggagaccttgttgctatgggaggatttttctggatatgctatggctgctgccgaagcccaaggtgagcaacaggaggactccctggagaaggtgattaaggacacagagtccctttttaaaacacgcgaaaaggaatatcaggaaaccattgaccagattgagctggaattggccacggccaagaatgatatgaacagacacctacatgagtatatggagatgtgttcaatgaagcgcggtcttgacgttcaaatggaaacctgccgccgacttattacacagtcaggggaccggaaatctcccgctttcactgccgtcccactgtcagatcccccaccacctccatctgaggccgaggattcggatcgtgatgtcagcagcgattccagcatgcgctag

SEQ ID NO: 32271 - DNA, 3101 bp, Artificial Sequence
  derived and/or modified sequence
gatgagacatgacaaagctggctctgggaagcatgccctacctaggaccctgccctgtggcccagggtgtcgtccggcccacttgcagtcttaatctctgaattctgggccctggaacaggctgtgtctagttctcatttgccgtactcaccgggcccctttacatactctactttctctttccctctgggtttgagtgctagtaaccccaggctcgtgtgtccactgctgtcatgctgctgtgggacttccggcctctgagccagtctggtcacctctctgtgactcccttagaggaggctctggatgcttttacagggttaaatgataccacaagaggcagggcagcgggctcgacgagctctgttctggtgcgggcaggaggcgggagcccggatctgtgcgactgaaggtgggaagaggagtacacggtgcggatccagctgcaagaccgtgtaaatgagctccaggaggaagcccaggaggctgatgcctgccaggaggagctggcactgaaggtggaacagttgaaggctgagctggtggtcttcaaggggctcatgagtaacaacctgtcggagctggacaccaagatccaggagaaagccatgaaggtggatatggacatctgccgccgcatcgacatcaccgccaagctctgcgatgtggctcagcagcgcaactgcgaggacatgatccagatgttccagaagaagctggtcccatccatgggggggcggaagcgggagcgcaaggctgccgtcgaggaggacacctccctgtcggagagtgaggggccccgccagcccgatggggatgaggaggagagcacagccctcagcatcaacgaggagatgcagcgcatgctcaaccagctgagggagtatgattttgaggacgactgtgacagcctgacttgggaggagactgaggagaccctgctgctttgggaggatttctcaggctatgccatggcagctgcagaggcccagggagagcagcaggaagatagcctggagaaggtgattaaagatacggagtccctgttcaaaacccgggagaaggagtatcaggagaccattgaccagatagagctggagttggccacggccaagaacgacatgaaccggcacctgcacgagtacatggagatgtgcagcatgaagcgcggcctggacgtgcagatggagacctgccgccggctcatcacccagtctggagaccgaaagtctcctgctttcactgcggtcccgcttagcgacccgccgccgccgccaagcgaggctgaggactccgatcgcgatgtctcatctgacagctccatgagatagagacctgcctcccccttgcacccgaggccctcgcagcagggagctcagcgaggcagagggtggggctgcacagaggggaacatcagctgcagctctgcaccaggccggtccctggggactggggcgctcctccctcaggctttctccctcagtcttggcttctccagggctctggggtgtctggagctaggcttggccctaccattctggggccatttccaccacagttggggctctcctgccttcacgcgtgggtgtctgctacttccccatctttaaaatgctgccagagcgattgcggcccctcaccttgtccacgtatcaggaatgtgaatgtgggacctttcctccatccctgttgtccggagccagctcactgtcttccacactggtgctaactggcccaggcactggagtggaatagaatgcagctggaggctacgcatggcctctgcagcacacgcagctggagagggcttctgtccctgtcagcggcagagggcgttggggctggccggggcaccttgtccctgctatggtccacgtgctcacgctgtccacctgccaggtggagtgtatgtggctgtggccctccctcgtggaggtgccgtgctttaaagaggccttagtgcccgggatgggcacagtgttttgaagggaggtgggagctcttgctctcctggtcactgcagaatgacagagaaggtgaagctccatgcatgtgtgcgcgggtgtatgtgcgctcagggtctctgtttaagtatcagctaaagatgtgcttcctccgtgtctgtcatacactgagaccaacaggctacagtgtccctgattcttggaaaagcctggagaagctggggagatgcggttcacaatgcctcggtataggaggctgtgttgagctgacattcaaatggattctttaataataatgaaactggcgagtatttattgtgcactttggtgtcactgtctcaagcacttcctaatattcactagtttgaactctgaggtaggtactttttttttttttgagatggagtctcatactctgttgcctaggctggagtgcagtggtgtggtctcagctcactgcagcctctgcctccggggtgcaagcgattctcctgcttcagcatgcctgtagctgggactataggcatgtgccatgaagcctggctgatttttgtaattttagtagagacggagtttcaccatgttggccaggctggtctcaaactcctgacctcaggtgatacacccaccttggcctcccaaagtgctggggttacaggcgtgcgcgctctaccgaggtatgtacttttgtctccactaggtaagcacacgtgcaaagtgaggcccgggagtaactgcccaaagcaactgagccgttcagtggcagagccaggggtctggacctaggtcccagctacacgccttgcccctacccaagttcccctaaggacgatgatggaaataagtcaccctgacacatctcagttcatcttcctcaaaactatgcgagatagcctaggactggagcgaggagaggaaaaggccttgttctctgaagtagtggtgccagcttcctgtagcactcaagacgtctgagcgggaagcaaatggttctcgaagcaagcaaggctgtttggaggccctaccctcagtctgaggagaacataccaggtccctccccagcaagaatgtctcaccttgacacaagcccagcttccctcccctctgccccagaccctagaataagacaggacaagt

SEQ ID NO: 32272 - protein, 929 aa, Artificial Sequence
  derived and/or modified sequence
MTASSVEQLRKEGNELFKCGDYGGALAAYTQALGLDATPQDQAVLHRNRAACHLKLEDYDKAETEASKAIEKDGGDVKALYRRSQALEKLGRLDQAVLDLQRCVSLEPKNKVFQEALRNIGGQIQEKVRYMSSTDAKVEQMFQILLDPEEKGTEKKQKASQNLVVLAREDAGAEKIFRSNGVQLLQRLLDMGETDLMLAALRTLVGICSEHQSRTVATLSILGTRRVVSILGVESQAVSLAACHLLQVMFDALKEGVKKGFRGKEGAIIVDPARELKVLISNLLDLLTEVGVSGQGRDNALTLLIKAVPRKSLKDPNNSLTLWVIDQGLKKILEVGGSLQDPPGELAVTANSRMSASILLSKLFDDLKCDAERENFHRLCENYIKSWFEGQGLAGKLRAIQTVSCLLQGPCDAGNRALELSGVMESVIALCASEQEEEQLVAVEALIHAAGKAKRASFITANGVSLLKDLYKCSEKDSIRIRALVGLCKLGSAGGTDFSMKQFAEGSTLKLAKQCRKWLCNDQIDAGTRRWAVEGLAYLTFDADVKEEFVEDAAALKALFQLSRLEERSVLFAVASALVNCTNSYDYEEPDPKMVELAKYAKQHVPEQHPKDKPSFVRARVKKLLAAGVVSAMVCMVKTESPVLTSSCRELLSRVFLALVEEVEDRGTVVAQGGGRALIPLALEGTDVGQTKAAQALAKLTITSNPEMTFPGERIYEVVRPLVSLLHLNCSGLQNFEALMALTNLAGISERLRQKILKEKAVPMIEGYMFEEHEMIRRAATECMCNLAMSKEVQDLFEAQGNDRLKLLVLYSGEDDELLQRAAAGGLAMLTSMRPTLCSRIPQVTTHWLEILQALLLSSNQELQHRGAVVVLNMVEASREIASTLMESEMMEILSVLAKGDHSPVTRAAAACLDKAVEYGLIQPNQDGE

SEQ ID NO: 32273 - DNA, 2790 bp, Artificial Sequence
  derived and/or modified sequence
atgaccgccagcagcgtggagcagctgagaaaggagggcaacgagctgttcaagtgcggcgactacggcggcgccctggccgcctacacccaggccctgggcctggacgccaccccccaggaccaggccgtgctgcacagaaacagagccgcctgccacctgaagctggaggactacgacaaggccgagaccgaggccagcaaggccatcgagaaggacggcggcgacgtgaaggccctgtacagaagaagccaggccctggagaagctgggcagactggaccaggccgtgctggacctgcagagatgcgtgagcctggagcccaagaacaaggtgttccaggaggccctgagaaacatcggcggccagatccaggagaaggtgagatacatgagcagcaccgacgccaaggtggagcagatgttccagatcctgctggaccccgaggagaagggcaccgagaagaagcagaaggccagccagaacctggtggtgctggccagagaggacgccggcgccgagaagatcttcagaagcaacggcgtgcagctgctgcagagactgctggacatgggcgagaccgacctgatgctggccgccctgagaaccctggtgggcatctgcagcgagcaccagagcagaaccgtggccaccctgagcatcctgggcaccagaagagtggtgagcatcctgggcgtggagagccaggccgtgagcctggccgcctgccacctgctgcaggtgatgttcgacgccctgaaggagggcgtgaagaagggcttcagaggcaaggagggcgccatcatcgtggaccccgccagagagctgaaggtgctgatcagcaacctgctggacctgctgaccgaggtgggcgtgagcggccagggcagagacaacgccctgaccctgctgatcaaggccgtgcccagaaagagcctgaaggaccccaacaacagcctgaccctgtgggtgatcgaccagggcctgaagaagatcctggaggtgggcggcagcctgcaggacccccccggcgagctggccgtgaccgccaacagcagaatgagcgccagcatcctgctgagcaagctgttcgacgacctgaagtgcgacgccgagagagagaacttccacagactgtgcgagaactacatcaagagctggttcgagggccagggcctggccggcaagctgagagccatccagaccgtgagctgcctgctgcagggcccctgcgacgccggcaacagagccctggagctgagcggcgtgatggagagcgtgatcgccctgtgcgccagcgagcaggaggaggagcagctggtggccgtggaggccctgatccacgccgccggcaaggccaagagagccagcttcatcaccgccaacggcgtgagcctgctgaaggacctgtacaagtgcagcgagaaggacagcatcagaatcagagccctggtgggcctgtgcaagctgggcagcgccggcggcaccgacttcagcatgaagcagttcgccgagggcagcaccctgaagctggccaagcagtgcagaaagtggctgtgcaacgaccagatcgacgccggcaccagaagatgggccgtggagggcctggcctacctgaccttcgacgccgacgtgaaggaggagttcgtggaggacgccgccgccctgaaggccctgttccagctgagcagactggaggagagaagcgtgctgttcgccgtggccagcgccctggtgaactgcaccaacagctacgactacgaggagcccgaccccaagatggtggagctggccaagtacgccaagcagcacgtgcccgagcagcaccccaaggacaagcccagcttcgtgagagccagagtgaagaagctgctggccgccggcgtggtgagcgccatggtgtgcatggtgaagaccgagagccccgtgctgaccagcagctgcagagagctgctgagcagagtgttcctggccctggtggaggaggtggaggacagaggcaccgtggtggcccagggcggcggcagagccctgatccccctggccctggagggcaccgacgtgggccagaccaaggccgcccaggccctggccaagctgaccatcaccagcaaccccgagatgaccttccccggcgagagaatctacgaggtggtgagacccctggtgagcctgctgcacctgaactgcagcggcctgcagaacttcgaggccctgatggccctgaccaacctggccggcatcagcgagagactgagacagaagatcctgaaggagaaggccgtgcccatgatcgagggctacatgttcgaggagcacgagatgatcagaagagccgccaccgagtgcatgtgcaacctggccatgagcaaggaggtgcaggacctgttcgaggcccagggcaacgacagactgaagctgctggtgctgtacagcggcgaggacgacgagctgctgcagagagccgccgccggcggcctggccatgctgaccagcatgagacccaccctgtgcagcagaatcccccaggtgaccacccactggctggagatcctgcaggccctgctgctgagcagcaaccaggagctgcagcacagaggcgccgtggtggtgctgaacatggtggaggccagcagagagatcgccagcaccctgatggagagcgagatgatggagatcctgagcgtgctggccaagggcgaccacagccccgtgaccagagccgccgccgcctgcctggacaaggccgtggagtacggcctgatccagcccaaccaggacggcgagtag

SEQ ID NO: 32274 - DNA, 2790 bp, Artificial Sequence
  derived and/or modified sequence
atgacggcatccagtgttgaacagttacggaaggaaggtaacgaactgttcaaatgtggcgactacggcggtgctctggccgcgtatactcaggcactcggcctggatgccacgccacaggaccaggcagtactgcatagaaaccgtgccgcatgccacctcaagctggaggattacgataaggctgagactgaggcttccaaagctatagagaaagacggaggggacgtaaaagcactctaccggagatcccaggcgctggaaaaacttggtcgccttgaccaggcggtgttggacctccaaaggtgtgtgtctctggagccaaagaacaaggtgtttcaagaggcacttaggaacatcgggggccaaattcaggagaaggttcggtacatgtcttcaacggacgccaaagtcgagcagatgttccagatacttttggacccagaggagaaaggtaccgagaaaaaacagaaagcctcccagaacctggtcgtgctagcaagagaggacgcgggcgccgaaaaaattttccggtcaaacggggtacagttactgcagcgactgctcgatatgggtgaaactgatcttatgctcgcggccctcaggacactggtcggcatctgctctgaacaccagtccagaaccgtagcaactctgagtatcttgggcacccgaagggttgtttcgatcctcggggtcgaaagccaagcagtctcccttgccgcatgccacctcttgcaggtcatgtttgacgcactcaaagagggggttaaaaagggtttcagaggaaaggagggtgcaatcattgtagacccagcccgcgaactgaaggtcctaatatcgaacttgctggacctgctcacagaagttggcgtgagcggtcagggaagggataacgcacttaccctactgataaaagccgtgcccaggaagtcactgaaagaccctaacaatagtcttactctctgggtcatagatcagggcctaaaaaagattttggaggtgggcggttccctgcaggaccccccgggagaactggctgtcacggcaaacagcaggatgtccgccagtatcttgctaagcaagttgttcgatgatttgaagtgtgatgctgaacgtgagaatttccatcgcctgtgtgaaaattatataaagtcttggtttgaggggcagggcttggccggtaagttacgagctatccagacagtctcctgccttctgcaggggccctgtgacgcaggtaatagggctttagaactctcgggagtgatggagagcgtgatagctctgtgcgccagtgagcaggaggaggagcagctggtagccgtggaagcgctaattcacgcagccggcaaggctaagagggcaagcttcatcaccgccaatggcgtttccctgctgaaagatctttacaagtgcagcgagaaggactccattcgtattagggctctggtgggcctgtgtaagctgggttccgctggagggacagacttcagtatgaagcagttcgctgaaggctctacactgaaactggcaaaacaatgtcggaaatggttatgcaatgaccagattgacgcggggaccagacgatgggcggtcgaaggtcttgcttacctgacctttgacgccgacgtgaaggaggagttcgtggaagacgccgcggctctcaaggccttattccagctgagcagactagaagaacggagcgttttgtttgccgtggcttctgcactggttaactgcaccaattcctatgattatgaagaaccagatccaaaaatggtggagctcgccaagtacgcaaaacagcacgtacctgagcagcatcccaaagacaaaccaagctttgtacgggcacgcgtgaaaaagctactggcagcgggcgtcgtctctgctatggtgtgcatggtgaagaccgagagcccagtcttgacctcctcctgtagagagctgctttctcgtgtgtttctcgcactcgtggaggaggtcgaagacagagggacagtggtggcccaggggggagggcgagctctcataccactggcccttgagggaacagatgtcggccagaccaaagctgcccaagccttggctaaactcactataacatcaaaccctgagatgacgtttcccggcgagcggatctatgaagttgtgcgcccactcgtgtcactgctgcatcttaactgttcaggtctccaaaatttcgaagctcttatggctcttacaaacctggcgggtattagcgaacgccttcgtcagaaaatactgaaggagaaggccgtgccgatgattgaggggtacatgtttgaagagcacgagatgatccgcagagccgctaccgagtgtatgtgcaaccttgccatgagtaaagaggtccaggatctgttcgaagcacaggggaatgatagacttaagttgttagtgctgtatagcggagaagacgatgagctcctccaacgcgcagctgccggcggactggccatgcttacaagcatgagacccaccctgtgtagccgaattccccaggtaacgactcactggttggagatcttgcaggcgctgctactgtcgtctaatcaggagttgcagcatagaggggccgtggtggtgctgaatatggtcgaggcatccagagaaattgcaagcacccttatggagagtgagatgatggagatcctgagtgtcctggcgaaaggcgaccactcgccggtgacacgggcagccgccgcgtgtttggataaagcggtggagtatgggctgatacaaccaaatcaagacggtgaatag

SEQ ID NO: 32275 - DNA, 2790 bp, Artificial Sequence
  derived and/or modified sequence
atgacagccagctctgtggagcagctgaggaaggagggcaatgagctgttcaagtgtggggactatggaggagccctggccgcctacacccaggccctgggcctggatgccaccccccaggaccaggccgtgctgcacaggaacagagctgcctgccacctgaagctggaggactatgacaaggccgagacagaggccagcaaggccatcgagaaggatggaggagatgtgaaggccctgtaccgccgcagccaggccctggagaagctgggccgcctggaccaggccgtgctggacctgcagagatgtgtgtccctggagcccaagaacaaggtgttccaggaggccctgaggaacatcggcggccagatccaggagaaggtgcgctacatgagcagcacagatgccaaggtggagcagatgttccagatcctgctggaccctgaggagaagggcacagagaagaagcagaaggccagccagaacctggtggtgctggccagagaagatgctggagctgagaagatcttccgcagcaatggagtgcagctgctgcagaggctgctggacatgggagaaacagacctgatgctggccgccctgcggaccctggtgggcatctgcagcgagcaccagagcaggacagtggccaccctgagcatcctgggcaccaggagagtggtgtccatcctgggcgtggagagccaggccgtgtccctggccgcctgccacctgctgcaggtgatgtttgatgccctgaaggagggcgtgaagaagggcttccggggcaaggagggcgccatcatcgtggaccctgcccgggagctgaaggtgctgatcagcaacctgctggacctgctgacagaggtgggcgtgtctggccagggccgggacaatgccctgaccctgctgatcaaggctgtgcccaggaagagcctgaaggaccccaacaacagcctgaccctgtgggtgattgaccagggcctgaagaagatcctggaggtgggcggcagcctgcaggaccccccaggagagctggccgtgacagccaacagcaggatgtctgccagcatcctgctgagcaagctgtttgatgacctgaagtgtgatgctgagcgggagaacttccaccggctgtgtgagaactacatcaagtcctggtttgagggccagggcctggccggcaagctgcgggccatccagacagtgtcctgcctgctgcagggcccctgtgatgctggcaacagagccctggagctgtctggagtgatggagagcgtcatcgccctgtgtgccagcgagcaggaggaggagcagctggtggccgtggaggccctgattcatgctgctgggaaggccaagagggccagcttcatcacagccaacggggtgtccctgctgaaggacctgtacaagtgcagcgagaaggacagcatccgcatccgggccctggtgggcctgtgcaagctgggcagcgctgggggcacagacttctccatgaagcagtttgctgagggcagcaccctgaagctggccaagcagtgcaggaagtggctgtgcaatgaccagattgatgctggcacccggcgctgggccgtggagggcctggcctacctgacctttgatgctgatgtgaaggaggagtttgtggaggatgctgctgccctgaaggccctcttccagctgagccggctggaggagaggtctgtgctgtttgctgtggccagcgccctggtgaactgcaccaacagctatgactatgaggagccagaccccaagatggtggagctggccaagtatgccaagcagcacgtgcctgagcagcaccccaaggacaagcccagctttgtgcgggcccgggtgaagaagctgctggccgccggcgtggtgtctgccatggtgtgcatggtgaagacagagagccctgtgctgaccagcagctgccgggagctgctgagcagggtcttcctggccctggtggaggaggtggaggaccggggcaccgtggtggcccagggcggcggccgggccctgatccccctggccctggagggcacagatgtgggccagaccaaggccgcccaggccctggccaagctgaccatcaccagcaaccctgagatgaccttccctggagagcgcatctatgaggtggtgcggcccctggtgtccctgctgcacctgaactgcagcggcctgcagaactttgaggccctgatggccctgaccaacctggccggcatcagcgagcggctgcggcagaagatcctgaaggagaaggctgtgcccatgattgagggctacatgtttgaggagcacgagatgatcagaagagctgccacagagtgcatgtgcaacctggccatgagcaaggaggtgcaggacctgtttgaggcccagggcaatgaccggctgaagctgctggtgctgtacagcggggaggatgatgagctgctgcagagagctgctgctgggggcctggccatgctgacctccatgaggcccaccctgtgcagccgcatcccccaggtgaccacccactggctggagatcctgcaggccctgctgctgagcagcaaccaggagctgcagcacagaggagctgtggtggtgctgaacatggtggaggccagccgggagatcgccagcaccctgatggagagcgagatgatggagatcctgtctgtgctggccaagggggaccacagccctgtgaccagggctgctgctgcctgcctggacaaggctgtggagtatggcctcatccagcccaaccaggatggagagtag

SEQ ID NO: 32276 - DNA, 2790 bp, Artificial Sequence
  derived and/or modified sequence
atgaccgccagcagcgtggagcagctgcggaaggagggcaacgagttgttcaagtgcggcgactacggcggagcgctagcagcttatacccaggcgttgggcctcgacgctactccccaggatcaggccgtgttgcacaggaatcgtgcagcctgccatctgaaacttgaggactatgacaaggccgagacggaagcatcaaaggcaatcgaaaaagatggtggtgacgtcaaggccctataccgccgctctcaagccctggagaagctgggacgactggaccaggccgtcctggatctccagcgttgcgtatctttggagcccaagaacaaggtgtttcaggaagccctgcggaatattggcggtcagatccaggaaaaagtgagatatatgtcctccactgacgctaaggtcgagcagatgttccagattttgctagacccggaagagaaggggactgaaaagaagcaaaaagcatcacagaacttagtggtgttggcccgtgaggacgctggagcggagaaaatatttaggtccaatggcgtccaacttctgcagaggctactggatatgggagagaccgatctgatgctcgccgccctacggacactggtgggcatctgctcggaacaccagagtcgcaccgtggctaccttaagtattctgggtactaggcgagttgtttctattctgggagtcgagagtcaggctgtgagcttggccgcttgtcacctgcttcaggtgatgtttgatgcgttgaaggaaggagtgaaaaaaggctttcgaggcaaagaaggtgccattattgtcgaccctgctcgagagttaaaagttctcatttccaatctgttggatctgctgactgaggtgggagtgagcgggcaaggccgggataatgccctgacactcctcatcaaagccgtgccacgcaaaagtctgaaagacccgaacaacagcctgactctctgggtgatagaccagggccttaaaaaaattctggaggtgggcgggagtctacaagacccaccaggtgaactcgcagtgaccgctaatagccggatgtccgcatcaatccttctatccaagctgtttgatgatctgaaatgtgatgccgagcgcgagaatttccacaggctttgtgaaaactacataaagtcgtggttcgagggacaaggcctggcaggaaaactcagagcaatacagacagttagttgtctgctgcaaggcccttgcgacgcaggaaatcgggccttggagctgtcaggcgtcatggagtcagtcattgctttgtgtgccagcgagcaggaagaggagcagcttgtcgccgtggaagcacttatccatgcggcgggaaaggccaaacgcgcctcattcattaccgccaatggggtatcactcttaaaagacttatataaatgtagtgagaaggactctatccgtatccgagcactcgtaggactctgcaaactgggctcagccggcggaacagatttcagcatgaagcaatttgctgaggggtcaacattaaaactggccaagcagtgtcgaaagtggctatgtaacgaccaaattgatgctgggacccgccgatgggcagttgaaggactggcttatctcacatttgatgcagacgtgaaagaggaatttgtagaggacgccgctgctctgaaagccttgtttcagctgagcagactggaggaacgctcggttctcttcgcagttgcttcggccctggtgaattgcactaattcttacgattacgaggagcctgatcctaagatggtggagctggccaaatacgccaaacagcacgtccctgagcagcaccctaaagataaaccgtccttcgtcagagctcgggttaaaaaactgttagctgccggcgtagtgagtgccatggtttgcatggtgaaaacagagtctcctgtcttgaccagctcatgccgagaattgctgtctagagtctttctggctcttgtggaggaagtcgaagatcggggtacggttgtggcacaggggggcggccgagcactgattcccctggcgctggagggtactgatgtggggcagaccaaggccgctcaggcgttggccaagttgaccatcacttctaatcctgaaatgacattcccgggcgagaggatctacgaagtcgtgcgcccacttgtgtctcttttgcatctgaactgctctggtctgcagaacttcgaggcgctgatggctctaacaaatctggccggcatttccgagcgcctgcgacaaaaaatcctaaaggagaaagctgttccaatgatcgaagggtacatgttcgaagaacacgaaatgatcagaagggctgccaccgaatgtatgtgtaatctagccatgtctaaggaggtgcaggacctttttgaggcacagggaaacgaccgcctgaaactgctggtgctatacagcggcgaggacgatgaactccttcagagagccgctgcggggggcttggccatgcttacttcaatgcggccaactctgtgcagtagaataccccaagtgaccactcattggcttgagatcttacaggcgctgcttctgtcgtccaaccaggagctccagcacaggggggctgtagtggtgctaaatatggtagaggcgtcaagggagatcgcctctaccctgatggaatctgagatgatggaaattctgagtgtgttggcaaaaggagaccatagcccagtgactcgggcagccgctgcctgtctcgacaaagctgtcgagtatggcctcatccagcctaatcaagatggggaatag

SEQ ID NO: 32277 - DNA, 2790 bp, Artificial Sequence
  derived and/or modified sequence
atgacagcgagctctgtcgagcaactgagaaaagaaggaaacgagctattcaagtgtggcgattatggaggtgcccttgctgcttacactcaggctcttgggctggacgccacccctcaagaccaagccgtacttcacaggaatcgtgcagcatgtcatcttaaactggaagattacgacaaagcagagaccgaagcctcaaaggcgatcgagaaggacggtggagatgtgaaagcactgtaccggagaagccaggcccttgaaaagctaggaaggttggatcaggctgtgctcgatctacaaaggtgcgttagtctggagcccaaaaacaaggtcttccaagaggctttacgtaatattgggggtcagattcaggagaaagtcaggtacatgtctagcacagacgccaaggttgagcaaatgttccagatactgttggacccagaggagaaagggacggagaaaaagcagaaagcttcacagaacctagtcgtgttggccagggaagacgctggagcagagaaaatcttccgctcaaatggtgtgcagttgcttcaaaggctgcttgatatgggcgagaccgaccttatgctggccgcactgcggacactggttggcatatgctccgaacaccagagccgtactgtagctacactgagcatccttggcacccgaagggtcgtctctatcttgggggttgagagccaggccgtctccctggccgcatgtcacttgctccaggtgatgttcgatgccctgaaagagggcgtgaagaaaggatttcgcggaaaggagggggcaattatcgtggatcctgccagagagctgaaggtcctgatctcaaatcttctagacttacttactgaagtcggagtgagcggccaaggcagggataacgctctgacactattaatcaaggccgttcccaggaagtcattaaaggaccctaacaacagcctcacactttgggttattgaccaagggcttaaaaaaatcctggaggttgggggttcccttcaggaccctccaggagagctggccgttaccgcaaattcccgcatgtccgcttcaatcttactgtccaagctctttgatgacttgaaatgtgacgcggagagagaaaactttcataggctgtgcgagaactatatcaagtcttggtttgaagggcagggcttggccggtaagttgcgcgcaatacagaccgtgtcttgtctgttgcaggggccatgcgacgcaggaaaccgggctttagagttaagtggtgtaatggagtctgtcatagccctttgcgcatccgagcaagaagaggaacaactcgtggcggtcgaagcgcttattcacgcagctggtaaggcgaagagggcctccttcatcacagctaacggggtttccctactgaaggacctctacaaatgtagtgagaaagacagtatcagaattcgcgcactcgtcgggctgtgtaagctggggtccgccggtggaaccgacttttccatgaaacaatttgcggagggtagcacactgaaattggccaagcaatgccgtaagtggctgtgcaatgatcagatcgatgcaggcacgcgtagatgggccgtggagggactcgcctacctgactttcgacgcagacgttaaagaagagttcgtcgaggacgcagccgctctgaaggctctgtttcagctttcacgactcgaagaacggagcgtcctgtttgcggttgcttcagcacttgtgaattgtacaaattcatatgactatgaggagccagatcctaagatggtggagttagctaaatatgctaagcagcatgtccccgagcagcatcctaaagacaaaccgtccttcgttcgcgcacgcgtgaagaaacttcttgctgcaggcgtggtatccgccatggtgtgcatggtgaagacggagtccccggtgctgacaagtagttgcagggaactgttatcccgggtttttctggcccttgtagaggaggtagaggatcgcggtaccgtcgtggcccagggcggtggcagagccctcattcctctggccctagaaggtaccgacgtcggacaaaccaaagctgcccaggccctggcgaagttgaccataacaagtaaccctgagatgacattccccggagaacgcatttatgaggtcgtgagaccccttgtctccctcctgcatctgaactgctcaggactccagaatttcgaggcccttatggcgcttacaaatctagccggtatcagcgagcgcctgaggcagaaaattctcaaggagaaggccgttcccatgatcgagggatacatgtttgaggaacatgaaatgattcggagggccgctaccgagtgtatgtgcaatctcgctatgtcaaaggaggtgcaggacttatttgaggctcagggcaatgatcgcctcaagttgctggtcctatatagcggtgaagacgacgagctacttcagcgagccgctgcagggggtcttgccatgctcacctctatgcgccctacactctgtagccggattcctcaggtaaccactcattggctggagatcctacaagcacttctcttaagctccaaccaggaattacagcacaggggagccgtcgttgtgctaaatatggtggaagcaagcagggagattgcatcaaccttaatggagagcgaaatgatggaaatccttagtgtgttagctaaaggggaccatagtcctgttacgcgagccgcagccgcttgccttgataaggcagtggaatatggactgatccagccaaatcaggacggagaatag

SEQ ID NO: 32278 - DNA, 4002 bp, Artificial Sequence
  derived and/or modified sequence
acttaacaaccgaagtaacccgcaatgcggaagggcgaggggattgcgagtcaccgagtttcccgcgcggcttgagtcacggcctagaaagagagatgttggggttcccaggaccaggacagaggtggtagtgaactctcatgggcatccagagaaggtcaggccccttgctgacaggcctatctgtggggctactgctgctcttcagctgggtgacccttgtccagccaacctctctctcagctctggtccaccaccctcacttgtgccagaccacccgggatgtccatggccgtcactaccctggtttcttttgccctcgtctgtctgattctccagaggaagcctactgctgccacctgcaggctgcagggggctcctgctgcacccgggctgaatttgaggccctgtaccaagtcaatctgtccgctcttccgcccccgcccatcctcaggggcccaggcccgctcctagtgctgggcctctacaacctactggttgtgaccctgatgaccgtagacctcgtgcacttctgctgcggtcggggccggagtctgggctggagccaccgcaggcctccctctgggtcctccgccgcgagctccctgcaggtctctgcggggacagcttaggtgcgcccggagcttgcctgcacctgcgatccagagccaagcgccccgcccctgcccgggcgcgctccctccttagccctgcccctctctgaccccacctccgacgcaagagtggggcggggcagctgccggtggcgtcccgaacccagactcgccccgccccagagactgcgcctgcgcgggcacgagacaacctctccgcgatgactgccagctcagtggagcagctgcggaaggagggcaatgagctgttcaaatgtggagactacgggggcgccctggcggcctacactcaggccctgggtctggacgcgacgccccaggaccaggccgttctgcaccggaaccgggccgcctgccacctcaagctggaagattacgacaaagcagaaacagaggcatccaaagccattgaaaaggatggtggggatgtcaaagcactctaccggcggagccaagccctagagaagctgggccgcctggaccaggctgtccttgacctgcagagatgtgtgagcttggagcccaagaacaaagttttccaggaggccttgcggaacatcgggggccagattcaggagaaggtgcgatacatgtcctcgacggatgccaaagtggaacagatgtttcagatactgttggacccagaagagaagggcactgagaaaaagcaaaaggcttctcagaacctggtggtgctggccagggaggatgctggagcggagaagatcttccggagtaatggggttcagctcttgcaacgtttactggacatgggagagactgacctcatgctggcggctctgcgtacgctggttggcatttgctctgagcatcagtcacggacagtggcaaccctgagcatactgggaactcggcgagtagtctccatcctgggcgtggaaagccaggctgtgtccctggctgcctgccacctgctgcaggttatgtttgatgccctcaaggaaggtgtcaaaaaaggcttccgaggcaaagaaggtgccatcattgtggatcctgcccgggagctgaaggtcctcatcagtaacctcttagatctgctgacagaggtgggggtctctggccaaggccgagacaatgccctgaccctcctgattaaagcggtgccccggaagtctctcaaggaccccaacaacagcctcaccctctgggtcatcgaccaaggtctgaaaaagattttggaagtggggggctctctacaggaccctcctggggagctcgcagtgaccgcaaacagccgcatgagcgcctctattctcctcagcaagctctttgatgacctcaagtgtgatgcggagagggagaatttccacagactttgtgaaaactacatcaagagctggtttgagggccaagggctggccgggaagctacgggccatccagacggtgtcctgcctcctgcagggcccatgtgacgctggcaaccgggccttggagctgagcggtgtcatggagagtgtgattgctctgtgtgcctctgagcaggaggaggagcagctggtggccgtggaggctctgatccatgcagccggcaaggctaagcgggcctcattcatcactgccaatggtgtctcgctgctgaaggacctatataagtgcagcgagaaggacagcatccgcatccgggcgctagtgggactctgtaagctcggttcggctggagggactgacttcagcatgaagcagtttgctgaaggctccactctcaaactggctaagcagtgtcgaaagtggctgtgcaatgaccagatcgacgcaggcactcggcgctgggcagtggagggcctggcttacctgacctttgatgccgacgtgaaggaagagtttgtggaggatgcggctgctctgaaagctctgttccagctcagcaggttggaggagaggtcagtgctctttgcggtggcctcagcgctggtgaactgcaccaacagctatgactacgaggagcccgaccccaagatggtggagctggccaagtatgccaagcagcatgtgcccgagcagcaccccaaggacaagccaagcttcgtgcgggctcgggtgaagaagctgctggcagcgggtgtggtgtcggccatggtgtgcatggtgaagacggagagccctgtgctgaccagttcctgcagagagctgctctccagggtcttcttggctttagtggaagaggtagaggaccgaggcactgtggttgcccagggaggcggcagggcgctgatcccgctggccctggaaggcacggacgtggggcagacaaaggcagcccaggcccttgccaagctcaccatcacctccaacccggagatgaccttccctggcgagcggatctatgaggtggtccggcccctcgtctccctgttgcacctcaactgctcaggcctgcagaacttcgaggcgctcatggccctaacaaacctggctgggatcagcgagaggctccggcagaagatcctgaaggagaaggctgtgcccatgatagaaggctacatgtttgaggagcatgagatgatccgccgggcagccacggagtgcatgtgtaacttggccatgagcaaggaggtgcaggacctcttcgaagcccagggcaatgaccgactgaagctgctggtgctgtacagtggagaggatgatgagctgctacagcgggcagctgccgggggcttggccatgcttacctccatgcggcccacgctctgcagccgcattccccaagtgaccacacactggctggagatcctgcaggccctgcttctgagctccaaccaggagctgcagcaccggggtgctgtggtggtgctgaacatggtggaggcctcgagggagattgccagcaccctgatggagagtgagatgatggagatcttgtcagtgctagctaagggtgaccacagccctgtcacaagggctgctgcagcctgcctggacaaagcagtggaatatgggcttatccaacccaaccaagatggagagtgagggggttgtccctgggcccaaggctcatgcacacgctacctattgtggcacggagagtaaggacggaagcagctttggctggtggtggctggcatgcccaatactcttgcccatcctcgcttgctgccctaggatgtcctctgttctgagtcagcggccacgttcagtcacacagccctgcttggccagcactgcctgcagcctcactcagaggggccctttttctgtactactgtagtcagctgggaatggggaaggtgcatcccaacacagcctgtggatcctggggcatctggaagggcgcacacatcagcagcctcaccagctgtgagcctgctatcaggcctgcccctccaataaaagtgtgtagaactcca

SEQ ID NO: 32279 - protein, 1431 aa, Artificial Sequence
  derived and/or modified sequence
MDRRNDYGYRVPLFQGPLPPPGSLGLPFPPDIQTETTEEDSVLLMHTLLAATKDSLAMDPPVVNRPKKSKTKKAPIKTITKAAPAAPPVPAANEIATNKPKITWQALNLPVITQISQALPTTEVTNTQASSVTAQPKKANKMKRVTAKAAQGSQSPTGHEGGTIQLKSPLQVLKLPVISQNIHAPIANESASSQALITSIKPKKASKAKKAANKAIASATEVSLAATATHTATTQGQITNETASIHTTAASIRTKKASKARKTIAKVINTDTEHIEALNVTDAATRQIEASVVAIRPKKSKGKKAASRGPNSVSEISEAPLATQIVTNQALAATLRVKRGSRARKAATKARATESQTPNADQGAQAKIASAQTNVSALETQVAAAVQALADDYLAQLSLEPTTRTRGKRNRKSKHLNGDERSGSNYRRIPWGRRPAPPRDVAILQERANKLVKYLLVKDQTKIPIKRSDMLRDVIQEYDEYFPEIIERASYTLEKMFRVNLKEIDKQSSLYILISTQESSAGILGTTKDTPKLGLLMVILSVIFMNGNKASEAVIWEVLRKLGLRPGVRHSLFGEVRKLITDEFVKQKYLEYKRVPNSRPPEYEFFWGLRSYHETSKMKVLKFACRVQKKDPKDWAVQYREAVEMEVQAAAVAVAEAEARAEARAQMGIGEEAVAGPWNWDDMDIDCLTREELGDDAQAWSRFSFEIEARAQENADASTNVNFSRGASTRAGFSDGASISFNGAPSSSGGFSGGPGITFGVAPSTSASFSNTASISFGGTLSTSSSFSSAASISFGCAHSTSTSFSSEASISFGGMPCTSASFSGGVSSSFSGPLSTSATFSGGASSGFGGTLSTTAGFSGVLSTSTSFGSAPTTSTVFSSALSTSTGFGGILSTSVCFGGSPSSSGSFGGTLSTSICFGGSPCTSTGFGGTLSTSVSFGGSSSTSANFGGTLSTSICFDGSPSTGAGFGGALNTSASFGSVLNTSTGFGGAMSTSADFGGTLSTSVCFGGSPGTSVSFGSALNTNAGYGGAVSTNTDFGGTLSTSVCFGGSPSTSAGFGGALNTNASFGCAVSTSASFSGAVSTSACFSGAPITNPGFGGAFSTSAGFGGALSTAADFGGTPSNSIGFGAAPSTSVSFGGAHGTSLCFGGAPSTSLCFGSASNTNLCFGGPPSTSACFSGATSPSFCDGPSTSTGFSFGNGLSTNAGFGGGLNTSAGFGGGLGTSAGFSGGLSTSSGFDGGLGTSAGFGGGPGTSTGFGGGLGTSAGFSGGLGTSAGFGGGLVTSDGFGGGLGTNASFGSTLGTSAGFSGGLSTSDGFGSRPNASFDRGLSTIIGFGSGSNTSTGFTGEPSTSTGFSSGPSSIVGFSGGPSTGVGFCSGPSTSGFSGGPSTGAGFGGGPNTGAGFGGGPSTSAGFGSGAASLGACGFSYG

SEQ ID NO: 32280 - protein, 169 aa, Artificial Sequence
  derived and/or modified sequence
MDRRNDYGYRVPLFQGPLPPPGSLGLPFPPDIQTETTEEDSVLLMHTLLAATKDSLAMDPPVVNRPKKSKTKKAPIKTITKAAPAAPPVPAANEIATNKPKITWQALNLPVITQISQALPTTEVTNTQASSVTAQPKKANKMKRVTAKAAQGSQSPTGHEGGTIQLKSP

SEQ ID NO: 32281 - protein, 168 aa, Artificial Sequence
  derived and/or modified sequence
MDRRNDYGYRVPLFQGPLPPPGSLGLPFPPDIQTETTEEDSVLLMHTLLAATKDSLAMDPPVVNRPKKSKTKKAPIKTITKAAPAAPPVPAANEIATNKPKITWQALNLPVITQISQALPTTEVTNTQASSVTAQPKKANKMKRVTAKAAQGSQSPTGHEGGTIQLKS

SEQ ID NO: 32282 - DNA, 4296 bp, Artificial Sequence
  derived and/or modified sequence
atggacagaagaaacgactacggctacagagtgcccctgttccagggccccctgcccccccccggcagcctgggcctgcccttcccccccgacatccagaccgagaccaccgaggaggacagcgtgctgctgatgcacaccctgctggccgccaccaaggacagcctggccatggacccccccgtggtgaacagacccaagaagagcaagaccaagaaggcccccatcaagaccatcaccaaggccgcccccgccgccccccccgtgcccgccgccaacgagatcgccaccaacaagcccaagatcacctggcaggccctgaacctgcccgtgatcacccagatcagccaggccctgcccaccaccgaggtgaccaacacccaggccagcagcgtgaccgcccagcccaagaaggccaacaagatgaagagagtgaccgccaaggccgcccagggcagccagagccccaccggccacgagggcggcaccatccagctgaagagccccctgcaggtgctgaagctgcccgtgatcagccagaacatccacgcccccatcgccaacgagagcgccagcagccaggccctgatcaccagcatcaagcccaagaaggccagcaaggccaagaaggccgccaacaaggccatcgccagcgccaccgaggtgagcctggccgccaccgccacccacaccgccaccacccagggccagatcaccaacgagaccgccagcatccacaccaccgccgccagcatcagaaccaagaaggccagcaaggccagaaagaccatcgccaaggtgatcaacaccgacaccgagcacatcgaggccctgaacgtgaccgacgccgccaccagacagatcgaggccagcgtggtggccatcagacccaagaagagcaagggcaagaaggccgccagcagaggccccaacagcgtgagcgagatcagcgaggcccccctggccacccagatcgtgaccaaccaggccctggccgccaccctgagagtgaagagaggcagcagagccagaaaggccgccaccaaggccagagccaccgagagccagacccccaacgccgaccagggcgcccaggccaagatcgccagcgcccagaccaacgtgagcgccctggagacccaggtggccgccgccgtgcaggccctggccgacgactacctggcccagctgagcctggagcccaccaccagaaccagaggcaagagaaacagaaagagcaagcacctgaacggcgacgagagaagcggcagcaactacagaagaatcccctggggcagaagacccgccccccccagagacgtggccatcctgcaggagagagccaacaagctggtgaagtacctgctggtgaaggaccagaccaagatccccatcaagagaagcgacatgctgagagacgtgatccaggagtacgacgagtacttccccgagatcatcgagagagccagctacaccctggagaagatgttcagagtgaacctgaaggagatcgacaagcagagcagcctgtacatcctgatcagcacccaggagagcagcgccggcatcctgggcaccaccaaggacacccccaagctgggcctgctgatggtgatcctgagcgtgatcttcatgaacggcaacaaggccagcgaggccgtgatctgggaggtgctgagaaagctgggcctgagacccggcgtgagacacagcctgttcggcgaggtgagaaagctgatcaccgacgagttcgtgaagcagaagtacctggagtacaagagagtgcccaacagcagaccccccgagtacgagttcttctggggcctgagaagctaccacgagaccagcaagatgaaggtgctgaagttcgcctgcagagtgcagaagaaggaccccaaggactgggccgtgcagtacagagaggccgtggagatggaggtgcaggccgccgccgtggccgtggccgaggccgaggccagagccgaggccagagcccagatgggcatcggcgaggaggccgtggccggcccctggaactgggacgacatggacatcgactgcctgaccagagaggagctgggcgacgacgcccaggcctggagcagattcagcttcgagatcgaggccagagcccaggagaacgccgacgccagcaccaacgtgaacttcagcagaggcgccagcaccagagccggcttcagcgacggcgccagcatcagcttcaacggcgcccccagcagcagcggcggcttcagcggcggccccggcatcaccttcggcgtggcccccagcaccagcgccagcttcagcaacaccgccagcatcagcttcggcggcaccctgagcaccagcagcagcttcagcagcgccgccagcatcagcttcggctgcgcccacagcaccagcaccagcttcagcagcgaggccagcatcagcttcggcggcatgccctgcaccagcgccagcttcagcggcggcgtgagcagcagcttcagcggccccctgagcaccagcgccaccttcagcggcggcgccagcagcggcttcggcggcaccctgagcaccaccgccggcttcagcggcgtgctgagcaccagcaccagcttcggcagcgcccccaccaccagcaccgtgttcagcagcgccctgagcaccagcaccggcttcggcggcatcctgagcaccagcgtgtgcttcggcggcagccccagcagcagcggcagcttcggcggcaccctgagcaccagcatctgcttcggcggcagcccctgcaccagcaccggcttcggcggcaccctgagcaccagcgtgagcttcggcggcagcagcagcaccagcgccaacttcggcggcaccctgagcaccagcatctgcttcgacggcagccccagcaccggcgccggcttcggcggcgccctgaacaccagcgccagcttcggcagcgtgctgaacaccagcaccggcttcggcggcgccatgagcaccagcgccgacttcggcggcaccctgagcaccagcgtgtgcttcggcggcagccccggcaccagcgtgagcttcggcagcgccctgaacaccaacgccggctacggcggcgccgtgagcaccaacaccgacttcggcggcaccctgagcaccagcgtgtgcttcggcggcagccccagcaccagcgccggcttcggcggcgccctgaacaccaacgccagcttcggctgcgccgtgagcaccagcgccagcttcagcggcgccgtgagcaccagcgcctgcttcagcggcgcccccatcaccaaccccggcttcggcggcgccttcagcaccagcgccggcttcggcggcgccctgagcaccgccgccgacttcggcggcacccccagcaacagcatcggcttcggcgccgcccccagcaccagcgtgagcttcggcggcgcccacggcaccagcctgtgcttcggcggcgcccccagcaccagcctgtgcttcggcagcgccagcaacaccaacctgtgcttcggcggcccccccagcaccagcgcctgcttcagcggcgccaccagccccagcttctgcgacggccccagcaccagcaccggcttcagcttcggcaacggcctgagcaccaacgccggcttcggcggcggcctgaacaccagcgccggcttcggcggcggcctgggcaccagcgccggcttcagcggcggcctgagcaccagcagcggcttcgacggcggcctgggcaccagcgccggcttcggcggcggccccggcaccagcaccggcttcggcggcggcctgggcaccagcgccggcttcagcggcggcctgggcaccagcgccggcttcggcggcggcctggtgaccagcgacggcttcggcggcggcctgggcaccaacgccagcttcggcagcaccctgggcaccagcgccggcttcagcggcggcctgagcaccagcgacggcttcggcagcagacccaacgccagcttcgacagaggcctgagcaccatcatcggcttcggcagcggcagcaacaccagcaccggcttcaccggcgagcccagcaccagcaccggcttcagcagcggccccagcagcatcgtgggcttcagcggcggccccagcaccggcgtgggcttctgcagcggccccagcaccagcggcttcagcggcggccccagcaccggcgccggcttcggcggcggccccaacaccggcgccggcttcggcggcggccccagcaccagcgccggcttcggcagcggcgccgccagcctgggcgcctgcggcttcagctacggctag

SEQ ID NO: 32283 - DNA, 4296 bp, Artificial Sequence
  derived and/or modified sequence
atggaccgccggaacgactatggctaccgggtgcccctttttcagggacccctgcctccacctggctctctgggccttccatttccacctgatatccaaacagagactactgaagaagattctgtcttgctcatgcatacgctgttagcagccaccaaggatagtctggccatggatccacccgtagtcaatcgtccgaagaaatcaaagacgaaaaaggcaccaatcaagacaatcaccaaagcagcccccgccgctccacccgtgccagccgctaatgagatcgccacaaataaaccaaaaatcacatggcaggccctgaatttaccagtcatcacccagatctcacaggctctacccactaccgaggtgaccaacacgcaagcctcgagtgtcactgctcagccaaagaaggcaaataaaatgaagagagtaacagcaaaggcagcacaaggatcacaatcaccgaccggtcacgaagggggaacaattcaactaaagagtcctttgcaagtcctgaagcttcctgtgatatctcagaacattcacgcccctattgcaaatgagtctgcatcaagccaggccctgataacctctatcaagccaaagaaggcctccaaagccaagaaagcggccaacaaggccatcgcctcagctaccgaagtctctctggcagcgaccgccacccatacagctacaactcagggacagatcactaatgagaccgcttccatccacacaaccgctgccagcatccgtaccaagaaggcctccaaggcccgtaagacaatagctaaggtaattaatactgacactgagcacattgaggctttgaacgttacagacgcagctactcgtcagattgaagcctccgtggtggctattcgacccaagaagagtaagggtaagaaagccgcatcacgcggccctaattctgttagcgagatctcagaagcaccacttgcaactcagatcgtaacgaaccaagccctcgcagccactctgcgagtcaaacggggcagcagggcccgcaaggcagcaacaaaggcacgagccacagagagtcagacaccgaacgcagatcagggcgcccaggccaagattgcaagcgcacagaccaatgtttctgccctagagacacaagtagccgccgcagtgcaagcgctggccgacgattacctggcacagctttcactggagccgacaactcggacgcgcggtaagcgcaatcgcaaatcaaagcacttgaacggtgacgagcgtagtggtagtaattacagacgaataccctgggggcgccgtccggccccgcctcgagacgtcgcaatcttgcaggagagggctaacaagttggtaaaatatctgttggtgaaagaccagacaaaaataccaatcaagcggagcgatatgctccgggatgtcatccaagaatacgatgaatactttcctgagattatagagcgggctagttacaccttagagaagatgtttcgcgtgaacctcaaggaaatcgacaagcagtcttctctgtacatcttaatctcaacccaggaatctagtgcaggcatcctcggcactactaaggacactcctaagctaggcttgctcatggtgatcctcagtgtaattttcatgaacgggaacaaggccagtgaagcagtgatctgggaggtgctcaggaaactcggactgcgccccggagtccgtcattctttattcggggaggttcgaaaactgatcacagatgagtttgtgaagcaaaagtatctcgagtacaaacgggtccctaatagccggcctcccgagtacgaatttttctggggtttaaggtcataccacgaaacctctaagatgaaggtgctgaagtttgcatgtagggtgcagaaaaaagatccaaaagattgggccgttcagtaccgggaagccgtggagatggaagtgcaagccgctgccgtggctgttgcggaggccgaagcccgcgcagaagcaagagcacagatggggattggggaagaagccgtggctgggccttggaattgggatgacatggacattgactgtctcacccgcgaggagctgggagacgatgctcaggcgtggtcccgattttcgtttgaaattgaggcaagagctcaggagaacgccgacgcctccaccaacgtcaacttctcacgcggagcatcaacacgggccggtttttctgatggggcgagtatcagctttaacggggcaccttcttcaagtggggggttctcaggcggaccaggtatcacctttggggtcgccccgtctaccagtgcatccttttctaacaccgcaagcataagttttggaggaactctcagcacctcaagttccttctcctctgccgcgtctatcagctttgggtgcgcacactccactagtacgtccttctcatctgaggcctcaattagcttcggtggaatgccctgtaccagcgcatctttttctgggggcgtgtccagctcattctccggaccacttagcacatccgcgacctttagtggcggagcatccagcggctttggcgggacactgtccactacagctggatttagtggcgtgctttctacttccacctcattcggatctgctcctaccacttcgaccgtatttagtagtgccctgtccacttccacaggctttggcgggatactgagcacctccgtatgtttcggagggtctcccagtagtagcggctcctttggcgggaccctctccacctctatttgctttgggggcagtccatgcacctcaacaggctttggcggcacgcttagcaccagtgttagcttcgggggatcctccagtacctctgcaaacttcgggggcacgttgagtaccagtatctgtttcgatgggtcacctagcaccggagccggattcgggggcgccctgaatacaagcgcctcttttgggagcgtgttgaatacaagtacagggttcgggggagcgatgtcaaccagtgcagacttcggcggaactctgtctacctccgtctgtttcgggggcagccccggtaccagcgtttcctttggctcagccctgaacaccaacgctggctacggcggagccgttagcaccaacaccgactttggtgggaccctgagcacctcagtgtgcttcggcggatctcctagcacatctgctgggtttgggggcgcgctcaacacaaacgcctccttcggttgcgccgtctctacatctgccagtttttctggcgccgtgtcgacttctgcctgtttctcaggcgcaccaatcaccaacccaggcttcggaggcgcattttcaaccagcgccgggtttggaggtgccttgagcacggcagccgacttcggcgggaccccctccaacagcatcgggttcggcgcagcaccaagcactagtgtgagcttcggaggagcccacgggacgtccttgtgcttcggaggggccccttcaacctccctgtgttttggctcagcttctaatacgaacttatgcttcggcggtcctcctagcacaagcgcatgcttcagcggcgcaactagccccagcttttgcgatggaccctccacctcaaccggattcagcttcggaaatgggctgtctaccaacgctggctttggtggtgggctcaataccagcgccggcttcggcggcggcctgggaacctctgccggattcagtggcggcctgtccacatccagcggctttgacggaggcctgggaacaagcgctggctttggaggtggcccagggacaagtaccggttttggaggcggcctagggaccagcgccgggttttctggcggccttggcacttcagccggcttcggggggggtcttgtcacctcggatggttttggaggtggactcggcacgaatgcctcattcgggagcactttgggaactagtgccggattcagcgggggtttaagcacatctgatgggtttggcagtaggccaaacgcctccttcgaccgcggattgtcaacaatcataggttttggaagcgggagcaacacatctacaggtttcaccggcgagccctccacttcaaccggatttagctcggggcccagcagcattgtagggttctctggcggcccgtctacgggcgtggggttttgctcagggccaagcacctccggattttccggtgggccttcaactggggccggatttgggggtggccccaataccggcgccggctttggggggggaccatctacgtcagccggctttggttcgggggccgcgagcctgggcgcttgcggcttcagctatgggtag

SEQ ID NO: 32284 - DNA, 4296 bp, Artificial Sequence
  derived and/or modified sequence
atggacagaagaaatgactatggctacagagtgcccctcttccagggccccctgcccccacctggcagcctgggcctgcccttccccccagacatccagacagagaccacagaagaagattctgtgctgctgatgcacaccctgctggccgccaccaaggacagcctggccatggacccccctgtggtgaaccggcccaagaagagcaagaccaagaaggcccccatcaagaccatcaccaaggccgccccagctgcccctcctgtgcctgctgccaatgaaattgccaccaacaagcccaagatcacctggcaggccctgaacctgcccgtcatcacccagatcagccaggccctgcccaccacagaggtgaccaacacccaggccagctctgtgacagcccagcccaagaaggccaacaagatgaagagggtgacagccaaggccgcccagggcagccagagccccactggacatgaaggaggcaccatccagctgaagagccccctgcaggtgctgaagctgcccgtcatcagccagaacatccacgcccccatcgccaatgaaagtgccagcagccaggccctgatcaccagcatcaagcccaagaaggccagcaaggccaagaaggccgccaacaaggccatcgccagcgccacagaggtgtccctggccgccacagccacccacacagccaccacccagggccagatcaccaatgaaacagccagcatccacaccacagctgccagcatccgcaccaagaaggccagcaaggccaggaagaccatcgccaaggtgatcaacacagacacagagcacatcgaggccctgaatgtgacagatgctgccacccggcagatcgaggcctctgtggtggccatccggcccaagaagagcaagggcaagaaggccgccagccggggccccaacagcgtgtctgagatcagcgaggcccccctggccacccagatcgtgaccaaccaggccctggccgccaccctgcgggtgaagaggggcagccgggccaggaaggccgccaccaaggcccgggccacagagagccagaccccaaatgctgaccagggcgcccaggccaagatcgccagcgcccagaccaacgtgtctgccctggagacccaggtggccgctgctgtgcaggccctggctgatgactacctggcccagctgagcctggagcccaccaccaggacccggggcaagaggaacaggaagagcaagcacctgaatggagatgagaggagcggcagcaactaccgccgcatcccctggggcagaagacctgcccccccaagagatgtggccatcctgcaggagcgggccaacaagctggtgaagtacctgctggtgaaggaccagaccaagatccccatcaagagaagtgacatgctgagagatgtgatccaggagtatgatgagtacttccctgagatcatcgagcgggccagctacaccctggagaagatgttccgggtgaacctgaaggagattgacaagcagagcagcctgtacatcctgatcagcacccaggagagcagcgctggcatcctgggcaccaccaaggacacccccaagctgggcctgctgatggtgatcctgagcgtcatcttcatgaatggaaacaaggccagcgaggccgtcatctgggaggtgctgaggaagctgggcctgcggcctggggtgcgccacagcctgtttggagaggtgaggaagctgatcacagatgaatttgtgaagcagaagtacctggagtacaagagggtgcccaacagccggcccccagaatatgagttcttctggggcctgcggagctaccacgagaccagcaagatgaaggtgctgaagtttgcctgccgggtgcagaagaaggaccccaaggactgggccgtgcagtaccgggaggccgtggagatggaggtgcaggccgctgctgtggccgtggccgaggccgaggcccgggcagaggcccgggcccagatgggcattggagaggaggccgtggccggcccctggaactgggatgacatggacatcgactgcctgacccgggaggagctgggagatgatgcccaggcctggagccgcttctcctttgaaattgaggcccgggcccaggagaatgctgatgccagcaccaacgtgaacttcagcagaggagccagcaccagggctggcttcagtgatggagccagcatctccttcaacggggcccccagcagcagcggcggcttcagcggcggccctggcatcacctttggagtggcccccagcaccagcgccagcttcagcaacacagccagcatcagctttggaggcaccctgagcaccagcagcagcttcagcagcgctgccagcatcagctttggctgtgcccacagcaccagcaccagcttcagcagcgaggccagcatcagctttggaggcatgccctgcaccagcgccagcttcagcggcggcgtgagcagcagcttcagcggccccctgagcaccagcgccaccttcagcggcggggccagcagcggctttggaggcaccctgagcaccacagctggcttcagcggcgtgctgagcaccagcaccagctttggaagtgcccccaccaccagcacagtgttcagcagcgccctgagcaccagcactggatttggaggcatcctgagcacctctgtgtgctttggaggcagccccagcagcagcggcagctttggaggcaccctgagcaccagcatctgctttggaggcagcccctgcaccagcactggatttggaggcaccctgagcacctctgtgtcctttggaggcagcagcagcaccagcgccaactttggaggcaccctgagcaccagcatctgctttgatggcagccccagcactggagctggctttggaggagccctgaacaccagcgccagctttggatctgtgctgaacaccagcactggatttggaggagccatgagcaccagcgctgactttggaggcaccctgagcacctctgtgtgctttggaggcagccctggcacctctgtgtcctttggaagtgccctgaacaccaatgccggctatggaggagctgtgtccaccaacacagactttggaggcaccctgagcacctctgtgtgctttggaggcagccccagcaccagcgctggctttggaggagccctgaacaccaatgccagctttggctgtgctgtgtccaccagcgccagcttcagcggggctgtgtccaccagcgcctgcttcagcggggcccccatcaccaaccctggctttggaggagccttcagcaccagcgctggctttggaggagccctgagcacagctgctgactttggaggcacccccagcaacagcattggatttggagctgcccccagcacctctgtgtcctttggaggagcccacggcaccagcctgtgctttggaggagcccccagcaccagcctgtgctttggaagtgccagcaacaccaacctgtgctttggaggcccccccagcaccagcgcctgcttcagcggggccaccagccccagcttctgtgatggccccagcaccagcacaggcttctcctttggaaatggcctgagcaccaatgccggctttggaggcggcctgaacaccagcgctggctttggaggcggcctgggcaccagcgctggcttcagcggcggcctgagcaccagcagcggctttgatggcggcctgggcaccagcgctggctttggaggcggccctggcaccagcactggatttggaggcggcctgggcaccagcgctggcttcagcggcggcctgggcaccagcgctggctttggaggcggcctggtgaccagtgatggctttggaggcggcctgggcaccaatgccagctttggcagcaccctgggcaccagcgctggcttcagcggcggcctgagcaccagtgatggcttcggcagccggcccaatgccagctttgaccggggcctgagcaccatcattggatttggaagtggcagcaacaccagcacaggcttcaccggggagcccagcaccagcacaggcttcagcagcggccccagcagcatcgtgggcttcagcggcggccccagcactggagtgggcttctgcagcggccccagcaccagcggcttcagcggcggccccagcactggagctggctttggaggcggccccaacacaggagctggctttggaggcggccccagcaccagcgctggcttcggcagcggggccgccagcctgggcgcctgtggcttctcctatggatag

SEQ ID NO: 32285 - DNA, 4296 bp, Artificial Sequence
  derived and/or modified sequence
atggaccggcggaacgactacggctaccgggtgcccctgttccagggacccctgccgccaccagggtccttgggactgcctttcccccctgacatacagacagagaccactgaggaagatagcgtactgttgatgcatactttactagccgccactaaagacagcctcgccatggatccaccggtcgtaaatcgacctaagaagtcgaagaccaagaaggctccaatcaagaccataaccaaggctgctcccgcagcacctcccgtcccagccgccaacgagatagcaacgaacaagccaaagattacttggcaggctctgaatctgcctgtgattacacaaatcagccaggccttacctaccactgaggttacgaacacgcaggcttcttccgtcaccgcccaaccaaagaaagccaacaaaatgaaacgcgtaaccgccaaagctgcacagggctcacagtcccctactggacacgaaggtggcactattcagctcaaaagcccactgcaggtgctgaagcttccagtgattagtcagaacattcacgcaccaattgccaatgaatctgcttcatcccaagccctcatcacgagtattaaaccaaaaaaggccagcaaggctaagaaagcagccaacaaagcaattgcgtcagccaccgaggttagccttgccgcaaccgccactcacaccgccacaactcagggacagatcaccaacgagaccgcctctatccacaccacagcagcatcaatccggaccaaaaaggccagcaaagctcggaagaccattgctaaggtgattaataccgataccgagcacatcgaagcattgaacgtgactgacgcagcaacgcgtcaaatagaggctagcgtggtggccatccgccctaaaaagtcaaaaggaaagaaggctgctagcagaggcccaaacagcgtgagcgaaatatctgaagccccactggccacccaaattgttacgaatcaggccctcgcggcaacactcagggtaaaacgggggtcaagggcacgcaaagccgctacaaaagctcgggcaacagagtcccagacccctaacgcagaccaaggggcgcaggctaagattgccagcgcgcagactaacgtttcagccttggagacccaggtagcagccgctgtgcaggccctagccgacgattaccttgcccagctgtctctcgagccgactacccggacccgaggcaagcgcaaccgcaaaagcaagcatttaaacggagatgagcgttcagggagcaattatcgtcgcattccctgggggcggcgccctgcccccccaagagatgtggcaatactccaggagagggctaacaagctcgtaaaatatctactggtcaaagaccagaccaagattcctataaagcgctccgatatgctccgtgacgttattcaagagtacgatgaatactttccagaaataattgaacgagcatcctacaccctggagaaaatgttccgggttaacctcaaggaaattgacaagcagagtagcctgtatattctgatatcaacacaggagtccagcgccggcatcctcggaacgaccaaggatactccgaaactgggcctgctgatggttattctgtctgttattttcatgaacggtaataaggcatccgaagccgtgatttgggaggttctgagaaaacttgggttgcgacccggggtgcggcactccctgtttggcgaggtgagaaaattaataacagatgagttcgtaaaacagaagtatctcgagtataagagagtgcctaattcccgcccaccagagtatgagtttttctggggtctgcggtcgtatcatgagacgtctaaaatgaaggttttgaagttcgcctgtcgcgtacagaagaaagatccaaaagactgggcagtccaataccgagaggcagtcgagatggaggttcaagccgctgcagtcgctgtcgctgaggccgaggcacgggccgaggccagggcccagatgggcatcggagaagaggcagtcgcaggaccatggaactgggatgatatggacatcgactgcctgacccgggaggagctgggggatgatgcgcaggcatggtctagattctctttcgagatcgaggcgagggctcaggaaaatgccgatgcatcaacgaacgtgaatttttccagaggcgccagcaccagagccggcttttccgacggcgcttccatctcctttaacggagccccttcctcaagcgggggtttttccggaggtcccggaattacgttcggggtggcaccctcaacttcagcctccttcagcaacacggcatctatttccttcggggggaccttgtcaacgtcatcaagcttcagctctgccgccagcatcagtttcgggtgcgcgcattctacatcaacatccttcagttctgaagctagtatatcctttggtggtatgccctgtacctccgcatctttttcgggaggagtttcatcaagtttctctggacccttgtcaacctccgcaaccttctccggtggcgcctcatctggattcggaggaaccctgagcacaacagcaggattctctggggtgttgtccacatctacatcctttggttcagcccccactacaagcaccgttttttcgagcgcattgtccacttccacgggatttgggggcatcctcagtacatctgtctgtttcggtggttcgcctagtagctccggttcattcggcggtaccctgtctacatcaatttgcttcggcggctccccctgtactagcacgggcttcggcggcaccctgtctaccagcgtcagcttcgggggctcctcctccacgtcagctaactttggtgggaccctgtccacatcgatttgtttcgatggctcccctagcaccggcgcaggcttcgggggggccttaaatacatctgcttctttcggcagtgtattgaatacgtctacaggcttcggtggcgctatgagtacttctgcagactttggaggaaccctctctacttccgtgtgctttgggggatctccggggacatctgtttcatttgggagcgcgctcaatactaacgctggctatggtggcgcggtaagtaccaataccgacttcgggggcacgctttctacaagcgtctgctttggcggttccccgtctacaagcgcagggttcggcggggccttaaacacgaacgctagcttcggctgtgcagtttccacgagtgcctctttcagcggcgccgtttccacatccgcctgtttctcgggggcccctattactaacccaggctttgggggagcattctccacatctgccggctttggaggggctctgagcaccgctgcagacttcggcggaacgccttcgaactcaattgggttcggcgcagccccgtcaacctccgtgagttttggaggggcccacggaacctctctttgcttcggcggcgctccctctacgtccctctgtttcggcagtgcatctaataccaacttgtgtttcgggggccctcccagcactagtgcgtgcttttcaggagcgacatctccgtcattttgcgacggcccgtctacatccacgggcttcagtttcgggaatggcctgtccacgaacgccggcttcggcggtggcctcaacacatctgccgggtttggaggcgggctcggtaccagcgccgggtttagtggaggcttgagcacaagctccggattcgatggcggtcttggcaccagtgcgggctttggtggaggacctggtacttctacggggtttggcggcggactaggtacaagcgcagggttctccgggggcctgggtacatcggccggcttcgggggaggactcgtgacttccgacggatttgggggtggtttgggaaccaatgcttcctttggatccacgctgggcacaagtgcgggattttccggtggtcttagcacctccgatggatttggtagcaggcccaatgcgtccttcgacagaggcctgtcaacgattatcggctttggtagtggctctaacaccagtaccggctttaccggggagccaagtacctccacaggtttttcttccggtcccagctcaatcgtcggcttctccggaggcccatctacaggggtggggttctgtagtggtccctctacttctgggttttctggcgggccaagtacaggggctggcttcggagggggccctaacacaggcgccggattcggcggagggccctctacctcagctggttttggtagtggagccgcatcattaggagcttgcggtttttcctatggctag

SEQ ID NO: 32286 - DNA, 4296 bp, Artificial Sequence
  derived and/or modified sequence
atggatcgcaggaacgactacggttatagagtgcccctgttccagggtccgctccctcctccgggttccctgggtctcccgtttcctcccgacatccaaacagagaccactgaagaggacagcgtgttgctgatgcacacgttgcttgccgctacaaaggatagcctcgccatggacccccctgtcgtgaaccggcctaaaaagtctaaaacaaagaaagcaccaatcaagaccatcacaaaggctgcccctgccgcacctcccgtacccgctgccaacgagattgccactaataagcctaaaatcacctggcaggccctcaatttacccgtgattacgcagatatctcaagcgctgcccaccaccgaagttacaaatacccaggcatctagcgtgaccgctcaacccaagaaagccaacaaaatgaagcgtgtgactgccaaagccgctcagggtagccagtccccaactgggcacgagggcggaaccattcagctaaaatccccactccaagtactgaagctgcccgtgatttctcagaatattcacgcgccaattgccaacgagagcgcttcctcccaggctctgattacgagtatcaaacccaaaaaggcaagcaaggctaaaaaagctgccaataaagccatcgcctccgcaaccgaggtgagcctcgctgcgactgctacccatacagccacgacccaaggtcagatcaccaacgagactgcctcaattcacaccacggctgcctctattcgtaccaagaaggcttctaaggcacggaagactatcgccaaagtgataaatacagatactgagcacattgaagcactgaatgtaactgacgctgcaacccggcagatcgaagcctccgtagtcgcaatcaggcctaaaaaaagtaaagggaagaaagcagcctcccggggacctaattcggtttctgagatttccgaggctcctttagcgacgcaaattgtcacaaaccaggcgcttgcagctacattaagagtgaagaggggatctagagcgagaaaggccgcaacaaaggcccgtgctactgaaagtcagactcccaacgcggatcagggggctcaggctaagattgccagcgcccaaacgaatgtatccgcccttgagactcaggtcgcggctgcggtgcaagctttggctgatgactatttagcgcagctgagcttggagccaaccacgcggactcgtggtaaaaggaacagaaagtccaaacacctaaatggagatgaacggtcaggcagcaattaccgaagaatcccgtggggaagacgtcccgcacctccacgggatgtggccatccttcaggagagagccaataagctagtgaagtatctactcgtgaaagaccagactaagatacccattaaaagatcagacatgttgagggacgtgattcaagagtatgatgagtacttccccgagatcatcgagagggcgtcttacactctggagaaaatgttcagagtcaacttaaaggaaattgacaaacaatcgtccctgtacatattgatcagcacacaggaatccagtgctggcatattgggaacaactaaggataccccgaaacttgggttactgatggtgatcctgagtgtcatttttatgaacggcaataaggcctccgaggcggtgatttgggaagttctgcggaagctcgggctcagacctggagtgcgtcacagcttgtttggcgaggtccgaaagctgattacggacgaattcgtgaaacaaaagtatttagaatacaaaagagtgcctaacagcagacctcccgaatacgaattcttctggggcctacgtagttatcacgaaaccagcaagatgaaggtgcttaagttcgcctgccgagtgcagaagaaggatcccaaagattgggccgtacaatacagggaagccgtagaaatggaagtgcaagctgcggcagtggccgtggctgaggctgaggcgagggccgaagcgagagcgcagatgggcatcggtgaagaagcggtagctgggccatggaattgggacgacatggacatcgactgtcttacacgagaagagctgggggacgacgcccaggcttggtctcgcttctcatttgaaatcgaggctcgcgcacaggagaatgctgacgcaagcacaaacgtgaatttttctagaggcgctagcacacgcgcaggtttttctgacggtgcaagcatttctttcaacggtgccccttcctccagcggaggtttctccggcggacctggcataaccttcggggttgccccttcaacctctgcctcattcagtaatacagcctctatcagcttcggaggcacgctgtccacctcatcatcgtttagttcagccgcttctatctcatttggttgtgcacattcgacgagcacctccttttcctccgaggcgtcgatttccttcggaggaatgccatgtaccagcgccagtttctctgggggtgtgagtagttccttttccggaccactgagcacttcagctacgttttctggaggtgcatcctccgggtttgggggaacgttgtccaccaccgccggtttctcaggagtgctgagcacatcaacatccttcggttcggcccctaccacaagcacagtgttcagttcggctctgtctacctctaccggattcggaggtatcctgtcaacatctgtgtgtttcgggggtagtccctcttcatccggttccttcgggggaaccctgtccacatcaatctgcttcggagggtcgccttgcacatcaactggcttcggtggaacgctgtccaccagcgtctcattcggtggctcctcgagcacttcagcgaactttggaggaacgctgagtacttctatctgttttgacggaagtcctagtacaggggctgggtttggtggcgctctgaatacaagtgcatcattcggatcagtgttaaacacctccactggatttggaggtgctatgagtactagcgcagatttcggcggtaccctgagcacctctgtctgtttcggaggaagcccaggaacttccgtcagtttcggctccgccctcaatactaatgccggatatgggggtgcagtttccacgaacaccgatttcggcggtaccctgtccaccagcgtatgcttcggtggatctcctagtaccagtgccggttttggaggagcactcaacactaacgcaagctttgggtgcgcagtctccacgagtgcaagcttctccggcgctgtctcaacatccgcgtgtttttccggggcaccaatcacaaatcccggatttgggggtgctttctccacatctgccggattcggaggcgctctctcaacagctgcggattttggcggaaccccttctaatagtataggattcggggcagctccctctacatccgtgtcattcggaggggcacatgggacctcactgtgcttcgggggagctcccagcacatcactttgctttggaagcgccagcaatacgaatctctgctttggcggacccccatctacttccgcatgtttctccggggcaacatcccccagcttctgcgacgggccaagcacctctaccgggttcagctttggtaatggcctgtccaccaacgcaggtttcggaggaggtttgaacacttctgctggattcggaggtggcctcggcacgtcggctggtttctcaggtgggttatccaccagcagcggcttcgatggcggacttggcaccagcgctggctttggtggaggacccggaaccagcacgggcttcggcggaggcctgggcacaagtgctggtttctccggcggtctcgggactagcgcagggttcgggggaggtttagttactagcgacggtttcggcggtggcctgggcactaacgccagtttcggcagcaccttgggaacctccgcgggtttcagcggagggctcagtactagtgatggattcgggtctagacccaacgcctctttcgaccggggactcagtaccatcatcggatttggaagcggttctaacacctccaccgggttcacaggagaaccaagcactagtaccggcttcagctccggaccttcatctattgtaggtttctctggcggacctagcactggtgtcggtttctgttccgggccaagcactagcggttttagtgggggacctagcactggggctggctttgggggaggcccaaatacaggcgcaggatttgggggaggaccatccacaagcgccggtttcggaagcggcgctgcgtcacttggagcgtgtggattctcatacgggtag

SEQ ID NO: 32287 - DNA, 4647 bp, Artificial Sequence
  derived and/or modified sequence
gggggataggctcagacacaaggagaggcttggagagagcagacgccttctggattcaagaagacgaggcccattcccctcaggctcacctgttactcggcctcccagaaagatggataggagaaatgactacggatatagggtgcctctatttcagggccctctgcctcccccggggagcctggggcttcccttccctccagatatacagactgagaccacagaagaggacagtgtcctgctgatgcataccctgttggcggcaaccaaggactccctggccatggacccaccagttgtcaaccggcctaagaaaagcaagaccaagaaggcccctataaagactattactaaggctgcacctgctgcccctccagtcccagctgccaatgagattgccaccaacaagcccaaaataacttggcaggctttaaacctgccagtcattacccagatcagccaggctttacctaccactgaggtaaccaatactcaggcttcttcagtcactgctcagcctaagaaagccaacaagatgaagagagttactgccaaggcagcccaaggctcccaatccccaactggccatgagggtggcactatacagctgaagtcacccttgcaggtcctaaagctaccagtcatctcacagaatattcacgctccaattgccaatgagtcagccagttcccaagccttgataacctctatcaagcctaagaaagcttccaaggctaagaaggctgcaaataaggccatagctagtgccaccgaggtctcgctggctgcaactgccacccatacagctaccacccaaggccaaattaccaatgagacagccagtatccacaccacagcagcctccatccgaaccaagaaagcctccaaagccaggaagacaattgctaaggtcataaatactgacactgagcatatagaggctctaaatgtcactgacgcagctaccaggcagattgaggcctcagtagtggctatcaggcccaaaaaatccaagggcaagaaggctgccagcaggggcccaaattctgtctctgagatctctgaggccccacttgccactcagatagtcacaaaccaagccctggcagccaccctgcgggtcaagagagggtctagggctcggaaggctgccactaaggctcgggcaactgaaagccagactccaaatgctgaccaaggggcccaggccaagatagcctctgctcagaccaacgtaagtgcccttgagactcaggttgctgctgctgtccaggccctggcagatgactatctggctcagttgagcctggagcccacaaccaggacccggggcaaaagaaaccgaaagtccaagcatctgaatggggatgagagaagtggcagtaattacaggcggatcccatggggccggaggcctgcaccaccgcgagatgtggccattttacaagaaagggctaataagttggtgaaatacctgttggttaaggaccagacaaagatccccatcaaacgctcagacatgctgagggatgtcatccaagaatatgatgaatatttcccagaaatcattgaacgagcaagctacactctggagaagatgtttcgagtcaatctgaaagaaattgataagcaaagtagcttgtatattctcatcagcactcaggaatcctctgcaggcatactgggaacgaccaaggacacacccaagctgggtctcctcatggtgattctgagtgtcatttttatgaatggcaacaaggccagtgaggctgtcatctgggaggtgctgcgcaagttggggctgcgccctggggtgaggcattcactctttggggaagtgaggaagctcatcacagacgagtttgtgaagcagaagtacctggagtacaagagggtccctaacagcagaccacctgaatatgagttcttctggggcttgcgctcctaccacgagactagcaagatgaaagtcctcaagtttgcatgcagggtgcagaagaaagaccccaaggactgggctgtgcagtaccgcgaggcagtggagatggaagtccaagctgcagctgtggctgtggctgaggctgaagccagggctgaggcaagagcccaaatggggattggagaggaagctgtggctgggccctggaattgggatgacatggatatcgactgcctaacaagggaagagttaggcgatgatgctcaggcctggagcagattttcatttgaaattgaggccagagcccaagaaaatgcagatgccagcaccaacgtcaacttcagcagaggagctagtaccagggctggcttcagcgatggtgctagtattagcttcaatggtgcacccagctccagtggtggcttcagtggtggacctggcattacctttggtgttgcacccagcaccagtgccagcttcagcaatacagccagcattagctttggtggtacactgagcactagctccagcttcagcagcgcagccagcattagctttggttgtgcacacagcaccagcactagtttcagcagtgaagccagcattagctttggtggcatgccttgtaccagtgccagctttagtggtggagtcagctctagttttagtggcccactcagcaccagtgccactttcagtggtggagccagctctggctttggaggcacactcagcaccacggctggctttagtggtgtactcagcactagcaccagctttggcagtgcacccacaacgagcacagtcttcagtagtgcgcttagcaccagcactggctttggaggcatactcagcaccagtgtctgttttggtggctctcccagctccagtggtagctttggtggtacactcagtaccagtatctgcttcggtggctctccctgcaccagcactggctttggaggcacacttagcaccagtgtctcctttggtggctcttccagcaccagtgccaattttggtggtacactaagtaccagcatctgctttgatggctctcccagcactggtgctggctttggtggtgctctcaacaccagtgccagctttggcagtgtgctcaacaccagtactggttttggtggtgctatgagcaccagtgctgactttggcggtacactaagcaccagtgtctgctttggtggctctcctggcaccagtgtcagctttggcagtgcactcaacaccaatgctggttatggtggtgctgtcagcaccaacactgactttggtggtacactaagcaccagcgtctgttttggtggctctcccagcaccagtgctggctttggtggtgcactcaacaccaatgccagctttggctgtgccgtcagcaccagtgccagcttcagtggtgctgtcagcaccagtgcttgcttcagtggtgcaccaatcaccaaccctggctttggcggtgcatttagcaccagtgctggcttcggtggggcacttagtaccgctgctgacttcggtggtactcccagcaacagcattggctttggtgctgctcccagcaccagtgtcagctttggtggtgctcatggcaccagcctctgttttggtggagctcccagcaccagcctctgctttggcagtgcatctaatactaacctatgctttggtggccctcctagcaccagtgcctgctttagtggtgctaccagccctagtttttgtgatggacccagcaccagtaccggtttcagctttggcaatgggttaagcaccaatgctggatttggtggtggactgaacaccagtgctggctttggtggtggcctaggcaccagtgctggcttcagtggtggcctaagcacaagttctggctttgatggtgggctaggtaccagcgctggcttcggtggaggaccaggcaccagcactggttttggtggtggactgggcaccagtgctggcttcagtggcggactgggcaccagtgctggctttggtggtggactggtcactagtgatggctttggtggtggactgggcaccaatgctagtttcggcagcacacttggcaccagtgctggctttagtggtggcctcagcaccagcgatggctttggcagtaggcctaatgccagcttcgacagaggactgagtaccatcattggctttggcagtggttccaacaccagcactggctttactggcgaacccagcaccagcacgggcttcagtagtggacccagttctattgttggcttcagcggtggaccaagcactggtgttggcttctgcagtggaccaagcaccagtggcttcagcggtggaccgagcacaggagctggcttcggcggtggaccaaacactggtgctggctttggtggtggaccgagcaccagtgctggctttggcagtggagccgccagtcttggtgcctgtggcttctcgtatggctagtgaggtttcagatttattccccatgtttacagataccgctaataaattgcagtagtccttcccatggagccaaagtacatccttggaatctttgtccacacagcagtcaaggcagttatggccaatcagctgagggtgtcatgtgatggaaaaatctgtttgctgttcctgctttattgtttgctttctgtgtgctgtcatattttggtatcagagttacattaaatttgcaaaatgaa

SEQ ID NO: 32288 - protein, 941 aa, Artificial Sequence
  derived and/or modified sequence
MWTEEAGATAEAQESGIRNKSSSSSQIPVVGVVTEDDEAQDVFKPMDLNRVIKLLEETDKDGLEEKQLKFVKKLVQCYQNGLPLRDLAQIFKILNLCSGKIKNQPRFIESAYDIIKLCGLPFLKKKVSDEITYAEDTANSIALLGDLMKIPSSELRIQICKCIVDFYHAEPPKKHIPGYQQASSSYKIQMAEVGGLAKTMVQSMTLLENQLVEKLWVLKVLQHLSTSEVNCTIMMKAQAASGICTHLNDPDPSGQLLFRSSEILWNLLEKSSKEEVIQQLSNLECLLALKEVFKNLFMRGFSHYDRQLRNDILVITTIIAQNPEAPMIECGFTKDLILFATFNEVKSQNLLVKGLKLSNSYEDFELKKLLFNVIVILCKDLPTVQLLIDGKVILALFTYVKKPEKQKIIDWSAAQHEELQLHAIATLSSVAPLLIEEYMSCQGNARVLAFLEWCESEDPFFSHGNSFHGTGGRGNKFAQMRYSLRLLRAVVYLEDETVNKDLCEKGTIQQMIGIFKNIISKPNEKEEAIVLEIQSDILLILSGLCENHIQRKEIFGTEGVDIVLHVMKTDPRKLQSGLGYNVLLFSTLDSIWCCILGCYPSEDYFLEKEGIFLLLDLLALNQKKFCNLILGIMVEFCDNPKTAAHVNAWQGKKDQTAASLLIKLWRKEEKELGVKRDKNGKIIDTKKPLFTSFQEEQKIIPLPANCPSIAVMDVSENIRAKIYAILGKLDFENLPGLSAEDFVTLCIIHRYLDFKIGEIWNEIYEEIKLEKLRPVTTDKKALEAITTASENIGKMVASLQSDIIESQACQDMQNEQKVYAKIQATHKQRELANKSWEDFLARTSNAKTLKKAKSLQEKAIEASRYHKRPQNAIFHQTHIKGLNTTVPSGGVVTVESTPARLVGGPLVDTDIALKKLPIRGGALQRVKAVKIVDAPKKSIPT

SEQ ID NO: 32289 - DNA, 2688 bp, Artificial Sequence
  derived and/or modified sequence
atgtggaccgaggaggccggcgccaccgccgaggcccaggagagcggcatcagaaacaagagcagcagcagcagccagatccccgtggtgggcgtggtgaccgaggacgacgaggcccaggacgtgttcaagcccatggacctgaacagagtgatcaagctgctggaggagaccgacaaggacggcctggaggagaagcagctgaagttcgtgaagaagctggtgcagtgctaccagaacggcctgcccctgagagacctggcccagatcttcaagatcctgaacctgtgcagcggcaagatcaagaaccagcccagattcatcgagagcgcctacgacatcatcaagctgtgcggcctgcccttcctgaagaagaaggtgagcgacgagatcacctacgccgaggacaccgccaacagcatcgccctgctgggcgacctgatgaagatccccagcagcgagctgagaatccagatctgcaagtgcatcgtggacttctaccacgccgagccccccaagaagcacatccccggctaccagcaggccagcagcagctacaagatccagatggccgaggtgggcggcctggccaagaccatggtgcagagcatgaccctgctggagaaccagctggtggagaagctgtgggtgctgaaggtgctgcagcacctgagcaccagcgaggtgaactgcaccatcatgatgaaggcccaggccgccagcggcatctgcacccacctgaacgaccccgaccccagcggccagctgctgttcagaagcagcgagatcctgtggaacctgctggagaagagcagcaaggaggaggtgatccagcagctgagcaacctggagtgcctgctggccctgaaggaggtgttcaagaacctgttcatgagaggcttcagccactacgacagacagctgagaaacgacatcctggtgatcaccaccatcatcgcccagaaccccgaggcccccatgatcgagtgcggcttcaccaaggacctgatcctgttcgccaccttcaacgaggtgaagagccagaacctgctggtgaagggcctgaagctgagcaacagctacgaggacttcgagctgaagaagctgctgttcaacgtgatcgtgatcctgtgcaaggacctgcccaccgtgcagctgctgatcgacggcaaggtgatcctggccctgttcacctacgtgaagaagcccgagaagcagaagatcatcgactggagcgccgcccagcacgaggagctgcagctgcacgccatcgccaccctgagcagcgtggcccccctgctgatcgaggagtacatgagctgccagggcaacgccagagtgctggccttcctggagtggtgcgagagcgaggaccccttcttcagccacggcaacagcttccacggcaccggcggcagaggcaacaagttcgcccagatgagatacagcctgagactgctgagagccgtggtgtacctggaggacgagaccgtgaacaaggacctgtgcgagaagggcaccatccagcagatgatcggcatcttcaagaacatcatcagcaagcccaacgagaaggaggaggccatcgtgctggagatccagagcgacatcctgctgatcctgagcggcctgtgcgagaaccacatccagagaaaggagatcttcggcaccgagggcgtggacatcgtgctgcacgtgatgaagaccgaccccagaaagctgcagagcggcctgggctacaacgtgctgctgttcagcaccctggacagcatctggtgctgcatcctgggctgctaccccagcgaggactacttcctggagaaggagggcatcttcctgctgctggacctgctggccctgaaccagaagaagttctgcaacctgatcctgggcatcatggtggagttctgcgacaaccccaagaccgccgcccacgtgaacgcctggcagggcaagaaggaccagaccgccgccagcctgctgatcaagctgtggagaaaggaggagaaggagctgggcgtgaagagagacaagaacggcaagatcatcgacttcgagaacctgcccggcctgagcgccgaggacttcgtgaccctgtgcatcatccacagatacctggacttcaagatcggcgagatctggaacgagatctacgaggagatcaagctggagaagctgagacccgtgaccaccgacaagaaggccctggaggccatcaccaccgccagcgagaacatcggcaagatggtggccagcctgcagagcgacatcatcgagagccaggcctgccaggacatgcagaacgagcagaaggtgtacgccaagatccaggccacccacaagcagagagagctggccaacaagagctgggaggacttcctggccagaaccagcaacgccaagaccctgaagaaggccaagagcctgcaggagaaggccatcgaggccagcagataccacaagagaccccagaacgccatcttccaccagacccacatcaagggcctgaacaccaccgtgcccagcggcggcgtggtgaccgtggagagcacccccgccagactggtgggcggccccctggtggacaccgacatcgccctgaagaagctgcccatcagaggcggcgccctgcagagagtgaaggccgtgaagatcgtggacgcccccaagaagagcatccccacctag

SEQ ID NO: 32290 - DNA, 2826 bp, Artificial Sequence
  derived and/or modified sequence
atgtggaccgaggaggccggcgccaccgccgaggcccaggagagcggcatcagaaacaagagcagcagcagcagccagatccccgtggtgggcgtggtgaccgaggacgacgaggcccaggacgtgttcaagcccatggacctgaacagagtgatcaagctgctggaggagaccgacaaggacggcctggaggagaagcagctgaagttcgtgaagaagctggtgcagtgctaccagaacggcctgcccctgagagacctggcccagatcttcaagatcctgaacctgtgcagcggcaagatcaagaaccagcccagattcatcgagagcgcctacgacatcatcaagctgtgcggcctgcccttcctgaagaagaaggtgagcgacgagatcacctacgccgaggacaccgccaacagcatcgccctgctgggcgacctgatgaagatccccagcagcgagctgagaatccagatctgcaagtgcatcgtggacttctaccacgccgagccccccaagaagcacatccccggctaccagcaggccagcagcagctacaagatccagatggccgaggtgggcggcctggccaagaccatggtgcagagcatgaccctgctggagaaccagctggtggagaagctgtgggtgctgaaggtgctgcagcacctgagcaccagcgaggtgaactgcaccatcatgatgaaggcccaggccgccagcggcatctgcacccacctgaacgaccccgaccccagcggccagctgctgttcagaagcagcgagatcctgtggaacctgctggagaagagcagcaaggaggaggtgatccagcagctgagcaacctggagtgcctgctggccctgaaggaggtgttcaagaacctgttcatgagaggcttcagccactacgacagacagctgagaaacgacatcctggtgatcaccaccatcatcgcccagaaccccgaggcccccatgatcgagtgcggcttcaccaaggacctgatcctgttcgccaccttcaacgaggtgaagagccagaacctgctggtgaagggcctgaagctgagcaacagctacgaggacttcgagctgaagaagctgctgttcaacgtgatcgtgatcctgtgcaaggacctgcccaccgtgcagctgctgatcgacggcaaggtgatcctggccctgttcacctacgtgaagaagcccgagaagcagaagatcatcgactggagcgccgcccagcacgaggagctgcagctgcacgccatcgccaccctgagcagcgtggcccccctgctgatcgaggagtacatgagctgccagggcaacgccagagtgctggccttcctggagtggtgcgagagcgaggaccccttcttcagccacggcaacagcttccacggcaccggcggcagaggcaacaagttcgcccagatgagatacagcctgagactgctgagagccgtggtgtacctggaggacgagaccgtgaacaaggacctgtgcgagaagggcaccatccagcagatgatcggcatcttcaagaacatcatcagcaagcccaacgagaaggaggaggccatcgtgctggagatccagagcgacatcctgctgatcctgagcggcctgtgcgagaaccacatccagagaaaggagatcttcggcaccgagggcgtggacatcgtgctgcacgtgatgaagaccgaccccagaaagctgcagagcggcctgggctacaacgtgctgctgttcagcaccctggacagcatctggtgctgcatcctgggctgctaccccagcgaggactacttcctggagaaggagggcatcttcctgctgctggacctgctggccctgaaccagaagaagttctgcaacctgatcctgggcatcatggtggagttctgcgacaaccccaagaccgccgcccacgtgaacgcctggcagggcaagaaggaccagaccgccgccagcctgctgatcaagctgtggagaaaggaggagaaggagctgggcgtgaagagagacaagaacggcaagatcatcgacaccaagaagcccctgttcaccagcttccaggaggagcagaagatcatccccctgcccgccaactgccccagcatcgccgtgatggacgtgagcgagaacatcagagccaagatctacgccatcctgggcaagctggacttcgagaacctgcccggcctgagcgccgaggacttcgtgaccctgtgcatcatccacagatacctggacttcaagatcggcgagatctggaacgagatctacgaggagatcaagctggagaagctgagacccgtgaccaccgacaagaaggccctggaggccatcaccaccgccagcgagaacatcggcaagatggtggccagcctgcagagcgacatcatcgagagccaggcctgccaggacatgcagaacgagcagaaggtgtacgccaagatccaggccacccacaagcagagagagctggccaacaagagctgggaggacttcctggccagaaccagcaacgccaagaccctgaagaaggccaagagcctgcaggagaaggccatcgaggccagcagataccacaagagaccccagaacgccatcttccaccagacccacatcaagggcctgaacaccaccgtgcccagcggcggcgtggtgaccgtggagagcacccccgccagactggtgggcggccccctggtggacaccgacatcgccctgaagaagctgcccatcagaggcggcgccctgcagagagtgaaggccgtgaagatcgtggacgcccccaagaagagcatccccacctag

SEQ ID NO: 32291 - DNA, 1437 bp, Artificial Sequence
  derived and/or modified sequence
gagctgcagctgcacgccatcgccaccctgagcagcgtggcccccctgctgatcgaggagtacatgagctgccagggcaacgccagagtgctggccttcctggagtggtgcgagagcgaggaccccttcttcagccacggcaacagcttccacggcaccggcggcagaggcaacaagttcgcccagatgagatacagcctgagactgctgagagccgtggtgtacctggaggacgagaccgtgaacaaggacctgtgcgagaagggcaccatccagcagatgatcggcatcttcaagaacatcatcagcaagcccaacgagaaggaggaggccatcgtgctggagatccagagcgacatcctgctgatcctgagcggcctgtgcgagaaccacatccagagaaaggagatcttcggcaccgagggcgtggacatcgtgctgcacgtgatgaagaccgaccccagaaagctgcagagcggcctgggctacaacgtgctgctgttcagcaccctggacagcatctggtgctgcatcctgggctgctaccccagcgaggactacttcctggagaaggagggcatcttcctgctgctggacctgctggccctgaaccagaagaagttctgcaacctgatcctgggcatcatggtggagttctgcgacaaccccaagaccgccgcccacgtgaacgcctggcagggcaagaaggaccagaccgccgccagcctgctgatcaagctgtggagaaaggaggagaaggagctgggcgtgaagagagacaagaacggcaagatcatcgacttcgagaacctgcccggcctgagcgccgaggacttcgtgaccctgtgcatcatccacagatacctggacttcaagatcggcgagatctggaacgagatctacgaggagatcaagctggagaagctgagacccgtgaccaccgacaagaaggccctggaggccatcaccaccgccagcgagaacatcggcaagatggtggccagcctgcagagcgacatcatcgagagccaggcctgccaggacatgcagaacgagcagaaggtgtacgccaagatccaggccacccacaagcagagagagctggccaacaagagctgggaggacttcctggccagaaccagcaacgccaagaccctgaagaaggccaagagcctgcaggagaaggccatcgaggccagcagataccacaagagaccccagaacgccatcttccaccagacccacatcaagggcctgaacaccaccgtgcccagcggcggcgtggtgaccgtggagagcacccccgccagactggtgggcggccccctggtggacaccgacatcgccctgaagaagctgcccatcagaggcggcgccctgcagagagtgaaggccgtgaagatcgtggacgcccccaagaagagcatccccacctag

SEQ ID NO: 32292 - DNA, 3762 bp, Artificial Sequence
  derived and/or modified sequence
agcaacgcgctggcttgtgttaacaaccggcccgggatcagaggtctgggtcaactggggggcggcagcggcgctaagcggactgtatggcggtggcctaggcccctggcggaattttgggacctttcgcgactctagcgactctcaggctgccttcccttctcggtggcggggcctctttgggcccagcggctgcgggcgcactgtaggacaggaagatccccccactctccaccccgccgccaccggccatgtggacagaggaagccggggcgaccgccgaggcccaggaatccggcatcaggaacaagtctagcagttccagtcaaatcccggtggttggggtggtgacggaggacgatgaggcgcaggatgttttcaagcctatggaccttaatcgtgtcatcaaactcctcgaagagactgataaagatggcttggaagaaaaacaacttaaatttgtcaagaaactggtacagtgttatcagaatggacttccattaagggatttagcacagatatttaaaattctgaatctgtgttcaggaaaaataaaaaaccagcctcgttttatagaatctgcatatgatatcataaaactgtgtggcttgccatttttgaaaaagaaagtgtcggatgaaataacttatgctgaagatactgctaattcaattgcacttctgggtgacttaatgaaaataccaagttctgaattgaggatacaaatttgtaagtgtattgttgatttttatcatgcagaaccaccaaagaagcatattccaggttaccagcaagcgagttcatcatacaagattcaaatggctgaagttggaggattagcaaaaacaatggtccagtcaatgaccttgcttgaaaatcaacttgttgagaaactttgggtacttaaagttctgcagcatctctcaacttctgaagttaattgtactataatgatgaaagcacaagcagccagtggaatctgtactcacctcaatgacccagatccctctggacagcttttatttcgttcatcagaaatactttggaacttgctggaaaaatcttcaaaagaagaagtcatacaacagcttagtaacttggaatgtttgctggctttgaaggaagtatttaaaaatctgtttatgagaggtttcagtcattatgaccgtcagcttagaaatgacatattagtgatcactacaattatagctcaaaatcctgaagcaccaatgattgaatgtggctttaccaaggatttgatactgtttgccacctttaatgaagttaaaagtcaaaatcttttggtaaaaggacttaagctttctaattcctatgaagattttgagttgaagaaattactattcaacgtaattgtgatcttatgtaaagatttacctactgtacagctattaattgatggcaaagttattttggctttgtttacctatgttaagaagcctgagaagcaaaaaataattgactggtctgcagcacagcatgaagaattacaactgcatgcaattgccactttgtcatcagtggctcctttattaatagaagaatacatgtcatgccagggaaatgctcgagtccttgcatttctagaatggtgtgagagtgaagatccgtttttcagtcatggtaacagttttcatggtacaggtggccgaggcaacaagtttgcccagatgcgttacagtttaagactcctgagagccgtggtctaccttgaagatgagactgtaaacaaagatctttgtgaaaagggaacaattcagcaaatgataggaatctttaaaaatataataagcaagcctaatgaaaaggaagaagccattgttttggaaatccagtctgatatattacttatcctatctggcctttgtgagaatcacattcaaaggaaggaaattttcggaactgaaggagtagatatcgttcttcatgtgatgaaaacagaccccaggaagttacagagtggcttaggctataatgtacttctttttagtacattggacagcatttggtgctgtattttgggatgttatccctcagaggattattttcttgaaaaggaaggcatttttctccttttggatttgttagcattgaaccaaaaaaaattctgtaatctaatacttggaataatggttgaattttgtgataatcccaaaactgcagctcatgtcaatgcttggcaagggaagaaggatcagacagctgctagtcttttaattaaattgtggagaaaggaggaaaaagaactaggagtaaaacgtgataaaaatgggaagatcattgattttgaaaatttacctggcctatctgctgaagattttgtcaccctttgtatcatacatagatatcttgattttaaaattggagaaatatggaatgaaatatatgaagaaataaaattagaaaaattaagaccagtcactacagataaaaaagctttggaagctattacaacagcatcagaaaatattggaaagatggttgcttctctgcaaagtgatataattgaaagccaagcatgccaagacatgcaaaatgaacaaaaagtatatgcaaaaatacaggccacgcacaagcaaagagagctggctaataaatcatgggaagatttcttggctagaacatcaaacgctaaaacgttaaagaaagcaaaaagccttcaagaaaaagctatagaagcctccagataccataaacgaccacaaaatgcaatatttcaccaaacacatattaaaggccttaacacaacggtgccctctggtggagtagtaacagtggaaagcactcctgcccgattagtaggaggacctctggttgatacggatattgctcttaaaaaactgcccattcgaggaggagccttgcagagggtgaaagcagttaaaattgtggatgcaccaaaaaagagtattcctacgtaatatactatagagactttttgaaataaagtcagcttataattttttagctgaatatatctttatacatatgtaaagccaatattttagaataagtattttagtataaatattttagtaaaatactataaaaataaaaggacatataatttatttttatggaaaacatcaacatgtaatatcagaagagttgtcatcagtttctttggaaaggctaccaattttactaagtgaaattgtaaaacatagtacatcagttaggactctgttggttgcatgtgaactattctaactagtttaagtcagaaaaaaaatttcttacaggctctatacctatcaaatctaggaggaatttagactacaggcattgctgaatctaaggactaaaactatatgagtaggatcttctccttccctagcagctcctggcttacattctcttaggttcatgcctgtgtctctgtggtttctgcagctgcctatgcatctcaggacccctgattgcccacatgcctacggtagtcctgagccattcaccatgactttggccatggctgagtactgcctattcctggagccagaagcagggcaactccatccaaaacatatggatagagtggggaatcagggtactattatcagaagcaagtatatatgaatattgggcagcaagataaacaataactctgcaacaagtatgttggtcaaaataaaattatgttttctctgctataaaagcaaatgttagtcatgagccaaatggtaaaaaagaaaaaaaaatgcagctggttttactcttaatatataaatatacaaagcaaactct

SEQ ID NO: 32293 - DNA, 3902 bp, Artificial Sequence
  derived and/or modified sequence
agcaacgcgctggcttgtgttaacaaccggcccgggatcagaggtctgggtcaactggggggcggcagcggcgctaagcggactgtatggcggtggcctaggcccctggcggaattttgggacctttcgcgactctagcgactctcaggctgccttcccttctcggtggcggggcctctttgggcccagcggctgcgggcgcactgtaggacaggaagatccccccactctccaccccgccgccaccggccatgtggacagaggaagccggggcgaccgccgaggcccaggaatccggcatcaggaacaagtctagcagttccagtcaaatcccggtggttggggtggtgacggaggacgatgaggcgcaggatgttttcaagcctatggaccttaatcgtgtcatcaaactcctcgaagagactgataaagatggcttggaagaaaaacaacttaaatttgtcaagaaactggtacagtgttatcagaatggacttccattaagggatttagcacagatatttaaaattctgaatctgtgttcaggaaaaataaaaaaccagcctcgttttatagaatctgcatatgatatcataaaactgtgtggcttgccatttttgaaaaagaaagtgtcggatgaaataacttatgctgaagatactgctaattcaattgcacttctgggtgacttaatgaaaataccaagttctgaattgaggatacaaatttgtaagtgtattgttgatttttatcatgcagaaccaccaaagaagcatattccaggttaccagcaagcgagttcatcatacaagattcaaatggctgaagttggaggattagcaaaaacaatggtccagtcaatgaccttgcttgaaaatcaacttgttgagaaactttgggtacttaaagttctgcagcatctctcaacttctgaagttaattgtactataatgatgaaagcacaagcagccagtggaatctgtactcacctcaatgacccagatccctctggacagcttttatttcgttcatcagaaatactttggaacttgctggaaaaatcttcaaaagaagaagtcatacaacagcttagtaacttggaatgtttgctggctttgaaggaagtatttaaaaatctgtttatgagaggtttcagtcattatgaccgtcagcttagaaatgacatattagtgatcactacaattatagctcaaaatcctgaagcaccaatgattgaatgtggctttaccaaggatttgatactgtttgccacctttaatgaagttaaaagtcaaaatcttttggtaaaaggacttaagctttctaattcctatgaagattttgagttgaagaaattactattcaacgtaattgtgatcttatgtaaagatttacctactgtacagctattaattgatggcaaagttattttggctttgtttacctatgttaagaagcctgagaagcaaaaaataattgactggtctgcagcacagcatgaagaattacaactgcatgcaattgccactttgtcatcagtggctcctttattaatagaagaatacatgtcatgccagggaaatgctcgagtccttgcatttctagaatggtgtgagagtgaagatccgtttttcagtcatggtaacagttttcatggtacaggtggccgaggcaacaagtttgcccagatgcgttacagtttaagactcctgagagccgtggtctaccttgaagatgagactgtaaacaaagatctttgtgaaaagggaacaattcagcaaatgataggaatctttaaaaatataataagcaagcctaatgaaaaggaagaagccattgttttggaaatccagtctgatatattacttatcctatctggcctttgtgagaatcacattcaaaggaaggaaattttcggaactgaaggagtagatatcgttcttcatgtgatgaaaacagaccccaggaagttacagagtggcttaggctataatgtacttctttttagtacattggacagcatttggtgctgtattttgggatgttatccctcagaggattattttcttgaaaaggaaggcatttttctccttttggatttgttagcattgaaccaaaaaaaattctgtaatctaatacttggaataatggttgaattttgtgataatcccaaaactgcagctcatgtcaatgcttggcaagggaagaaggatcagacagctgctagtcttttaattaaattgtggagaaaggaggaaaaagaactaggagtaaaacgtgataaaaatgggaagatcattgatacaaaaaaacctctatttactagctttcaagaagagcaaaaaatcatcccactgcctgctaactgcccatctattgcggttatggatgtttctgagaatattagagcaaaaatttatgctatattgggcaaactagattttgaaaatttacctggcctatctgctgaagattttgtcaccctttgtatcatacatagatatcttgattttaaaattggagaaatatggaatgaaatatatgaagaaataaaattagaaaaattaagaccagtcactacagataaaaaagctttggaagctattacaacagcatcagaaaatattggaaagatggttgcttctctgcaaagtgatataattgaaagccaagcatgccaagacatgcaaaatgaacaaaaagtatatgcaaaaatacaggccacgcacaagcaaagagagctggctaataaatcatgggaagatttcttggctagaacatcaaacgctaaaacgttaaagaaagcaaaaagccttcaagaaaaagctatagaagcctccagataccataaacgaccacaaaatgcaatatttcaccaaacacatattaaaggccttaacacaacggtgccctctggtggagtagtaacagtggaaagcactcctgcccgattagtaggaggacctctggttgatacggatattgctcttaaaaaactgcccattcgaggaggagccttgcagagggtgaaagcagttaaaattgtggatgcaccaaaaaagagtattcctacgtaatatactatagagactttttgaaataaagtcagcttataattttttagctgaatatatctttatacatatgtaaagccaatattttagaataagtattttagtataaatattttagtaaaatactataaaaataaaaggacatataatttatttttatggaaaacatcaacatgtaatatcagaagagttgtcatcagtttctttggaaaggctaccaattttactaagtgaaattgtaaaacatagtacatcagttaggactctgttggttgcatgtgaactattctaactagtttaagtcagaaaaaaaatttcttacaggctctatacctatcaaatctaggaggaatttagactacaggcattgctgaatctaaggactaaaactatatgagtaggatcttctccttccctagcagctcctggcttacattctcttaggttcatgcctgtgtctctgtggtttctgcagctgcctatgcatctcaggacccctgattgcccacatgcctacggtagtcctgagccattcaccatgactttggccatggctgagtactgcctattcctggagccagaagcagggcaactccatccaaaacatatggatagagtggggaatcagggtactattatcagaagcaagtatatatgaatattgggcagcaagataaacaataactctgcaacaagtatgttggtcaaaataaaattatgttttctctgctataaaagcaaatgttagtcatgagccaaatggtaaaaaagaaaaaaaaatgcagctggttttactcttaatatataaatatacaaagcaaactctaa

SEQ ID NO: 32294 - DNA, 1489 bp, Artificial Sequence
  derived and/or modified sequence
gaattacaactgcatgcaattgccactttgtcatcagtggctcctttattaatagaagaatacatgtcatgccagggaaatgctcgagtccttgcatttctagaatggtgtgagagtgaagatccgtttttcagtcatggtaacagttttcatggtacaggtggccgaggcaacaagtttgcccagatgcgttacagtttaagactcctgagagccgtggtctaccttgaagatgagactgtaaacaaagatctttgtgaaaagggaacaattcagcaaatgataggaatctttaaaaatataataagcaagcctaatgaaaaggaagaagccattgttttggaaatccagtctgatatattacttatcctatctggcctttgtgagaatcacattcaaaggaaggaaattttcggaactgaaggagtagatatcgttcttcatgtgatgaaaacagaccccaggaagttacagagtggcttaggctataatgtacttctttttagtacattggacagcatttggtgctgtattttgggatgttatccctcagaggattattttcttgaaaaggaaggcatttttctccttttggatttgttagcattgaaccaaaaaaaattctgtaatctaatacttggaataatggttgaattttgtgataatcccaaaactgcagctcatgtcaatgcttggcaagggaagaaggatcagacagctgctagtcttttaattaaattgtggagaaaggaggaaaaagaactaggagtaaaacgtgataaaaatgggaagatcattgattttgaaaatttacctggcctatctgctgaagattttgtcaccctttgtatcatacatagatatcttgattttaaaattggagaaatatggaatgaaatatatgaagaaataaaattagaaaaattaagaccagtcactacagataaaaaagctttggaagctattacaacagcatcagaaaatattggaaagatggttgcttctctgcaaagtgatataattgaaagccaagcatgccaagacatgcaaaatgaacaaaaagtatatgcaaaaatacaggccacgcacaagcaaagagagctggctaataaatcatgggaagatttcttggctagaacatcaaacgctaaaacgttaaagaaagcaaaaagccttcaagaaaaagctatagaagcctccagataccataaacgaccacaaaatgcaatatttcaccaaacacatattaaaggccttaacacaacggtgccctctggtggagtagtaacagtggaaagcactcctgcccgattagtaggaggacctctggttgatacggatattgctcttaaaaaactgcccattcgaggaggagccttgcagagggtgaaagcagttaaaattgtggatgcaccaaaaaagagtattcctacgtaatatactatagagactttttgaaataaagtcagcttataattttttagctgaa

SEQ ID NO: 32295 - DNA, 2688 bp, Artificial Sequence
  derived and/or modified sequence
atgtggacagaggaggcaggcgccacagccgaggctcaagagagtggcatcaggaacaagtcctcctctagctcccagattcctgtcgtgggcgtcgtaaccgaggatgatgaagcacaggatgttttcaagcccatggacttaaatcgcgttatcaaactgttggaggagacggataaagacgggctggaagagaaacaactgaaattcgtgaagaaactcgttcagtgctaccagaacggactacccctgcgcgatctggcacagatctttaagatcctgaatctgtgtagcggaaagattaaaaatcaaccgagattcatagagtccgcatacgacatcatcaagttgtgtggtctgccgttccttaaaaaaaaagtcagcgatgagattacctacgccgaggacaccgccaattctatagccctcctgggagatctgatgaaaattccaagctctgagctgcgaattcagatttgcaagtgcattgtggatttttatcacgctgagccgcctaagaaacacatccctggctatcaacaggcttctagtagctataagattcagatggccgaagttggcggtttagcaaagactatggtccaatctatgacattactcgaaaaccagctggtagagaaactctgggtgctgaaagtgctgcagcatctgtcgacatccgaggtcaattgcactatcatgatgaaggcccaggcagcctctgggatatgcacccacttgaacgaccccgacccatcaggtcaattactgtttagatcctcagagatcctgtggaatctccttgaaaagagctccaaagaggaggtgattcaacagctaagcaacttggaatgtctgctggccctcaaagaagtttttaaaaatctctttatgcgtggattttcccactatgaccgtcagctgaggaacgacatccttgtcattaccactattatcgcccagaaccctgaagcccctatgattgagtgcggcttcaccaaggatttgatcttgttcgcaacattcaatgaggtgaagagtcagaacctgctggtgaaaggcttaaagctgtccaattcttatgaagactttgagctgaagaagttactctttaacgtgatcgtgatactctgcaaagatctgcctacggtgcagctgctcattgacgggaaggtgatcttggctctgtttacgtacgtcaagaagccagagaaacaaaagatcattgattggagtgctgcacaacatgaagagttgcaacttcacgctatagccacattatcaagcgtggccccattacttatcgaggagtatatgagctgccagggaaacgcaagggtgcttgcttttctggaatggtgcgagtctgaagatccttttttctctcatggcaactcttttcacggtaccggcggccgagggaacaaattcgcccagatgcggtactcactgcgactgctaagggccgtagtttacctggaagatgagacggtgaacaaagacttatgtgaaaaggggacaattcaacagatgattggaatatttaaaaatatcatatctaaacccaatgagaaggaggaggctatagtcctggagattcagtcagacattctgttaatattgtccggtctttgcgagaatcatatacagcgcaaggagatatttggcactgagggtgtggatatcgtgcttcacgtgatgaagacagaccctagaaaactccagagtgggctgggatacaatgttcttctgttttcaacccttgactccatttggtgttgtatcctcggttgttacccttctgaggactattttttggagaaggaaggcatattcctgctcctcgacctgttggcactgaaccagaaaaagttctgcaatttaatcctcggtatcatggttgagttttgcgataatccgaagaccgctgctcatgtcaacgcatggcaggggaagaaagatcagactgcagccagcctgttaattaaactatggcggaaggaggagaaggagctcggcgttaaaagggacaaaaatggtaagattatagactttgagaatctgcctggcctgtccgctgaagacttcgtcacattgtgtattattcaccgctatctggacttcaagattggcgagatctggaacgagatctatgaagaaatcaagctggaaaagctgaggccagtgaccaccgacaaaaaagcgctggaggcaatcacaacggccagtgagaacatcggcaaaatggtggcctcgctccagagtgacatcatcgagtcacaggcttgtcaggatatgcaaaacgaacagaaagtgtatgctaaaatccaggctacgcataagcagagagaattagcaaataaatcctgggaggacttcttggccaggacttcaaatgcaaaaacgctgaaaaaagccaaaagcctacaggaaaaggctattgaggcctcccgctaccacaagagaccacagaacgccatcttccaccagactcatattaagggactgaacactacagtaccttcaggaggcgttgtgacggttgaaagtacacctgccaggctggttgggggccctctcgtggataccgacatcgccttaaaaaaactccctattcgagggggagctctacagagggtaaaagccgtcaagatcgtcgacgctccgaaaaagtccatcccaacctag

SEQ ID NO: 32296 - DNA, 2826 bp, Artificial Sequence
  derived and/or modified sequence
atgtggaccgaggaggctggtgccaccgctgaggctcaagagtcagggatccggaacaaatcttcatcctccagtcagatacctgtggtaggtgtggtgaccgaagacgatgaggcgcaagacgtattcaaacccatggatctcaatcgcgtcattaagctgcttgaagaaacagataaagacggtctggaggaaaaacagttaaagtttgttaagaaacttgtgcaatgttaccagaatggtctgccgctccgtgatttagcacagatcttcaagattttgaacctctgctccgggaagattaaaaatcagcccagatttattgagtctgcgtacgatattataaaactgtgtgggctgcccttcctgaagaagaaggtcagtgacgagatcacctatgcagaggacaccgctaacagcattgccctgctgggtgatctgatgaagattcctagctctgagctccgcattcagatttgcaaatgcattgtggacttctatcacgccgagcctcccaaaaagcatattccgggctaccagcaggcctcaagcagctataagattcaaatggctgaggtcggcgggttagccaagactatggtgcagtcaatgactttgttagagaaccaacttgttgagaagttatgggtgctgaaagtattacagcacctgagcacatcagaggtgaattgcacaattatgatgaaggcccaggctgccagcggcatctgtacccatttaaatgacccagacccttccgggcagctcctgtttagatcctcagagatcttgtggaacctgctggagaaatcatccaaggaagaggtgatacagcagctctcaaatctggaatgcctactggcccttaaggaggtctttaagaaccttttcatgagggggttcagccattatgaccgccagctgcggaatgatatcctagttatcacgaccattattgctcaaaaccccgaagcccctatgattgagtgcggattcacaaaggatctcattctgttcgcaacctttaatgaggtcaaatcacaaaacctgcttgtgaagggcttgaagttgtccaacagctacgaagactttgaactgaagaaactactcttcaatgtaatcgtcattctgtgcaaggacctgcccaccgtccagctgctcatcgatggaaaggtcattcttgcattatttacatatgtgaaaaaaccagagaagcaaaaaataattgattggagcgctgcccagcatgaggaattacagctgcacgccatcgctactttgtcaagtgtcgcccccctcctgattgaagaatacatgagctgccagggaaatgcacgggtgcttgccttcctagaatggtgtgaaagcgaagaccctttcttctctcatggcaattcatttcacggtacggggggcagaggtaacaagttcgcccagatgagatattcactccgcttactccgcgccgtcgtatatctcgaggacgaaaccgttaacaaagacctctgcgaaaagggcacaatccaacagatgatcggtatattcaaaaacatcattagtaaaccaaatgagaaggaggaagccatcgtcttagagatacagagcgatatcctgctgatccttagtggactttgcgaaaatcatattcagcgcaaggaaatctttggaaccgagggagtggatatcgttctgcatgttatgaagacagacccgcggaagctgcagtccggactggggtacaatgtcctgctgttcagcacattagatagtatctggtgttgcattctgggctgctacccttccgaggattacttcctggaaaaggagggcatttttctgttactggacctgctggccctgaatcagaagaagttttgcaatctaatcctcggtatcatggtcgaattctgtgataatccgaaaacggccgcacacgttaatgcttggcagggtaagaaagatcaaacagcagccagcctgcttatcaagctgtggaggaaggaagaaaaagaacttggcgtgaagcgagacaaaaatggaaagataatcgacactaagaagccactctttacgagcttccaagaagaacaaaagattatccctttacctgccaactgtccttccattgctgtaatggatgtgagcgagaacattcgggcaaagatatacgccattcttggtaaactagactttgagaacctgcctggtttatctgcagaagactttgtaaccctctgtatcatccaccgttacctcgactttaaaattggtgagatttggaatgaaatctatgaagaaattaaactcgagaagctcaggccagtgaccaccgacaaaaaggctctagaagccattaccacggcctcagagaacatcgggaagatggtggcatctctgcagtccgacatcatagagagccaggcatgccaagatatgcagaacgagcaaaaagtctatgctaagattcaggcgacccacaagcagcgagaacttgctaataaatcgtgggaagacttccttgctaggactagcaacgccaagaccctgaagaaagccaaaagcctgcaggaaaaggcaatcgaagcatcacggtatcataaacgcccacaaaacgcaatttttcaccaaacccatatcaagggcctgaatactacagtcccatccggcggcgtcgttacagtcgagagcacccccgccagattagttggaggccctctcgtagataccgatatcgccctgaaaaagctgcccatacgtggtggagccctacagagagtaaaggcagtgaaaatcgtggacgcccctaaaaagagtattccaacttag

SEQ ID NO: 32297 - DNA, 1437 bp, Artificial Sequence
  derived and/or modified sequence
gaactgcagttgcacgctatagcaacactatccagtgtggcccccctcctgattgaagagtacatgtcttgtcagggaaacgcccgtgtgttagccttcttggagtggtgcgagagtgaggatccgtttttttctcacgggaactccttccatgggacaggcggtagggggaataaattcgctcagatgcgttattctctcagattactgcgggcagtggtgtacttagaggatgagacggtaaacaaggatttgtgcgagaagggcacaatacagcagatgatcggaatcttcaaaaatatcatttctaagccgaacgagaaggaggaggctatcgtgttagagattcagtctgatatactgttgatactgagcggtttgtgtgagaatcacattcaacgcaaagagatctttgggacagaaggggtggacattgtgctccacgtgatgaagactgacccacggaagttgcagtcaggtctgggctacaacgtgctgctcttctctactttggactcaatctggtgctgcattctcgggtgctatccttcagaagactatttcttagaaaaggaaggtatctttctgctccttgatcttctggctctcaatcagaagaaattttgtaatctgattctgggtattatggtggagttctgcgacaatcccaagactgctgctcacgtgaacgcctggcagggcaaaaaagaccagacggccgcctcgttactaatcaaactatggcgcaaagaagaaaaagagctgggagtgaaaagagacaagaacgggaagatcatagatttcgaaaatctcccgggactgtccgcagaggatttcgtgactttgtgtatcattcaccgctatctggattttaagatcggcgagatttggaatgaaatctatgaggagatcaagctcgagaaacttagacctgttaccacagacaaaaaggctctggaagccatcactaccgcgtctgaaaatatcggcaagatggttgctagtttacagtccgacattatcgaatcccaggcctgtcaggatatgcagaacgaacagaaagtgtatgccaagatccaggctacccacaaacagcgcgagctcgcaaacaaatcttgggaagacttcttagcccgtacaagtaatgcaaagacattaaaaaaggctaagtccttgcaagagaaagcgattgaagcctcccgctaccacaaaagaccacagaatgcaatcttccatcagacccatatcaaagggctgaacacaacagtcccctccggaggtgttgttacggtggaaagcacgcctgctaggcttgttggcgggcctctagtggataccgacatcgcgttaaagaagcttccaatcagaggcggcgctctgcaacgggtaaaagcagtcaagattgtggacgctcccaaaaagtctattcctacatag

SEQ ID NO: 32298 - DNA, 2688 bp, Artificial Sequence
  derived and/or modified sequence
atgtggacagaggaggccggggccacagctgaggcccaggagagcggcatccggaacaagagcagcagcagcagccagatccctgtggtgggcgtggtgacagaagatgatgaggcccaggatgtgttcaagcccatggacctgaacagagtcatcaagctgctggaggagacagacaaggatggcctggaggagaagcagctgaagtttgtgaagaagctggtgcagtgctaccagaatggcctgcccctgcgggacctggcccagatcttcaagatcctgaacctgtgcagcggcaagatcaagaaccagccccgcttcatcgagagcgcctatgacatcatcaagctgtgtggcctgcccttcctgaagaagaaggtgtctgatgagatcacctatgcagaggacacagccaacagcatcgccctgctgggggacctgatgaagatccccagcagcgagctgcgcatccagatctgcaagtgcatcgtggacttctaccacgccgagccccccaagaagcacatccctggctaccagcaggccagcagcagctacaagatccagatggccgaggtgggcggcctggccaagaccatggtgcagagcatgaccctgctggagaaccagctggtggagaagctgtgggtgctgaaggtgctgcagcacctgagcaccagcgaggtgaactgcaccatcatgatgaaggcccaggccgccagcggcatctgcacccacctgaatgaccctgaccccagcggccagctgctcttccgcagcagcgagatcctgtggaacctgctggagaagagcagcaaggaggaggtgatccagcagctgagcaacctggagtgcctgctggccctgaaggaggtgttcaagaacctcttcatgaggggcttcagccactatgaccggcagctgagaaatgacatcctggtgatcaccaccatcatcgcccagaaccctgaggcccccatgattgaatgtggcttcaccaaggacctgatcctgtttgccaccttcaatgaggtgaagagccagaacctgctggtgaagggcctgaagctgagcaacagctatgaggactttgagctgaagaagctgctcttcaacgtcatcgtcatcctgtgcaaggacctgcccaccgtgcagctgctgattgatggcaaggtgatcctggccctcttcacctacgtgaagaagccagagaagcagaagatcatcgactggagcgctgcccagcacgaggagctgcagctgcacgccatcgccaccctgagctctgtggcccccctgctgattgaggagtacatgagctgccagggcaatgcccgggtgctggccttcctggagtggtgtgagagcgaggaccccttcttcagccacggcaacagcttccacggcaccggcggccggggcaacaagtttgcccagatgagatacagcctgcggctgctgcgggctgtggtgtacctggaggatgaaacagtgaacaaggacctgtgtgagaagggcaccatccagcagatgattggcatcttcaagaacatcatcagcaagcccaatgagaaggaggaggccatcgtgctggagatccagagcgacatcctgctgatcctgagcggcctgtgtgagaaccacatccagaggaaggagatctttggaacagaaggagtggacatcgtgctgcacgtgatgaagacagaccccaggaagctgcagagcggcctgggctacaacgtgctgctcttcagcaccctggacagcatctggtgctgcatcctgggctgctaccccagcgaggactacttcctggagaaggagggcatcttcctgctgctggacctgctggccctgaaccagaagaagttctgcaacctgatcctgggcatcatggtggagttctgtgacaaccccaagacagctgcccacgtgaatgcctggcagggcaagaaggaccagacagctgccagcctgctgatcaagctgtggaggaaggaggagaaggagctgggcgtgaagagggacaagaatggcaagatcatcgactttgagaacctgcccggcctgtctgctgaggactttgtgaccctgtgcatcatccaccgctacctggacttcaagatcggggagatctggaatgagatctatgaggagatcaagctggagaagctgcggcctgtgaccacagacaagaaggccctggaggccatcaccacagccagcgagaacatcggcaagatggtggccagcctgcagagcgacatcatcgagagccaggcctgccaggacatgcagaatgagcagaaggtgtatgccaagatccaggccacccacaagcagcgggagctggccaacaagtcctgggaggacttcctggcccggaccagcaatgccaagaccctgaagaaggccaagagcctgcaggagaaggccatcgaggccagccgctaccacaagaggccccagaatgccatcttccaccagacccacatcaagggcctgaacaccaccgtgcccagcggcggcgtggtgacagtggagagcaccccagcccggctggtgggcggccccctggtggacacagacatcgccctgaagaagctgcccatccggggcggggccctgcagagggtgaaggctgtgaagatcgtggatgcccccaagaagagcatccccacctag

SEQ ID NO: 32299 - DNA, 2826 bp, Artificial Sequence
  derived and/or modified sequence
atgtggacagaggaggccggggccacagctgaggcccaggagagcggcatccggaacaagagcagcagcagcagccagatccctgtggtgggcgtggtgacagaagatgatgaggcccaggatgtgttcaagcccatggacctgaacagagtcatcaagctgctggaggagacagacaaggatggcctggaggagaagcagctgaagtttgtgaagaagctggtgcagtgctaccagaatggcctgcccctgcgggacctggcccagatcttcaagatcctgaacctgtgcagcggcaagatcaagaaccagccccgcttcatcgagagcgcctatgacatcatcaagctgtgtggcctgcccttcctgaagaagaaggtgtctgatgagatcacctatgcagaggacacagccaacagcatcgccctgctgggggacctgatgaagatccccagcagcgagctgcgcatccagatctgcaagtgcatcgtggacttctaccacgccgagccccccaagaagcacatccctggctaccagcaggccagcagcagctacaagatccagatggccgaggtgggcggcctggccaagaccatggtgcagagcatgaccctgctggagaaccagctggtggagaagctgtgggtgctgaaggtgctgcagcacctgagcaccagcgaggtgaactgcaccatcatgatgaaggcccaggccgccagcggcatctgcacccacctgaatgaccctgaccccagcggccagctgctcttccgcagcagcgagatcctgtggaacctgctggagaagagcagcaaggaggaggtgatccagcagctgagcaacctggagtgcctgctggccctgaaggaggtgttcaagaacctcttcatgaggggcttcagccactatgaccggcagctgagaaatgacatcctggtgatcaccaccatcatcgcccagaaccctgaggcccccatgattgaatgtggcttcaccaaggacctgatcctgtttgccaccttcaatgaggtgaagagccagaacctgctggtgaagggcctgaagctgagcaacagctatgaggactttgagctgaagaagctgctcttcaacgtcatcgtcatcctgtgcaaggacctgcccaccgtgcagctgctgattgatggcaaggtgatcctggccctcttcacctacgtgaagaagccagagaagcagaagatcatcgactggagcgctgcccagcacgaggagctgcagctgcacgccatcgccaccctgagctctgtggcccccctgctgattgaggagtacatgagctgccagggcaatgcccgggtgctggccttcctggagtggtgtgagagcgaggaccccttcttcagccacggcaacagcttccacggcaccggcggccggggcaacaagtttgcccagatgagatacagcctgcggctgctgcgggctgtggtgtacctggaggatgaaacagtgaacaaggacctgtgtgagaagggcaccatccagcagatgattggcatcttcaagaacatcatcagcaagcccaatgagaaggaggaggccatcgtgctggagatccagagcgacatcctgctgatcctgagcggcctgtgtgagaaccacatccagaggaaggagatctttggaacagaaggagtggacatcgtgctgcacgtgatgaagacagaccccaggaagctgcagagcggcctgggctacaacgtgctgctcttcagcaccctggacagcatctggtgctgcatcctgggctgctaccccagcgaggactacttcctggagaaggagggcatcttcctgctgctggacctgctggccctgaaccagaagaagttctgcaacctgatcctgggcatcatggtggagttctgtgacaaccccaagacagctgcccacgtgaatgcctggcagggcaagaaggaccagacagctgccagcctgctgatcaagctgtggaggaaggaggagaaggagctgggcgtgaagagggacaagaatggcaagatcatcgacaccaagaagcccctcttcaccagcttccaggaggagcagaagatcatccccctgcctgccaactgccccagcattgctgtgatggatgtgtctgagaacatccgggccaagatctatgccatcctgggcaagctggactttgagaacctgcccggcctgtctgctgaggactttgtgaccctgtgcatcatccaccgctacctggacttcaagatcggggagatctggaatgagatctatgaggagatcaagctggagaagctgcggcctgtgaccacagacaagaaggccctggaggccatcaccacagccagcgagaacatcggcaagatggtggccagcctgcagagcgacatcatcgagagccaggcctgccaggacatgcagaatgagcagaaggtgtatgccaagatccaggccacccacaagcagcgggagctggccaacaagtcctgggaggacttcctggcccggaccagcaatgccaagaccctgaagaaggccaagagcctgcaggagaaggccatcgaggccagccgctaccacaagaggccccagaatgccatcttccaccagacccacatcaagggcctgaacaccaccgtgcccagcggcggcgtggtgacagtggagagcaccccagcccggctggtgggcggccccctggtggacacagacatcgccctgaagaagctgcccatccggggcggggccctgcagagggtgaaggctgtgaagatcgtggatgcccccaagaagagcatccccacctag

SEQ ID NO: 32300 - DNA, 1437 bp, Artificial Sequence
  derived and/or modified sequence
gagctgcagctgcacgccatcgccaccctgagctctgtggcccccctgctgattgaggagtacatgagctgccagggcaatgcccgggtgctggccttcctggagtggtgtgagagcgaggaccccttcttcagccacggcaacagcttccatggaactggaggccggggcaacaagtttgcccagatgagatacagcctgcggctgctgcgggctgtggtgtacctggaggatgagaccgtgaacaaggacctgtgtgagaagggcaccatccagcagatgattggcatcttcaagaacatcatcagcaagcccaatgagaaggaggaggccatcgtgctggagatccagagcgacatcctgctgatcctgagcggcctgtgtgagaaccacatccagaggaaggagatcttcggcacagagggcgtggacatcgtgctgcacgtgatgaagacagaccccaggaagctgcagagcggcctgggctacaacgtgctgctcttcagcaccctggacagcatctggtgctgcatcctgggctgctaccccagcgaggactacttcctggagaaggagggcatcttcctgctgctggacctgctggccctgaaccagaagaagttctgcaacctgatcctgggcatcatggtggagttctgtgacaaccccaagacagctgcccacgtgaatgcctggcagggcaagaaggaccagacagctgccagcctgctgatcaagctgtggaggaaggaggagaaggagctgggcgtgaagagggacaagaatggcaagatcatcgactttgagaacctgcccggcctgtctgcagaagattttgtgaccctgtgcatcatccaccgctacctggacttcaagattggagagatctggaatgagatctatgaggagatcaagctggagaagctgcggcctgtgaccacagacaagaaggccctggaggccatcaccacagcctctgaaaatattggcaagatggtggccagcctgcagagcgacatcatcgagagccaggcctgccaggacatgcagaatgagcagaaggtgtatgccaagatccaggccacccacaagcagcgggagctggccaacaagtcctgggaggacttcctggcccggaccagcaatgccaagaccctgaagaaggccaagagcctgcaggagaaggccatcgaggccagccgctaccacaagaggccccagaatgccatcttccaccagacccacatcaagggcctgaacaccaccgtgcccagcggaggagtggtgacagtggagagcaccccagcccggctggtgggcggccccctggtggacacagacatcgccctgaagaagctgcccatccggggcggggccctgcagagggtgaaggctgtgaagatcgtggatgcccccaagaagagcatccccacctag

SEQ ID NO: 32301 - DNA, 2688 bp, Artificial Sequence
  derived and/or modified sequence
atgtggaccgaggaggccggcgccaccgccgaggcccaggagagcggtattcggaataagtcctcgagttcctctcagatccctgtggtgggggtagtgaccgaggacgatgaagctcaggatgtgtttaaacctatggatctgaacagggtcatcaaactcctcgaggagaccgacaaagatggactcgaggaaaagcaactcaaattcgtcaagaaacttgttcagtgttaccagaatggattgcccctgcgggatctggcacagatatttaagatcctgaatctttgctcaggcaagattaagaaccaaccacgattcattgaatctgcttacgatattatcaagctgtgcggactccccttcctgaagaaaaaggtttcagacgagattacttatgccgaggacacagctaactcgatcgccctgctgggagacttaatgaaaatcccctcatctgagctgcgtatccagatctgtaaatgtatcgtggacttctatcatgccgaaccccccaagaaacatattcctggctatcagcaggcctcaagctcttataagatacaaatggccgaagttgggggcctagctaagactatggttcagtccatgacgctactcgagaatcagcttgtcgaaaaactgtgggtgttaaaggtcctgcagcacctttcaacgtccgaagtaaattgcacgatcatgatgaaggcccaagccgccagcgggatatgcactcacctcaatgatccagatccatcgggccaactcctgttccgatcctccgaaattctgtggaatctcctcgaaaaaagttcaaaggaagaagtgattcagcagctatcaaatcttgagtgcttactggcactgaaagaggtgtttaaaaacctctttatgagggggttcagccactacgaccgccagctgcgcaacgatatcctcgttattacaaccatcatcgcccagaatccggaggcccccatgattgaatgcggatttacaaaagacctaatcctgtttgctacattcaacgaggtaaagtcccaaaacctgctggttaaaggcctaaaacttagtaacagctacgaggattttgagctgaaaaaactgttgttcaatgtgatcgttattctgtgtaaagacctgcccacagtccagctgctcatcgacggtaaggtcatcctggcattgtttacctacgtaaagaaaccagagaagcagaagattattgactggtccgccgcccagcatgaggaattacagctgcacgcgatcgcaactctgtcttccgtcgccccgcttctgatcgaggaatatatgagctgtcagggcaatgccagggtactcgcattcctggaatggtgcgaatccgaagacccattcttctctcatgggaattcctttcatggcacaggtggaaggggaaataaattcgcccagatgcggtacagcctgaggctcctgcgcgcagtggtgtaccttgaggacgagaccgtgaacaaagacctgtgtgagaaggggaccatccagcagatgatcggcatcttcaaaaacattatctcaaaacctaacgagaaggaggaggccattgttctggaaattcaatcggacatcctgctgattctgtctggactgtgtgagaaccacattcaacggaaggagatcttcggcaccgaaggagtggatatcgttttgcacgttatgaaaacagacccgcgcaaactccaatccggcctcgggtataatgtactcctgttctctacattggactccatctggtgttgtatactgggctgctacccttctgaagactattttctcgagaaagaaggaatctttctcctcttggatcttctggctctcaaccaaaagaaattctgtaacttgatactggggataatggtggagttttgtgacaatcccaagacagcggcccacgttaatgcatggcagggtaagaaggaccaaactgcggcctctcttctgattaagctctggcggaaagaggagaaggagctcggagttaagcgtgacaagaacggcaaaattattgactttgagaatttgcccgggttgagtgctgaagatttcgtcactctatgcattatccaccgttacttggattttaagattggggaaatatggaacgaaatctatgaagaaataaagctggaaaaactgcgcccagtgacaacggacaagaaggccttggaagcgatcaccaccgcttcagagaacatcgggaagatggtcgcgagcctgcagtcggacattatcgagagccaggcttgccaagatatgcagaatgaacagaaagtctatgcgaagattcaggctacgcataaacaacgggaattagccaataagtcatgggaggattttctggcgcgtaccagcaacgccaagacactgaaaaaggccaagtcactgcaggaaaaggcaattgaggcgtcacgctaccacaaaagaccccaaaacgcaatctttcatcagacgcacatcaagggcctcaacaccaccgtgccgtcaggcggcgttgtgaccgttgaatccacgccggcgcgacttgtggggggtccattagtggacactgacattgccctgaaaaaactgcccattaggggaggagcccttcagagggtgaaggccgtgaaaatcgtggatgccccgaaaaagagcatccccacctag

SEQ ID NO: 32302 - DNA, 2826 bp, Artificial Sequence
  derived and/or modified sequence
atgtggaccgaggaggccggcgccaccgccgaggcccaggagagcggaatcaggaacaagagttcctcctctagtcagatccccgtcgtgggcgtggttaccgaggatgatgaagcgcaggacgtattcaagccaatggaccttaaccgggtgataaagcttctggaagaaacggacaaggatggactggaagagaaacagttgaagttcgttaaaaagctggtgcaatgttatcagaatggcttgcccctacgagatctcgcccagatcttcaagattttgaacctgtgttccggcaagatcaagaatcagcccagatttatcgagtccgcatatgacatcattaagctgtgcggtctgcccttcctgaaaaagaaggtgtccgatgagattacatacgctgaagatactgccaacagcatagccctgttaggcgacctgatgaagattccgtcctccgagctccgcattcaaatctgcaagtgtatcgtcgacttttatcatgctgagccccccaagaagcatatacccgggtaccagcaggcttcctcctcttacaagatacagatggcggaggtgggaggcctggcgaagacaatggtccaaagcatgacactgcttgagaaccagctggtggagaaactctgggtgcttaaggtgttgcagcatctgtctacttctgaggtcaattgtacaatcatgatgaaggcgcaggcagctagcgggatctgtacacacctcaacgatccagacccaagcggacagctgctgttcaggagcagtgaaatattatggaatctgcttgaaaagtcctccaaagaggaagtgattcagcaactcagtaacctggagtgccttcttgctctgaaggaggtttttaaaaacctcttcatgcgcggcttctctcactatgacagacaactgcgcaacgacatcctggtgatcaccacaataattgcccagaacccagaggcccctatgatcgagtgcgggttcacaaaggacttgatactctttgccacctttaatgaggtgaaatctcaaaatcttctcgtgaagggcctgaagctgagtaattcctatgaagacttcgaacttaagaaacttctttttaatgtcattgtgattctctgtaaggatctgcccactgtgcagcttttaatcgatggtaaggtcatcctggcactctttacatatgtgaagaaacccgagaaacagaagatcatcgactggtcagcagcccaacacgaggagctccaactgcacgcaattgccaccttatcttctgtggcacccctgctgattgaagaatatatgtcttgccaggggaacgcccgtgttcttgccttcctggaatggtgtgaatccgaggaccctttctttagccacggaaactcctttcatgggactggcggacgtggcaataagtttgcccagatgaggtactccctcaggctactcagagctgtcgtgtatctggaggatgagaccgtgaataaggatctgtgtgaaaaggggacaatccagcaaatgatcggtatctttaagaacattatcagtaagcctaatgagaaagaggaagctatcgtgctcgaaatacaaagcgacatactgcttatactgtcaggcctctgtgagaaccatatacagcgaaaggaaatcttcggaacggaaggtgttgacattgtgctgcatgtgatgaagacagacccacgcaagcttcagagcggcttaggctataacgttctcttatttagcacgttggattccatctggtgctgcatcctgggctgttacccaagcgaggactactttttggagaaggaaggtattttcttgctgctagatttactagccctgaaccagaagaagttttgcaatctgatcctaggaatcatggtggaattttgcgacaaccctaagaccgccgcgcacgtaaacgcttggcaaggcaaaaaggaccaaaccgccgcctcactgctgataaagctctggaggaaggaagagaaagaactgggggtaaaacgtgacaaaaatggcaagattatcgacacaaagaaaccactctttacctctttccaggaagagcagaagattatacctctgcccgccaactgcccaagtatagccgtcatggatgtgtcagaaaacattagggcaaaaatctatgctatcctgggcaagctcgacttcgagaacctgcctggcctgtccgcagaagactttgtgacactgtgcattatccaccggtacctggattttaagattggggagatctggaacgagatctacgaggaaattaagttggaaaaactacgcccagttactaccgacaaaaaggcactggaagcgatcaccaccgcctctgaaaacattggtaaaatggttgcttctcttcagagcgacatcattgaaagccaagcatgtcaggatatgcagaacgagcagaaggtgtacgccaagatacaagcgacacataaacagcgggagctagctaacaagtcatgggaggatttcctggctaggacctctaacgctaagaccctgaagaaagccaaaagtctccaggagaaagctattgaggccagccgttaccataagaggcctcaaaacgccattttccatcagacgcacataaagggactcaatacgactgtgcccagcggtggagtcgtaaccgtggaaagcactcctgccagactcgtgggaggacctttagtcgacacagatattgctttaaagaagttacccatccgggggggcgctctccagcgagtcaaagcggtgaaaatcgtggacgcgcctaagaaatctatcccaacttag

SEQ ID NO: 32303 - DNA, 1437 bp, Artificial Sequence
  derived and/or modified sequence
gagctgcagctgcacgccatcgccaccctgagcagcgtggcccccctactcattgaagagtatatgagctgccaggggaacgcccgagtgttggcattcctggagtggtgcgagtctgaagacccatttttcagtcacgggaatagtttccacggcacgggcggtagaggaaataaattcgcccagatgcgctactcccttcgactgctgagagctgtagtatacctggaggatgaaaccgtgaacaaggatctctgtgagaaggggacgattcagcagatgattggcatctttaaaaatattattagtaagccaaatgagaaggaagaagctatcgtcctcgagatacagagtgatattctgttgattttgtctgggctgtgcgagaaccacatccagaggaaggagatcttcggcacagaaggtgttgatatagtcctgcacgttatgaagactgaccctcggaaacttcagtctggtctggggtacaacgtgctcttgttcagcacactcgactccatctggtgctgcattctgggctgttacccctctgaagattacttcttagagaaagaaggaatttttctgttgttagacctgctggcgctgaatcaaaaaaaattttgcaatctcatcttaggaatcatggttgaattttgcgacaacccaaaaacagcagcccatgtgaacgcctggcagggaaagaaggatcagaccgccgcatcactgctcatcaagctgtggcgcaaggaggaaaaggagcttggagtgaagcgtgataaaaatggaaagattattgattttgaaaacctgccagggctcagcgccgaggacttcgttaccctttgcatcatccatagatatctagactttaagatcggtgagatctggaatgagatatatgaggagattaaactcgagaagctgaggcctgtcacaacagacaaaaaagctctcgaggctatcaccacagcctcagaaaacattggtaagatggtggcatcactgcagtcagacatcattgagagccaggcctgtcaggatatgcagaacgaacagaaagtttatgctaagatccaagctacccataagcagagagagctggccaacaaatcatgggaggatttcctagccagaacctctaacgccaagactttgaagaaggcaaaaagtctccaagaaaaggccatcgaagccagcagatatcacaagagaccacagaacgccatctttcaccaaacacacataaagggcttgaataccacagtgccctcaggaggcgtagttacggtcgagtctacacccgcccgtttagtgggaggacctttggtggacaccgacatagcactgaaaaagttgccaatcagggggggcgcgctacagcgcgttaaggcagttaagatagtcgatgctccgaaaaagtcaataccaacttag

SEQ ID NO: 32304 - DNA, 2688 bp, Artificial Sequence
  derived and/or modified sequence
atgtggacggaggaggcaggtgccacggccgaggcacaggagagcgggatccgcaacaagtcatcatcttctagccaaatcccagtcgtgggcgtagtgacggaggatgacgaagcacaggacgtctttaagccgatggacttgaacagggtcattaaactgcttgaagagaccgacaaagacggtcttgaagagaagcagcttaaattcgttaagaaactggtccagtgttaccagaacggtctgcctctgcgggacctggctcagatcttcaagatcctcaatctgtgtagtggcaagattaagaatcagccgcgattcatcgagtcggcttacgacattatcaagttatgtggacttccttttttgaagaaaaaggtgagcgatgagattacttacgccgaggatacagcaaacagcattgcactgctcggcgacctgatgaagatcccttcttctgaacttagaatccagatctgtaagtgtattgtcgatttttaccacgctgaacccccaaagaaacatatccccggatatcaacaggcctccagctcttacaaaatccagatggccgaggtgggcggactagcgaaaacaatggtacagtccatgactcttttggaaaaccagttggttgagaagctatgggttctgaaggtgctgcagcatctcagcacttcagaagtgaattgcactatcatgatgaaggctcaggcagctagcggaatctgtacacatctgaacgatccagatccctctgggcagttgctcttcaggtcatccgagattctctggaacttgctcgaaaaaagtagtaaggaggaagttattcagcagttatcaaatctcgagtgtctcctcgctctcaaagaagtattcaagaacttgttcatgagaggcttctcccattacgataggcagctgaggaatgatatacttgtaataaccacgatcatcgctcaaaatcctgaagcacccatgattgagtgtggctttaccaaagatctcatactgttcgctacctttaacgaagtgaaatcccagaatcttctggttaagggactgaagctcagtaacagttacgaggattttgagctcaagaagctgctctttaacgtgattgtgattttgtgcaaggacctgcctacagtgcaactgcttatcgatggcaaggtgatcttggcactatttacttacgtaaaaaaacctgaaaaacaaaagatcatcgactggtctgctgcccagcacgaagagcttcagctgcatgccatcgcaaccttatcgtccgtcgcaccactccttatagaggagtatatgagttgtcagggtaacgctcgagtgctggcatttctggagtggtgcgaatctgaggacccatttttcagccacggcaatagcttccacggcacaggtggcaggggcaacaaattcgcccagatgcgctactctttacggctgctgagagctgtcgtatatctagaggacgagacggtgaataaagatttgtgtgagaaaggaaccatccaacagatgatcggcatcttcaagaacatcataagcaagcctaacgagaaggaggaggccatcgtactggaaatacagtcggacatactgctcatcctgagcggcctttgcgaaaaccatatccagcgtaaagaaatcttcggcactgagggtgtggacatcgtgctgcacgtgatgaaaaccgaccctaggaagctgcaatctggcctgggctataacgttctcctgttcagcaccctggattccatatggtgttgtattcttggctgttaccccagcgaagattacttcctggagaaggaaggcatctttctcttgctagaccttctggccttgaatcaaaaaaaattttgtaatctcatcctcggtataatggtggagttttgcgacaatccaaaaactgctgcccacgtcaacgcttggcagggtaaaaaggatcagactgcggctagcctattaatcaaactgtggaggaaggaggaaaaagagctgggggtgaaacgcgataaaaatgggaagattatagactttgaaaacttgcccggactgtctgccgaagacttcgtgaccctctgcatcattcatagatacctcgacttcaagatcggagagatatggaatgagatatatgaagagatcaagctagaaaagcttcggccagtgaccactgacaaaaaggcccttgaagcaatcactacggccagtgaaaacattggtaaaatggtggccagcctccagagcgacattatcgagtcccaggcctgccaagacatgcaaaatgaacagaaagtgtacgccaagatccaagccacccataaacagagggaacttgcgaacaaaagttgggaagatttcctcgcacgtacaagtaatgccaagacactcaagaaagctaaaagtctgcaggagaaggcaattgaggcctccaggtaccacaaacggccacagaatgcgatctttcaccagacgcatatcaaggggctcaacacaactgtcccctccggaggcgtagtgacagtggagtcaacacctgcccgactggttggaggtcctctcgtggatacagatatagccctcaagaagctgcctatccgcggaggcgcactgcagagggtgaaggcggttaagattgtggatgctccaaagaaatctattcctacatag

SEQ ID NO: 32305 - DNA, 2826 bp, Artificial Sequence
  derived and/or modified sequence
atgtggaccgaggaggccggagcaaccgctgaggcccaggagtccggcatcaggaacaagagttcctcttctagccaaattccagttgttggagtggtgactgaagatgacgaagcacaggatgttttcaaaccaatggatctcaatagggtgattaagctgctcgaggaaactgacaaggatgggctagaggagaagcagctcaaattcgtcaagaagctggtacagtgttaccagaacggcctccccctgcgcgacctcgctcagatcttcaaaatactgaacctgtgttccgggaagattaagaaccaaccaagatttattgaatcagcatatgacattattaaactatgtggattgcccttcctcaaaaagaaagtgagtgatgagatcacatatgcagaagacacggccaattcaattgcactgctcggggatcttatgaaaatcccttcctctgagttgagaatccagatctgtaagtgcattgtggacttctatcacgcggagcctccaaaaaaacacattcctggctaccaacaggcatccagctcctacaagatccagatggctgaggtcgggggtctcgccaaaaccatggtgcaatcgatgaccctgttagagaaccagctggttgagaaattgtgggtactgaaagtgcttcagcacctgtccacttccgaggtgaactgtaccatcatgatgaaggcccaggcggcatccggaatctgtacgcaccttaacgatcctgatccgagtggacagctgctgttcagaagttctgaaatcttgtggaatcttctcgaaaagtcatctaaagaggaggtgattcagcagctcagcaacctggagtgtttgctcgcactaaaggaagtgtttaagaatctcttcatgcgtgggttcagccattatgaccgccagctccgcaacgacatccttgtgattacgaccatcattgctcagaaccctgaggcacctatgatcgaatgtggatttactaaagatctgatcctgttcgcaacattcaacgaggtgaaatctcagaacctgctggtgaagggtctcaaattgtctaactcgtatgaggactttgaactgaagaaactgcttttcaatgtaatcgtcatcctctgtaaagatctaccaaccgtgcagctcctgatcgacggtaaggtaatcttggctctcttcacatacgtgaaaaaacctgagaagcagaaaattatagattggtccgccgcacagcacgaggagcttcagctgcatgcgatcgctacgctgtccagtgtggcgcctcttctaatcgaagagtacatgtcttgccaaggcaacgcgcgagttctcgcatttctcgagtggtgcgaaagcgaagaccctttctttagccacggcaactccttccacggcactggtggaaggggaaataaattcgcccaaatgaggtactctcttagattgctgcgggcagtggtttacctcgaggatgagactgtgaataaggacctgtgcgaaaagggcacgatccaacaaatgatcgggatcttcaaaaatatcatatccaaaccaaacgagaaagaggaggccattgttcttgagatacaatccgacatcttgctgatcctctctggcctatgcgaaaaccacattcagaggaaagagatcttcggcacagagggcgtggacattgtattgcatgtcatgaaaaccgacccgaggaaattacagtcggggctcggctacaacgtgttactgttctccacattggactcaatctggtgttgcatcttggggtgttatccctcagaggattactttttggagaaggaaggaatcttcctgttactagatctgctggctttaaatcagaagaaattctgcaacttaatacttggaattatggtagagttctgtgacaacccaaaaaccgccgctcacgtcaatgcctggcaagggaaaaaggaccaaaccgcagcttccctccttatcaagctgtggcgcaaggaggagaaggaactgggagttaagagagataaaaacgggaagattatcgatactaaaaagccattattcacatcatttcaggaagaacagaaaataatcccgctgccagccaattgcccgagcatcgctgttatggacgtatccgagaacattcgggcaaagatttatgccatcctggggaagctggacttcgaaaatttgccaggcctgtccgcggaagatttcgtcaccttgtgcataatacaccggtatcttgattttaaaattggtgagatatggaacgaaatctatgaggaaatcaagttggaaaaactgcgccctgttaccacagacaagaaagccctggaggcaattaccaccgcttcagaaaatataggcaaaatggtggcatcactgcagagcgatattatcgagagccaggcttgccaggacatgcaaaatgagcagaaagtatacgcaaaaatacaggccacgcacaaacaaagagaattggccaataagtcttgggaggactttctggcgaggactagtaatgctaaaacactgaagaaggccaaatctttacaagagaaggccatcgaagctagccgttatcataaacgaccccagaacgcaatcttccaccaaacccacattaaggggcttaacactacagtgccctccgggggagtagttacagttgagtctacacccgcaagattggtggggggaccattggtggacaccgacatcgctctgaagaagctgcctataagggggggtgcactgcagcgggttaaagccgttaagatcgtggatgcacccaagaagagcattcccacatag

SEQ ID NO: 32306 - DNA, 1437 bp, Artificial Sequence
  derived and/or modified sequence
gaattacagctccacgcaatagctactctgtcctctgtggctccgcttctgattgaagaatacatgagctgccaggggaacgccagggtgttggccttcctcgagtggtgcgaatcagaagatccttttttctcccacggcaattccttccacgggaccggcggtagaggaaacaagtttgcccagatgagatactcccttaggctgctcagagcagtggtatatctcgaggacgagactgtaaataaggatctgtgcgaaaagggcaccatccagcagatgataggcatcttcaagaacatcattagcaagcctaacgagaaggaagaggccatagtgctcgaaattcaaagcgacatcctgctgatcttgagcggactttgcgaaaaccacattcagcggaaagagattttcggcaccgagggagtggacatcgtccttcatgtgatgaagaccgaccccaggaagttgcaaagcggcctgggctataatgtgctgctgttcagcactctggactccatctggtgctgtattctgggctgttatcccagcgaggattacttcctggagaaggaaggcatattcctgctgctggatcttttggccctgaatcaaaagaagttctgtaacctgattctgggcatcatggttgagttttgtgataaccctaagactgccgcacacgttaacgcttggcaggggaaaaaagaccagaccgccgcttctctgctgatcaagttatggagaaaagaagaaaaagaactgggggtcaaacgcgataaaaacgggaagatcattgatttcgaaaatctccccggactttccgccgaagatttcgtgaccttatgtattattcacaggtaccttgactttaaaatcggggaaatctggaacgagatttatgaggaaatcaagctggaaaaattgagacccgtgacaaccgacaaaaaggctctagaagccattacaactgcaagtgagaacattggcaagatggttgcatccctgcagagcgacattatcgaaagccaggcttgccaggacatgcaaaacgagcagaaggtgtatgccaagattcaggctacacataagcagagagagctagctaacaaatcatgggaggatttcttggctcgtacctctaatgccaagacccttaaaaaagctaaaagcctacaggaaaaggccatagaagcaagtcggtaccataaaagacctcagaacgccatcttccaccaaactcatattaaggggctgaacaccacagtaccttcaggaggtgtggttacagtggagagcacgcctgcgcgtcttgttggcggtccgctggtggacaccgacatcgctctaaagaaattacctatccgcggaggagcattacagcgcgttaaggctgtgaagattgttgacgcacccaagaagagcatcccaacctag

SEQ ID NO: 32307 - protein, 435 aa, Artificial Sequence
  derived and/or modified sequence
MSGYQRRPGATPLSRARSLAIPDAPAFYERRSCLPQLNCERPHGRDLDSPFFGIRPAFMCYVPSPVLASVGDTDFGYGKGKCSKQSPSGAHGTHFGDDRFEDLEEANPFSFREFLKTKNLGLSKEDPASRIYAKEASRHSLGLDHNSPPSQTGGYGLEYQQPFFEDPTGAGDLLDEEEDEDTGWSGAYLPSAIEQTHPERVPAGTSPCSTYLSFFSTPSELAGPESLPSWALSDTDSRVSPASPAGSPSADFAVHGESLGDRHLRTLQISYDALKDENSKLRRKLNEVQSFSEAQTEMVRTLERKLEAKMIKEESDYHDLESVVQQVEQNLELMTKRAVKAENHVVKLKQEISLLQAQVSNFQRENEALRCGQGASLTVVKQNADVALQNLRVVMNSAQASIKQLVSGAETLNLVAEILKSIDRISEVKDEEEDS

SEQ ID NO: 32308 - DNA, 1308 bp, Artificial Sequence
  derived and/or modified sequence
atgagcggctaccagagaagacccggcgccacccccctgagcagagccagaagcctggccatccccgacgcccccgccttctacgagagaagaagctgcctgccccagctgaactgcgagagaccccacggcagagacctggacagccccttcttcggcatcagacccgccttcatgtgctacgtgcccagccccgtgctggccagcgtgggcgacaccgacttcggctacggcaagggcaagtgcagcaagcagagccccagcggcgcccacggcacccacttcggcgacgacagattcgaggacctggaggaggccaaccccttcagcttcagagagttcctgaagaccaagaacctgggcctgagcaaggaggaccccgccagcagaatctacgccaaggaggccagcagacacagcctgggcctggaccacaacagcccccccagccagaccggcggctacggcctggagtaccagcagcccttcttcgaggaccccaccggcgccggcgacctgctggacgaggaggaggacgaggacaccggctggagcggcgcctacctgcccagcgccatcgagcagacccaccccgagagagtgcccgccggcaccagcccctgcagcacctacctgagcttcttcagcacccccagcgagctggccggccccgagagcctgcccagctgggccctgagcgacaccgacagcagagtgagccccgccagccccgccggcagccccagcgccgacttcgccgtgcacggcgagagcctgggcgacagacacctgagaaccctgcagatcagctacgacgccctgaaggacgagaacagcaagctgagaagaaagctgaacgaggtgcagagcttcagcgaggcccagaccgagatggtgagaaccctggagagaaagctggaggccaagatgatcaaggaggagagcgactaccacgacctggagagcgtggtgcagcaggtggagcagaacctggagctgatgaccaagagagccgtgaaggccgagaaccacgtggtgaagctgaagcaggagatcagcctgctgcaggcccaggtgagcaacttccagagagagaacgaggccctgagatgcggccagggcgccagcctgaccgtggtgaagcagaacgccgacgtggccctgcagaacctgagagtggtgatgaacagcgcccaggccagcatcaagcagctggtgagcggcgccgagaccctgaacctggtggccgagatcctgaagagcatcgacagaatcagcgaggtgaaggacgaggaggaggacagctag

SEQ ID NO: 32309 - DNA, 2301 bp, Artificial Sequence
  derived and/or modified sequence
ggcggccgagcggcgggcgacgggggcgggcgacgggggcgggcgacgcgggccgcggcacgggcggagccggggccatggagccgccgctgccgggctaggcaggtcgtgccccgccgggccggcggcgatgtcgggctaccagcgccgcccgggcgccaccccgctgtcccgagcccggagcctcgccattcccgacgctccagcgttctatgagcgccggtcttgtctcccccagctaaattgtgagcgcccccatggcagggacctggactcccccttcttcggcattcggccggcctttatgtgctatgtgcccagcccggtgctggcttccgtgggagacacagattttggctatggaaaggggaaatgttctaagcagagcccgtcaggagcccacgggacacattttggagatgacagatttgaagatctggaagaggcaaatccattctcttttagagagtttctgaagaccaagaacctcggcctctcgaaagaggatccggccagcagaatttatgcaaaggaagcctcgaggcattccctgggacttgaccacaactccccaccctcccaaaccggcgggtatggcctggagtatcagcagccatttttcgaggatccgacaggggctggtgacctcctggatgaggaggaggatgaggacaccggatggagtggggcctacctgccgtccgccatcgagcagactcaccccgagagggtccctgccggcacgtcgccctgcagcacatacctttcctttttctccaccccgtcggagctggcagggcctgagtctctgccctcgtgggcgttgagtgacactgattctcgcgtgtctccggcctctccggcagggagtcctagcgcagactttgcggttcatggagagtctctgggagacaggcacctgcggacgctgcagataagttacgacgcactgaaagatgaaaattctaagctgagaagaaagctgaatgaggttcagagcttctctgaagctcaaacagaaatggtgaggacgcttgagcggaagttagaagcaaaaatgatcaaggaggaaagcgactaccacgacctggagtcggtggttcagcaggtggagcagaacctggagctgatgaccaaacgggctgtaaaggcagaaaaccacgtcgtgaaactaaaacaggaaatcagtttgctccaggcgcaggtctccaacttccagcgagagaatgaagccctgcggtgcggccagggtgccagcctgaccgtggtgaagcagaacgccgacgtggccctgcagaacctccgggtggtcatgaacagtgcacaggcttccatcaagcaactggtttccggagctgagacactgaatcttgttgccgaaatccttaaatctatagacagaatttctgaagttaaagacgaggaggaagactcttgaggacccctgggtgttctcagcatgaagctccgtgtataccctgaggtcaccaccgctcgatctaaatgtgcagttgtgtccttaaatatgcagtcttcacccagagtaaagtgttgatcgcaagagtccagtgtcgtgccctcagccagttcttggccaccacaatgggagcagccctggccgagttgtctctgtggtttctatgcagcccttcttggcgaaattcctgcgatcttatagattctaatgagctcttggaagacattgtcataaaagccagtgattttaagaaaaagagtggttctggaatcaatgttttccagtcccatcccagaacatcagttgtaagataagtacaattggttgtccttgatttcataagtagaacaaacactaaatgtgcctctgagatggccaccccgggcagggacctgtgccttccgccgatgctcagggctccctctggctcccgggtcactcttgtggccccagtgggtggtccctgcagtcatggcctgagtgcgcaggggccaccgcgtggctgctgctgtcctcctccgggacccacggggaccaaggtcacacgttccgtgctgtgaagctgtccagatgtgcctctttggctgggggttctggtggacgtttcaagtggcattttgtacaatgcaggttagaattcaggaatttcaagtatgtgcccgggtctgtcaggtcccagttgcctttctgacggcccccctcagagggacggcgatgagcactaaatgcttttttgactattttcctatagattttttttaaaacttttttttcctcctgttccaattgatagctttcttatttaataaattctgtagttcacc

SEQ ID NO: 32310 - DNA, 1308 bp, Artificial Sequence
  derived and/or modified sequence
atgtccggctatcagagaagacctggcgccacaccgctgtcccgagctcgctcattggcgatccccgacgcccccgctttttatgagaggcggagttgcctgccccagctgaattgcgagcgtccgcatggacgcgacttggatagcccatttttcggtattcggcccgcctttatgtgttacgtgcccagccctgtcctagcatctgtgggcgacactgatttcggatacggcaaaggcaaatgctccaagcagtctccatccggtgcacacggaacccatttcggcgatgatagattcgaagatttggaggaggcgaaccctttcagtttccgagaatttctgaagaccaaaaacctcggactgtctaaagaggatcctgcaagccggatctacgcaaaagaggcaagccggcacagcctcggcctggaccataattcgcccccttcacagaccgggggttacggcctggaatatcagcaaccttttttcgaagaccccacaggcgccggggacctgctagacgaggaggaagatgaagacacgggctggagcggggcttacctaccgagcgcaattgagcagactcacccagagagagtccccgcagggacatccccctgttcaacctatctatcctttttctccacaccctcagaattggcgggaccagagtcactcccttcctgggctctctcagatactgatagtagagtgtcaccggcttcccccgcagggtccccctccgctgacttcgctgtgcacggggagagtcttggggacaggcatctgagaaccctccagatctcatatgatgctctgaaggacgagaatagcaagctgagaaggaaactgaacgaagtacagagtttctccgaggcccaaaccgaaatggttaggacactggagaggaagctggaagccaagatgattaaagaagagtctgactaccatgacttggagtccgtagtgcagcaggttgagcagaacctggaactaatgacaaagcgcgccgtaaaagccgaaaaccacgtggtcaagttaaaacaggaaatatcacttcttcaggctcaggtgtctaacttccaacgggagaatgaagcactgagatgtgggcagggcgccagcctcaccgttgttaaacagaatgccgatgttgccctccaaaacctgagagttgtgatgaatagcgcacaggctagcattaaacaactggtgagcggcgccgagacactcaacctagtggccgagattcttaaatccatcgatcgcatcagtgaggtcaaagatgaagaggaggattcctag

SEQ ID NO: 32311 - DNA, 1308 bp, Artificial Sequence
  derived and/or modified sequence
atgagcggctaccagaggaggcctggggccacccccctgagccgggcccggagcctggccatcccagatgccccagccttctatgaaagaagaagctgcctgccccagctgaactgtgagcggccccacggccgggacctggacagccccttcttcggcatccggcctgccttcatgtgctacgtgcccagccctgtgctggcctctgtgggggacacagactttggctacggcaagggcaagtgcagcaagcagagccccagcggggcccacggcacccactttggagatgacagatttgaggacctggaggaggccaaccccttctccttccgggagttcctgaagaccaagaacctgggcctgagcaaagaagatcctgccagccgcatctatgccaaggaggccagccgccacagcctgggcctggaccacaacagcccccccagccagacaggaggctacggcctggagtaccagcagcccttctttgaggaccccaccggggccggggacctgctggatgaggaggaggatgaggacaccggctggagcggggcctacctgcccagcgccatcgagcagacccaccctgagcgggtgcctgctggcaccagcccctgcagcacctacctgtccttcttcagcaccccatctgagctggccggccctgagagcctgcccagctgggccctgagtgacacagacagccgggtgtccccagccagccctgctggcagccccagcgctgactttgctgtgcatggagagagcctgggggacagacacctgcggaccctgcagatctcctatgatgccctgaaggatgagaacagcaagctgcggaggaagctgaatgaggtgcagagcttcagcgaggcccagacagagatggtgaggaccctggagaggaagctggaggccaagatgatcaaggaggagagtgactaccatgacctggagagcgtggtgcagcaggtggagcagaacctggagctgatgaccaagagagctgtgaaggccgagaaccacgtggtgaagctgaagcaggagatcagcctgctgcaggcccaggtgagcaacttccagagagaaaatgaggccctgcgctgtggccagggcgccagcctgactgtggtgaagcagaatgctgatgtggccctgcagaacctgcgggtggtgatgaacagcgcccaggccagcatcaagcagctggtgtctggagctgagaccctgaacctggtggccgagatcctgaagagcattgaccgcatcagcgaggtgaaggatgaggaggaggacagctag

SEQ ID NO: 32312 - DNA, 1308 bp, Artificial Sequence
  derived and/or modified sequence
atgagcggctaccagcggcggcccggcgccacccccctgagccgggcccgatctctcgctattcccgacgcaccggcgttttacgagagacggagctgtttacctcagttgaattgcgaacggccccacgggcgtgacctggacagtcctttcttcggcattcggccggctttcatgtgctacgtgccatctccggtgctcgcaagtgtgggagacacagattttggatacggcaaaggcaaatgtagtaaacagtcaccctcgggtgcccacggtacacactttggggacgacaggtttgaagatttggaagaggcgaatcctttctcattccgggagtttttaaaaaccaaaaacctgggcctgagcaaagaggatcctgcctccaggatctacgcaaaggaggcaagtcggcatagcctgggtctggaccacaatagtcccccaagccagactggcggatacggtcttgaatatcaacagccttttttcgaggaccccacgggggctggggacctgctcgatgaggaagaggacgaggacaccggatggagcggggcctatcttccttctgctatcgaacaaacccacccggagagggtccccgccggcacatctccatgttctacatatctgtctttctttagcaccccatccgaactggctggcccagaaagcctcccctcatgggctctgagtgataccgacagccgagtcagtcctgcgtcccccgccggcagtccaagcgctgatttcgctgttcatggcgagtctctgggagatcggcatttgcgcactttgcagattagctatgacgcactgaaggacgaaaacagtaagttgcggagaaagctgaacgaggttcagtccttcagtgaggcccagacggagatggttagaactttggaaaggaagttggaggctaaaatgatcaaagaggagagtgattaccatgacctggagtcagtggtgcagcaggttgaacagaacctggagctgatgaccaaacgcgcggtgaaagccgagaatcacgttgttaagttaaagcaagagatttccctgttgcaagcacaagtatccaatttccagagagaaaacgaagccctgaggtgcgggcagggtgcaagcctcactgtagtcaagcagaatgctgacgttgcacttcagaatcttagagtggtgatgaattccgcacaggcaagtataaaacagctagtcagcggcgcagagacgctgaatttggtagccgagattctcaagtccatcgatcggatttcagaagtgaaggatgaagaagaagacagttag

SEQ ID NO: 32313 - DNA, 1308 bp, Artificial Sequence
  derived and/or modified sequence
atgagcggatatcagagacggccaggcgcaacaccattgagtagggcacgctccttagccattcctgacgcacccgcattttacgaacgcaggagctgtcttccacaacttaattgtgaacgcccacatggcagagatctggactcaccttttttcggaatccggcctgctttcatgtgctacgttccctcacctgtactagcaagcgtgggagacacagatttcggctacggcaaaggcaagtgtagcaaacagagccctagcggagcacatggaacccacttcggcgatgatcgcttcgaggacctggaagaggcaaaccccttcagctttcgcgaatttctgaaaacgaaaaatttgggcctgtctaaagaggatccagcctcaagaatctatgcaaaggaggccagcagacactcactgggactagaccataatagcccgccaagtcagacaggcggttatggactggaataccagcagccttttttcgaggacccaactggcgcaggtgacctcctggacgaggaggaagacgaggataccggctggtccggggcttatctcccgtctgcaattgaacagacacatccagaaagggtccccgctgggactagtccttgtagcacatatctgagtttcttttccactccctccgaactggcaggtccagagtcactgccttcctgggctctgagcgacaccgactctagagtgtctccagcctccccagctggatcaccaagtgccgattttgctgtgcacggcgaatccctgggtgaccggcatctccgcactttacagatatcttacgatgcgctgaaagatgagaattccaaacttaggaggaagctgaacgaagtacaatcgttcagcgaagcccaaactgagatggtgaggactctggaaagaaaactggaagccaaaatgataaaagaagagagtgactatcatgatctcgaatcggtggtccagcaggttgaacagaacctggaactcatgaccaagcgagctgttaaggccgaaaatcacgtggtgaaactcaagcaggaaatcagtctgctacaggcgcaggttagtaactttcagagagaaaacgaggctttaaggtgtggccagggtgcctctctgaccgttgtgaagcagaatgccgatgtcgctctgcagaatctccgggtcgttatgaacagcgcccaagcaagtattaagcagctggtttcgggcgctgagaccttaaatctggtggccgagattcttaaaagtattgacaggattagtgaagttaaagacgaggaagaggacagttag

SEQ ID NO: 32314 - protein, 362 aa, Artificial Sequence
  derived and/or modified sequence
MSGYQRRPGATPLSRARSLAIPDDDRFEDLEEANPFSFREFLKTKNLGLSKEDPASRIYAKEASRHSLGLDHNSPPSQTGGYGLEYQQPFFEDPTGAGDLLDEEEDEDTGWSGAYLPSAIEQTHPERVPAGTSPCSTYLSFFSTPSELAGPESLPSWALSDTDSRVSPASPAGSPSADFAVHGESLGDRHLRTLQISYDALKDENSKLRRKLNEVQSFSEAQTEMVRTLERKLEAKMIKEESDYHDLESVVQQVEQNLELMTKRAVKAENHVVKLKQEISLLQAQVSNFQRENEALRCGQGASLTVVKQNADVALQNLRVVMNSAQASIKQLVSGAETLNLVAEILKSIDRISEVKDEEEDS

SEQ ID NO: 32315 - DNA, 1089 bp, Artificial Sequence
  derived and/or modified sequence
atgagcggctaccagagaagacccggcgccacccccctgagcagagccagaagcctggccatccccgacgacgacagattcgaggacctggaggaggccaaccccttcagcttcagagagttcctgaagaccaagaacctgggcctgagcaaggaggaccccgccagcagaatctacgccaaggaggccagcagacacagcctgggcctggaccacaacagcccccccagccagaccggcggctacggcctggagtaccagcagcccttcttcgaggaccccaccggcgccggcgacctgctggacgaggaggaggacgaggacaccggctggagcggcgcctacctgcccagcgccatcgagcagacccaccccgagagagtgcccgccggcaccagcccctgcagcacctacctgagcttcttcagcacccccagcgagctggccggccccgagagcctgcccagctgggccctgagcgacaccgacagcagagtgagccccgccagccccgccggcagccccagcgccgacttcgccgtgcacggcgagagcctgggcgacagacacctgagaaccctgcagatcagctacgacgccctgaaggacgagaacagcaagctgagaagaaagctgaacgaggtgcagagcttcagcgaggcccagaccgagatggtgagaaccctggagagaaagctggaggccaagatgatcaaggaggagagcgactaccacgacctggagagcgtggtgcagcaggtggagcagaacctggagctgatgaccaagagagccgtgaaggccgagaaccacgtggtgaagctgaagcaggagatcagcctgctgcaggcccaggtgagcaacttccagagagagaacgaggccctgagatgcggccagggcgccagcctgaccgtggtgaagcagaacgccgacgtggccctgcagaacctgagagtggtgatgaacagcgcccaggccagcatcaagcagctggtgagcggcgccgagaccctgaacctggtggccgagatcctgaagagcatcgacagaatcagcgaggtgaaggacgaggaggaggacagctag

SEQ ID NO: 32316 - DNA, 1089 bp, Artificial Sequence
  derived and/or modified sequence
atgtcggggtaccagcggaggcccggagctacacccctgagcagagcgcgaagtcttgctattcctgatgatgacagattcgaagacctggaagaggccaaccccttttcgttccgtgagttcttgaaaaccaaaaatctaggacttagcaaggaagatcctgccagcagaatctacgctaaggaagcatcacgccactctctgggcctggatcacaacagcccgccgagccagacaggtggttatggactcgaatatcagcagccgttctttgaagatccaacgggggcaggagacctgttggatgaagaagaagatgaggatacagggtggtcaggggcttacttaccttccgctatagagcaaacccaccccgaacgggtgcctgccggcacctccccatgcagcacttacctcagtttcttctctaccccctccgagttggcaggccccgagtcccttccaagctgggctctttctgataccgactcgcgcgtgagcccggcatcaccagcgggttccccatccgccgacttcgcagttcacggtgagtcactgggagataggcacctgaggacgctccaaattagctacgacgcactgaaagatgaaaactccaagctccgtcggaagctcaatgaggtgcagtcttttagtgaagctcagaccgagatggtgaggacactcgagaggaagttggaggctaagatgatcaaggaagagtctgactaccatgacctggagtcggtggtgcagcaggtcgagcagaaccttgagttgatgactaaacgcgctgtgaaagcggagaatcacgtggtaaagttaaaacaagagattagtctactacaggcgcaagtgtccaactttcagcgggagaacgaggcactgcgttgtggtcagggggcctccctgactgtggtcaaacagaacgcagatgtggcactgcagaacctgagggtggtgatgaattcagcacaggcaagtatcaagcaactggttagcggcgcagaaaccctaaatttggtggcagagatcctcaaatctatcgatcgaatatcagaggtcaaggacgaggaagaagactcttag

SEQ ID NO: 32317 - DNA, 2129 bp, Artificial Sequence
  derived and/or modified sequence
cggcccaaggcgttcaggcacgcgctttcggtgctcggagcggaagcagcggcgagaggctcggaggcgcgggggcggccgagcggcgggcgacgggggcgggcgacgggggcgggcgacgcgggccgcggcacgggcggagccggggccatggagccgccgctgccgggctaggcaggtcgtgccccgccgggccggcggcgatgtcgggctaccagcgccgcccgggcgccaccccgctgtcccgagcccggagcctcgccattcccgacgatgacagatttgaagatctggaagaggcaaatccattctcttttagagagtttctgaagaccaagaacctcggcctctcgaaagaggatccggccagcagaatttatgcaaaggaagcctcgaggcattccctgggacttgaccacaactccccaccctcccaaaccggcgggtatggcctggagtatcagcagccatttttcgaggatccgacaggggctggtgacctcctggatgaggaggaggatgaggacaccggatggagtggggcctacctgccgtccgccatcgagcagactcaccccgagagggtccctgccggcacgtcgccctgcagcacatacctttcctttttctccaccccgtcggagctggcagggcctgagtctctgccctcgtgggcgttgagtgacactgattctcgcgtgtctccggcctctccggcagggagtcctagcgcagactttgcggttcatggagagtctctgggagacaggcacctgcggacgctgcagataagttacgacgcactgaaagatgaaaattctaagctgagaagaaagctgaatgaggttcagagcttctctgaagctcaaacagaaatggtgaggacgcttgagcggaagttagaagcaaaaatgatcaaggaggaaagcgactaccacgacctggagtcggtggttcagcaggtggagcagaacctggagctgatgaccaaacgggctgtaaaggcagaaaaccacgtcgtgaaactaaaacaggaaatcagtttgctccaggcgcaggtctccaacttccagcgagagaatgaagccctgcggtgcggccagggtgccagcctgaccgtggtgaagcagaacgccgacgtggccctgcagaacctccgggtggtcatgaacagtgcacaggcttccatcaagcaactggtttccggagctgagacactgaatcttgttgccgaaatccttaaatctatagacagaatttctgaagttaaagacgaggaggaagactcttgaggacccctgggtgttctcagcatgaagctccgtgtataccctgaggtcaccaccgctcgatctaaatgtgcagttgtgtccttaaatatgcagtcttcacccagagtaaagtgttgatcgcaagagtccagtgtcgtgccctcagccagttcttggccaccacaatgggagcagccctggccgagttgtctctgtggtttctatgcagcccttcttggcgaaattcctgcgatcttatagattctaatgagctcttggaagacattgtcataaaagccagtgattttaagaaaaagagtggttctggaatcaatgttttccagtcccatcccagaacatcagttgtaagataagtacaattggttgtccttgatttcataagtagaacaaacactaaatgtgcctctgagatggccaccccgggcagggacctgtgccttccgccgatgctcagggctccctctggctcccgggtcactcttgtggccccagtgggtggtccctgcagtcatggcctgagtgcgcaggggccaccgcgtggctgctgctgtcctcctccgggacccacggggaccaaggtcacacgttccgtgctgtgaagctgtccagatgtgcctctttggctgggggttctggtggacgtttcaagtggcattttgtacaatgcaggttagaattcaggaatttcaagtatgtgcccgggtctgtcaggtcccagttgcctttctgacggcccccctcagagggacggcgatgagcactaaatgcttttttgactattttcctatagattttttttaaaacttttttttcctcctgttccaattgatagctttc

SEQ ID NO: 32318 - DNA, 1089 bp, Artificial Sequence
  derived and/or modified sequence
atgagcggctaccagaggaggcctggggccacccccctgagccgggcccggagcctggccatcccagatgatgacagatttgaggacctggaggaggccaaccccttctccttccgggagttcctgaagaccaagaacctgggcctgagcaaggaggaccctgccagccgcatctatgccaaggaggccagccgccacagcctgggcctggaccacaacagcccccccagccagacaggaggctacggcctggagtaccagcagcccttctttgaggaccccactggagctggggacctgctggatgaggaggaggatgaggacaccggctggagcggggcctacctgcccagcgccatcgagcagacccaccctgagcgggtgcctgctggcaccagcccctgcagcacctacctgtccttcttcagcacccccagcgagctggccggccctgagagcctgcccagctgggccctgagtgacacagacagccgggtgtccccagccagccctgctggcagccccagcgctgactttgctgtgcacggggagagcctgggggacagacacctgcggaccctgcagatctcctatgatgccctgaaggatgagaacagcaagctgcggaggaagctgaatgaggtgcagagcttcagcgaggcccagacagagatggtgaggaccctggagaggaagctggaggccaagatgatcaaggaggagagtgactaccatgacctggagagcgtggtgcagcaggtggagcagaacctggagctgatgaccaagagagctgtgaaggcagaaaatcatgtggtgaagctgaagcaggagatcagcctgctgcaggcccaggtgagcaacttccagcgggagaatgaggccctgcgctgtggccagggcgccagcctgactgtggtgaagcagaatgctgatgtggccctgcagaacctgcgggtggtgatgaacagcgcccaggccagcatcaagcagctggtgtctggagctgagaccctgaacctggtggccgagatcctgaagagcattgaccgcatcagcgaggtgaaggatgaggaggaggacagctag

SEQ ID NO: 32319 - DNA, 1089 bp, Artificial Sequence
  derived and/or modified sequence
atgagcggctaccagcggcggcccggcgccacccccctgagccgggcccgctctctggctatccctgacgatgaccgattcgaggatctggaagaagccaacccttttagctttagggagtttttgaaaactaaaaatcttggtttgtctaaagaggatcctgcatctagaatttacgcaaaagaagctagccggcattctctgggccttgaccataacagcccgccctctcaaacgggtggatatgggcttgaatatcagcagccgttttttgaagacccaactggagccggcgaccttcttgatgaggaggaagatgaggacactggatggtcaggtgcttacttgccatccgctattgaacaaactcacccggaacgggtcccagcggggacttctccttgcagcacctatttaagctttttctcgacaccctcggagctggccgggcccgagagcctcccaagttgggccttatcggatactgattctcgagtgagccccgccagcccagctggctccccaagcgctgactttgccgtccatggcgagtccctcggagatcgccatcttagaacattacagatctcctacgatgcactgaaggacgagaactcaaaactcaggcgcaaacttaacgaagtccaaagtttttccgaagcccaaaccgaaatggtgagaactctcgagagaaaattggaagcaaaaatgattaaagaagaaagcgattatcacgacttggaaagtgtcgttcagcaggttgagcagaacctagagctcatgaccaaaagagccgtgaaggcggagaatcacgtagttaagctcaagcaggagattagtctcctgcaggcccaggtctcaaacttccaacgagagaacgaagcccttaggtgcggtcaaggcgcatccctgaccgtcgtgaagcagaacgccgacgttgccttgcagaatctccgcgttgtgatgaatagcgcacaggcatcgataaaacagctggtgtctggtgcggaaacactgaacctggtggccgaaattctcaagtccatcgataggatttccgaagttaaggacgaggaggaggactcctag

SEQ ID NO: 32320 - DNA, 1089 bp, Artificial Sequence
  derived and/or modified sequence
atgtcaggctatcaacgacggccaggtgcgacccctctttctagagctaggtcacttgccatcccagacgatgataggttcgaggatctagaagaggccaacccattttcctttcgtgaattcttgaaaactaagaatcttggtctgtccaaagaagatccggcaagccgcatctacgcaaaagaagcctcgcgacattcattggggctcgaccataactcccccccttctcagacaggcggatacggccttgagtaccagcagcccttcttcgaggatcctacaggagcaggcgatttgctcgacgaagaggaggacgaggacaccgggtggtctggggcttacctcccttccgccatcgaacagacccaccctgaaagagttcccgctggtaccagtccctgttcaacatatttgtcttttttctccacaccctctgagcttgctggccctgaaagccttccttcgtgggccctgagcgatactgactcacgtgtttcacctgcctcccccgcaggctccccatccgctgatttcgcagtgcacggcgagtccctcggtgatcgacacctcaggacactgcagatttcctacgatgccttgaaggacgaaaattccaaactccgcagaaaactgaatgaagttcagtcgttctctgaagcacagaccgagatggtcagaaccttagagcgcaagctggaagccaagatgatcaaggaggaaagcgactaccacgacctcgaatccgtggtccagcaagttgagcaaaatctggagctgatgactaagcgcgcagtgaaggcggaaaaccacgtggttaagttgaagcaggagatttccttgctgcaggcccaggtttccaatttccagcgcgagaatgaggcattgcggtgcggacagggggctagtcttaccgtcgtgaagcaaaacgcagacgtggcattgcagaatttgagagtcgtgatgaacagcgcccaggcctctattaagcagctggtgtccggggcagagacactgaacctggtagccgagatcctgaagtccatagaccgcatctctgaagtgaaggacgaagaagaggacagctag

SEQ ID NO: 32321 - protein, 318 aa, Artificial Sequence
  derived and/or modified sequence
MAGLKRRASQVWPEEHGEQEHGLYSLHRMFDIVGTHLTHRDVRVLSFLFVDVIDDHERGLIRNGRDFLLALERQGRCDESNFRQVLQLLRIITRHDLLPYVTLKRRRAVCPDLVDKYLEETSIRYVTPRALSDPEPRPPQPSKTVPPHYPVVCCPTSGPQMCSKRPARGRATLGSQRKRRKSVTPDPKEKQTCDIRLRVRAEYCQHETALQGNVFSNKQDPLERQFERFNQANTILKSRDLGSIICDIKFSELTYLDAFWRDYINGSLLEALKGVFITDSLKQAVGHEAIKLLVNVDEEDYELGRQKLLRNLMLQALP

SEQ ID NO: 32322 - protein, 275 aa, Artificial Sequence
  derived and/or modified sequence
MAGLKRRASQVWPEEHGEQEHGLYSLHRMFDIVGTHLTHRDVLQLLRIITRHDLLPYVTLKRRRAVCPDLVDKYLEETSIRYVTPRALSDPEPRPPQPSKTVPPHYPVVCCPTSGPQMCSKRPARGRATLGSQRKRRKSVTPDPKEKQTCDIRLRVRAEYCQHETALQGNVFSNKQDPLERQFERFNQANTILKSRDLGSIICDIKFSELTYLDAFWRDYINGSLLEALKGVFITDSLKQAVGHEAIKLLVNVDEEDYELGRQKLLRNLMLQALP

SEQ ID NO: 32323 - DNA, 414 bp, Artificial Sequence
  derived and/or modified sequence
atgaccagccccctggtgttcgccagcctgagccccgacgccatggccaaaatgctggaaatggccgccctcaacgtcgggaccatcagaattagcctcaataccgaacccaggccacctgtgattactcagctagccccatcgcctgaaaccttacctttctgccctgaatggggcgcggagaaccagtctcgacatctgaagctccccccatttttcatctgtaggtgccgtggaccactataccaggaagagtctttatcagagatccactgccactctggactgttcctggatcagttaagcctccccactcctttctcctctctgtcagtgagtctcattcactggaccttcatttcaacgaagtacgtgccaggcatcatgctcgccttcgggggcactaataagtag

SEQ ID NO: 32324 - DNA, 414 bp, Artificial Sequence
  derived and/or modified sequence
atgactagccctctcgtgttcgcatccctctccccagatgcaatggccaaaatgttggagatggcggctttaaacgtgggcaccattcgaatctcacttaatacggagcccaggccccctgtgatcactcagctggccccttcgccagaaacactcccgttttgccctgaatggggagcggagaaccagagccgtcacttgaagttgccacccttttttatttgccggtgccgagggccactctaccaggaagagagcctctcagagatacactgtcacagtgggctttttctagatcagctttcgctccccactcctttcagttcactttcagtgtccttgatacattggacgttcatctccaccaagtacgtccctggaataatgttggcgttcgggggtacaaacaagtag

SEQ ID NO: 32325 - DNA, 957 bp, Artificial Sequence
  derived and/or modified sequence
atggccgggctaaaaaggagggcttctcaggtttggcccgaagaacacggagagcaagaacatgggctgtatagtctccaccggatgttcgacattgttggaacgcacctgacgcaccgtgacgtgcgggtgctctcctttttgttcgtggacgtaattgacgatcatgagcgaggacttattagaaatggccgggatttcttgcttgccctggagaggcagggacggtgcgacgaatctaattttaggcaggtgctccagctactaagaattattacaagacacgatttgcttccctatgtaaccctgaagaggaggcgggccgtctgcccagacctggttgacaaatatttggaggagacttctatccgctacgtgacaccccgggccctgtccgacccagaaccacgccctcctcagccatccaaaaccgtccctccacactaccccgttgtttgctgcccaacaagtgggccacagatgtgcagcaaacggcccgccaggggcagggctaccctgggaagtcagagaaagagacgtaaatccgtaaccccagatcccaaggaaaaacaaacttgtgatatcagactgagggtgcgcgctgaatattgtcagcatgaaaccgccctccaaggcaacgtgtttagtaacaagcaggatccactggaacggcagttcgaacggtttaaccaggcaaacactattttgaaatcacgggacctgggcagcattatatgcgacatcaaattcagtgaactaacctatttggatgcattctggagggactatatcaacggctctttgctggaagcacttaagggtgtgtttattaccgacagcctgaaacaggctgtagggcatgaagctatcaagctcctcgtgaacgtggacgaggaggactacgaactgggtagacagaagctgctccggaatctgatgttgcaggcactcccttag

SEQ ID NO: 32326 - DNA, 957 bp, Artificial Sequence
  derived and/or modified sequence
atggcagggctgaaacggagggcatcccaggtgtggcctgaggagcacggcgaacaagaacacggcttgtatagccttcaccggatgtttgacattgttggtacccacctgactcatagggacgtccgcgtcctctcgtttctgttcgtcgacgtaattgacgatcatgagaggggactgatccggaatggacgtgacttcttattagctctggaacgccagggaaggtgcgatgaaagcaacttccgccaggtcctgcagctcctacggatcattaccagacacgacctgctgccttacgtaactctgaagaggaggagggctgtctgcccggatctcgtcgataagtacttggaagaaaccagtattcggtacgtgacaccccgtgctttgtctgatcctgagccacgaccgccacaacctagtaagacagtacccccccattatcctgtggtgtgttgtcctacctctggcccacagatgtgctctaagaggccagccagggggcgtgccaccctgggatcacagaggaaaaggcgcaaatccgtcactcctgaccctaaagaaaaacagacatgcgacatacggctgcgcgtccgggcagagtactgtcaacatgagactgcactccagggaaacgtattcagcaacaaacaggacccactagaaaggcagttcgaaagatttaaccaggccaatacaatcctgaaatcacgtgatctgggctccattatttgtgatattaaattctcagagctgacctacctggatgcgttctggcgcgattatatcaatggctcattactagaagcactcaagggcgtgttcatcactgacagcctgaaacaagcggtcgggcatgaggccataaaactgctggtgaatgtggatgaagaggattacgagctgggtaggcagaagttactgcgaaatctgatgctccaggcgctgccatag

SEQ ID NO: 32327 - DNA, 828 bp, Artificial Sequence
  derived and/or modified sequence
atggccggactgaagcggagggccagtcaggtttggcctgaggagcacggagagcaagagcatggactgtatagtcttcaccgtatgtttgacatcgtaggaactcaccttacccaccgggacgtccttcaattactcagaatcattacccgccatgacctgttaccttatgtgaccctcaagaggcgccgggccgtatgccccgaccttgtggacaagtaccttgaagaaacctccataagatatgtaactccccgtgcattatcagacccagaaccccgacccccccagccctcgaaaaccgttccccctcattacccagtggtctgttgcccgacatccggtccacagatgtgcagcaagagacccgcacgagggagggccaccctcggatcgcagcggaagcggcgcaaatcagtgacccccgatcccaaggagaaacagacctgcgacatacgtttgcgagtgagggcagagtattgccagcacgagacagctctccagggcaatgtgttctctaataagcaggacccactggagaggcaattcgagagatttaaccaagctaacacaatcctcaagagccgggatcttggctctatcatttgtgacataaagtttagcgaactgacctacctcgacgccttctggagagactacataaacggtagcctcctcgaggcattaaagggggtgttcatcacagactccctgaagcaggcagtagggcacgaggccatcaaactcctggtcaacgtggacgaagaggactacgagttggggcggcaaaaactactgagaaacctgatgttacaggctttgccctag

SEQ ID NO: 32328 - DNA, 957 bp, Artificial Sequence
  derived and/or modified sequence
atggccggcctgaagcgacgtgcttcgcaggtctggcctgaagagcacggcgagcaggaacacggcctctattctctccaccgcatgtttgatatcgtgggcacacatctcacccacagagatgtgcgcgtgctttcgtttctgttcgttgatgtcattgatgaccacgagagaggactgattcgcaacggaagagacttcctgctggcgcttgaacgtcaggggagatgcgatgagagtaattttcgtcaggtgctacagctcctccgaatcatcacgcggcatgacctgctcccatacgtaacactgaagaggagaagagctgtttgcccggaccttgtggacaagtacttggaggagacttctatcaggtacgttacgccacgagccctgtctgatcccgagcctcggcctcctcaaccctccaagacagtgccccctcactacccagtggtatgctgcccaacgtcaggtcctcaaatgtgttccaagcgccccgcacggggccgggcaaccctgggctcccagaggaaacgccgtaagagtgtgacaccagacccgaaggaaaagcagacctgtgacatccggctacgggtgagggcggagtattgtcagcacgaaacggctctgcagggtaacgtcttctccaataagcaggacccactggagagacagtttgagagatttaaccaggccaacactatcctaaaatcacgcgacctgggatcaatcatctgtgatatcaagtttagcgaactgacctacctggatgctttttggcgagattacatcaatggttcattgcttgaagcactgaaaggtgtttttatcacagactccctgaagcaagctgtgggtcatgaagctatcaaattgcttgttaatgtggacgaggaggactacgagctgggaaggcagaagctgctccggaatctgatgttgcaagccctcccatag

SEQ ID NO: 32329 - DNA, 957 bp, Artificial Sequence
  derived and/or modified sequence
atggccgggttgaaacgcagggccagccaggtgtggcccgaagaacacggggaacaagaacacggcttgtactccctccatcggatgttcgacatcgttgggacccatcttacacaccgcgatgtaagggtcctctcttttctttttgtggatgtgattgacgaccacgagcgtggattgattagaaatggccgggactttctgctggctttggagcggcagggaaggtgtgacgagtcaaactttcgacaggttttgcagctgttgcgcatcatcacccgtcacgacctgcttccttatgtcaccctgaaacggcgaagagcagtgtgtccagacctggtggacaagtatctcgaggagacgtcaatccgctatgtcactcccagagccctctccgaccctgagccacggccaccccagccaagtaaaaccgtgcctccacattaccctgtagtatgttgtcccacaagtggacctcaaatgtgttcgaaaagaccagctcggggaagggccactctcggctcacaaaggaaacgccgcaaatctgtgacccccgacccgaaggagaaacaaacttgcgatattaggctgcgcgtgcgggcagagtactgccagcatgaaactgccctacagggaaacgtattctctaacaaacaagacccgctggaaagacagttcgagcgctttaatcaagcgaacactatcctgaaatcacgtgacctgggtagcataatctgtgacatcaaatttagtgagcttacctatttagacgccttctggagagattatattaacggctcattgctggaagcgttaaagggcgtgtttatcacagactcgcttaagcaggctgtcggccacgaagcgattaaattactggttaatgtggatgaggaggattacgagttaggccgccagaagctactgcgcaaccttatgctgcaggcactgccttag

SEQ ID NO: 32330 - DNA, 957 bp, Artificial Sequence
  derived and/or modified sequence
atggccggcctgaagaggcgggccagccaggtgtggccagaggagcacggggagcaggagcacggcctgtacagcctgcacaggatgtttgacatcgtgggcacccacctgacccacagagatgtgcgggtgctgtccttcctgtttgtggatgtgattgatgaccacgagcggggcctcatcagaaatggccgggacttcctgctggccctggagcggcagggccgctgtgatgagagcaacttccggcaggtgctgcagctgctgcgcatcatcaccaggcatgacctgctgccctacgtgaccctgaagagaagaagagctgtgtgcccagacctggtggacaagtacctggaggagaccagcatccgctacgtgaccccccgggccctgagtgaccctgagccccggcccccccagcccagcaagacagtgcccccccactaccctgtggtgtgctgccccaccagcggcccccagatgtgcagcaagaggcctgcccggggccgggccaccctgggcagccagaggaagaggaggaagtctgtgaccccagaccccaaggagaagcagacctgtgacatccggctgcgggtgcgggcagagtactgccagcacgagacagccctgcagggcaatgtgttcagcaacaagcaggaccccctggagcggcagtttgagcgcttcaaccaggccaacaccatcctgaagagccgggacctgggcagcatcatctgtgacatcaagttcagcgagctgacctacctggatgccttctggagggactacatcaatggcagcctgctggaggccctgaagggcgtcttcatcacagacagcctgaagcaggccgtgggccacgaggccatcaagctgctggtgaatgtggatgaagaagattatgagctgggccggcagaagctgctgaggaacctgatgctgcaggccctgccctag

SEQ ID NO: 32331 - DNA, 828 bp, Artificial Sequence
  derived and/or modified sequence
atggccggcctgaagaggcgggccagccaggtgtggccagaggagcacggggagcaggagcacggcctgtacagcctgcacaggatgtttgacatcgtgggcacccacctgacccacagagatgtgctgcagctgctgcgcatcatcaccaggcatgacctgctgccctacgtgaccctgaagagaagaagagctgtgtgcccagacctggtggacaagtacctggaggagaccagcatccgctacgtgaccccccgggccctgagtgaccctgagcccaggcctccccagcccagcaagacagtgcccccccactaccctgtggtgtgctgccccaccagcggcccccagatgtgcagcaagaggcctgcccggggccgggccaccctgggcagccagaggaagaggaggaagtctgtgaccccagaccccaaggagaagcagacctgtgacatccggctgcgggtgcgggcagagtactgccagcatgaaacagccctgcagggcaatgtgttcagcaacaagcaggaccccctggagcggcagtttgagcgcttcaaccaggccaacaccatcctgaagagccgggacctgggcagcatcatctgtgacatcaagttcagcgagctgacctacctggatgccttctggagggactacatcaatggcagcctgctggaggccctgaagggcgtcttcatcacagacagcctgaagcaggccgtgggccacgaggccatcaagctgctggtgaatgtggatgaggaggactatgagctgggccggcagaagctgctgaggaacctgatgctgcaggccctgccctag

SEQ ID NO: 32332 - DNA, 957 bp, Artificial Sequence
  derived and/or modified sequence
atggccggcctgaagcggcgggccagccaggtgtggcccgaggagcatggagagcaggaacatggtctatacagcctacacagaatgttcgacatagtcggtacacatttaacacacagggacgtgcgcgtgctttcctttctgttcgtagatgtcattgacgaccatgagagagggctgatcagaaatggccgggatttcctgctggctcttgaacgccaggggagatgtgacgaatcaaacttccggcaggtgcttcagcttttgaggatcatcacacggcacgacctgttaccctacgttacccttaagagaaggcgagctgtgtgccccgacttagtcgataaatatctcgaggagacttccataaggtacgtcaccccacgagcactgtcagatcccgaaccacggccccctcagccgtctaaaaccgtccctccccattacccggtcgtgtgctgccccaccagtggtccccagatgtgttctaagcggcctgcacggggacgcgcaaccttggggagccagcggaagcgcagaaaatccgtgacacccgaccctaaagaaaaacagacctgcgatatccgattaagagtgagggcagagtattgtcagcacgagacagcactccagggaaatgtgttcagtaataaacaggacccacttgagaggcaattcgaacgattcaatcaggccaataccatactgaagtcccgggacctcggctcgatcatttgcgacattaagttcagcgaattaacctatcttgatgctttttggcgagattatatcaatggctcgttgttggaagccctaaaaggggtctttattactgatagcttgaagcaagccgtgggacacgaggcgattaaactacttgtaaacgtggatgaagaggactacgaactcggcagacagaaattgcttaggaacctgatgctgcaggccctgccttag

SEQ ID NO: 32333 - DNA, 957 bp, Artificial Sequence
  derived and/or modified sequence
atggccggcctgaagcggcgggccagccaggtgtggcccgaggagcacggggaacaggagcatgggttatattccctgcatcgcatgttcgatattgtggggacgcatctcacccatagggacgtccgggtacttagcttcttgttcgtcgacgtgatcgacgaccatgagaggggtctgatccgcaacggtcgggacttcctgcttgctctggagcgccagggtcgctgtgacgaatccaatttcagacaggttctacagttgctccgcattattacccgccatgatttactgccatacgtcacccttaaacggagaagagccgtatgtccagacctggtggataagtaccttgaggagacatccatccggtatgtcacccctcgagcactgagcgatcctgagccacggccgcctcagccttccaagacagtaccaccacattatccagtggtctgctgtccaacttctggaccgcagatgtgtagtaaacggccagctagagggagggccactcttggttcacagagaaaacgtcgaaagtccgtgacacctgatcctaaggaaaagcagacctgcgacatccgcctgcgggtcagggcggagtactgtcaacatgaaaccgccctgcagggaaatgttttttccaacaagcaagacccactggagcgacaattcgagcgattcaaccaggctaatacgatcctcaaatcccgggacctgggatcaatcatttgcgacattaaattttcagaactaacctatttagacgcattctggcgcgattacatcaacgggagtctgcttgaagctctgaaaggcgtgttcatcacagactcactcaagcaagccgtcgggcacgaagcaattaaattactcgtgaacgttgacgaagaagattatgagctcggcagacagaaactgttaaggaatctcatgctgcaggccctgccctag

SEQ ID NO: 32334 - DNA, 828 bp, Artificial Sequence
  derived and/or modified sequence
atggccggcctgaagcggcgggccagccaggtgtggcccgaggagcatggggagcaggagcacggcttatacagtctgcatagaatgttcgacattgtgggaactcatctaacccaccgggatgtgcttcagctactccgcatcattactcgccacgatctactcccatacgtgacactcaagcggcggcgggccgtatgccctgatcttgtggataagtatctggaagaaacctctataagatatgtgacccctagggccctcagtgacccagaaccccggcctccccaaccttccaaaacagtgcctccacattacccagtggtgtgttgtccaacgtcagggccgcagatgtgctcgaagcgtcccgcacgtggccgtgctactctgggcagtcagaggaaacggaggaagtcggtaacccctgatcccaaagaaaaacaaacctgtgacatccgcctgcgtgtgcgcgctgagtactgccaacacgagacagccctgcagggtaatgtgtttagcaacaaacaggatccccttgagaggcagtttgagcggttcaatcaagccaatacaattttgaaaagtcgggatctcggctcgatcatttgcgatatcaaattttcagagctcacttacctggacgcattttggagagactatattaatggctctttactggaagccctgaaaggcgtgtttattaccgattcactaaaacaggctgtgggtcacgaagcaatcaaactgctcgtaaacgttgacgaggaggactatgaactgggtcggcaaaagttgctgcgcaacctaatgctgcaggcgctgccttag

SEQ ID NO: 32335 - DNA, 957 bp, Artificial Sequence
  derived and/or modified sequence
atggccggcctgaagcggcgggccagccaggtgtggcccgaggagcatggggagcaggaacatggactgtacagtctgcatagaatgtttgacatcgtgggcacacatctgacccaccgagacgttagggtacttagctttttgtttgtggacgtgatagatgatcacgagcgcggactgattcggaacggacgcgatttccttctggcacttgagcgccaggggagatgcgatgagtccaacttcaggcaagttctacaactgctgcggattataactcgccatgacttgcttccgtacgtgaccctgaaacgcagacgcgctgtatgccctgacttggtggacaaatacctggaggagacctccatccgctacgtcacaccgcgcgccttgtcggatccggaacctagacctccacagccctctaaaacagtgcctccccactacccggtcgtctgttgccccacgtctgggcctcaaatgtgtagcaaaagacctgctcggggaagggctaccctgggatcccagaggaagagacgtaagtcggttacccctgatccaaaagagaaacagacctgtgacatccggctgagggttcgcgccgagtactgtcaacacgaaactgctctccagggcaatgtcttctctaataaacaagaccccctggaacgccaattcgagagatttaaccaggccaataccattctgaaatctagagacctaggctcaataatttgcgatattaaattctcggaactcacatacctggacgccttttggcgtgattatattaacggttcgctactcgaggcactcaagggcgtgttcattacggattcgctgaagcaagcagtcgggcacgaggctatcaagctgttagtgaacgttgatgaagaggattatgagctgggacgacagaagctgctgaggaatcttatgctgcaggccctgccatag

SEQ ID NO: 32336 - DNA, 957 bp, Artificial Sequence
  derived and/or modified sequence
atggccggcctgaagcggcgggccagccaggtgtggcccgaggagcacggagagcaggagcatggtctctattcattgcaccggatgttcgatattgtaggaacccatttgacgcaccgggatgtgagggttttgagcttccttttcgttgacgttatagatgatcatgagcgcggactgatcaggaatggacgcgactttctgctggcccttgagcgtcaagggcgttgcgacgaatctaatttccgtcaagtgctccagttgttgcgcattataacccgccatgatctgctcccgtacgtgacactcaaacgccggagggctgtttgcccagacctggtggataaatatctcgaagaaactagcatcagatatgttacacctcgagcgttgtccgatccagaaccacggccaccccagccatcgaagaccgtcccgccacattacccggtggtgtgctgccctacatcaggtccacaaatgtgtagcaagagacctgcgcgggggcgagcgacgctaggctcacagcggaaacggaggaaaagtgtcacccccgatcccaaagaaaaacagacctgtgacattaggctgagggtgcgcgctgagtattgccagcacgaaacggccttgcagggcaacgtattttctaataaacaggacccactcgaacgtcagttcgagcggtttaatcaggccaacaccatcctgaagtcgcgcgatctcggctccataatttgcgatatcaagttctctgagctgacttacctcgatgccttttggcgggactacattaacggctccttattagaagccctgaagggagtcttcataacagatagcttgaaacaggctgtcggccacgaagctataaaacttctggtcaatgtagatgaagaagactacgaactgggtagacagaagctgctgagaaacctcatgcttcaggccctgccttag

SEQ ID NO: 32337 - DNA, 957 bp, Artificial Sequence
  derived and/or modified sequence
atggccggtctcaaacgccgagccagccaagtctggcccgaggagcacggggagcaagagcacgggctttactcacttcaccgtatgttcgatatcgttggaacccatttgacacatcgagatgtccgggtcctctcgtttctgttcgttgacgtcatagacgatcacgagcggggtctcattaggaatggaagggattttttgttggccttggaacgacaaggaaggtgcgatgaaagcaacttccggcaggtcctccagctccttcgcatcattactagacacgatctgctaccatacgtgactttgaagagaaggcgcgctgtatgcccagacttggtggacaaatatctggaagaaaccagcataagatatgttactcccagagctctgagtgaccccgagcctagaccccctcaacctagcaagacagtacctccccactaccccgtagtgtgctgcccaacttcgggtccgcagatgtgcagtaagaggcccgctaggggcagagccactctaggctcacaaaggaaaagaagaaagagtgtaactccggaccccaaagagaaacagacctgtgacatcaggttaagagtccgagccgagtactgccaacacgagacagctctgcagggaaatgtgttctccaacaaacaggatccacttgagcgacagtttgagaggtttaatcaggccaatactattctaaaatcccgggatctgggcagcatcatctgtgacattaagttttccgagctgacctacctggatgccttttggcgggactatatcaacggctccctgttggaagcactgaaaggcgtgtttattactgattctttgaagcaggctgtgggacacgaggccatcaaactgctcgtgaacgtcgatgaggaggattatgaactgggaagacagaagctgctgagaaacctgatgctccaggcgcttccctag

SEQ ID NO: 32338 - DNA, 957 bp, Artificial Sequence
  derived and/or modified sequence
atggctgggctcaaaaggagggcaagtcaggtctggcccgaagaacacggcgagcaggagcacggtctgtatagcctgcaccgaatgtttgatatcgttggcacccatcttactcaccgagacgttagagtgctcagttttctgtttgtggacgtaatcgacgaccatgagagagggctgattcgcaatggcagggacttccttttagcactggagcgccagggtcgttgtgatgagtccaattttcggcaagttcttcagttgctgcgcatcatcacaagacacgatctccttccctacgtgaccctgaaaaggagaagagccgtgtgccctgacctcgtcgataaatacttagaggaaaccagtattcgttacgttaccccgagggccctatcggaccccgagccacgcccacctcagccctcaaagaccgtgccgcctcattaccctgtggtttgttgtcccaccagtggcccacaaatgtgcagcaaacgtccagcaaggggaagagccacacttggttcacagcggaaacggagaaagtcggtaactccagaccctaaggagaagcagacttgcgacataagactgcgggttcgtgcagaatattgtcagcacgagactgctctgcagggcaatgtgttctctaacaagcaggatccattagagcgtcaatttgaaagattcaaccaggcaaataccattctgaagtcccgggacctgggttctatcatctgtgatattaaatttagcgagctgacataccttgacgctttttggcgggactacattaatgggtcactattggaagccttgaaaggggtttttattacagattcactcaagcaggccgtgggtcatgaggccatcaaacttctggtgaacgtcgacgaagaggattacgagctcgggaggcagaaactgttgcgcaacctgatgctgcaagccctcccatag

SEQ ID NO: 32339 - DNA, 828 bp, Artificial Sequence
  derived and/or modified sequence
atggctggtctgaagagaagggcttcccaggtgtggcccgaagaacacggagagcaagaacacggcctgtatagcttgcatcggatgtttgacatcgttggaacccatttgactcatcgcgatgtcctccagctccttaggattatcaccaggcacgatttgctgccatacgtgacactcaagcgccgacgggctgtttgccccgatttagtggacaagtacttggaggaaacttcgatacggtacgtaaccccacgcgctctgagcgatcccgagcctcgccctccccagccaagtaagaccgtgccgcctcactacccagtagtgtgttgccctaccagtggtccccaaatgtgctctaaaagaccagctagggggagggctaccctgggttcacaaaggaaaaggaggaagagcgtcaccccagacccaaaggagaagcaaacctgtgacattcggttgcgagtacgagctgaatattgccaacatgagacggcactgcagggcaatgtattcagcaacaaacaagatcctctggaaagacaatttgaaagatttaatcaggccaacaccattcttaagtcccgcgatcttggcagcatcatttgtgatatcaaattctcggaattgacgtatctggatgcattttggcgcgactacatcaatggaagtctgttggaggctttaaaaggggtgttcatcaccgactccttgaagcaagccgtgggtcacgaagccatcaaactgctggtcaacgtggatgaagaagactacgagcttggtcgccaaaaacttctgagaaacctgatgctccaggctctgccttag

SEQ ID NO: 32340 - DNA, 957 bp, Artificial Sequence
  derived and/or modified sequence
atggccggtctgaagcgaagagcgtcgcaggtctggcctgaggaacacggagaacaggagcacggtctctatagtctgcacaggatgtttgacatcgtagggactcacctaactcaccgagatgtccgggtcctctcgtttctgttcgtggatgtcattgatgaccatgagcgcggtctgattaggaacggtcgcgatttcttattagctcttgagaggcaagggaggtgcgatgagagcaatttccgccaggtactccagttactgcgtattataacccggcatgacctgctgccttacgtcacactgaagcggagacgcgctgtgtgcccagatctggtggacaaatacctcgaagagacctcaataagatatgttacgcctcgcgctctatccgatccggaaccacggcctccgcagccctcaaaaactgtcccccctcactaccctgttgtgtgctgcccaacctccggaccacagatgtgcagtaagcgcccagcaagaggaagggcaactctgggctcgcagcgcaagaggcgtaagtcagtaacacccgacccgaaagaaaaacagacttgtgacatcaggctccgagtgagggcagagtactgccagcatgagacagccctccagggcaatgtgttcagcaataagcaggacccactcgaacggcagttcgagcggttcaaccaggctaacaccattcttaagagccgcgacctcggcagcatcatctgcgacattaagttttccgagcttacttacttagacgccttttggcgggattatatcaacggctccctgttagaagctctgaagggtgttttcataacagactcactgaagcaggccgtcggacacgaagctatcaagctgctcgtcaacgtcgacgaggaagattatgaactgggtaggcaaaagttgttgagaaatctcatgctgcaggctctaccttag

SEQ ID NO: 32341 - DNA, 957 bp, Artificial Sequence
  derived and/or modified sequence
atggcaggtctcaaacggagagcctcccaagtttggcccgaggagcacggcgagcaggagcatggcctttactccctgcataggatgttcgatatcgttggaactcacctgacacacagggatgtgagagtgctgagctttctgtttgttgacgtgatcgatgaccatgaaaggggactgattcgcaacggcagagacttcctgctagccttagagaggcaaggtaggtgcgacgagagtaatttccgccaggttttgcagcttttacgcataattacaaggcacgatctgctgccctacgtcacactcaaacgcaggcgcgctgtgtgcccagatctggtggataagtacctcgaagaaacctctattcggtacgtgacgccccgagcgctcagtgaccctgagcctagaccccctcaacccagcaaaacagttcccccacattacccagtggtgtgctgtcctacaagcggcccacaaatgtgttcaaaacgccctgccagaggacgcgctacattggggtcccaacggaaacggaggaagagcgttacccctgatcctaaggagaaacagacctgcgatattcgtttgcgcgtgagagccgaatactgccagcatgagactgctctccagggaaatgtctttagcaataagcaggatcctctcgagaggcagttcgaacggttcaatcaggccaacacgatactgaagtctcgagacctcggtagcattatttgtgacataaagttctctgagctgacataccttgacgcattttggagggactacatcaatgggagcctgttggaggcattaaagggtgtatttattacagactctctgaagcaggctgtcggccatgaagccatcaagttgctcgtgaacgtcgatgaagaggattatgaacttgggaggcaaaaactgttaagaaacctgatgctgcaagccctcccctag

SEQ ID NO: 32342 - DNA, 957 bp, Artificial Sequence
  derived and/or modified sequence
atggccggcctgaagagaagagccagccaggtgtggcccgaggagcacggcgagcaggagcacggcctgtacagcctgcacagaatgttcgacatcgtgggcacccacctgacccacagagacgtgagagtgctgagcttcctgttcgtggacgtgatcgacgaccacgagagaggcctgatcagaaacggcagagacttcctgctggccctggagagacagggcagatgcgacgagagcaacttcagacaggtgctgcagctgctgagaatcatcaccagacacgacctgctgccctacgtgaccctgaagagaagaagagccgtgtgccccgacctggtggacaagtacctggaggagaccagcatcagatacgtgacccccagagccctgagcgaccccgagcccagacccccccagcccagcaagaccgtgcccccccactaccccgtggtgtgctgccccaccagcggcccccagatgtgcagcaagagacccgccagaggcagagccaccctgggcagccagagaaagagaagaaagagcgtgacccccgaccccaaggagaagcagacctgcgacatcagactgagagtgagagccgagtactgccagcacgagaccgccctgcagggcaacgtgttcagcaacaagcaggaccccctggagagacagttcgagagattcaaccaggccaacaccatcctgaagagcagagacctgggcagcatcatctgcgacatcaagttcagcgagctgacctacctggacgccttctggagagactacatcaacggcagcctgctggaggccctgaagggcgtgttcatcaccgacagcctgaagcaggccgtgggccacgaggccatcaagctgctggtgaacgtggacgaggaggactacgagctgggcagacagaagctgctgagaaacctgatgctgcaggccctgccctag

SEQ ID NO: 32343 - DNA, 828 bp, Artificial Sequence
  derived and/or modified sequence
atggccggcctgaagagaagagccagccaggtgtggcccgaggagcacggcgagcaggagcacggcctgtacagcctgcacagaatgttcgacatcgtgggcacccacctgacccacagagacgtgctgcagctgctgagaatcatcaccagacacgacctgctgccctacgtgaccctgaagagaagaagagccgtgtgccccgacctggtggacaagtacctggaggagaccagcatcagatacgtgacccccagagccctgagcgaccccgagcccagacccccccagcccagcaagaccgtgcccccccactaccccgtggtgtgctgccccaccagcggcccccagatgtgcagcaagagacccgccagaggcagagccaccctgggcagccagagaaagagaagaaagagcgtgacccccgaccccaaggagaagcagacctgcgacatcagactgagagtgagagccgagtactgccagcacgagaccgccctgcagggcaacgtgttcagcaacaagcaggaccccctggagagacagttcgagagattcaaccaggccaacaccatcctgaagagcagagacctgggcagcatcatctgcgacatcaagttcagcgagctgacctacctggacgccttctggagagactacatcaacggcagcctgctggaggccctgaagggcgtgttcatcaccgacagcctgaagcaggccgtgggccacgaggccatcaagctgctggtgaacgtggacgaggaggactacgagctgggcagacagaagctgctgagaaacctgatgctgcaggccctgccctag

SEQ ID NO: 32344 - DNA, 2345 bp, Artificial Sequence
  derived and/or modified sequence
cacggccgcggcggcggcggcggcggcggctgctggagcccggatgcggcgccgtgaggcaggcccgggagagcggcgcggatggatccaacatggcggcgccgagcctgagccgagagaagagacctgggaaattaagtttcttgcggagtacggtggggattgcagctgctgagcagggattctggaaagcattgcgtacctgagcccccagcatggcgggcctaaagcggcgggcaagccaggtgtggccagaagagcatggtgagcaggaacatgggctgtacagcctgcaccgcatgtttgacatcgtgggcactcatctgacacacagagatgtgcgcgtgctttctttcctctttgttgatgtcattgatgaccacgagcgtggactcatccgaaatggacgtgacttcttattggcactggagcgccagggccgctgtgatgaaagtaactttcgccaggtgctgcagctgctgcgcatcatcactcgccacgacctgctgccctacgtcaccctcaagaggagacgggctgtgtgccctgatcttgtagacaagtatctggaggagacatcaattcgctatgtgacccccagagccctcagtgatccagaaccaaggcctccccagccctctaaaacagtgcctccccactatcctgtggtgtgttgccccacttcgggtcctcagatgtgtagcaagcggccagcccgagggagagccacacttgggagccagcgaaaacgccggaagtcagtgacaccagatcccaaggagaagcagacatgtgacatcagactgcgggttcgggctgaatactgccagcatgagactgctctgcagggcaatgtcttctctaacaagcaggacccacttgagcgccagtttgagcgctttaaccaggccaacaccatcctcaagtcccgggacctgggctccatcatctgtgacatcaagttctctgagctcacctacctcgatgcattctggcgtgactacatcaatggctctttattagaggcacttaaaggtgtcttcatcacagactccctcaagcaagctgtgggccatgaagccatcaagctgctggtaaatgtagacgaggaggactatgagctgggccgacagaaactcctgaggaacttgatgctgcaagcattgccctgacctattccctcttctcactttggggactgttcccatcacccacctctggagcttacactgttctggggtttgttctctacccttccaaccaatcacacccctgcctttttttttttttttttaaagaaaaagacaaaagaaagtggaagtggtattccccacccctccctgcacccatgtgcctgggcttcccctttatttcccttttccatttaccccgtaatgtgtctctacagctaccttaccactgagccgtaagacaaatgtataggaagaagcaaagtctacagcacatagtctttgtaagggattgatgtgaacacttttttttggatgcactaaggagttatcaatacttctggctttatgagagctcttaaattttgtctaaaaaaccaaagggctgtgagtaagggagctatgtggaaagtgggactctgaagtgtattttgaaaattaatcgccaccctcttccaaattatagaattttttaaaaacaagctgtggccctttccactctctcctggcctctggtgctgctcctctctgccgcctttcctccattccatggcttgaaacctctgcctgatgtggctccttcctttttcccatttgtcaaaccctcttcaaaggaggaacagataagactgggtcagcctagtcatgcctcccaactgtggtggtatatgtgtacacacatacacagggtggatggagaagaggttgctgattaaaatacactccccctataaaggggaagggggagtgtgacactttctttccatgttcaagtgaaaataaataatgtaccctgcagcccttttcccctttgctttcttctggcttgggcaaagggcatcataggtgtaagtgaagtaattcctttttccttccccctcctccactcctacgcccactcccatgcttgggagaatggggctgggacatgcactgagtgttgcacttttatttaggtagggaggcatgttgaatgagccaggaggtctagaactggagcttagtccagctggtacaataccaactccccttctagttcccaaaggcgatgtccagacacagactttatgattattatatttttcaatgccagtgctgctcagccctcagcagaacttcagtttccatgaaataaacaatgactatataaaattc

SEQ ID NO: 32345 - DNA, 2300 bp, Artificial Sequence
  derived and/or modified sequence
aggaaagtggagggggaggcggtggcgacgtccagcctgagaacctcaagagagggaggtgacgggacgctgagaggaagagacctgggaaattaagtttcttgcggagtacggtggggattgcagctgctgagcagggattctggaaagcattgcgtacctgagcccccagcatggcgggcctaaagcggcgggcaagccaggtgtggccagaagagcatggtgagcaggaacatgggctgtacagcctgcaccgcatgtttgacatcgtgggcactcatctgacacacagagatgtgcgcgtgctttctttcctctttgttgatgtcattgatgaccacgagcgtggactcatccgaaatggacgtgacttcttattggcactggagcgccagggccgctgtgatgaaagtaactttcgccaggtgctgcagctgctgcgcatcatcactcgccacgacctgctgccctacgtcaccctcaagaggagacgggctgtgtgccctgatcttgtagacaagtatctggaggagacatcaattcgctatgtgacccccagagccctcagtgatccagaaccaaggcctccccagccctctaaaacagtgcctccccactatcctgtggtgtgttgccccacttcgggtcctcagatgtgtagcaagcggccagcccgagggagagccacacttgggagccagcgaaaacgccggaagtcagtgacaccagatcccaaggagaagcagacatgtgacatcagactgcgggttcgggctgaatactgccagcatgagactgctctgcagggcaatgtcttctctaacaagcaggacccacttgagcgccagtttgagcgctttaaccaggccaacaccatcctcaagtcccgggacctgggctccatcatctgtgacatcaagttctctgagctcacctacctcgatgcattctggcgtgactacatcaatggctctttattagaggcacttaaaggtgtcttcatcacagactccctcaagcaagctgtgggccatgaagccatcaagctgctggtaaatgtagacgaggaggactatgagctgggccgacagaaactcctgaggaacttgatgctgcaagcattgccctgacctattccctcttctcactttggggactgttcccatcacccacctctggagcttacactgttctggggtttgttctctacccttccaaccaatcacacccctgcctttttttttttttttttaaagaaaaagacaaaagaaagtggaagtggtattccccacccctccctgcacccatgtgcctgggcttcccctttatttcccttttccatttaccccgtaatgtgtctctacagctaccttaccactgagccgtaagacaaatgtataggaagaagcaaagtctacagcacatagtctttgtaagggattgatgtgaacacttttttttggatgcactaaggagttatcaatacttctggctttatgagagctcttaaattttgtctaaaaaaccaaagggctgtgagtaagggagctatgtggaaagtgggactctgaagtgtattttgaaaattaatcgccaccctcttccaaattatagaattttttaaaaacaagctgtggccctttccactctctcctggcctctggtgctgctcctctctgccgcctttcctccattccatggcttgaaacctctgcctgatgtggctccttcctttttcccatttgtcaaaccctcttcaaaggaggaacagataagactgggtcagcctagtcatgcctcccaactgtggtggtatatgtgtacacacatacacagggtggatggagaagaggttgctgattaaaatacactccccctataaaggggaagggggagtgtgacactttctttccatgttcaagtgaaaataaataatgtaccctgcagcccttttcccctttgctttcttctggcttgggcaaagggcatcataggtgtaagtgaagtaattcctttttccttccccctcctccactcctacgcccactcccatgcttgggagaatggggctgggacatgcactgagtgttgcacttttatttaggtagggaggcatgttgaatgagccaggaggtctagaactggagcttagtccagctggtacaataccaactccccttctagttcccaaaggcgatgtccagacacagactttatgattattatatttttcaatgccagtgctgctcagccctcagcagaacttcagtttccatgaaataaacaatgactatataaaa

SEQ ID NO: 32346 - DNA, 1042 bp, Artificial Sequence
  derived and/or modified sequence
atggatccaacatggcggcgccgagcctgagccgagagaagagacctgggaaattaagtttcttgcggagtacggtggggattgcagctgctgagcagggattctggaaagcattgcgtacctgagcccccagcatggcgggcctaaagcggcgggcaagccaggtgtggccagaagagcatggtgagcaggaacatgggctgtacagcctgcaccgcatgtttgacatcgtgggcactcatctgacacacagagatgtgctgcagctgctgcgcatcatcactcgccacgacctgctgccctacgtcaccctcaagaggagacgggctgtgtgccctgatcttgtagacaagtatctggaggagacatcaattcgctatgtgacccccagagccctcagtgatccagaaccaaggcctccccagccctctaaaacagtgcctccccactatcctgtggtgtgttgccccacttcgggtcctcagatgtgtagcaagcggccagcccgagggagagccacacttgggagccagcgaaaacgccggaagtcagtgacaccagatcccaaggagaagcagacatgtgacatcagactgcgggttcgggctgaatactgccagcatgagactgctctgcagggcaatgtcttctctaacaagcaggacccacttgagcgccagtttgagcgctttaaccaggccaacaccatcctcaagtcccgggacctgggctccatcatctgtgacatcaagttctctgagctcacctacctcgatgcattctggcgtgactacatcaatggctctttattagaggcacttaaaggtgtcttcatcacagactccctcaagcaagctgtgggccatgaagccatcaagctgctggtaaatgtagacgaggaggactatgagctgggccgacagaaactcctgaggaacttgatgctgcaagcattgccctgacctattccctcttctcactttggggactgttcccatcacccacctctggagcttacactgttctggggtttgttctctac

SEQ ID NO: 32347 - DNA, 1828 bp, Artificial Sequence
  derived and/or modified sequence
gcgatccgctcgtattgaagggggaagagacctgggaaattaagtttcttgcggagtacggtggggattgcagctgctgagcagggattctggaaagcattgcgtacctgagcccccagcatggcgggcctaaagcggcgggcaagccaggtgtggccagaagagcatggtgagcaggaacatgggctgtacagcctgcaccgcatgtttgacatcgtgggcactcatctgacacacagagatgtgcgcgtgctttctttcctctttgttgatgtcattgatgaccacgagcgtggactcatccgaaatggacgtgacttcttattggcactggagcgccagggccgctgtgatgaaagtaactttcgccaggtgctgcagctgctgcgcatcatcactcgccacgacctgctgccctacgtcaccctcaagaggagacgggctgtgtgccctgatcttgtagacaagtatctggaggagacatcaattcgctatgtgacccccagagccctcagtgatccagaaccaaggcctccccagccctctaaaacagtgcctccccactatcctgtggtgtgttgccccacttcgggtcctcagatgtgtagcaagcggccagcccgagggagagccacacttgggagccagcgaaaacgccggaagtcagtgacaccagatcccaaggagaagcagacatgtgacatcagactgcgggttcgggctgaatactgccagcatgagactgctctgcagggcaatgtcttctctaacaagcaggacccacttgagcgccagtttgagcgctttaaccaggccaacaccatcctcaagtcccgggacctgggctccatcatctgtgacatcaagttctctgagctcacctacctcgatgcattctggcgtgactacatcaatggctctttattagaggcacttaaaggtgtcttcatcacagactccctcaagcaagctgtgggccatgaagccatcaagctgctggtaaatgtagacgaggaggactatgagctgggccgacagaaactcctgaggaacttgatgctgcaagcattgccctgacctattccctcttctcactttggggactgttcccatcacccacctctggagcttacactgttctggggtttgttctctacccttccaaccaatcacacccctccctgcacccatgtgcctgggcttcccctttatttcccttttccatttaccccgtaatgtgtctctacagctaccttaccactgagccgtaagacaaatgtataggaagaagcaaagtctacagcacatagtctttgtaagggattgatgtgaacacttttttttggatgcactaaggagttatcaatacttctggctttatgagagctcttaaattttgtctaaaaaaccaaagggctgtgagtaagggagctatgtggaaagtgggactctgaagtgtattttgaaaattaatcgccaccctcttccaaattatagaattttttaaaaacaagctgtggccctttccactctctcctggcctctggtgctgctcctctctgccgcctttcctccattccatggcttgaaacctctgcctgatgtggctccttcctttttcccatttgtcaaaccctcttcaaaggaggaacagataagactgggtcagcctagtcatgcctcccaactgtggtggtatatgtgtacacacatacacagggtggatggagaagaggttgctgattaaaatacactccccctataaaggggaagggggagtgtgacactttctttccatgttcaagtgaaaataaataatgtaccctgc

SEQ ID NO: 32348 - DNA, 2329 bp, Artificial Sequence
  derived and/or modified sequence
cgcccgcctgtcccctcccccacggccgcggcggcggcggcggcggcggctgctggagcccggatgcggcgccgtgaggcaggcccgggagagcggcgcggatggatccaacatggcggcgccgagcctgagccgagatacggtggggattgcagctgctgagcagggattctggaaagcattgcgtacctgagcccccagcatggcgggcctaaagcggcgggcaagccaggtgtggccagaagagcatggtgagcaggaacatgggctgtacagcctgcaccgcatgtttgacatcgtgggcactcatctgacacacagagatgtgcgcgtgctttctttcctctttgttgatgtcattgatgaccacgagcgtggactcatccgaaatggacgtgacttcttattggcactggagcgccagggccgctgtgatgaaagtaactttcgccaggtgctgcagctgctgcgcatcatcactcgccacgacctgctgccctacgtcaccctcaagaggagacgggctgtgtgccctgatcttgtagacaagtatctggaggagacatcaattcgctatgtgacccccagagccctcagtgatccagaaccaaggcctccccagccctctaaaacagtgcctccccactatcctgtggtgtgttgccccacttcgggtcctcagatgtgtagcaagcggccagcccgagggagagccacacttgggagccagcgaaaacgccggaagtcagtgacaccagatcccaaggagaagcagacatgtgacatcagactgcgggttcgggctgaatactgccagcatgagactgctctgcagggcaatgtcttctctaacaagcaggacccacttgagcgccagtttgagcgctttaaccaggccaacaccatcctcaagtcccgggacctgggctccatcatctgtgacatcaagttctctgagctcacctacctcgatgcattctggcgtgactacatcaatggctctttattagaggcacttaaaggtgtcttcatcacagactccctcaagcaagctgtgggccatgaagccatcaagctgctggtaaatgtagacgaggaggactatgagctgggccgacagaaactcctgaggaacttgatgctgcaagcattgccctgacctattccctcttctcactttggggactgttcccatcacccacctctggagcttacactgttctggggtttgttctctacccttccaaccaatcacacccctgcctttttttttttttttttaaagaaaaagacaaaagaaagtggaagtggtattccccacccctccctgcacccatgtgcctgggcttcccctttatttcccttttccatttaccccgtaatgtgtctctacagctaccttaccactgagccgtaagacaaatgtataggaagaagcaaagtctacagcacatagtctttgtaagggattgatgtgaacacttttttttggatgcactaaggagttatcaatacttctggctttatgagagctcttaaattttgtctaaaaaaccaaagggctgtgagtaagggagctatgtggaaagtgggactctgaagtgtattttgaaaattaatcgccaccctcttccaaattatagaattttttaaaaacaagctgtggccctttccactctctcctggcctctggtgctgctcctctctgccgcctttcctccattccatggcttgaaacctctgcctgatgtggctccttcctttttcccatttgtcaaaccctcttcaaaggaggaacagataagactgggtcagcctagtcatgcctcccaactgtggtggtatatgtgtacacacatacacagggtggatggagaagaggttgctgattaaaatacactccccctataaaggggaagggggagtgtgacactttctttccatgttcaagtgaaaataaataatgtaccctgcagcccttttcccctttgctttcttctggcttgggcaaagggcatcataggtgtaagtgaagtaattcctttttccttccccctcctccactcctacgcccactcccatgcttgggagaatggggctgggacatgcactgagtgttgcacttttatttaggtagggaggcatgttgaatgagccaggaggtctagaactggagcttagtccagctggtacaataccaactccccttctagttcccaaaggcgatgtccagacacagactttatgattattatatttttcaatgccagtgctgctcagccctcagcagaacttcagtttccatgaaataaacaatgactatataaaa

SEQ ID NO: 32349 - protein, 506 aa, Artificial Sequence
  derived and/or modified sequence
MRDPLTDCPYNKVYKNLKEFSQNGENFCKQVTSVLQQRANLEISYAKGLQKLASKLSKALQNTRKSCVSSAWAWASEGMKSTADLHQKLGKAIELEAIKPTYQVLNVQEKKRKSLDNEVEKTANLVISNWNQQIKAKKKLMVSTKKHEALFQLVESSKQSMTEKEKRKLLNKLTKSTEKLEKEDENYYQKNMAGYSTRLKWENTLENCYQSILELEKERIQLLCNNLNQYSQHISLFGQTLTTCHTQIHCAISKIDIEKDIQAVMEETAILSTENKSEFLLTDYFEEDPNSAMDKERRKSLLKPKLLRLQRDIEKASKDKEGLERMLKTYSSTSSFSDAKSQKDTAALMDENNLKLDLLEANSYKLSSMLAELEQRPQPSHPCSNSIFRWREKEHTHSYVKISRPFLMKRLENIVSKASSGGQSNPGSSTPAPGAAQLSSRLCKALYSFQARQDDELNLEKGDIVIIHEKKEGGWWFGSLNGKKGHFPAAYVEELPSNAGNTATKA

SEQ ID NO: 32350 - DNA, 1521 bp, Artificial Sequence
  derived and/or modified sequence
atgcgtgacccgcttactgactgtccctataataaagtgtacaagaatctgaaagagttctctcagaatggtgaaaacttctgtaaacaggtgacaagcgtgctgcaacaacgcgccaacctggaaatctcatatgccaaaggtctgcagaaattagcttccaagttatccaaggcactgcagaacacacgtaagtcttgcgtgtccagtgcatgggcctgggccagtgagggtatgaagagcactgctgatttgcaccagaagctcgggaaggccatagaactcgaagctatcaagcctacataccaagtgctcaacgtgcaagaaaagaagcgaaaatctctggataacgaggtggagaaaaccgctaacctcgtcatctcaaattggaaccaacagattaaggctaagaagaaactcatggtcagcaccaaaaagcacgaagcgcttttccagctggtggaatccagcaagcagagcatgactgaaaaggaaaagaggaagctgctgaacaagctgacaaagtctaccgagaagctggagaaggaagacgagaattactatcagaagaacatggcaggctactccactagactgaagtgggagaacacccttgagaattgctatcagagtattctggagctggagaaagagaggatacagctgctttgcaataaccttaatcagtactctcaacacatatcattattcggacagactctgactacctgtcacacacaaattcactgcgcaatcagtaagatcgacattgagaaggatattcaggccgtgatggaggagacagccatcctttccaccgagaacaagagcgagttcctcctgacagattattttgaagaagaccccaactccgctatggacaaggagcggcggaagtcgctgctgaagccgaagttgcttcgtcttcagcgagatatcgaaaaggcaagtaaggataaagaggggctggaacggatgcttaaaacctattcctctacgagttctttctctgacgccaaatcacagaaggacaccgccgctttaatggacgaaaacaacctgaagttagacctcttagaagctaatagctacaagctgtcctccatgcttgctgagttggaacagaggccccagcccagccatccttgtagcaattcgatttttcgctggagggaaaaggagcacacacatagttatgttaaaataagtcgcccttttctgatgaagagactggagaacatcgtttcaaaagcatcctccggcgggcagtcaaaccctgggagctcaacaccagcacctggcgctgcacaactctcttccaggttgtgcaaggcactgtattcattccaggcccgccaggatgacgaattgaatctggaaaagggagatattgtaattattcatgagaaaaaggaaggagggtggtggttcggctcactgaatggtaagaaaggccacttcccggctgcgtatgtggaagaactcccatctaacgctggcaacacagcaaccaaggcatag

SEQ ID NO: 32351 - DNA, 1521 bp, Artificial Sequence
  derived and/or modified sequence
atgagggaccccctgacagactgcccctacaacaaggtgtacaagaacctgaaggagttcagccagaatggagagaacttctgcaagcaggtgacctctgtgctgcagcagagggccaacctggagatctcctatgccaagggcctgcagaagctggccagcaagctgagcaaggccctgcagaacaccaggaagagctgtgtgagcagcgcctgggcctgggccagcgagggcatgaagagcacagctgacctgcaccagaagctgggcaaggccatcgagctggaggccatcaagcccacctaccaggtgctgaatgtgcaggagaagaagaggaagagcctggacaatgaggtggagaagacagccaacctggtgatcagcaactggaaccagcagatcaaggccaagaagaagctgatggtgtccaccaagaagcatgaggccctcttccagctggtggagagcagcaagcagagcatgacagagaaggagaagaggaagctgctgaacaagctgaccaagagcacagagaagctggagaaggaggatgagaactactaccagaagaacatggccggctacagcacccggctgaagtgggagaacaccctggagaactgctaccagagcatcctggagctggagaaggagcgcatccagctgctgtgcaacaacctgaaccagtacagccagcacatcagcctgtttggccagaccctgaccacctgccacacccagatccactgtgccatcagcaagattgatattgagaaggacatccaggccgtgatggaggagacagccatcctgagcacagagaacaagtctgagttcctgctgacagactactttgaggaggaccccaacagcgccatggacaaggagaggaggaagagcctgctgaagcccaagctgctgcggctgcagagggacatcgagaaggccagcaaggacaaggagggcctggagaggatgctgaagacctacagcagcaccagcagcttcagtgatgccaagagccagaaggacacagctgccctgatggatgagaacaacctgaagctggacctgctggaggccaacagctacaagctgagctccatgctggccgagctggagcagaggccccagcccagccacccctgcagcaacagcatcttccgctggagggagaaggagcacacccacagctatgtgaagatcagccggcccttcctgatgaagaggctggagaacatcgtgtccaaggccagcagcggcggccagagcaaccctggcagcagcaccccagcccctggagctgcccagctgagcagccggctgtgcaaggccctgtacagcttccaggcccggcaggatgatgagctgaacctggagaagggggacatcgtcatcatccacgagaagaaggagggcggctggtggtttggcagcctgaatggcaagaagggccacttccctgctgcctacgtggaggagctgcccagcaatgccggcaacacagccaccaaggcctag

SEQ ID NO: 32352 - DNA, 1521 bp, Artificial Sequence
  derived and/or modified sequence
atgcgggaccccctgaccgactgcccctacaacaaggtgtacaagaatctgaaagagtttagccagaacggggagaatttttgtaagcaagtcacctcagttctgcaacagcgtgccaacctcgagatctcatacgccaaaggcctgcaaaaactcgccagtaaactcagcaaagcgctgcagaacactcgcaagagctgcgtaagcagtgcctgggcttgggcttcggaagggatgaagtcaacagccgatttgcatcaaaaactggggaaagctatcgaattggaggccatcaaaccaacctaccaggtgctcaatgtgcaggaaaagaagcggaagtctctagataacgaggtcgaaaagacagccaacctggtgatttccaactggaaccagcagattaaagctaagaagaaactaatggtgagcacaaaaaaacatgaagcactattccagctggtggagagctccaagcaatctatgactgagaaagaaaagaggaaactgctcaacaagctgactaagtctactgagaagctcgaaaaggaggacgagaactattatcagaagaacatggctggatacagtactaggctgaagtgggagaacactctggagaactgctatcagagtattctggagctggagaaagaacgcattcagttactctgcaacaacctcaaccagtattcacagcacatcagcttgttcgggcagactctgaccacctgtcatactcagattcactgcgcaatttctaagattgacatcgagaaagatatacaggccgttatggaagagacggccattctgagtactgaaaacaaatcagagttcctgttaaccgactatttcgaagaggaccccaatagcgccatggataaggagagacgaaaaagtttattaaagccgaagcttttgagactgcaaagagacattgagaaggcttcaaaggacaaggagggtctcgaacgtatgttaaagacttattcatcgaccagttccttttcggatgctaagtctcagaaagacaccgccgcacttatggacgaaaacaatctgaaactggatcttttagaggctaatagctacaagcttagctccatgttggccgaactggaacaaaggccacaacctagccatccgtgcagtaatagtattttccggtggagggagaaggagcacactcactcttacgttaaaatctcacggccatttctgatgaagcgtttagaaaatattgttagcaaagcaagttcgggaggtcagagtaacccaggcagtagtacaccagctcctggagccgcacagttgtccagcaggctttgtaaagctctttattcctttcaggcacgccaagatgatgaactgaatctggagaaaggagacatagtgatcatacacgaaaaaaaagaaggtggctggtggttcggctccctcaacgggaagaaagggcatttccccgccgcctacgtcgaagagttgccgtcaaatgctggcaataccgctactaaagcctag

SEQ ID NO: 32353 - DNA, 2294 bp, Artificial Sequence
  derived and/or modified sequence
attctcactatctcacactggccgtcttgacccagagcagttctttactttctcgggacacaaacgggatgaaagtccagggctgggacttcctccttggaatgtttgacaaggactgacgtactctaggccctttgaatcccggaagtccaggacacacccaaccttgattacagtgtccagaatgctggagcgtaggtgaaaggacaaaagccagacacatttcaacatgagggacccactgacagattgtccgtataataaagtatacaagaacctaaaggagttttctcaaaatggagagaatttctgcaaacaggtcacatctgttcttcagcaaagggcaaacctggaaattagctatgccaaaggacttcagaaactggcaagcaagctgagcaaagcattacagaacacgagaaaaagttgtgttagcagtgcctgggcctgggcctcagagggaatgaaatccacagcggacctgcatcaaaaacttggcaaagcaattgaattggaagcaataaaaccgacttatcaagtcctaaatgtacaagagaagaagagaaaatcacttgacaatgaagttgaaaagacagcaaatcttgtcattagcaactggaatcagcaaattaaggccaagaagaaattaatggttagtaccaagaaacatgaagcacttttccagcttgtagaaagctccaagcaatctatgactgagaaggagaagcggaagctcctcaataaactgacaaaatcaactgaaaagttggaaaaggaagatgaaaattactaccaaaaaaacatggcgggttattctaccagactgaaatgggaaaacacactagagaactgctaccagagcattctggagctggagaaggaaagaattcaacttttatgcaataacttaaaccagtacagccaacatatttctctttttggccaaaccctgaccacatgccacacgcagattcactgtgccatcagcaagattgacattgaaaaagatatccaggctgtaatggaagaaactgcaattttatctacagaaaacaaatctgagttcctgttaacggattactttgaagaagatcctaacagtgcaatggataaagagagacgaaagtctttactaaaaccaaaattattgagactgcagagagacattgaaaaagcctcaaaagacaaggaaggcctggaacgaatgcttaaaacgtactccagcacctcctccttctctgatgcaaagagccagaaagacacagcagcgttaatggatgagaacaatttgaaactagaccttttggaagcgaactcctacaaactgtcatcaatgttagcagaacttgagcaaagacctcaacccagccatccttgtagtaattccatcttcaggtggagggaaaaggagcatactcatagctatgtgaaaatatctcggccttttttaatgaagagattagagaatattgtgagcaaggcatcttctggtgggcagagcaatccaggttcttcaactccagcccctggtgcagcccagctcagcagcagactttgcaaggccttgtattcttttcaagccaggcaagatgatgagttgaatttggaaaagggtgacattgtgattatacacgagaaaaaagaaggaggatggtggtttggatctttgaatgggaaaaaaggccattttcctgccgcttatgtggaggagttaccttcaaatgctggcaacacagctacaaaggcataaaacaagactctgaacatactaccttcacactcggtaatcaacaatacagtgtggttcaaataagaataaagtgctcttacctttacatgtttttcttttgaaatggatggagttctacctgcatgtcacagcactttgcattcatgattattagcttgaaacagtcagaaaaaagatggatgggtggagacagacaaggaagaggctccttggttcctagaggagtttccaaattctaggagaccctagagatgatccagtataacccctggtgtcacagaaacagacggagtccaaggtgggttcagctgcttgcctgaagtcagagttatctggtagacaacagcagtgggacttagatgtctttttcctctggatttgggtggcaacagaacacagcaggcctatgagggggtcaagcagagcctgggagatgaggaacacagatcaattccaagaagagagacaggcaatcaagacaccaatgagatcaacccaaattaggggatggtaggatatctctgacaaacccacagccaatatc

SEQ ID NO: 32354 - DNA, 1446 bp, Artificial Sequence
  derived and/or modified sequence
cacatttcaacatgagggacccactgacagattgtccgggcaaacctggaaattagctatgccaaaggacttcagaaactggcaagcaagctgagcaaagcattacagaacacgagaaaaagttgtgttagcagtgcctgggcctgggcctcagagggaatgaaatccacagcggacctgcatcaaaaacttggcaaagcaattgaattggaagcaataaaaccgacttatcaagtcctaaatgtacaagagaagaagagaaaatcacttgacaatgaagttgaaaagacagcaaatcttgtcattagcaactggaatcagcaaattaaggccaagaagaaattaatggttagtaccaagaaacatgaagcacttttccagcttgtagaaagctccaagcaatctatgactgagaaggagaagcggaagctcctcaataaactgacaaaatcaactgaaaagttggaaaaggaagatgaaaattactaccaaaaaaacatggcgggttattctaccagactgaaatgggaaaacacactagagaactgctaccagagcattctggagctggagaaggaaagaattcaacttttatgcaataacttaaaccagtacagccaacatatttctctttttggccaaaccctgaccacatgccacacgcagattcactgtgccatcagcaagattgacattgaaaaagatatccaggctgtaatggaagaaactgcaattttatctacagaaaacaaatctgagttcctgttaacggattactttgaagaagatcctaacagtgcaatggataaagagagacgaaagtctttactaaaaccaaaattattgagactgcagagagacattgaaaaagcctcaaaagacaaggaaggcctggaacgaatgcttaaaacgtactccagcacctcctccttctctgatgcaaagagccagaaagacacagcagcgttaatggatgagaacaatttgaaactagaccttttggaagcgaactcctacaaactgtcatcaatgttagcagaacttgagcaaagacctcaacccagccatccttgtagtaattccatcttcaggtggagggaaaaggagcatactcatagctatgtgaaaatatctcggccttttttaatgaagagattagagaatattgtgagcaaggcatcttctggtgggcagagcaatccaggttcttcaactccagcccctggtgcagcccagctcagcagcagactttgcaaggccttgtattcttttcaagccaggcaagatgatgagttgaatttggaaaagggtgacattgtgattatacacgagaaaaaagaaggaggatggtggtttggatctttgaatgggaaaaaaggccattttcctgccgcttatgtggaggagttaccttcaaatgctggcaacacagctacaaaggcataa

SEQ ID NO: 32355 - DNA, 1521 bp, Artificial Sequence
  derived and/or modified sequence
atgcgagaccccctgacggactgtccgtacaacaaggtgtataaaaacttgaaggagttttcacagaatggcgagaatttttgtaaacaagtgactagtgtccttcaacagagggcaaaccttgagatctcttatgcaaaagggctacagaagcttgcaagtaaactctctaaggcattgcagaacacaaggaaatcgtgcgtctcttcagcttgggcctgggcatctgaaggcatgaagtccacagcggacctgcaccagaagctgggcaaagcaattgaactggaggcaattaagcccacatatcaggtgctgaatgtccaggagaagaagcgcaagtcactggataatgaagtggaaaagaccgcaaatctcgtgatttcaaactggaaccagcagatcaaagctaaaaaaaagcttatggtctctactaagaagcatgaggctctgtttcaactcgttgaaagctcaaagcaaagcatgacagagaaggagaagagaaaactgcttaataagctgactaaatctacagagaagctggagaaggaggatgagaattactaccagaagaacatggccggatattcaaccagactgaaatgggagaataccctagaaaactgttaccagagcattctggaacttgagaaggagcggatccagctgttatgtaataatctaaatcaatacagccagcacatcagcctgtttggacagaccctgactacctgccacacgcaaatacattgcgcaatatcaaagattgatatagagaaagatatccaagctgttatggaagagacagcaattctaagtactgaaaataagtccgaattccttcttaccgattattttgaggaagacccaaattctgctatggacaaagagaggcgcaagtccttgttaaagcctaaactccttcgtctgcagcgggacatcgagaaggcttcgaaggataaggaaggtctggaacggatgttgaaaacatactcttctaccagctctttttctgatgctaaatcacagaaggacaccgcagctttaatggacgagaacaaccttaagctcgatctgctggaagcaaattcctacaaactgtctagcatgctggctgagctcgaacagcgaccccagcccagccacccctgcagtaatagcatctttcgatggcgagaaaaagagcacactcactcatacgtgaaaattagccgaccttttctcatgaagcgtctggaaaacatcgtgtctaaagcatcctccggcggacagagcaacccaggaagcagtactcccgctcccggagccgctcagctgagctccaggctgtgtaaggccctgtactccttccaggcccgacaggatgatgaattgaatctagaaaagggggatattgtgattatccatgaaaagaaggagggcggatggtggtttggaagtctaaatggaaaaaaagggcactttcccgctgcctacgtggaagaactcccttccaacgcaggcaatacagccaccaaagcctag

SEQ ID NO: 32356 - DNA, 1521 bp, Artificial Sequence
  derived and/or modified sequence
atgagagaccccctgaccgactgcccctacaacaaggtgtacaagaacctgaaggagttcagccagaacggcgagaacttctgcaagcaggtgaccagcgtgctgcagcagagagccaacctggagatcagctacgccaagggcctgcagaagctggccagcaagctgagcaaggccctgcagaacaccagaaagagctgcgtgagcagcgcctgggcctgggccagcgagggcatgaagagcaccgccgacctgcaccagaagctgggcaaggccatcgagctggaggccatcaagcccacctaccaggtgctgaacgtgcaggagaagaagagaaagagcctggacaacgaggtggagaagaccgccaacctggtgatcagcaactggaaccagcagatcaaggccaagaagaagctgatggtgagcaccaagaagcacgaggccctgttccagctggtggagagcagcaagcagagcatgaccgagaaggagaagagaaagctgctgaacaagctgaccaagagcaccgagaagctggagaaggaggacgagaactactaccagaagaacatggccggctacagcaccagactgaagtgggagaacaccctggagaactgctaccagagcatcctggagctggagaaggagagaatccagctgctgtgcaacaacctgaaccagtacagccagcacatcagcctgttcggccagaccctgaccacctgccacacccagatccactgcgccatcagcaagatcgacatcgagaaggacatccaggccgtgatggaggagaccgccatcctgagcaccgagaacaagagcgagttcctgctgaccgactacttcgaggaggaccccaacagcgccatggacaaggagagaagaaagagcctgctgaagcccaagctgctgagactgcagagagacatcgagaaggccagcaaggacaaggagggcctggagagaatgctgaagacctacagcagcaccagcagcttcagcgacgccaagagccagaaggacaccgccgccctgatggacgagaacaacctgaagctggacctgctggaggccaacagctacaagctgagcagcatgctggccgagctggagcagagaccccagcccagccacccctgcagcaacagcatcttcagatggagagagaaggagcacacccacagctacgtgaagatcagcagacccttcctgatgaagagactggagaacatcgtgagcaaggccagcagcggcggccagagcaaccccggcagcagcacccccgcccccggcgccgcccagctgagcagcagactgtgcaaggccctgtacagcttccaggccagacaggacgacgagctgaacctggagaagggcgacatcgtgatcatccacgagaagaaggagggcggctggtggttcggcagcctgaacggcaagaagggccacttccccgccgcctacgtggaggagctgcccagcaacgccggcaacaccgccaccaaggcctag

SEQ ID NO: 32357 - protein, 1958 aa, Artificial Sequence
  derived and/or modified sequence
MADRTAPRCQLRLEWVYGYRGHQCRNNLYYTAGKEVVYFVAGVGVVYNTREHSQKFFLGHNDDIISLALHPDKTLVATGQVGKEPYICIWDSYNVQTVSLLKDVHTHGVACLAFDSDGQRLASVGLDAKNTVCIWDWRKGKLLASATGHSDRIFDISWDPYQPNRVVSCGVKHIKFWTLCGNALTAKRGIFGKTGDLQTILCLACAKEDITYSGALNGDIYVWKGLNLVRTIQGAHSAGIFSMYACEEGFATGGRDGCIRLWDTDFKPITKIDLRETEQGYKGLSIRSVCWKADRLLAGTQDSEIFEVIVRERDKPMLILQGHCEGELWALALHPKKPLAVTGSDDRSVRLWSLADHALIARCNMEEAVRSVAFSPDGSQLALGMKDGSFIVLRVRDMTEVVHIKDRKEVIHEMKFSPDGSYLAVGSNDGPVDVYAVAQRYKKIGECSKSLSFITHIDWSLDSKYLQTNDGAGERLFYRMPSGKPLTSKEEIKGIPWASWTCVKGPEVSGIWPKYTEVTDINSVDANYNSSVLVSGDDFGLVKLFKFPCLKRGAKFRKYVGHSAHVTNVRWSHDFQWVLSTGGADHSVFQWRFIPEGVSNGMLETAPQEGGADSYSEESDSDLSDVPELDSDIEQEAQINYDRQVYKEDLPQLKQQSKEKNHAVPFLKREKAPEDSLKLQFIHGYRGYDCRNNLFYTQAGEVVYHIAAVAVVYNRQQHSQRLYLGHDDDILSLTIHPVKDYVATGQVGRDAAIHVWDTQTLKCLSLLKGQHQRGVCALDFSADGKCLVSVGLDDFHSIVFWDWKKGEKIATTRGHKDKIFVVKCNPHHVDKLVTVGIKHIKFWQQAGGGFTSKRGTFGSVGKLETMMCVSYGRMEDLVFSGAATGDIFIWKDILLLKTVKAHDGPVFAMYALDKGFVTGGKDGIVELWDDMFERCLKTYAIKRSALSTSSKGLLLEDNPSIRAITLGHGHILVGTKNGEILEIDKSGPMTLLVQGHMEGEVWGLAAHPLLPICATVSDDKTLRIWELSAQHRMLAVRKLKKGGRCCAFSPDGKALAVGLNDGSFLVVNADTVEDMVSFHHRKEMISDIKFSKDTGKYLAVASHDNFVDIYNVLTSKRVGICKGASSYITHIDWDSRGKLLQVNSGAREQLFFEAPRGKRHIIRPSEIEKIEWDTWTCVLGPTCEGIWPAHSDITDVNAASLTKDCSLLATGDDFGFVKLFSYPVKGQHARFKKYVGHSAHVTNVRWLHNDSVLLTVGGADTALMIWTREFVGTQESKLVDSEESDTDVEEDGGYDSDVAREKAIDYTTKIYAVSIREMEGTKPHQQLKEVSVEERPPVSRAAPQPEKLQKNNITKKKKLVEELALDHVFGYRGFDCRNNLHYLNDGADIIFHTAAAGIVQNLSTGSQSFYLEHTDDILCLTVNQHPKYRNVVATSQIGTTPSIHIWDAMTKHTLSMLRCFHSKGVNYINFSATGKLLVSVGVDPEHTITVWRWQEGAKVASRGGHLERIFVVEFRPDSDTQFVSVGVKHMKFWTLAGSALLYKKGVIGSLGAAKMQTMLSVAFGANNLTFTGAINGDVYVWKDHFLIRLVAKAHTGPVFTMYTTLRDGLIVTGGKERPTKEGGAVKLWDQEMKRCRAFQLETGQLVECVRSVCRGKGKILVGTKDGEIIEVGEKNAASNILIDGHMEGEIWGLATHPSKDLFISASNDGTARIWDLADKKLLNKVSLGHAARCAAYSPDGEMVAIGMKNGEFVILLVNSLKVWGKKRDRKSAIQDIRISPDNRFLAVGSSEHTVDFYDLTQGTNLNRIGYCKDIPSFVIQMDFSADGKYIQVSTGAYKRQVHEVPLGKQVTEAVVIEKITWASWTSVLGDEVIGIWPRNADKADVNCACVTHAGLNIVTGDDFGLVKLFDFPCTEKFAKHKRYFGHSAHVTNIRFSYDDKYVVSTGGDDCSVFVWRCL

SEQ ID NO: 32358 - DNA, 5877 bp, Artificial Sequence
  derived and/or modified sequence
atggccgacagaaccgcccccagatgccagctgagactggagtgggtgtacggctacagaggccaccagtgcagaaacaacctgtactacaccgccggcaaggaggtggtgtacttcgtggccggcgtgggcgtggtgtacaacaccagagagcacagccagaagttcttcctgggccacaacgacgacatcatcagcctggccctgcaccccgacaagaccctggtggccaccggccaggtgggcaaggagccctacatctgcatctgggacagctacaacgtgcagaccgtgagcctgctgaaggacgtgcacacccacggcgtggcctgcctggccttcgacagcgacggccagagactggccagcgtgggcctggacgccaagaacaccgtgtgcatctgggactggagaaagggcaagctgctggccagcgccaccggccacagcgacagaatcttcgacatcagctgggacccctaccagcccaacagagtggtgagctgcggcgtgaagcacatcaagttctggaccctgtgcggcaacgccctgaccgccaagagaggcatcttcggcaagaccggcgacctgcagaccatcctgtgcctggcctgcgccaaggaggacatcacctacagcggcgccctgaacggcgacatctacgtgtggaagggcctgaacctggtgagaaccatccagggcgcccacagcgccggcatcttcagcatgtacgcctgcgaggagggcttcgccaccggcggcagagacggctgcatcagactgtgggacaccgacttcaagcccatcaccaagatcgacctgagagagaccgagcagggctacaagggcctgagcatcagaagcgtgtgctggaaggccgacagactgctggccggcacccaggacagcgagatcttcgaggtgatcgtgagagagagagacaagcccatgctgatcctgcagggccactgcgagggcgagctgtgggccctggccctgcaccccaagaagcccctggccgtgaccggcagcgacgacagaagcgtgagactgtggagcctggccgaccacgccctgatcgccagatgcaacatggaggaggccgtgagaagcgtggccttcagccccgacggcagccagctggccctgggcatgaaggacggcagcttcatcgtgctgagagtgagagacatgaccgaggtggtgcacatcaaggacagaaaggaggtgatccacgagatgaagttcagccccgacggcagctacctggccgtgggcagcaacgacggccccgtggacgtgtacgccgtggcccagagatacaagaagatcggcgagtgcagcaagagcctgagcttcatcacccacatcgactggagcctggacagcaagtacctgcagaccaacgacggcgccggcgagagactgttctacagaatgcccagcggcaagcccctgaccagcaaggaggagatcaagggcatcccctgggccagctggacctgcgtgaagggccccgaggtgagcggcatctggcccaagtacaccgaggtgaccgacatcaacagcgtggacgccaactacaacagcagcgtgctggtgagcggcgacgacttcggcctggtgaagctgttcaagttcccctgcctgaagagaggcgccaagttcagaaagtacgtgggccacagcgcccacgtgaccaacgtgagatggagccacgacttccagtgggtgctgagcaccggcggcgccgaccacagcgtgttccagtggagattcatccccgagggcgtgagcaacggcatgctggagaccgccccccaggagggcggcgccgacagctacagcgaggagagcgacagcgacctgagcgacgtgcccgagctggacagcgacatcgagcaggaggcccagatcaactacgacagacaggtgtacaaggaggacctgccccagctgaagcagcagagcaaggagaagaaccacgccgtgcccttcctgaagagagagaaggcccccgaggacagcctgaagctgcagttcatccacggctacagaggctacgactgcagaaacaacctgttctacacccaggccggcgaggtggtgtaccacatcgccgccgtggccgtggtgtacaacagacagcagcacagccagagactgtacctgggccacgacgacgacatcctgagcctgaccatccaccccgtgaaggactacgtggccaccggccaggtgggcagagacgccgccatccacgtgtgggacacccagaccctgaagtgcctgagcctgctgaagggccagcaccagagaggcgtgtgcgccctggacttcagcgccgacggcaagtgcctggtgagcgtgggcctggacgacttccacagcatcgtgttctgggactggaagaagggcgagaagatcgccaccaccagaggccacaaggacaagatcttcgtggtgaagtgcaacccccaccacgtggacaagctggtgaccgtgggcatcaagcacatcaagttctggcagcaggccggcggcggcttcaccagcaagagaggcaccttcggcagcgtgggcaagctggagaccatgatgtgcgtgagctacggcagaatggaggacctggtgttcagcggcgccgccaccggcgacatcttcatctggaaggacatcctgctgctgaagaccgtgaaggcccacgacggccccgtgttcgccatgtacgccctggacaagggcttcgtgaccggcggcaaggacggcatcgtggagctgtgggacgacatgttcgagagatgcctgaagacctacgccatcaagagaagcgccctgagcaccagcagcaagggcctgctgctggaggacaaccccagcatcagagccatcaccctgggccacggccacatcctggtgggcaccaagaacggcgagatcctggagatcgacaagagcggccccatgaccctgctggtgcagggccacatggagggcgaggtgtggggcctggccgcccaccccctgctgcccatctgcgccaccgtgagcgacgacaagaccctgagaatctgggagctgagcgcccagcacagaatgctggccgtgagaaagctgaagaagggcggcagatgctgcgccttcagccccgacggcaaggccctggccgtgggcctgaacgacggcagcttcctggtggtgaacgccgacaccgtggaggacatggtgagcttccaccacagaaaggagatgatcagcgacatcaagttcagcaaggacaccggcaagtacctggccgtggccagccacgacaacttcgtggacatctacaacgtgctgaccagcaagagagtgggcatctgcaagggcgccagcagctacatcacccacatcgactgggacagcagaggcaagctgctgcaggtgaacagcggcgccagagagcagctgttcttcgaggcccccagaggcaagagacacatcatcagacccagcgagatcgagaagatcgagtgggacacctggacctgcgtgctgggccccacctgcgagggcatctggcccgcccacagcgacatcaccgacgtgaacgccgccagcctgaccaaggactgcagcctgctggccaccggcgacgacttcggcttcgtgaagctgttcagctaccccgtgaagggccagcacgccagattcaagaagtacgtgggccacagcgcccacgtgaccaacgtgagatggctgcacaacgacagcgtgctgctgaccgtgggcggcgccgacaccgccctgatgatctggaccagagagttcgtgggcacccaggagagcaagctggtggacagcgaggagagcgacaccgacgtggaggaggacggcggctacgacagcgacgtggccagagagaaggccatcgactacaccaccaagatctacgccgtgagcatcagagagatggagggcaccaagccccaccagcagctgaaggaggtgagcgtggaggagagaccccccgtgagcagagccgccccccagcccgagaagctgcagaagaacaacatcaccaagaagaagaagctggtggaggagctggccctggaccacgtgttcggctacagaggcttcgactgcagaaacaacctgcactacctgaacgacggcgccgacatcatcttccacaccgccgccgccggcatcgtgcagaacctgagcaccggcagccagagcttctacctggagcacaccgacgacatcctgtgcctgaccgtgaaccagcaccccaagtacagaaacgtggtggccaccagccagatcggcaccacccccagcatccacatctgggacgccatgaccaagcacaccctgagcatgctgagatgcttccacagcaagggcgtgaactacatcaacttcagcgccaccggcaagctgctggtgagcgtgggcgtggaccccgagcacaccatcaccgtgtggagatggcaggagggcgccaaggtggccagcagaggcggccacctggagagaatcttcgtggtggagttcagacccgacagcgacacccagttcgtgagcgtgggcgtgaagcacatgaagttctggaccctggccggcagcgccctgctgtacaagaagggcgtgatcggcagcctgggcgccgccaagatgcagaccatgctgagcgtggccttcggcgccaacaacctgaccttcaccggcgccatcaacggcgacgtgtacgtgtggaaggaccacttcctgatcagactggtggccaaggcccacaccggccccgtgttcaccatgtacaccaccctgagagacggcctgatcgtgaccggcggcaaggagagacccaccaaggagggcggcgccgtgaagctgtgggaccaggagatgaagagatgcagagccttccagctggagaccggccagctggtggagtgcgtgagaagcgtgtgcagaggcaagggcaagatcctggtgggcaccaaggacggcgagatcatcgaggtgggcgagaagaacgccgccagcaacatcctgatcgacggccacatggagggcgagatctggggcctggccacccaccccagcaaggacctgttcatcagcgccagcaacgacggcaccgccagaatctgggacctggccgacaagaagctgctgaacaaggtgagcctgggccacgccgccagatgcgccgcctacagccccgacggcgagatggtggccatcggcatgaagaacggcgagttcgtgatcctgctggtgaacagcctgaaggtgtggggcaagaagagagacagaaagagcgccatccaggacatcagaatcagccccgacaacagattcctggccgtgggcagcagcgagcacaccgtggacttctacgacctgacccagggcaccaacctgaacagaatcggctactgcaaggacatccccagcttcgtgatccagatggacttcagcgccgacggcaagtacatccaggtgagcaccggcgcctacaagagacaggtgcacgaggtgcccctgggcaagcaggtgaccgaggccgtggtgatcgagaagatcacctgggccagctggaccagcgtgctgggcgacgaggtgatcggcatctggcccagaaacgccgacaaggccgacgtgaactgcgcctgcgtgacccacgccggcctgaacatcgtgaccggcgacgacttcggcctggtgaagctgttcgacttcccctgcaccgagaagttcgccaagcacaagagatacttcggccacagcgcccacgtgaccaacatcagattcagctacgacgacaagtacgtggtgagcaccggcggcgacgactgcagcgtgttcgtgtggagatgcctgtag

SEQ ID NO: 32359 - DNA, 8320 bp, Artificial Sequence
  derived and/or modified sequence
gatatagactgtcaatttcggatccaaagacggcgatggcagagctcacccgggttgcctgtcaaatcaaggctatcgcagaataaatcccgccgcctgccgcgaagccccggcgcaccgcaaacttcagtgagcgaactgggtgatcgctgttgggatatgcagattcctgatgtaaaaggcggggtggcccccccgagagcctctcccgggggccggagcccgcaggtgcagtgaggcgcgcgcgccggtgccggcgcccccagagccgccttgcccgggtagagggagcccggcgcccggcggggtctggcggccgcacaccggcggcggcggcttgtctgcggcggctgcagcggatgatggtggcggccggcccgctgggctgtgcctgtgtgtcgccgcggaaatcagcgccctgcgccgcgcgctgagcccctgcaggtccgccgcagccccagcctcggcgaggacggccccggcgcgcgggggggcggggggcgcgcggggtcggcttatcatggcggatcggacggcgccccgctgccagctccggctggagtgggtgtacgggtaccggggtcaccagtgccgcaacaacctgtactacacggcaggcaaggaggtggtctactttgtggctggggtcggggtggtttacaacacccgcgagcacagccaaaaattcttcctgggacacaacgacgacattatcagccttgccttacacccagacaaaactctcgttgcaactggccaagtcgggaaggagccatatatatgcatatgggattcctataatgtccagactgtgtctcttcttaaagatgtccatacacatggagttgcctgcctggcttttgactcagatggacagcgtttagcctctgtggggttggatgccaaaaacacagtctgcatttgggactggaggaagggaaaacttctggcgtcagccaccggccattctgacaggatttttgatatttcctgggatccatatcagccaaacagagtggttagctgtggagtaaaacacataaagttttggacactgtgtggaaatgccctgactgcaaaaagagggatatttggcaaaacaggggatcttcagaccatcctttgccttgcatgtgccaaagaagacatcacctactctggtgctttaaatggtgacatctatgtctggaaagggctcaatttagtccgcaccattcaaggagcacatagtgctggaatctttagcatgtatgcttgtgaagaaggctttgccactggtgggcgagatgggtgtatacgactgtgggacactgatttcaaaccaataaccaaaattgatctcagggagacagaacaaggatacaaaggcctctctatccggagcgtgtgctggaaagcagaccgccttctagcagggacccaggacagtgagatatttgaagtgattgtgcgagagcgagacaagccgatgttgatcctacagggccactgcgagggtgagctctgggctctggccctgcaccccaagaagcctctggctgtgacaggcagcgatgaccgctctgtcaggctgtggagcctggctgatcatgccttgatcgcccgctgtaacatggaagaggcggttcgcagtgtagctttcagccccgacggatctcagctggccctgggcatgaaggacggctctttcattgttctccgagtcagagatatgacagaagtagttcacatcaaagatcgaaaagaagtcattcatgaaatgaaattttctccagatggttcttaccttgcagtgggatccaatgatggcccagtagatgtctatgctgttgcccagaggtataagaaaattggagaatgcagcaagtcccttagtttcatcacgcatattgactggtccttggatagtaaatacttacaaactaatgacggtgcaggagaacgattgttctacagaatgccatctgggaagcctttaacaagtaaagaagaaattaaagggattccttgggcctcctggacatgcgtgaaaggccctgaagtgagtggaatttggcccaaatacactgaggttactgacatcaactcagtggatgcgaattacaacagctcagtgctggtgtctggagatgattttggactggttaaattgtttaaatttccttgtctcaagagaggagccaaatttagaaagtatgtgggccattctgcacatgtcacaaatgtccgctggtcccatgactttcagtgggtgttgagcacaggaggggctgatcactcagttttccagtggaggtttattccagaaggtgtcagcaacggcatgctggaaactgcaccccaagaaggtggagctgattcctacagtgaagaatctgattcagatttatctgatgtgcccgaactggactctgatattgagcaagaagctcaaatcaattatgatcgccaggtttacaaagaagatctacctcagctaaagcaacaaagtaaagagaaaaaccacgcagtgcccttcctcaaacgagaaaaggctcctgaggacagcttgaaactccagttcatacacggttatagaggctacgactgtagaaacaatctgttctacacacaagctggagaagtagtctaccacattgctgcagttgctgtcgtgtataatcggcagcagcactcccagaggctgtacctggggcacgatgacgacattctcagcctgaccatccatccagtgaaggactatgtggctactgggcaggttggaagagatgctgctattcatgtgtgggacacacaaactctaaaatgtttgtcgctgttgaaaggacaacatcagagaggagtgtgtgcacttgatttttcagccgatggaaaatgtctggtgtcggttggtttagacgattttcacagtattgtattttgggactggaaaaagggagaaaagatagccacaacaagaggacataaagataagatatttgtggtaaagtgtaacccacaccatgttgacaaactggttacagttgggataaaacacatcaaattctggcaacaagcaggtgggggcttcacttctaaaagaggaacttttggaagcgttggaaaattggaaacaatgatgtgtgtttcttacggacgaatggaagatctagtgttctcaggagcagctactggagatatttttatttggaaagacattctactactgaagacagtgaaagctcatgatgggcctgtgtttgctatgtatgcactggataagggctttgtaacaggtggaaaggacggcatcgtggagctctgggatgatatgtttgaaagatgtttgaagacttatgccattaaaagatcagcattgtcgactagctcaaaaggcttgcttttggaagataacccttcaattcgtgccatcactttgggacatggacatatcctggtgggaacaaaaaatggagagattctggaaattgataagagtggcccaatgacactgcttgttcaggggcacatggaaggagaagtgtgggggttggcagctcaccctctcctgcccatctgtgcaacagtgagcgatgataaaacacttcgcatctgggaactatctgcccagcaccgtatgctggcagtacggaaactcaaaaaaggtggaagatgctgtgccttttcccctgatgggaaagccttagcggttggcttgaacgatgggagtttcctggtggtaaatgctgacactgttgaagacatggtctctttccatcacagaaaagaaatgatctctgatattaagttttcaaaagatacgggaaaataccttgccgtggcatcccatgataactttgtggatatttacaacgtacttacaagcaaaagggttggcatctgtaaaggtgcttctagttatattacacacattgactgggactctagaggaaaattattgcaagtgaattcaggtgccagagaacaacttttttttgaagctccaagaggcaaacggcatataataagaccttcagagatcgagaagatagagtgggacacatggacctgtgtcctggggcccacctgtgagggaatctggccagcacatagcgatataactgacgtaaatgctgccagtcttaccaaagactgttcccttttagccaccggagatgattttggtttcgttaagcttttttcatatcctgtcaagggacagcacgcaagattcaagaagtatgtggggcacagtgcacatgtcactaacgtgaggtggctgcacaatgactctgtgctgctcacggtgggcggcgccgacacagccctgatgatctggaccagggagtttgtggggacccaggagagcaagctggtggacagcgaggagtcagacaccgacgtggaagaggatggaggctatgacagcgatgttgctagagaaaaggccattgactacaccaccaagatttatgctgtgagcatcagggaaatggaaggcaccaagccacaccagcagctgaaggaagtttccgtggaagaaagaccacccgttagccgagcagctccccagcctgagaaactgcagaagaacaatatcaccaaaaaaaagaaactggttgaggagctggctctagaccacgtgtttggctacagaggtttcgactgtcgaaataacctgcattaccttaatgatggcgctgacatcatcttccacacagcagcggctggcatcgttcagaacctctccacagggagccagagcttctatctggagcacacagatgacatcctctgtctcacagtgaaccagcaccccaagtacagaaacgtggtggccaccagccagatagggacaacaccttccatccacatatgggacgccatgaccaaacacaccctctccatgctgcggtgcttccactccaagggggtgaattacatcaacttcagtgcaactggaaagctcctggtgtcggtgggagtggaccctgagcacaccatcactgtctggcgatggcaggaaggtgccaaggttgccagccgagggggtcacctggagcgcatatttgtggtggaatttcgccccgactcagacacgcagtttgtatctgtcggggtcaaacatatgaagttctggaccctggcaggcagcgccttgctttacaagaaaggggtcatcgggtccctgggagctgccaaaatgcagacgatgctctccgtggccttcggtgctaacaatctcactttcacgggtgccatcaatggagatgtctacgtctggaaggaccacttcctcatccggctggtggccaaggctcacacaggccccgtgttcacaatgtacacaacccttcgggatggactcatagtgaccggcggaaaagagaggccgaccaaagaaggaggtgctgtaaaattgtgggaccaggagatgaagcgctgccgggcctttcagctggagaccgggcagctggtggagtgtgtgcgctccgtgtgccgtggaaaaggaaaaatcttagtgggaaccaaagacggagaaataattgaagttggtgaaaaaaatgctgcttctaacatcctgattgatggtcacatggaaggggagatctggggcctggccactcacccttccaaggacctcttcatctctgccagcaacgatggcacagcccggatctgggacctggctgacaagaagctgttaaacaaggtgagcttgggccatgcggccaggtgtgcagcctacagccctgatggggagatggtggccattggcatgaagaatggagagtttgtcatcttgttggtgaacagcctgaaagtttgggggaaaaaacgagaccggaaatctgctatccaagatatcagaatcagcccagacaaccgattcttagccgttggttcttctgaacacacagttgacttctatgacctcactcagggcacaaatctgaaccgcattggctactgcaaagatatcccaagctttgtcattcagatggatttttctgcggatggcaaatacattcaggtgtcaacaggtgcctataagcgccaggtgcatgaggtccccctggggaagcaggtaactgaagccgtggtcattgagaagatcacctgggcctcctggacaagcgtcctgggagatgaagtcattggaatctggccacgaaatgcagacaaggctgatgtcaactgcgcatgtgtgacccacgctggcctgaacattgtcacaggagatgactttgggctggtgaagctctttgattttccatgcacagaaaaatttgccaaacataagcgatacttcggtcactcggctcacgtgacgaacatccgtttctcttatgatgacaagtatgtggtcagcactggaggagacgactgcagtgtatttgtgtggcgatgtctgtaaaatgccagaagcctcttatgttattgctgctgctgctaccagccagcaactgcagaggccatgctgaggtgcctccttgccaccagccgttgggaaatgcctaccatgctgccccggatgcacaagctcaaaacgctgcagaagttacacaactgctcccataatctggactctccaaaaccgtgatgccacgaaggaaggtcaagttttaaaatgttaaagactgcttgcctctgttcctgagactaaacagtatacatactaactacattgacaaagaaatcctatctgataatgtagcccgctgacgaattttgaagcctcggttaccctaaccaatatgtagcttttaatttgcatcaaaacttttacaaagatgttttgctattgtttctatatacttcaagaatgttcatttttacaaataagttgaacaagacagcctaagttagatgcaccgaagtactagaaatatcgctagcctctgttctccagtttagctttcaaaaccaaatgagccatgtataaaggagttgagaaacttaatttttaaatgtttcatttgcagagttttatatccattaagtgcctttgaaagtttccagttgtgtgggctgctgtctcacctcccaccaatttctcctttctccatatggtgctaaaacctcaaagctgaggagggctgcaggacccttagcagattcagtgtgtcacccttgtcctgtgttcacgccaaggcttcctaaatgaaagacatcggttacctgcttatgggaaggtgagcagcaaaggaattgaagttcgggacagggtagaattatgggttttcattgtgtttcatgccaaacccacaaaatccaaaatagaattcaagttaaacaaacttctactacaaaatggaaggggaaaaaggctcaggaaggtctatgagaatgagctgacttatctcgttaaatcttaagataaatgagggtaacccaaggctgcaccttggtgtaccaccctgagtggagttgaggtgacttcatttgattgcttcaggcgaactatataggtcaagtccagattataaaaaaattatctgcagaacaaattgtaaacccaaggaatagctggtaaatcaaaattataaagtgagttagagttccttggagttggttgtatgacggaatatgacttggacaatctttaccagaagccatccgtaagcccctcagtcacactttccatgtagctgaccagtgactacaggatgtggctgacagtgctcactgaaaggagagttggtgcgggactggtggttctgagcacatagacgcctattagtccttctggtcagtgaacgaaaattctagacctacagttactggctacttgcatttgtcagtttagagaaaaggtaaaatgaggcattttcaattgtagaatagactaacatttaccacagaagtgcttcagcattctaaatggattagatcactcattaagctatttttatatgccaatttactaatgccttacatcaatccactaataggttgttgggcccgcagtagagtccctatgcagtcccaattctgttttctgtaaccatgtgactggtgatgcagagtgataaccatgtctgcctatcttgtactagactcttcatgctgatcggatcttgcattgaaataaccatgtggaagaacaatgaatcgattaatgatgacatgtacaaccatatttaaagagcaatagtgtccgtgtgtcatgaaaaacttatttgtaaacgtttatatggtatgattttgattttatgtatgttcataaatcctgcactgtatgatatatgtgagttaaaacattggtgcatgaatttattttcaaagtataaaacacatcacttaaacattttatgtgtcaaataaaatttgattatgt

SEQ ID NO: 32360 - DNA, 5877 bp, Artificial Sequence
  derived and/or modified sequence
atggctgaccggactgcgccccgttgccagctgagattggaatgggtgtatggatacagagggcaccaatgcaggaataatctttactacacagccgggaaagaggtagtgtacttcgttgccggggtgggtgtggtttacaatacaagagagcatagtcaaaaattctttctgggccataacgacgacattatcagcctggccctacaccccgacaagaccctggtggctacagggcaagtgggtaaggagccatacatctgcatttgggattcctacaacgttcagacagtttctctgctcaaagacgtccatacacacggggtggcttgcctggcctttgactccgacggccagcgcctggcctctgtgggtctggacgccaagaacaccgtctgtatatgggactggagaaaaggaaagttgctggcaagtgccacagggcacagcgatcgaattttcgatatttcatgggacccttaccagcccaatagggttgtgagctgtggtgtaaagcatatcaaattctggacactctgtggcaacgcattgactgctaaaagaggtatcttcgggaaaaccggtgatcttcagaccatcctgtgtttggcctgtgccaaagaggacatcacctactcaggcgcgctgaacggagatatttatgtgtggaaggggctgaaccttgtgaggacaatccagggtgcccactctgctggcatcttttccatgtacgcatgtgaggagggattcgctactggagggcgtgacggctgcatcagactgtgggataccgattttaagccaattacaaagatcgacctgcgtgagacagagcagggctacaagggcctgtccatccgttccgtgtgctggaaggcagacaggttgctagctggcacgcaggattcagaaattttcgaagtgatcgtccgagagcgggataaaccaatgctgatactacaggggcattgcgaaggggagctgtgggccctggcgttacaccctaagaagccacttgccgtgacaggcagcgatgacagatccgtacgactatggagcctggcagatcacgcactgatagcgaggtgcaacatggaggaggctgtgagatcagtcgccttttcccctgatggctctcagctcgctctcggcatgaaagacggaagttttatcgttttgcgagtgagggacatgactgaggtcgtccacatcaaggacaggaaggaggtcatccacgagatgaaattttcccccgatgggagttacctggctgttggcagcaatgatggacccgtcgacgtctatgcagtcgcccaaaggtataaaaagatcggtgaatgttcgaagtccttgagtttcattactcacatagattggtctctcgactctaaatatcttcagactaacgacggcgcaggagagagactgttttatcggatgccttccggaaagcctctgacctccaaggaggagatcaaaggaataccctgggctagttggacctgcgtaaaggggccagaggtgtcagggatctggccgaaatataccgaagtgacggatatcaactccgtggatgctaattacaactcaagcgtcctggtgtctggggatgacttcggtctggttaaactttttaagttcccttgcctgaaacgcggggctaagttcaggaaatacgtcggacatagcgctcatgtgactaacgtcaggtggtctcacgactttcaatgggtgctatcaacgggtggcgcagaccattccgttttccaatggaggttcatccccgagggcgtcagtaacgggatgttagaaactgcccctcaggagggcggggcagattcctactccgaagagtcagactccgatctgtcagacgtacccgagttggacagcgatatcgagcaggaggcccaaataaactacgacaggcaggtctataaggaggatctcccacaactgaagcagcagagcaaagagaagaatcacgctgtgcctttcctgaaaagggagaaggcccctgaagattcacttaagctgcaatttatccatggataccgcgggtacgattgccgtaacaacctcttctatacgcaggctggagaagtggtttatcacattgctgccgtggctgtcgtttacaaccgccagcagcacagtcagcgcttatacttaggccacgacgatgacatcctgtccctcaccattcaccccgtaaaagactacgtagcgaccggtcaagttggaagggacgccgccattcatgtttgggatacccagaccctgaagtgtctaagcctcctgaaggggcagcatcagcggggcgtgtgtgctctggacttctcagccgacggcaaatgcctcgtctcagtgggcctggatgacttccattcaattgtgttctgggactggaaaaaaggtgagaagatagctactactaggggtcataaagataagattttcgtggttaagtgcaatccccaccacgtagacaaacttgtgacggtaggaattaagcatatcaagttctggcagcaggccggaggcggttttacaagtaagagggggacattcgggtccgtgggcaagctggaaactatgatgtgtgtttcctatgggcgaatggaggatttggtgttcagtggcgcggctaccggggatatattcatctggaaggatattctccttctgaaaacagtgaaggcacacgatggtccagtctttgcaatgtatgcccttgataagggatttgtaaccggaggcaaggatggcatcgtggagctgtgggacgatatgttcgagcgctgcctcaaaacttacgctataaagcggtccgcactatctaccagtagtaagggcctccttttggaggacaacccatcgattagagctatcacattgggtcacggccatatcttagttgggaccaaaaacggagaaatcctagagatcgacaaatcagggccaatgacgcttttggtccaagggcacatggaaggagaagtttgggggcttgccgcacacccgttgttgcctatctgtgcaacagtaagtgatgacaaaaccctgagaatctgggagctcagcgcccagcaccggatgctggccgtgagaaaacttaaaaagggcggtcggtgttgcgctttttcaccggacgggaaggctcttgctgtggggcttaatgatggctccttcctggttgtaaacgcagatacagtggaggacatggtgtcatttcatcaccggaaggagatgatatcagatatcaagttctctaaggatactggcaagtacctggctgtggcctcacatgataactttgttgatatctacaacgtgctgacaagcaagcgggtgggcatttgtaaaggcgcctcatcctacatcacccatatagattgggacagcagaggcaagctgctccaggtcaattccggggctcgcgaacagctcttcttcgaagcccctagagggaagcgacacattatcaggccatctgagatcgagaagatagagtgggacacatggacatgcgtgctagggcctacctgtgagggaatctggccagcccatagcgatatcacagatgtcaatgcggccagcctcacgaaagactgcagtctcttagccacgggggacgacttcggcttcgtgaagttgttttcttatcccgtgaaaggtcaacatgccagattcaagaagtatgtgggccactcagcccatgttactaacgtccgttggctgcacaatgactccgtacttttgaccgtgggtggagcagacaccgctctcatgatatggactcgggagttcgtaggaacgcaggagtctaaattggtggattcagaggagtcagatactgacgtcgaggaagatggcggctatgattctgatgtggcccgtgaaaaggccattgattacaccaccaagatttacgctgtgtcaattagggaaatggagggcaccaagcctcatcagcaactcaaagaggtatccgtcgaagagaggccacctgtctcacgggcagccccgcagccagaaaagctgcagaagaataatattacaaaaaagaaaaaactggtcgaggaactggccctggaccacgtttttgggtaccgcgggttcgattgccgcaataacctgcattacctcaacgacggtgccgatatcatttttcataccgctgcggcaggaatcgtgcagaatctaagcactgggagccagtctttctatcttgaacatacagacgacattctgtgtctcaccgtgaaccaacatcctaagtaccgtaatgtagttgcaacttcccagattggcactacccccagcattcatatttgggatgcgatgactaagcacacgctgagcatgctgcgttgcttccattccaaaggcgtgaactatattaatttcagcgctacgggcaagttgctcgtttctgtgggcgtggacccagaacacactataacagtttggcggtggcaggagggcgcaaaagtcgcttcaagaggggggcacctggagaggatcttcgtggttgaattccggccagactcagatacacagtttgtctctgtcggcgtaaagcatatgaagttctggacactggccggctctgccttgttgtataaaaagggggtcattgggtcactcggcgcggcgaaaatgcagacaatgctgtctgtcgcctttggagccaacaacctgacattcacaggagctattaacggcgacgtgtatgtttggaaggatcacttcctaatccgtttagtcgcgaaagcccacactggccctgtgtttaccatgtataccacactcagagatggcctaattgtgactggcggcaaagagcgccctaccaaggaaggtggtgcagttaagctatgggatcaggaaatgaaaaggtgccgggcattccaacttgaaaccgggcaactggttgaatgcgtgcgttctgtgtgtcgaggcaagggcaagatcctagtcggcaccaaggacggagaaattatagaagtcggcgagaagaatgctgcgagcaacattctgattgacgggcatatggagggggaaatctgggggctagccacgcaccctagcaaggacctcttcattagcgcttctaacgacggaacagctcggatctgggacctcgccgacaaaaaactcctgaataaggtgtcacttggccacgcagctaggtgcgctgcctatagccccgacggggaaatggtcgctatagggatgaagaacggtgagtttgtgatccttctagtcaattccctaaaggtttggggtaagaagcgcgacagaaagtctgccatccaggatattagaatctctcccgacaaccgctttctagcggtaggaagctctgaacacacagtcgacttttacgatctcacacaggggactaacctgaacagaatcggatactgcaaggacatacctagctttgtgatacagatggatttcagcgccgatgggaagtacattcaagtatccacaggtgcctataagagacaggtgcatgaggttcctctgggcaagcaagttaccgaagccgttgtcatcgagaaaatcacctgggctagttggacctcagtccttggtgatgaagtgatcggcatttggcctcgaaacgccgataaagcagacgtgaactgcgcttgtgtcacgcatgctgggttaaacatagtgacgggggatgatttcggactcgtgaagctgttcgactttccatgtaccgagaagttcgccaagcataaacgttattttgggcacagtgcccatgtcacaaatatccgcttttcgtatgatgacaagtacgtggtttccaccgggggagatgactgcagtgtgtttgtgtggaggtgcctgtag

SEQ ID NO: 32361 - DNA, 5877 bp, Artificial Sequence
  derived and/or modified sequence
atggctgacagaacagccccccgctgccagctgcggctggagtgggtgtatggctaccggggccaccagtgcaggaacaacctgtactacacagctgggaaggaggtggtgtactttgtggccggcgtgggcgtggtgtacaacacccgggagcacagccagaagttcttcctgggccacaatgatgacatcatcagcctggccctgcacccagacaagaccctggtggccaccggccaggtgggcaaggagccctacatctgcatctgggacagctacaacgtgcagacagtgtccctgctgaaggatgtgcacacccatggagtggcctgcctggcctttgacagtgatggccagaggctggcctctgtgggcctggatgccaagaacacagtgtgcatctgggactggaggaagggcaagctgctggccagcgccaccggccacagcgaccgcatctttgacatctcctgggacccctaccagcccaacagagtggtgtcctgtggggtgaagcacatcaagttctggaccctgtgtggaaatgccctgacagccaagaggggcatctttgggaagacaggagacctgcagaccatcctgtgcctggcctgtgccaaggaggacatcacctacagcggggccctgaatggagacatctacgtgtggaagggcctgaacctggtgaggaccatccagggcgcccacagcgctggcatcttctccatgtatgcctgtgaggagggctttgccaccggcggcagagatggctgcatccggctgtgggacacagacttcaagcccatcaccaagattgacctgcgggagacagagcagggctacaagggcctgagcatccgctctgtgtgctggaaggctgaccggctgctggccggcacccaggacagcgagatctttgaggtgattgtgcgggagcgggacaagcccatgctgatcctgcagggccactgtgagggggagctgtgggccctggccctgcaccccaagaagcccctggccgtgacaggcagtgatgacagatctgtgcggctgtggagcctggccgaccacgccctgattgcccgctgcaacatggaggaggccgtgcgctctgtggccttctccccagatggcagccagctggccctgggcatgaaggatggcagcttcatcgtgctgcgggtgcgggacatgacagaggtggtgcacatcaaggacaggaaggaggtgatccacgagatgaagttctccccagatggcagctacctggccgtgggcagcaatgatggccctgtggatgtgtatgctgtggcccagcgctacaagaagatcggggagtgcagcaagagcctgtccttcatcacccacatcgactggagcctggacagcaagtacctgcagaccaatgatggagctggggagcggctcttctacaggatgcccagcggcaagcccctgaccagcaaggaggagatcaagggcatcccctgggcctcctggacctgtgtgaagggccctgaggtgtctggcatctggcccaagtacacagaggtgacagacatcaacagcgtggatgccaactacaacagctctgtgctggtgtctggagatgactttggcctggtgaagctgttcaagttcccctgcctgaagagaggagccaagttcagaaaatatgtgggccacagcgcccacgtgaccaacgtgcgctggagccatgacttccagtgggtgctgagcactggaggagctgaccacagcgtcttccagtggaggttcatccctgagggcgtgtccaatggcatgctggagacagccccccaggagggcggcgctgacagctacagcgaggagagtgacagcgacctgagtgatgtgcctgagctggacagcgacatcgagcaggaggcccagatcaactatgaccggcaggtgtacaaggaggacctgccccagctgaagcagcagagcaaggagaagaaccacgctgtgcccttcctgaagcgggagaaggcccctgaggacagcctgaagctgcagttcatccacggctaccggggctatgactgcaggaacaacctcttctacacccaggccggggaggtggtgtaccacatcgctgctgtggccgtggtgtacaaccggcagcagcacagccagaggctgtacctgggccatgatgatgacatcctgagcctgaccatccaccctgtgaaggactatgtggccaccggccaggtgggcagagatgctgccatccacgtgtgggacacccagaccctgaagtgcctgagcctgctgaagggccagcaccagaggggcgtgtgtgccctggacttcagcgcagatggcaagtgcctggtgtctgtgggcctggatgacttccacagcatcgtgttctgggactggaagaagggggagaagatcgccaccacccggggccacaaggacaagatctttgtggtgaagtgcaacccccaccacgtggacaagctggtgacagtgggcatcaagcacatcaagttctggcagcaggccggcggcggcttcaccagcaagaggggcacctttggatctgtgggcaagctggagaccatgatgtgtgtgtcctatggccgcatggaggacctggtgttcagcggggccgccaccggggacatcttcatctggaaggacatcctgctgctgaagacagtgaaggcccatgatggccctgtgtttgccatgtatgccctggacaagggctttgtgactggaggcaaggatggcatcgtggagctgtgggatgacatgtttgagcgctgcctgaagacctacgccatcaagaggtctgccctgagcaccagcagcaagggcctgctgctggaggacaaccccagcatccgggccatcaccctgggccacggccacatcctggtgggcaccaagaatggagagatcctggagattgacaagagcggccccatgaccctgctggtgcagggccacatggagggggaggtgtggggcctggccgcccaccccctgctgcccatctgtgccaccgtgtctgatgacaagaccctgcgcatctgggagctgagcgcccagcacaggatgctggccgtgaggaagctgaagaagggcggccgctgctgtgccttctccccagatggcaaggccctggccgtgggcctgaatgatggcagcttcctggtggtgaatgctgacacagtggaggacatggtgtccttccaccacaggaaggagatgatcagtgacatcaagttcagcaaggacaccgggaagtacctggccgtggccagccatgacaactttgtggacatctacaacgtgctgaccagcaagagggtgggcatctgcaagggggccagcagctacatcacccacatcgactgggacagccggggcaagctgctgcaggtgaacagcggggcccgggagcagctgttctttgaggccccccggggcaagaggcacatcatccggcccagcgagattgagaagattgagtgggacacctggacctgtgtgctgggccccacctgtgagggcatctggccagcccacagcgacatcacagatgtgaatgctgccagcctgaccaaggactgcagcctgctggccactggagatgactttggatttgtgaagctgttctcctaccctgtgaagggccagcacgcccgcttcaagaagtatgtgggccacagcgcccacgtgaccaacgtgcgctggctgcacaatgattctgtgctgctgactgtgggcggcgctgacacagccctgatgatctggacccgggagtttgtgggcacccaggagagcaagctggtggacagcgaggagagtgacacagatgtggaggaggatggcggctatgacagtgatgtggcccgggagaaggccatcgactacaccaccaagatctatgctgtgtccatccgggagatggagggcaccaagccccaccagcagctgaaggaggtgtctgtggaggagcggccccctgtgtccagagctgccccccagcctgagaagctgcagaagaacaacatcaccaagaagaagaagctggtggaggagctggccctggaccacgtgtttggctaccggggctttgactgcaggaacaacctgcactacctgaatgatggagctgacatcatcttccacacagctgctgctggcatcgtgcagaacctgagcacaggcagccagagcttctacctggagcacacagatgacatcctgtgcctgactgtgaaccagcaccccaagtacagaaatgtggtggccaccagccagatcggcaccacccccagcatccacatctgggatgccatgaccaagcacaccctgtccatgctgcgctgcttccacagcaaaggagtgaactacatcaacttcagcgccaccgggaagctgctggtgtctgtgggcgtggaccctgagcacaccatcaccgtgtggcgctggcaggagggcgccaaggtggccagcagaggaggccacctggagcgcatctttgtggtggagttccggccagacagcgacacccagtttgtgtctgtgggcgtgaagcacatgaagttctggaccctggccggcagcgccctgctgtacaagaagggcgtgattggcagcctgggcgccgccaagatgcagaccatgctgtctgtggcctttggagccaacaacctgaccttcaccggggccatcaatggagatgtgtatgtgtggaaggaccacttcctgatccggctggtggccaaggcccacactggacctgtgttcaccatgtacaccaccctgagagatggcctcatcgtgactggaggcaaggagcggcccaccaaggagggcggcgctgtgaagctgtgggaccaggagatgaagcgctgccgggccttccagctggagaccggccagctggtggagtgtgtgcgctctgtgtgccggggcaagggcaagatcctggtgggcaccaaggatggagagatcatcgaggtgggggagaagaatgctgccagcaacatcctgattgatggccacatggagggggagatctggggcctggccacccaccccagcaaggacctcttcatcagcgccagcaatgatggaacagcccgcatctgggacctggccgacaagaagctgctgaacaaggtgtccctgggccacgccgcccgctgtgccgcctacagcccagatggagagatggtggccatcggcatgaagaatggagaatttgtgatcctgctggtgaacagcctgaaggtgtggggcaagaagagggacaggaagagcgccatccaggacatccgcatcagcccagacaaccgcttcctggccgtgggcagcagcgagcacacagtggacttctatgacctgacccagggcaccaacctgaaccgcatcggctactgcaaggacatccccagctttgtgatccagatggacttcagcgcagatggcaagtacatccaggtgtccactggagcctacaagaggcaggtgcatgaggtgcccctgggcaagcaggtgacagaagctgtggtgattgagaagatcacctgggcctcctggacctctgtgctgggagatgaggtgattggcatctggcccagaaatgctgacaaggcagatgtgaactgtgcctgtgtgacccatgctggcctgaacatcgtgactggagatgactttggcctggtgaagctgtttgacttcccctgcacagagaagtttgccaagcacaagcgctacttcggccacagcgcccacgtgaccaacatccgcttctcctatgatgacaagtatgtggtgtccactggaggagatgactgcagcgtgtttgtgtggcgctgcctgtag

SEQ ID NO: 32362 - DNA, 5877 bp, Artificial Sequence
  derived and/or modified sequence
atggccgaccggaccgccccccggtgccagctgcggctggagtgggtttatggctacagaggacaccagtgccgaaacaatctgtactacaccgccggtaaggaggtcgtgtacttcgtagccggcgtcggcgtagtgtacaacacaagagagcatagtcaaaagttttttttaggccataatgatgacataatctctctcgccctccatccagataagacgctcgtggccacgggacaggtcgggaaagagccgtatatttgcatctgggacagttacaacgtacagacagtctccttgcttaaagatgtccatacgcatggggtcgcctgtctagctttcgactccgatgggcagaggttggcttcggtaggactggatgcaaaaaacaccgtgtgtatctgggattggcggaagggcaaacttttagcctcagctaccgggcatagcgacaggattttcgatattagctgggacccctatcagcccaaccgtgtggtgtcctgcggggttaaacacataaagttttggactttgtgtgggaacgctctaaccgcgaagcgcggaattttcggtaagactggcgacctacaaactatactatgcttggcctgcgctaaagaggatataacatactcgggcgctcttaatggcgacatttatgtttggaaaggcctcaatttagtgcgcaccatccagggagcccactcagccggcatcttttcgatgtacgcctgtgaggaaggctttgctaccggcgggagggatggatgcatccggctgtgggatacagatttcaagcctattaccaagattgatttgcgggagacagaacagggttataagggcctgtccatccgatcggtgtgctggaaggccgatagactcctagctggtacacaggactctgagatcttcgaagtcatagtgagagagcgggataagcctatgcttatcctccaggggcattgtgaaggtgaactctgggcacttgccctccatcccaagaaaccactggcagtgaccgggtccgacgacaggtcagtgcgcttgtggtctctagctgatcacgcactgatagccagatgtaacatggaagaggctgttaggagcgtggcattctcacctgacggaagtcagctggccctggggatgaaggacgggtcttttatagtactcagagtgcgggacatgactgaggtagtacacattaaggatcgcaaggaggtcatccatgagatgaagttctcaccagatggtagctacctcgcagttgggtcaaacgatggacccgtggacgtttatgcagtcgcccagaggtacaaaaagatcggagagtgttccaaatccctttctttcataactcatatcgactggtcccttgacagtaaatatctgcagaccaacgacggggccggggagaggctgttttataggatgccttcagggaagcccctaacatccaaggaggagatcaaggggataccgtgggccagctggacatgcgtgaaaggtcctgaagtcagcgggatctggcctaagtacaccgaggtgactgacatcaacagcgtggacgccaactacaattcgtctgtcctggtttctggggacgattttggactagtgaagctgttcaagttcccctgccttaagcgcggagctaagttccggaaatacgtgggtcacagtgctcacgtgacgaatgtgcgctggtctcatgactttcagtgggttctatctactggaggtgctgaccacagtgtcttccaatggcgattcatccccgagggcgtctctaacggaatgttggaaaccgcgccccaagaaggaggcgccgattcctacagcgaggagtcagactccgacttgtccgacgtgcccgagttggattctgacattgagcaggaagcacagattaattatgaccgccaggtgtataaggaggatctaccccagctgaagcagcagtcaaaggagaaaaatcacgcagtcccctttctcaaaagggagaaggcccccgaagatagcctgaagctccagttcattcacgggtatagaggctatgactgcagaaataatctgttttacacacaggcaggagaggttgtgtaccacatcgccgcagtggccgtggtctacaaccggcagcagcatagccagcgactgtacctggggcacgatgacgatatcctttccctgacaattcaccctgtgaaggactatgttgccacaggtcaggtgggaagagatgccgcaatccatgtgtgggacactcagaccctaaaatgcctgtcccttctgaaagggcagcaccaaagaggcgtttgcgcactggacttttccgcagacggaaaatgcctggttagcgtgggacttgacgactttcacagtatagtcttttgggactggaagaagggtgaaaaaatcgccactaccagaggccataaggataaaatctttgtggtgaagtgcaatcctcatcacgtggacaaactggtaacagtgggtatcaagcatatcaaattctggcagcaggccggaggaggctttacctccaaaagaggcacttttggctctgttggaaagctggaaacgatgatgtgcgtgagttacgggaggatggaggatttggtgttctctggggcagccacgggggacatatttatctggaaagacatcttactgctgaagacagtcaaagctcacgacgggcccgtattcgccatgtacgcactggacaagggctttgtaaccggaggtaaagatggcatcgtagagctctgggatgacatgtttgagagatgccttaagacttatgcgatcaagaggagtgccttgagcacttccagcaaagggctgctgctagaagataatccttctatccgagcgattacgctgggccacggccacattctggttgggacaaagaatggagaaatcctcgagatagacaagtccggcccaatgaccttgctggtgcaaggacacatggagggggaagtttggggcctggcggctcacccactcctcccaatatgcgcaacagttagtgacgataaaacactccgcatctgggagttaagtgctcagcatagaatgctagctgttcggaagctgaagaaagggggtcggtgttgcgcctttagtcctgacgggaaagcattggctgtgggcctcaacgacggttcctttctcgtcgtgaacgcagacacagtggaggatatggtgagttttcaccatcgcaaagaaatgatctcagatatcaagttttcgaaggataccggaaagtatcttgcagtggcatctcatgacaatttcgttgatatatataacgttctgacaagcaagagagtgggcatttgcaaaggagccagcagctatatcacacacatcgactgggactcaagaggtaagctgttacaagtgaattcgggggctcgcgagcagcttttctttgaggcgcctcgtggcaaacgccacattataaggccgagtgagatcgagaagattgagtgggacacctggacctgcgtccttggcccgacatgtgaaggtatctggcctgcacactccgacattaccgacgttaatgccgcctccctgacaaaggattgctccctacttgcgacaggcgatgacttcgggttcgtgaagctcttcagttaccctgttaaaggacaacatgcgaggttcaagaagtacgtggggcattcagctcacgtgactaatgtgcgctggctccataatgacagcgtgctgctaaccgtggggggggccgacaccgccctgatgatttggaccagggagttcgtcggaacacaggaaagtaaattggtagacagtgaggaatcagacactgacgtggaggaggacggaggatacgactccgatgttgccagggagaaagcgatcgactatactaccaagatttacgccgtgagtatccgggagatggaaggtactaaacctcaccagcagctgaaagaggttagtgtggaggagaggccaccagtctctagagcggctccacaaccagagaagcttcagaagaacaatatcacaaagaaaaaaaaactggtggaggagctggctttagaccatgtcttcggctatagaggatttgactgcaggaataacttgcattatttgaacgatggagccgatatcatcttccacactgctgccgctggcatcgtgcaaaatctttcaacaggatctcagtccttctatctcgaacacacagatgatattttatgcctaactgtgaaccagcatccaaagtatcggaacgtggttgccacatcacaaatcggcacaacgccgtctattcatatttgggatgctatgacaaaacacacgctgtctatgctgaggtgtttccattccaagggtgtgaattacattaatttctccgcgaccgggaaattattagtgtcagtgggagttgatcccgagcacactataactgtgtggagatggcaggagggggccaaagtggcaagccggggaggacatctcgagcgcatcttcgtggtcgagttcaggcctgatagcgacacacagtttgttagcgttggagtgaaacatatgaaattttggacgctcgccgggagcgcactactgtacaagaaaggcgtgatcgggtcactcggggctgcgaagatgcagacaatgctgagcgtagctttcggagctaacaacctgacctttactggcgccataaatggcgatgtgtacgtctggaaggatcacttcttaatccggcttgttgctaaggcacataccggtcctgtgttcactatgtacacaacattaagggacggcctcatagtaacaggtggaaaggagcgcccaaccaaggagggaggagccgtcaagctgtgggatcaggaaatgaagcgatgtcgggcctttcagttagagaccggccagctcgtggagtgtgttagaagtgtatgccgaggcaaagggaaaatactggtaggtaccaaggatggagaaataatcgaggtgggagaaaaaaatgctgcctcaaatatcctcatagatggccacatggaaggcgagatctggggcttggccactcatcccagtaaagacctgttcattagtgcttccaacgatggtaccgcccgcatttgggatctggctgacaaaaagctgcttaataaggtgtctctcgggcacgccgcccggtgtgccgcctatagccccgacggtgaaatggtcgccatcggaatgaagaacggagaatttgtgattttactggtgaactctcttaaagtgtggggtaaaaagcgggaccgcaaatcagccatacaagacattagaatatctcccgataatcggttcctggcagttgggtccagtgaacatacagtggacttctatgacctgactcaggggaccaatttgaatcgcattggctattgcaaggacatcccaagtttcgtcatccaaatggacttttctgccgacggcaaatatattcaggtttcaacaggcgcgtataagcgccaggtacacgaagtccctctggggaaacaggtaaccgaggccgtcgtcattgagaagattacctgggcatcatggacctcggtgctcggtgacgaggtaattggcatctggcctcgaaatgccgacaaggctgatgtgaactgtgcgtgtgtgacacatgccgggctcaacatagtaaccggtgacgatttcggccttgtaaagctgttcgattttccttgtactgagaaatttgcaaagcataagcggtacttcgggcactccgcgcacgtgaccaatatccggttttcctacgatgataaatatgtcgtgtcaactggcggagatgattgtagtgtgttcgtctggagatgcctgtag

SEQ ID NO: 32363 - DNA, 5876 bp, Artificial Sequence
  derived and/or modified sequence
atggctgatcgcacggcaccacggtgccagctgcgcctggaatgggtgtacgggtacagggggcaccagtgcagaaataacctgtactataccgctggtaaagaagtcgtgtattttgttgctggggtgggtgtggtctataatacccgcgaacacagtcagaagttcttcctgggacataacgatgatataatcagtctcgcactgcatcccgacaagacgctcgtggctaccggccaggtcggcaaagagccgtatatttgcatttgggacagctacaatgtacagacggtcagcttactcaaggacgtgcacacgcacggcgtcgcttgtttggcctttgactccgacggacagcgccttgcatcagtgggtctagatgctaagaataccgtatgcatctgggattggaggaagggtaaactgctagcgtcagctactggacattctgacagaattttcgatattagctgggacccataccaacccaatagggtggtttcctgcggagtaaagcacatcaaattttggacactctgcggaaatgcccttacagccaagagaggcatctttggtaagacaggagacctccaaacaatcttatgtcttgcgtgcgcgaaggaggacattacttattcaggggcactgaacggcgatatctacgtatggaagggccttaacttagttcggaccattcagggcgctcacagcgcaggaatctttagtatgtacgcctgtgaagaaggattcgccaccggcggacgggatggttgcatccggctctgggacaccgactttaagcccatcaccaagatcgacctgcgcgagaccgagcagggttataaaggcctctctattcgcagcgtctgctggaaagctgacagactgcttgccggtacacaagacagtgaaatttttgaggtgatcgtgagggaacgcgacaagcccatgctgattctacagggacactgcgagggcgaactgtgggcattggccctccaccccaagaagccgctcgcagtcaccggatctgacgacagatctgtgcgactgtggtctttagccgatcacgctctaatcgctcgatgcaatatggaagaagctgtgcgatctgtagccttctcacctgacggttcccagttagccctgggcatgaaagacgggtcctttattgtgctgagagtgagggacatgaccgaggtcgttcatattaaagaccgaaaggaggtcatccacgaaatgaagttctctccagatggctcctatctggccgtggggtctaatgacggtccggtggatgtgtacgctgttgcacagagatataagaagataggcgaatgcagcaagtccctcagtttcatcactcatatcgattggagcctggactctaagtatctgcagacgaacgacggagccggtgaacggttgttttacagaatgccatccggcaagccgctgacaagcaaggaagaaatcaaagggattccatgggcatcttggacatgcgtgaagggcccagaagtgtctggaatctggcccaagtacactgaggtaacagatatcaactctgtcgacgccaattacaactcatctgtgctcgtttcaggtgatgattttgggctcgtgaagctctttaaatttccctgcctgaaaagaggcgcaaaattccgcaaatatgtgggtcacagtgcgcatgtaaccaatgtgcgatggtctcatgatttccagtgggttctgtccacaggaggagctgaccactctgtttttcagtggcgtttcataccagagggggtaagcaatggtatgttggaaacagccccacaagaaggaggggcagattcctatagcgaagagtccgactccgatctgagtgatgtacctgagcttgatagcgatatcgagcaggaggcccagattaactacgacagacaagtttataaagaggatctgcctcaactgaagcagcagagcaaggagaaaaaccacgccgtcccttttcttaaacgagaaaaggcacctgaggatagcctcaagctccagtttatccacggatatagaggatacgactgtcggaacaacctgttttacacccaggccggagaggtcgtgtatcacatagctgctgttgctgtggtttataatcgtcagcagcattcacagcgtttgtatctcggacacgacgatgatatcttgtcactaactatccacccagtaaaagactatgtggcaactggtcaagtgggtcgcgacgctgcaatccacgtgtgggacactcagacacttaagtgcctaagcctactgaagggacagcaccaaaggggagtctgcgccctggatttttctgctgatggcaaatgcttggtgagcgtgggattggacgatttccacagtatcgtgttctgggattggaagaagggggagaagattgccaccacgagaggacataaggataaaattttcgtggtgaagtgtaatcctcaccatgttgataaactggtgacagttggcattaaacacattaagttctggcagcaggccggaggtggctttacctcgaagcgcggtaccttcggaagcgttggcaaattggaaactatgatgtgcgttagttacggccgaatggaggatctggtcttctccggagccgcaaccggcgatattttcatatggaaggacatcctcctgctgaagaccgttaaagcccacgacggtcctgtgttcgcgatgtatgctcttgacaagggctttgtgaccggtggtaaggatggcattgttgagctgtgggacgacatgtttgaaagatgcctgaagacttatgctatcaaacggtctgccctgagcacctccagtaagggcctgctgctggaggataacccaagcatcagagctatcaccttgggccacggccatattcttgtgggcacaaaaaacggtgagattctcgaaatagataagtcggggccaatgacactcctcgtgcagggccacatggaaggggaggtttgggggcttgccgctcacccgcttctgccaatctgcgctacggttagcgacgacaaaacactccgcatatgggaactgtccgcccagcatcggatgctggccgtcaggaagctaaaaaagggcggtcggtgttgtgccttttcacccgacggtaaggcactggctgttgggcttaatgacggatctttcctggtcgtgaatgctgatactgtcgaagacatggtgagcttccaccacaggaaagagatgatctcagatattaaattcagcaaggatacgggcaagtacctcgctgtggcctcccatgacaattttgtggacatttacaacgtcctgactagcaagcgtgtggggatctgcaagggcgcttcaagctacatcacccatatagactgggatagtcggggaaagctactgcaagtgaatagcggagctagggagcaattgtttttcgaggctcctcggggtaagcgccacattatcagaccctctgaaattgagaagatcgagtgggacacctggacttgtgtactggggccaacctgtgagggtatttggccagcacattcagatattacggatgtgaacgccgcttcgctcacaaaggattgtagcctcctggccaccggagacgattttggcttcgttaagctgttttcctatcccgtgaaagggcagcatgcacgtttcaagaagtacgtgggtcactccgcccatgtgacaaatgtgaggtggctgcataacgattccgtgctcctgaccgtgggcggagcagatacggctctgatgatctggacaagggaattcgtcggcacacaggagagtaagcttgtggacagtgaagagagtgataccgacgtcgaggaggacggcggatacgactcagacgtcgctagagagaaagccatcgactataccaccaagatctacgccgtgtctatccgggagatggagggcactaaaccccatcaacaactcaaggaggtgtccgtcgaggaacggcctccagtatcccgcgcagcccctcagccggagaagttgcagaagaacaatatcacaaagaagaagaagctcgtggaagagctggcccttgaccacgtattcgggtataggggttttgattgtcgaaataacctacactacttaaacgacggcgcagacatcatttttcacactgcagcagccggtatcgtgcaaaatctgtctactggcagtcaaagtttctatctggagcatacagatgacattttgtgtctgacagtgaatcagcaccccaagtacagaaacgttgtcgccacttctcaaatcggtactacaccttctatccatatatgggacgctatgaccaagcacacgctgtccatgcttcgttgtttccattccaagggtgtaaactacatcaacttcagtgccactggcaagctgctggtaagtgtgggggtggatccggaacataccattaccgtgtggagatggcaagagggcgcaaaggttgctagcaggggcggacacctagagagaatctttgttgtggaatttaggcccgactccgacactcagtttgtctctgtcggtgtgaaacatatgaagttttggaccctggctggcagcgctttgctctataagaagggagtaatagggtctctgggcgctgcaaaaatgcaaacgatgctttctgtggccttcggggctaacaacctgacatttaccggagccatcaacggggatgtgtatgtgtggaaagaccatttcttaatccggcttgtggcaaaagcccatacaggcccagtcttcaccatgtacactaccctcagagacggccttattgtgactggagggaaggaacgccctactaaggagggaggagcagtgaagctctgggatcaggaaatgaaacggtgccgtgccttccagctagagaccggtcaactggtggagtgcgtacggtctgtgtgtcgtgggaaaggaaagatcctggtggggaccaaagatggtgaaattatcgaggtgggcgagaagaatgcagcctctaatatcttaatcgatgggcatatggagggagagatctggggcctcgctacccacccctccaaggatctattcatctcagcatcaaatgacgggactgctagaatctgggacctcgccgataagaaattgttgaataaggtctccctcggccacgctgctcgttgtgccgcttactcccctgacggggagatggtcgcaatcggcatgaagaacggagagttcgtcatcctcctcgtgaattcactgaaggtatgggggaaaaagagagataggaagtcagcaatacaggatattagaatttcgccagataacaggtttctggccgtgggaagctctgagcatactgtcgacttctatgatctaacacaggggaccaatctgaataggatcggatactgcaaggacattccctcttttgtcattcaaatggactttagtgctgatgggaaatatattcaagtgagcaccggtgcctataagcgccaagtacacgaagtaccactaggcaagcaagtgaccgaggctgttgtcatcgagaaaataacttgggcatcatggacatcggttctgggggatgaagtgataggcatatggcccagaaatgctgacaaagcagatgtgaactgtgcctgtgtaacccatgctgggttaaacatcgtcactggcgatgatttcggactggtgaagctgtttgattttccgtgtaccgagaagttcgccaagcacaagagatatttcggccactccgctcacgtgacaaacatccgattcagttacgacgacaaatatgtagtgagcacaggcggagacgactgttctgtctttgtttggcgatgtttata

SEQ ID NO: 32364 - protein, 479 aa, Artificial Sequence
  derived and/or modified sequence
MVSKDTGKCILTTSESEVEPAACLALEMKYALDPNRQIKKRNKALQVRFKDICEAQNEQRDTQLSSGQLGEKREAKPVSCRAAYRKYMTVPARRSIPNVTKSTGVQTSPDLKKCYQTFPLDRKKGNLKSLPAADPFKSQNNGFLTDAKEKNEAGPMEEARPCGAGRVHKTTALVFHSNQHMNTVDQPLGVNCTEPCKSPEPLSYGEAALQNSTRPPSEEPDYQLLGRAKQDRGRPNSEEPAPPALRRVFKTEVATVYAPALSARAPEPGLSDSAAASQWSLCPADDERRRATHLNGLQAPSETALACSPPMQCLSPECSEQPSQTHTPPGLGNQPSPTAVAAGEECQRIVPHTEVVDLKAQLQMMENLISSSQETIKVLLGVIQELEKGEAHREGLSYRTGQDTANCDTCRNSACIIYSVELDFKQQEDKLQPVLRKLHPIEETQVIPSPYSQETYSSTPKQKSKTESKKHGRWKLWFL

SEQ ID NO: 32365 - DNA, 1440 bp, Artificial Sequence
  derived and/or modified sequence
atggtgagcaaggacaccggcaagtgcatcctgaccaccagcgagagcgaggtggagcccgccgcctgcctggccctggagatgaagtacgccctggaccccaacagacagatcaagaagagaaacaaggccctgcaggtgagattcaaggacatctgcgaggcccagaacgagcagagagacacccagctgagcagcggccagctgggcgagaagagagaggccaagcccgtgagctgcagagccgcctacagaaagtacatgaccgtgcccgccagaagaagcatccccaacgtgaccaagagcaccggcgtgcagaccagccccgacctgaagaagtgctaccagaccttccccctggacagaaagaagggcaacctgaagagcctgcccgccgccgaccccttcaagagccagaacaacggcttcctgaccgacgccaaggagaagaacgaggccggccccatggaggaggccagaccctgcggcgccggcagagtgcacaagaccaccgccctggtgttccacagcaaccagcacatgaacaccgtggaccagcccctgggcgtgaactgcaccgagccctgcaagagccccgagcccctgagctacggcgaggccgccctgcagaacagcaccagaccccccagcgaggagcccgactaccagctgctgggcagagccaagcaggacagaggcagacccaacagcgaggagcccgccccccccgccctgagaagagtgttcaagaccgaggtggccaccgtgtacgcccccgccctgagcgccagagcccccgagcccggcctgagcgacagcgccgccgccagccagtggagcctgtgccccgccgacgacgagagaagaagagccacccacctgaacggcctgcaggcccccagcgagaccgccctggcctgcagcccccccatgcagtgcctgagccccgagtgcagcgagcagcccagccagacccacaccccccccggcctgggcaaccagcccagccccaccgccgtggccgccggcgaggagtgccagagaatcgtgccccacaccgaggtggtggacctgaaggcccagctgcagatgatggagaacctgatcagcagcagccaggagaccatcaaggtgctgctgggcgtgatccaggagctggagaagggcgaggcccacagagagggcctgagctacagaaccggccaggacaccgccaactgcgacacctgcagaaacagcgcctgcatcatctacagcgtggagctggacttcaagcagcaggaggacaagctgcagcccgtgctgagaaagctgcaccccatcgaggagacccaggtgatccccagcccctacagccaggagacctacagcagcacccccaagcagaagagcaagaccgagagcaagaagcacggcagatggaagctgtggttcctgtag

SEQ ID NO: 32366 - DNA, 1440 bp, Artificial Sequence
  derived and/or modified sequence
atggtgagtaaagacaccggcaaatgtatccttacaaccagtgaaagtgaagtggaaccggctgcttgtttggccttggagatgaagtatgctctcgaccctaatcgccaaattaaaaagagaaacaaagccctccaagtgaggttcaaagatatctgcgaggcacagaatgagcaacgcgacactcagctatcttccggccagctaggagagaaacgagaggccaagccggtgtcttgcagggctgcttaccggaagtatatgacagtgcccgcaaggcgttctattcctaacgtaaccaagagtacgggggtgcagaccagtccagacttgaagaagtgttatcaaaccttccccttagatagaaagaagggcaatttgaagtcattaccggcagccgatcccttcaaaagccagaataacggctttttgacggatgcaaaggagaaaaacgaggcaggacctatggaggaggctcggccctgtggggctggccgagttcataagactactgccctagtgtttcattcaaaccagcacatgaacacggttgatcaacccctgggagtaaattgtactgaaccctgcaagtctcctgagcccctttcctacggcgaagccgcgctccagaattccacccgcccacctagcgaagagcctgactatcagctccttggccgtgccaaacaggaccgtggacgtcctaacagcgaagagcctgcccctcctgctctccggagggtttttaaaaccgaggttgccactgtgtatgcgccagccttgagtgcacgggctccggaacccggcctgtccgatagcgctgctgccagccagtggagtctttgccctgcagacgacgagagacgacgggcaacacatttgaatgggctgcaggcaccaagcgaaacagctcttgcctgcagccctccaatgcagtgtctatcgcccgagtgtagcgagcagccatcacagacccataccccaccaggcttaggaaatcagccctccccaaccgccgtggcggcgggtgaagaatgccagcggatagtgcctcacacagaagtcgtggatttaaaggcccagctgcagatgatggagaacctgatctctagctctcaagagacaatcaaggtgttactgggtgtgatccaagaactggagaaaggtgaggctcaccgggagggattgagctaccgcaccgggcaggacactgcaaactgcgatacctgccgtaactcagcatgtattatctatagcgttgagttggacttcaaacagcaggaagacaaattgcagcccgtgctccggaagctgcacccaatagaagagacacaagtaattcctagtccatacagtcaggaaacatactctagcacccccaaacagaagagtaagaccgagtctaagaaacacggacggtggaagctctggttcctctag

SEQ ID NO: 32367 - DNA, 4403 bp, Artificial Sequence
  derived and/or modified sequence
aagtccccggagccgaggcttcctccgcgtgagcgcggcgagtctggccgcggatgccctgtccggagtgctccgtgccgccccaggcttgccagggtccgcagcgagacatgcccgagccaggcgctgcatcgacctcgacttatctgtaagcagcggaagatcctgaaggcactaactaaggtatctccaggcaaccaaggatcttacctctcacattgagaaaaaccataacttcagagacatttcctggctccaaattcaagtcctttcagagacccctctactaattattttccagtaccactctccatggaataaaaggagttgcaaacatggcctttgtagatgcagggaaacccacgttccttttagagctgatgttaacccatgagaagcgaccacccctcgacgacttctccttcacggttcccacccaggagcacggccaactctcccccggaatccataacggctcacgcaaatagatttctttccgttcctcctcggagggctctccacatttatctgctcgagacgtggcagctccagaaccatggtcagtaaggacaccggcaaatgcatactcacaacgtcggagagtgaagtggaacccgccgcctgcctggccctggagatgaaatacgccctggaccccaaccggcagattaaaaaacggaacaaagccctgcaggtgcggtttaaggatatctgcgaggcacagaatgagcagagggacacacagctgtcctcgggccagctgggggagaagcgggaggccaagcccgtgtcctgcagagcagcctaccgcaaatacatgacagtgcccgcacgcaggtccatccccaacgtcaccaagagcacaggcgtgcagacctcgcccgaccttaagaagtgttaccagacgttccctctggaccgcaaaaaggggaacctcaaaagcctcccagctgcagatccctttaaaagccaaaacaatgggtttctaacagatgcgaaagagaagaacgaggctggacccatggaggaggcccggccatgtggcgcggggcgggtgcacaagaccacagccttggttttccattccaaccaacacatgaacacagtggaccagcctttgggggtcaactgcacagagccctgtaaaagcccggagccgctcagctatggagaagctgcgctccaaaactccactcggcctccatccgaagagcccgattaccagctgctcgggagggccaagcaggaccgggggaggccaaactccgaggagcccgctccacctgccctcaggagggtgtttaaaacggaggttgccaccgtttacgcacctgccctcagtgccagggcccccgagcctggtttgtcagactctgcagccgccagccagtggtcactctgcccggcagatgacgagcggaggagagccacacatctcaacgggctccaggcgccctcggaaactgccctggcctgctcacccccgatgcagtgcctgtcccccgaatgtagtgagcagccgtcgcagactcacaccccgccggggctggggaaccagcctagtcccacagcggttgctgcaggtgaagaatgccaacgaatcgtgcctcatacggaagtggtcgacctcaaagcacaacttcagatgatggagaacttgatcagttcaagccaagaaaccatcaaagtgctcttgggggtcattcaggagttggaaaaaggagaggcccatcgggaagggctttcatatcggacggggcaagacacagctaattgtgacacatgcaggaacagtgcatgtattatctatagtgtggagctggattttaagcagcaagaagacaaactccagccggttctaagaaaactccaccctattgaggaaactcaggtcataccttcgccttactctcaggagacttactcctcaactcccaagcaaaaatccaaaactgaatctaaaaagcacggaagatggaaactctggttcctttaacactcacggtgtctggagtctcgaggccgtctttagaacccactggagtttaagtcaatacttttccaaaatgaataggatcgagggaactgtggtgcccattcaggcacctcccacttctcgccctgcgtaccaaaaaggcctttgtaccaatagataattaacagaagcaaggtattctgtgtcactccttgccagctgttctttgcagttcactgatgtgggatgtaaaatctgaaatgaaacttacgtagtcaaagatgataagtaaaaattttcccccacccccgatctgcaagtaatacattatcaacctgcgagatggcaggctgtcaccctgtacacagctataactcataattattttcaagccttgattttttttttaaataatgagaagaaaaagcaagccttatgtttgcgaaggacttcatttttatgtttcattttgcaaataagcagggggcgagtgcaattttcagcacatcaaattccggagaaagcacaattttttcaagtggtcggagaccatgaataatctctaaaatgtgactatatgtatatttgccttcatgtgctatagcgctaagccaagtgaccacatctcagtgtcacaacgacacctcaaatttagcatcctcttcatctccagacttacgacatgtttactgctcattttccaaatggccagcagccaggagtcccccaaagtcaggatatgcctttaatcactgcaagtagacagggtcagagctattggacactaagttttcttagatctcatttttaatcttttggtacccaaaggccaaataatacattctggcaagaatctgagaacatacatagagatacacgatggataatccacccaccaataaatcacaggcattctgtgccatggcagacagtgtttttgtggatcgatcctccgagacactgttagccatggtaagtgcagccagacgttatgtacaattcgttatgctttgtattaatggtggaagccctgaccatctcaaagagaaacagtgcgtttagtttagctgctaccaagggacaatgtcgcctacatttaacctattagtaagttgtactaaacaacatacttaggggaaagctgtgaatcaaatgtttttaggtattttttaaatcaacagtaacacttagagttctctcttgattacacattgcaatgtaaatcttagttcctttattttttcactcatttctttgcacctttgcaagtatctttttatagaaatcaaatcccctagtctattaatgactttgtctatcaattttttgattttcacaataggaagtagggatcttactttgcctttttttttttttttgtacaacttaaattttgaatagtttgtgagcatacaggaaaacctagtcttgaagtttctgtccagcagtttcacatctagtggagtgctgacatgcacacctcattgactagatgccaaacacacagtggctaaccttggtaaaaggatctcacctgcttttgtcagattggagctgcttcttgccatgtattttcctcctgactcaacagcaaatctgttttagttctaagtgttttgattctacaaggacctagtgatcagtaaccagatcgggccttgaaaaaaaaatgaagagtatgtcgtgtaaacattcttcgggggccaaacaacactgcagttgtatgctttaatttaaaacacacatgtgcacacacacatcctctgcggaaacactatatgaagttcgaatccctgaatatcaataaaaggaactgagaaatattttggtgcaagaacaatgaggaagttgatcctgtaacatgaaggaagtgtaactgtttcacgtagactaaatatttaaaaatgggtttcatgttttttatactgtttttaactaaagttataaaaatgtttccaacaagttctctctccttatgttttaagaatcccaactatctcagtaaattgaaataagggtattagcagttttctaattagtaacacaaatctgtctaaacaagaggacatcctagtacacaaaataatgtcactgtttcacaccagtctagaccaaaaaaaaataaaattaaaatgttcagagtcaaaaaggaacttctgaagataaattaattcatccctaaaaattaaagtgtgttcaaaatagaaaaactattgtcaaaatcatttcatagtttaattgcaacacgtcactaacagatggtgattcttctcttggaaagattcaagtaaaaacgctgatacaaaagcaaggtaaaacgcacagggttcccttatgtagatgtacacatggcattgcatatagagattaaattattatacttgtcgttaagttctttattaatttttaaataaaaaaatcaaagatg

SEQ ID NO: 32368 - DNA, 1440 bp, Artificial Sequence
  derived and/or modified sequence
atggtgtccaaggacaccgggaagtgcatcctgaccaccagcgagagcgaggtggagcctgctgcctgcctggccctggagatgaagtatgccctggaccccaaccggcagatcaagaagaggaacaaggccctgcaggtgcgcttcaaggacatctgtgaggcccagaatgagcagagggacacccagctgagcagcggccagctgggggagaagcgggaggccaagcctgtgtcctgccgggccgcctacaggaagtacatgacagtgcctgcccggcgcagcatccccaacgtgaccaagagcactggagtgcagaccagcccagacctgaagaagtgctaccagaccttccccctggacaggaagaagggcaacctgaagagcctgcctgctgctgaccccttcaagagccagaacaacggcttcctgacagatgccaaggagaagaatgaagctggccccatggaggaggcccggccctgtggggccggccgggtgcacaagaccacagccctggtgttccacagcaaccagcacatgaacacagtggaccagcccctgggcgtgaactgcacagagccctgcaagagccctgagcccctgtcctatggagaggccgccctgcagaacagcaccaggcctccttctgaggagccagactaccagctgctgggccgggccaagcaggaccggggccggcccaacagcgaggagcccgcccccccagccctgcggcgggtcttcaagacagaggtggccaccgtgtatgccccagccctgagcgcccgggcccctgagcccggcctgagtgacagcgctgctgccagccagtggagcctgtgcccagcagatgatgagaggagaagagccacccacctgaatggcctgcaggcccccagcgagacagccctggcctgcagcccccccatgcagtgcctgagcccagaatgttctgagcagcccagccagacccacaccccacctggcctgggcaaccagcccagccccacagctgtggccgccggggaggagtgccagagaattgtgccccacacagaggtggtggacctgaaggcccagctgcagatgatggagaacctgatcagcagcagccaggagaccatcaaggtgctgctgggcgtcatccaggagctggagaagggggaggcccaccgggagggcctgagctacagaacaggccaggacacagccaactgtgacacctgcagaaattctgcctgcatcatctacagcgtggagctggacttcaagcagcaggaggacaagctgcagcctgtgctgaggaagctgcaccccatcgaggagacccaggtgatccccagcccctacagccaggagacctacagcagcacccccaagcagaagagcaagacagagagcaagaagcacggccgctggaagctgtggttcctgtag

SEQ ID NO: 32369 - DNA, 1440 bp, Artificial Sequence
  derived and/or modified sequence
atggtgagcaaggacaccggcaagtgcatcctgaccaccagcgagtcggaggtcgagccagccgcttgcctggctttagaaatgaaatacgcacttgatcctaaccgtcagatcaagaagcggaacaaggccttacaggtgagatttaaggacatctgcgaagcacagaatgagcagcgggacacacagttgtcctccggacagcttggtgaaaaacgagaggctaagcccgtttcatgcagggcagcctacagaaagtatatgaccgttcctgcgagacgatcaattcctaacgtcacgaagtccaccggggtacagacctctccagacttgaaaaaatgttaccaaacgttcccgctggaccgtaaaaaagggaacttaaagtcactgccggccgctgatccattcaagagccaaaataacggattcctgaccgacgcgaaagagaaaaacgaggcagggcccatggaagaagcaaggccttgtggcgctgggcgggtgcacaagacaacagcgctggtgttccatagtaaccagcatatgaacacagtcgatcagcccttaggggtaaattgtaccgagccatgtaaatcccccgagccattgtcctacggcgaagcagcactgcagaactctacccggccccctagtgaggagccagactaccagctgttggggagagcaaaacaggacaggggacggcccaattcagaggagcccgctcctccagccctgaggcgggtgtttaaaactgaagtggccaccgtctatgcaccagcactctcagctagagcccctgagcctgggctgagtgatagcgccgcagcatctcagtggagcttgtgtcccgccgacgatgaacggagacgggccacccatcttaatggcctccaagccccctctgaaacagccttagcctgttccccgccgatgcagtgtctgtccccggagtgtagcgagcagccctctcagacacacacgcccccaggacttggcaaccagcctagcccaaccgccgtcgcagcgggcgaagagtgccagcgcatcgtaccccatactgaagtggttgacttgaaggctcaactccagatgatggagaatctaatatcatccagtcaggaaacgatcaaggtcctactgggagtcattcaggagctcgagaaaggggaggcgcacagggagggactaagttaccgcactggacaggatacggccaactgcgacacctgccgcaactcagcctgcatcatttactccgtcgagctagattttaaacagcaggaagataaactacaacctgtgcttcgcaaactgcatcctatcgaagaaacacaggtgataccctcgccctattcgcaggagacgtactctagcacccctaaacagaaatccaagactgagagtaagaagcatggcaggtggaagctatggtttttgtag

SEQ ID NO: 32370 - DNA, 1440 bp, Artificial Sequence
  derived and/or modified sequence
atggtgagcaaggacacaggcaagtgcatacttaccacgagcgaatccgaggttgaaccagctgcgtgcctagccctcgagatgaagtacgcattagatcccaaccgtcagataaagaagcggaacaaggccttacaggttagattcaaggatatttgcgaagcgcaaaacgaacaaagagacactcaactaagttctggccagctaggagagaaaagggaagctaagcctgtgtcctgtagggccgcttatcgaaagtacatgacggtgccagctcgtaggtcgattcctaacgttaccaaaagcaccggcgttcaaaccagccccgacctcaagaagtgttaccagacatttcctttggatagaaagaagggaaatctcaagagcttgccggcagccgaccctttcaaaagccagaacaacggctttctgaccgatgcaaaggagaaaaacgaggctgggccaatggaagaagcccgaccatgcggtgcagggagggtccacaaaacaaccgccttggtgttccactctaaccaacatatgaacacagtggaccagccactgggtgtgaattgtacagagccctgcaaatctccagaacctctgagttacggcgaagccgctctccagaatagcacaagaccacctagtgaggaaccggactatcaattactgggacgggctaagcaggaccgcggtcgcccaaactccgaggaacctgcacctccagccctccgccgtgtgttcaagacagaggtagctaccgtgtacgctcctgctttgtccgccagggcccctgagcccggactctccgatagcgcagccgcaagtcaatggagtctatgtcccgctgacgacgaaaggcgcagggcgacccatctcaacggtttacaggccccaagcgagacggcactggcctgttccccgcctatgcagtgcctgagcccagaatgcagcgaacagcccagtcagacccacactcctcctgggctgggcaatcaacctagtcccacagcggtggcggctggagaggagtgccagcggatcgttccacacacagaagtagtagatttgaaagctcagttgcaaatgatggagaatctgatcagcagttcccaggaaacaatcaaagtgctgctgggggtgattcaggaactagaaaagggggaggcacaccgggaaggcctgtcataccgcactggccaagacacagcaaactgcgatacatgtaggaattccgcgtgcattatctattccgtagaattagacttcaaacagcaggaggacaaattgcagccagttctccggaagctgcatcctatcgaggaaactcaggttatcccaagtccctactctcaggaaacttattcaagcacccccaaacagaagtcaaaaactgagtctaaaaagcacggcagatggaagttgtggttcctttag

SEQ ID NO: 32371 - protein, 133 aa, Artificial Sequence
  derived and/or modified sequence
MRDLSERRLGQPELKAEQQMPLEPVRARLSVGLACCCSHTTAEASSLEHGDKVFGQGFPSPLEEIKRLLKISRALQARSVPSTQEKAKCLSGEPGQPEGKGQETYPGPGKVEGKAEPAMRKDDVCPGMKCISG

SEQ ID NO: 32372 - DNA, 1134 bp, Artificial Sequence
  derived and/or modified sequence
gggctcacaaaacagctacttgatgacaccattggaattcaccccacatgtggggaggtgttcacgactttggaaatcacaaagtcgtcaggactagacatcactcagaaaggctgctgaggctaggcctgctgctgtttagttctccttgtcatattctcatttctctcaaagataagaatgctctcggataaaatgagcctgtgctcatgacagctgctctgttactcagggaccagtgcagggctgtcttacgacacttagatgagaaagtagacaaggaaagaggacagcagtgggcatctgccttgtggtcttgctgacagcgagaagcagtgggactgcttccttgacgccttagcttggagccccgttatgaggtcctctcagattgcagcgggatgtttcatgaaagcctagacccggaagaataggaggataggagactgcagcagctgacctctggaagccagagctggatgagggacctgagcgagaggagacttgggcagccggagctgaaagctgagcagcagatgccactggagcctgtgagggcacgattgagtgtggggctggcttgctgctgctcccacaccactgcagaggcgtcctctctggaacatggagacaaggtttttggacaggggtttcccagtcccctggaagagattaagagactactgaagatctccagggcactgcaagccagatctgtaccctccacccaggagaaggcaaaatgtctttctggagagcctgggcagccagaggggaaaggtcaagaaacctatcctggccctgggaaagtggagggtaaggcagagccagccatgagaaaggatgatgtttgcccaggcatgaaatgtatcagcggatgatctctcacatggaagaagccaaagcagctacacccaatggcttagcaataagaaacaccaaaccagacaaacaccactgctgctgggaaagggacctggcagaaggaaaaggctgttcagagagcagaggtatttcgtgtgagccttttagggcttcttgtctctttagaccacatgcacatattacttgtataaaataatgcaccagatacaaacaatgaaatacaagtgctgagttcgatagactcataca

SEQ ID NO: 32373 - DNA, 402 bp, Artificial Sequence
  derived and/or modified sequence
atgagagacctgagcgagagaagactgggccagcccgagctgaaggccgagcagcagatgcccctggagcccgtgagagccagactgagcgtgggcctggcctgctgctgcagccacaccaccgccgaggccagcagcctggagcacggcgacaaggtgttcggccagggcttccccagccccctggaggagatcaagagactgctgaagatcagcagagccctgcaggccagaagcgtgcccagcacccaggagaaggccaagtgcctgagcggcgagcccggccagcccgagggcaagggccaggagacctaccccggccccggcaaggtggagggcaaggccgagcccgccatgagaaaggacgacgtgtgccccggcatgaagtgcatcagcggctag

SEQ ID NO: 32374 - DNA, 402 bp, Artificial Sequence
  derived and/or modified sequence
atgcgagacctcagcgaaagacggctgggtcaaccggaattaaaagccgagcagcagatgccactggagccagtgcgagctcgtttgtctgtgggccttgcgtgttgctgctcccacaccaccgctgaagcttcatctttagaacacggcgataaagtgttcgggcaaggctttcccagccctcttgaggaaatcaagcgcctgcttaaaatatcaagggctttgcaggctagatcagtgccatcaacgcaggaaaaggcaaaatgtctaagcggtgagcctggccagcctgaaggcaagggccaggagacttacccgggacctggaaaagtggaaggaaaagctgagccagctatgcgaaaggacgacgtgtgccctggtatgaaatgcatttctggatag

SEQ ID NO: 32375 - DNA, 402 bp, Artificial Sequence
  derived and/or modified sequence
atgcgtgatctcagtgaacgtcggctgggacagccagagctgaaagccgaacagcagatgcccctggaaccagtcagggcgcgattgagcgtcggtctggcttgttgctgctcccacaccacggcagaggcgagtagtctggagcatggcgacaaggtcttcggccaggggttccctagtcccctcgaagagatcaaacgcctgcttaagatttcgcgggctctgcaggcccgttccgtgccatctacccaagaaaaagccaagtgtctgagcggagagcctggacagccagagggcaagggccaggagacctatcccggccctgggaaggtagaggggaaggctgaacccgccatgcggaaggacgacgtttgccccgggatgaaatgtatctctggctag

SEQ ID NO: 32376 - DNA, 402 bp, Artificial Sequence
  derived and/or modified sequence
atgagggacctgtctgaaagaaggctgggccagcctgagctgaaggccgagcagcagatgcccctggagcctgtgcgggcccggctgtctgtgggcctggcctgctgctgcagccacaccacagctgaggccagcagcctggagcacggggacaaggtgtttggccagggcttccccagccccctggaggagatcaagaggctgctgaagatcagccgggccctgcaggcccggtctgtgcccagcacccaggagaaggccaagtgcctgtctggagagcccggccagcctgagggcaagggccaggagacctacccaggccctgggaaggtggagggcaaggccgagcccgccatgaggaaggatgatgtgtgccccggcatgaagtgcatcagcggctag

SEQ ID NO: 32377 - DNA, 402 bp, Artificial Sequence
  derived and/or modified sequence
atgcgggacctgagcgagcggcggctgggccagcccgagctgaaggctgagcagcagatgccgctcgagccagtacgagccagattatcagtcggactcgcatgttgctgcagtcacactactgccgaggcttcaagcctcgagcacggcgacaaggtgtttgggcagggattcccatccccactggaagaaattaaacgactgctcaagattagccgggcgctgcaggcccgctcagtgccaagcacacaagaaaaagcaaaatgtctgtcgggggagcccgggcaaccagaaggcaaggggcaggagacttaccccggacccgggaaagtcgaaggcaaggcggagcctgcaatgcggaaagacgacgtgtgccccggcatgaaatgcatcagcggctag

SEQ ID NO: 32378 - DNA, 402 bp, Artificial Sequence
  derived and/or modified sequence
atgcgggacctgagcgagcggcggctgggccagcccgagctgaaggctgaacagcagatgcctctggagcccgtgcgagccaggctatcagtgggcctggcgtgttgttgctcccacacgacagctgaggcttcttcactcgaacacggtgacaaagtctttgggcaggggttccccagccccctcgaggaaattaagaggctcctgaaaatttccagagctctgcaggctagatctgtgccgagcacacaggagaaagctaaatgcctgtcaggcgagccaggccagcccgaaggcaaaggtcaggaaacatatcccggccctggcaaggtcgagggtaaagcagaaccagccatgcggaaggacgacgtctgccccggaatgaaatgcatcagcggatag

SEQ ID NO: 32379 - DNA, 402 bp, Artificial Sequence
  derived and/or modified sequence
atgagagatctcagcgaacgtcgtttgggccagccagaactgaaagccgaacagcaaatgccgctggagcctgttcgcgctcggctctccgtgggcttggcctgctgctgtagccatactaccgcggaggccagctctctggaacacggagacaaagtattcggtcagggtttcccctcccccctggaggagatcaagcgattgctgaaaatttctcgagctctccaggccaggtccgtgccatcgactcaggagaaggcgaaatgtcttagcggcgagcctggccagcctgaaggtaaggggcaagaaacctatcctgggccaggaaaggttgaaggtaaagccgaacctgctatgaggaaggacgatgtgtgccccggtatgaagtgtatctcaggctag

SEQ ID NO: 32380 - DNA, 402 bp, Artificial Sequence
  derived and/or modified sequence
atgcgcgacctgtcagagagacggctcggacagccagagttaaaggcggagcagcagatgcccctggaacctgtccgagctcgtctgtcggttgggctggcctgttgttgctctcataccacagcggaagcttcatccctggagcacggcgacaaggtctttggacaaggatttccttctcccctcgaggaaatcaaaaggctgctgaagattagccgagccctccaggcgagatccgtgccatctactcaggagaaggcgaagtgtttatctggagaacctggacaaccggaaggaaagggacaggaaacctatcctggtcccggaaaggtggagggaaaagcggagcccgcaatgcgcaaagacgacgtttgtccgggaatgaaatgcatttctggatag

SEQ ID NO: 32381 - DNA, 1131 bp, Artificial Sequence
  derived and/or modified sequence
gggctcacaaaacagctacttgatgacaccattggaattcaccccacatgtggggaggtgttcacgactttggaaatcacaaagtcgtcaggactagacatcactcagaaaggctgctgaggctaggcctgctgctgtttagttctccttgtcatattctcatttctctcaaagataagaatgctctcggataaaatgagcctgtgctcatgacagctgctctgttactcagggaccagtgcagggctgtcttacgacacttagatgagaaagtagacaaggaaagaggacagcagtgggcatctgccttgtggtcttgctgacagcgagaagcagtgggactgcttccttgacgccttagcttggagccccgttatgaggtcctctcagattgcagcgggatgtttcatgaaagcctagacccggaagaataggaggataggagactgcagcagctgacctctggaagccagagctggatgagggacctgagcgagaggagacttgggcagccggagctgaaagctgagcagcagatgccactggagcctgtgagggcacgattgagtgtggggctggcttgctgctgctcccacaccactgcagaggcgtcctctctggaacatggagacaaggtttttggacaggggtttcccagtcccctggaagagattaagagactactgaagatctccagggcactgcaagccagatctgtaccctccacccaggagaaggcaaaatgtctttctggagagcctgggcagccagaggggaaaggtcaagaaacctatcctggccctgggaaagtggagggtaaggcagagccagccatgagaaaggatgatgtttgcccaggcatgaaatgtatcagcggatgatctctcacatggaagaagccaaagcagctacacccaatggcttagcaataagaaacaccaaaccagacaaacaccactgctgctgggaaagggacctggcagaaggaaaaggctgttcagagagcagaggtatttcgtgtgagccttttagggcttcttgtctctttagaccacatgcacatattacttgtataaaataatgcaccagatacaaacaatgaaatacaagtgctgagttcgatagactcat

SEQ ID NO: 32382 - DNA, 738 bp, Artificial Sequence
  derived and/or modified sequence
tcagattgcagcgggatgtttcatgaaagcctagacccggaagaataggaggataggagactgcagcagctgacctctggaagccagagctggatgagggacctgagcgagaggagacttgggcagccggagctgaaagctgagcagcagatgccactggagcctgtgagggcacgattgagtgtggggctggcttgctgctgctcccacaccactgcagaggcgtcctctctggaacatggagacaaggtttttggacaggggtttcccagtcccctggaagagattaagagactactgaagatctccagggcactgcaagccagatctgtaccctccacccaggagaaggcaaaatgtctttctggagagcctgggcagccagaggggaaaggtcaagaaacctatcctggccctgggaaagtggagggtaaggcagagccagccatgagaaaggatgatgtttgcccaggcatgaaatgtatcagcggatgatctctcacatggaagaagccaaagcagctacacccaatggcttagcaataagaaacaccaaaccagacaaacaccactgctgctgggaaagggacctggcagaaggaaaaggctgttcagagagcagaggtatttcgtgtgagccttttagggcttcttgtctctttagaccacatgcacatattacttgtataaaataatgcaccagatacaaacaatgaaatacaagtgctgagttcgata

SEQ ID NO: 32383 - protein, 346 aa, Artificial Sequence
  derived and/or modified sequence
MDQYCILGRIGEGAHGIVFKAKHVETGEIVALKKVALRRLEDGFPNQALREIKALQEMEDNQYVVQLKAVFPHGGGFVLAFEFMLSDLAEVVRHAQRPLAQAQVKSYLQMLLKGVAFCHANNIVHRDLKPANLLISASGQLKIADFGLARVFSPDGSRLYTHQVATRWYRAPELLYGARQYDQGVDLWSVGCIMGELLNGSPLFPGKNDIEQLCYVLRILGTPNPQVWPELTELPDYNKISFKEQVPMPLEEVLPDVSPQALDLLGQFLLYPPHQRIAASKALLHQYFFTAPLPAHPSELPIPQRLGGPAPKAHPGPPHIHDFHVDRPLEESLLNPELIRPFILEG

SEQ ID NO: 32384 - DNA, 2175 bp, Artificial Sequence
  derived and/or modified sequence
ctgtcatcgttccgtgggccctgctgcgggcacgctctcggcgcatgcgttttttatgcgggattaagcttgctgctgcgtgacagcggagggctaggaaaaggcgcagtggggcccggagctgtcacccctgactcgacgcagcttccgttctcctggtgacgtcgcctacaggaaccgccccagtggtcagctgccgcgctgttgctaggcaacagcgtgcgagctcagatcagcgtggggtggaggagaagtggagtttggaagttcaggggcacaggggcacaggcccacgactgcagcgggatggaccagtactgcatcctgggccgcatcggggagggcgcccacggcatcgtcttcaaggccaagcacgtggagactggcgagatagttgccctcaagaaggtggccctaaggcggttggaggacggcttccctaaccaggccctgcgggagattaaggctctgcaggagatggaggacaatcagtatgtggtacaactgaaggctgtgttcccacacggtggaggctttgtgctggcctttgagttcatgctgtcggatctggccgaggtggtgcgccatgcccagaggccactagcccaggcacaggtcaagagctacctgcagatgctgctcaagggtgtcgccttctgccatgccaacaacattgtacatcgggacctgaaacctgccaacctgctcatcagcgcctcaggccagctcaagatagcggactttggcctggctcgagtcttttccccagacggcagccgcctctacacacaccaggtggccaccaggtggtaccgagcccccgagctcctgtatggtgcccgccagtatgaccagggcgtcgatctgtggtctgtgggctgcatcatgggggagctgttgaatgggtccccccttttcccgggcaagaacgatattgaacagctttgctatgtgcttcgcatcttgggcaccccaaaccctcaagtctggccggagctcactgagctgccggactacaacaagatctcctttaaggagcaggtgcccatgcccctggaggaggtgctgcctgacgtctctccccaggcattggatctgctgggtcaattccttctctaccctcctcaccagcgcatcgcagcttccaaggctctcctccatcagtacttcttcacagctcccctgcctgcccatccatctgagctgccgattcctcagcgtctagggggacctgcccccaaggcccatccagggcccccccacatccatgacttccacgtggaccggcctcttgaggagtcgctgttgaacccagagctgattcggcccttcatcctggaggggtgagaagttggccctggtcccgtctgcctgctcctcaggaccactcagtccacctgttcctctgccacctgcctggcttcaccctccaaggcctccccatggccacagtgggcccacaccacaccctgccccttagcccttgcgagggttggtctcgaggcagaggtcatgttcccagccaagagtatgagaacatccagtcgagcagaggagattcatggcctgtgctcggtgagccttaccttctgtgtgctactgacgtacccatcaggacagtgagctctgctgccagtcaaggcctgcatatgcagaatgacgatgcctgccttggtgctgcttccccgagtgctgcctcctggtcaaggagaagtgcagagagtaaggtgtccttatgttggaaactcaagtggaaggaagatttggtttggttttattctcagagccattaaacactagttcagtatgtgagatatagattctaaaaacctcaggtggctctgccttatgtctgttcctccttcatttctctcaagggaaatggctaaggtggcattgtctcatggctctcgtttttggggtcatggggagggtagcaccaggcatagccacttttgccctgagggactcctgtgtacttcacatcactgagcactcatttagaagtgagggagacagaagtctaggcccagggatggctccagttggggatccagcaggagaccctctgcacatgaggctggtttaccaacatctactccctcaggatgagcgtgagccagaagcagctgtgtatttaaggaaacaagcgttcctggaattaatttataaatt

SEQ ID NO: 32385 - DNA, 1041 bp, Artificial Sequence
  derived and/or modified sequence
atggaccagtactgcatcctgggcagaatcggcgagggcgcccacggcatcgtgttcaaggccaagcacgtggagaccggcgagatcgtggccctgaagaaggtggccctgagaagactggaggacggcttccccaaccaggccctgagagagatcaaggccctgcaggagatggaggacaaccagtacgtggtgcagctgaaggccgtgttcccccacggcggcggcttcgtgctggccttcgagttcatgctgagcgacctggccgaggtggtgagacacgcccagagacccctggcccaggcccaggtgaagagctacctgcagatgctgctgaagggcgtggccttctgccacgccaacaacatcgtgcacagagacctgaagcccgccaacctgctgatcagcgccagcggccagctgaagatcgccgacttcggcctggccagagtgttcagccccgacggcagcagactgtacacccaccaggtggccaccagatggtacagagcccccgagctgctgtacggcgccagacagtacgaccagggcgtggacctgtggagcgtgggctgcatcatgggcgagctgctgaacggcagccccctgttccccggcaagaacgacatcgagcagctgtgctacgtgctgagaatcctgggcacccccaacccccaggtgtggcccgagctgaccgagctgcccgactacaacaagatcagcttcaaggagcaggtgcccatgcccctggaggaggtgctgcccgacgtgagcccccaggccctggacctgctgggccagttcctgctgtaccccccccaccagagaatcgccgccagcaaggccctgctgcaccagtacttcttcaccgcccccctgcccgcccaccccagcgagctgcccatcccccagagactgggcggccccgcccccaaggcccaccccggccccccccacatccacgacttccacgtggacagacccctggaggagagcctgctgaaccccgagctgatcagacccttcatcctggagggctag

SEQ ID NO: 32386 - DNA, 1041 bp, Artificial Sequence
  derived and/or modified sequence
atggaccagtactgtattctggggcggatcggggagggcgctcatgggatcgtattcaaggccaaacatgtcgaaacaggcgaaattgttgccttgaagaaagttgcactccgccgcttggaggacggtttccctaaccaagccctgcgtgagattaaagccctccaggaaatggaggataaccagtatgtggtgcaattgaaggcagtgttcccgcacggcggcgggtttgtgttggccttcgagtttatgctctcggacctcgctgaggtggtgagacatgcgcagagacctcttgcccaggcgcaggttaaaagctacctacagatgcttttgaagggggtggcattttgtcacgcaaataatatcgtccatagagatctgaagcccgcgaacctgttaatctcagccagtgggcagctcaaaatcgccgacttcgggcttgcacgagtgttctctccagacgggtcccgactgtatacacaccaggtggccacaaggtggtatcgggctcctgagctcctgtacggcgcaagacagtatgatcagggagttgatttatggtctgttggctgtattatgggagagctgctcaatggttcgcccctgttcccaggcaagaatgatatagagcagttatgttatgttttgcgaattttgggaactcctaatcctcaggtttggcccgagctcacagaactccctgactacaacaagatatcctttaaggagcaagttcccatgcctttagaggaagtgttgcctgatgtgagtccccaagcactggacctgctcggccagtttcttctctacccgccgcatcagcgaatagcagcgtctaaggctctactacaccaatacttctttaccgccccactgcccgctcaccccagtgaactgcctatccctcagcgactgggaggacccgctcctaaggcacaccccggcccccctcacatccacgacttccacgttgatcgtcccctggaggagtccctgctgaatcctgaattgatcaggccctttatactggaggggtag

SEQ ID NO: 32387 - DNA, 1041 bp, Artificial Sequence
  derived and/or modified sequence
atggaccagtactgcatcctgggccgcatcggggagggcgcccatggaattgtgttcaaggccaagcacgtggagaccggggagatcgtggccctgaagaaggtggccctgcggcggctggaggatggcttccccaaccaggccctgcgggagatcaaggccctgcaggagatggaggacaaccagtatgtggtgcagctgaaggctgtgttcccccatggaggcggctttgtgctggcctttgagttcatgctgagtgacctggccgaggtggtgagacatgcccagaggcccctggcccaggcccaggtgaagagctacctgcagatgctgctgaagggcgtggccttctgccacgccaacaacatcgtgcaccgggacctgaagccagccaacctgctgatcagcgccagcggccagctgaagattgctgactttggcctggcccgggtcttctccccagatggcagccggctgtacacccaccaggtggccacccgctggtaccgggcccctgagctgctgtatggagcccggcagtatgaccagggcgtggacctgtggagcgtgggctgcatcatgggagagctgctgaatggcagccccctcttccctgggaagaatgacatcgagcagctgtgctacgtgctgcgcatcctgggcacccccaacccccaggtgtggccagagctgacagagctgcctgactacaacaagatctccttcaaggagcaggtgcccatgcccctggaggaggtgctgcctgatgtgagcccccaggccctggacctgctgggccagttcctgctgtacccaccccaccagagaattgctgccagcaaggccctgctgcaccagtacttcttcaccgcccccctgcctgcccaccccagcgagctgcccatcccccagaggctgggcggccctgcccccaaggcccaccctggccccccccacatccatgacttccacgtggaccggcccctggaggagagcctgctgaaccctgagctgatccggcccttcatcctggagggctag

SEQ ID NO: 32388 - DNA, 1041 bp, Artificial Sequence
  derived and/or modified sequence
atggaccagtactgcatcctgggccggatcggcgagggcgcccacgggatcgtctttaaagcaaaacacgtcgagaccggcgagattgtggcacttaagaaggtggctctgagacggctggaggatggatttcccaaccaggcactccgtgaaataaaagcactccaggaaatggaagataaccagtatgtggtccaactcaaagcagtatttcctcacggaggcgggttcgtgctcgcctttgagttcatgttgtccgacctggccgaagtggtgcgccacgcgcaacggccccttgcccaagcgcaggtgaagagttatctgcaaatgctacttaaaggtgtcgctttctgtcacgcaaataacatagtgcacagggatctgaagccagctaacctgctgataagcgcatctggacagttaaagatcgcagacttcggcctcgctagagttttttcccccgatgggtcccgcttgtatactcaccaggtagctacacgatggtatcgtgccccagaattgctctacggagctagacagtacgaccagggtgtggatctctggtccgttggatgtattatgggcgaactgctgaacggatcaccactcttcccggggaagaatgacatcgagcagctgtgttacgttcttcgtatactcggaacccctaaccctcaggtgtggcccgaactgaccgaactccccgattataacaaaattagttttaaggagcaagtgcctatgcctttagaagaggttctgcccgacgtctctcctcaggctctcgacttgctaggccaatttctgttgtaccctccccatcagagaatcgccgccagtaaagcactcttacaccaatacttcttcaccgcacctctcccagcccacccttctgaactccctatccctcagagactgggcggtccagcaccaaaggctcaccctggacctccccacatccatgattttcatgtcgatagacccttggaggagtcactgctcaatccagagctgattaggcccttcattctggagggttag

SEQ ID NO: 32389 - DNA, 1041 bp, Artificial Sequence
  derived and/or modified sequence
atggaccagtattgcattctgggtcgcattggagagggagcacacggaatcgtgttcaaagcaaaacatgtggaaacaggggaaattgtggccttgaagaaggttgcactccgcaggctggaagacggcttccccaaccaggccctccgcgaaattaaggccctgcaggaaatggaggataaccagtacgtggttcagcttaaggccgtgtttcctcatggaggtggctttgtgcttgcttttgaatttatgctgagcgatctcgcagaggtagtacggcatgcgcagagacccctggcacaggcccaggtgaaaagttacctgcaaatgctgctgaagggggtcgccttctgccacgctaacaacatcgttcatagagatctgaaacccgctaacttattgatctccgcgtcaggccagctcaagatagccgattttggcctcgcccgagtcttttcgccagacggctcccgactgtatacgcaccaagtggccaccaggtggtatcgcgctcctgaactcttgtacggagcccgacagtacgaccagggggtagatttgtggagtgttggctgcattatgggcgaattgttgaacggctcccccctgtttccagggaagaacgatattgagcagctgtgttacgtgctgcggatcctgggcacacccaatccacaagtatggcccgagctgactgaactcccagattacaataagatcagcttcaaggaacaggtgcctatgccgttggaggaagtactgcccgatgtgtcgccacaagccctagatctcctgggacaatttctactctatccaccacaccaacgcatcgccgcttctaaggcactcctgcaccagtacttcttcacggcccctctccctgcccacccgtccgagcttcccattccacagcggctgggtggcccagcaccaaaggcacaccccggtccgcctcacattcatgacttccacgttgataggcctcttgaagagtctctgcttaatccagagctgatccggcctttcatccttgaagggtag

SEQ ID NO: 32390 - protein, 224 aa, Artificial Sequence
  derived and/or modified sequence
MSILLPNMAEFDTISELEEEEEEEAATSSSSPSSSSSVSGPDDDEEDEEEEEEEEEEEEEEEEEEEEEAPPPPRVVSEEHLRRYAPDPVLVRGAGHITVFGLSNKFDTEFPSVLTGKVAPEEFKTSIGRVNACLKKALPVNVKWLLCGCLCCCCTLGCSLWPVICLNKRTRRSIQKLIEWENNRLYHKLALHWKLTKRKCETSNMMEYVILIEFLPKYPIFRPD

SEQ ID NO: 32391 - DNA, 4158 bp, Artificial Sequence
  derived and/or modified sequence
gttccccctcctcttgcagcacctcggcaggttcaaactcttctccgggagcgtggcggcgatcgcgaggtcacgtgatgagcatcctgctgcccaacatggcggagttcgacaccatctcggaactggaggaggaggaggaagaagaagcggcaacgtcgtcgtcgtcgccgtcgtcgtcgtcgtcggtatctgggcccgacgatgacgaggaggatgaggaggaagaggaggaagaggaggaggaggaagaagaggaggaggaggaagaggaggaggaagcgccgcccccgcctcgggtagtgagcgaggagcatctgcggagatatgctcccgaccctgtattagtgcggggtgccggccacatcactgtgtttggcttgagcaacaagtttgatactgaatttccctccgttctaacagggaaggtggccccagaagaatttaaaaccagcattggccgtgtgaatgcatgtttgaaaaaggctctcccggtcaatgtgaaatggctgctgtgtggttgtctctgctgctgttgcacactgggttgcagcctatggcctgttatttgtctcaacaaaagaaccagaagatcaattcagaagttaatagaatgggaaaataacagattatatcacaagcttgctttgcactggaagttgactaagaggaaatgtgaaactagcaatatgatggagtatgtaatactaatagaattcttaccaaaatatcccatattccgacctgactgaggagttttatccagtcacttctgtgttacctgtcatttcctacccttagtgccttgtagatttggaatgaagatggtctcctttgctgtgttcaacttattctttataatggtagaatattcttctcgctcttttgtgttggtttatgaagaaaatttgcacatcttttttgtctttcaatgaggcttgtgttttgcactctcaattttaaatacacacacatgcgtgtgtgcatatacatatatagatagttgccattaaagataaatcatcagtgttggtgtttaaaaaacaaaaacttgttctgagcatgctgccttataattttcatactcattgtttctaaactcgcatcatttttctaggctacttgatgctctgtaatcccttactggacaaacttaaataagcttttggtagcttttagaaatggttttactctgcttttaaaggacatgcttttaaaggacatgcaattaatggcactggttttgtcctgcactttgctttatcacttatgttagtggataaaatatttaaactcctaaagacttgtaaatattgcctctttgcataatgtaaaatgtggtatgccatggtttacataatgtaacattactcttattgtattgccaacaattttacatagattttaatatgaatgaagtttgcaagcatccctttgaatgtagaaactgctaacatgctgttttatggcaaggccataatgagtatgttaagaatttcaggtgtagggcaaggttgccctttgtaacaagtggactaaaattgaaattattatctcagatattctgtattgcacctgaaaccatgacctttatttttccatttcgtttaataatttccattttgttgtctactccttcccacaaaaaaactatttgacatctgacacatttcacagtctcactatcctgcatttattagccttttcttcctttgaaaatacacacaattatgacttttaaggagtattttgagatttcagacatcttcagaaggtatctagaccctcttgaaagccactaacacctttctgcagttctgatattctagtttgagaaagagagagaactatttgagaagctgtagctaaagagtatatagcagctgattcataattgaaaaaaaattctcaattctgtttttgatgatcctttataaaacattaatgaggaaagacaagtgtttagacaaaagtattttagtttataaattcagcacatatgtaacatttatttggtccatatttctctatttttcttcacaattaaaatgattgctagcaccacacaactagaatttgaaaattcagtataatgaaagctttatatcacattaattcaactgcaaatgtatgcctgtttgtaggcattatttgtaattcatagtgctaaaaataaaagtgtctagggctcagtaatattttgtcatcttactcttactgcttttagtaaaccttttaggcaagattcatctcagtgaagtgaacaatcatttcttcatagaaggtcaagcctttttaagccactcttaaaatttatgcctaatttgaaatccacagtccttgaccagtttaaaaaagagaggaaaaagaagacactattttatatgtgattataattgtttgcacaaacacttttccaccttcctctgtgccccattacctctgtgccactcagtcaccccaaatctctaacctttagtaatgtgtatgcctgcaaatattatgtgtttgcctgctgcaaaattgaaggtgtatttttatagacaaggtagaagcctctgaaaatgtataccaaatgtcttgttttgtagctaaggtcgggaaaaattgtatctgaggtttatgttccagctaatgttatcaaatttatgcttcaaactgtgatattttaataccaaaatcgattttcagcataatacaaaatatctcattttcactgatagaaaattgcttttaagtgttgatccttagaaatcttatttttttctataaccttagaatttgatcatatgatggtcataggaactttttctgccatgtataaatcacacttggttttgctcaaagaacagcatgaagtggtgaattgtttccatgaaacaattattgagaatgggaatacagtatatctggaaatgacacagtataatacaagttacagtagcatttgtcacaaaaaccacttgtcagcatgtgtaaacttaattttaaagcctattctaatcactcgagtttattattttattgttcgctatgctggttgactcatcttagtttcttcaactacccaaaaaaataccaatttttttcctctcttgtatgactactttttcaaactgttttcctttgcagggggctgattagcaattgagtattttgtaatgtttgggcggggttgctttgttttcagtgaaattggttgcagtgaatgctaaaatgacacagcacactggtgattaattcctcccccatggagccttttttctgttatgcttaggatagaacatacttgtaattttccattaggttagtaacatacttttgtgaaagttgtttttagactgaagaaagtaattttgaatttctttgttacataatattcctttatgaaacttgtgatagtttccagagcaaaacatgtatttgccaaagtatataaatctcacaaggctttaagattacaagctaaaattgttttttaaaattaatgttccaatgtttctcatttggcccaagattctggcttcataaatttgtccaactggctatttttaagcttgtcctaaaagccaataacatgtttattcctaataactaatatgggcaagtgttatttacagatttattaactccatcccagatatgtctccactctttgttccctcctaatgctaatttaggaaagagaccactgtagtaaaactttagaagaagatggagaagtgccttgtctttttagaacaaagataacacattacgtgtaaggaagcataataaatgaattggtagatgattagattagaaatcatccttttcaactaggtctaagaatactttactagtgtattatcttttatttattatgtaaagcttctttccttccttttccccaatcatgatatattagtgacaaaatattacagaaccggactatcagtcacttaaaaaaacagtataattctaatgctagtaaacatgtaatttaatttagttctggaaggacagttgtctttgattaaagccccaccaaaacccatttaagtatttaatgtacatactattcatattattatggcctgtaaacactaatatctgagcaatcaaactgttttatctaccatttttgatgaaatttgaataaagtttaaaaacgtgtaa

SEQ ID NO: 32392 - DNA, 675 bp, Artificial Sequence
  derived and/or modified sequence
atgagcatcctgctgcccaacatggccgagttcgacaccatcagcgagctggaggaggaggaggaggaggaggccgccaccagcagcagcagccccagcagcagcagcagcgtgagcggccccgacgacgacgaggaggacgaggaggaggaggaggaggaggaggaggaggaggaggaggaggaggaggaggaggaggaggaggccccccccccccccagagtggtgagcgaggagcacctgagaagatacgcccccgaccccgtgctggtgagaggcgccggccacatcaccgtgttcggcctgagcaacaagttcgacaccgagttccccagcgtgctgaccggcaaggtggcccccgaggagttcaagaccagcatcggcagagtgaacgcctgcctgaagaaggccctgcccgtgaacgtgaagtggctgctgtgcggctgcctgtgctgctgctgcaccctgggctgcagcctgtggcccgtgatctgcctgaacaagagaaccagaagaagcatccagaagctgatcgagtgggagaacaacagactgtaccacaagctggccctgcactggaagctgaccaagagaaagtgcgagaccagcaacatgatggagtacgtgatcctgatcgagttcctgcccaagtaccccatcttcagacccgactag

SEQ ID NO: 32393 - DNA, 675 bp, Artificial Sequence
  derived and/or modified sequence
atgtcaattctgctgcctaatatggccgaattcgatactatctcggagctggaagaagaagaggaggaggaagctgccacatcctcctcctcgcccagcagctccagctctgtcagcggacctgacgatgatgaagaggatgaagaggaagaggaagaggaggaagaagaagaagaggaagaggaggaagaggaggaagaggaagcccctccaccaccgcgggtcgtgtcagaagagcatctgagacggtacgctccagacccggtgctggtcagaggggccggtcacatcaccgtgttcggcctgtctaacaagttcgatacggagttcccatctgtcctcactgggaaggtggccccggaggagtttaaaacgagcattggccgggtcaacgcgtgtctgaaaaaggccctgccagtaaacgtcaaatggcttttgtgcggctgcctgtgttgctgctgcacattaggttgcagtctctggcccgtgatatgcctgaataagcgcacacgtcggtccatacagaagctgatagaatgggaaaacaacaggttataccacaagctggctctgcactggaagttgaccaagagaaagtgtgagacgagtaatatgatggaatatgtgatactaattgagtttcttcctaagtatcccatctttagaccggactag

SEQ ID NO: 32394 - DNA, 675 bp, Artificial Sequence
  derived and/or modified sequence
atgagcatcctgctgcccaacatggccgagtttgacaccatcagcgagctggaggaggaggaggaggaggaggccgccaccagcagcagcagccccagcagcagcagctctgtgtctggcccagatgatgatgaggaggatgaggaggaggaggaggaggaggaggaggaggaggaggaggaggaggaggaggaggaggaggaggcccctcctccaccccgggtggtgtctgaggagcacctgcggcgctatgccccagaccctgtgctggtgcggggggccggccacatcaccgtgtttggcctgagcaacaagtttgacacagagttccccagcgtgctgaccgggaaggtggcccctgaggagttcaagaccagcatcggccgggtgaatgcctgcctgaagaaggccctgcctgtgaatgtgaagtggctgctgtgtggctgcctgtgctgctgctgcaccctgggctgcagcctgtggcctgtgatctgcctgaacaagaggaccaggaggagcatccagaagctgattgagtgggagaacaacagactctaccacaagctggccctgcactggaagctgaccaagaggaaatgtgagaccagcaacatgatggagtatgtgatcctgattgagttcctgcccaagtaccccatcttccggccagactag

SEQ ID NO: 32395 - DNA, 675 bp, Artificial Sequence
  derived and/or modified sequence
atgagcatcctgctgcccaacatggccgagttcgacaccatcagcgagttggaagaagaagaggaagaagaggctgctacctcaagtagcagcccatcctcttccagtagtgtgtctgggccagatgacgacgaagaagatgaggaggaggaggaagaggaggaagaggaggaggaggaggaggaagaggaagaggaggaagaagcccctccacccccgcgcgtggtcagcgaggaacacttgaggcgatatgcgccagatccagttttggtgaggggagctggtcacataaccgtatttgggctgtccaacaagttcgacacagagtttccatcagtactcaccggtaaggtcgctccagaagaatttaagacatccatcggtagagtgaacgcatgtttaaaaaaggcactgcccgtgaatgtcaagtggctcctgtgcggatgcctgtgctgttgctgcaccctcggatgctctttgtggccggtcatctgtctgaataagagaactcgacgctccatacagaagctcatcgaatgggagaacaaccgcttgtatcataagctggccctgcattggaagctcactaagcgcaaatgcgagactagcaatatgatggagtatgtcattttgatagagtttcttcctaagtaccccatctttcggccagactag

SEQ ID NO: 32396 - DNA, 675 bp, Artificial Sequence
  derived and/or modified sequence
atgtctatcctgttgcccaacatggccgagtttgacacaatttccgaattagaggaagaagaagaggaagaagccgctacatctagctccagcccaagttcatcatcgtccgtttctggcccagacgatgacgaggaagatgaggaagaagaagaagaagaggaggaggaggaggaggaggaagaggaagaggaggaagaagaggcacccccaccccctagagtggtgagcgaggaacacctgcggagatacgccccagaccccgtactggtgagaggcgctggccatatcacagtttttgggctgtcaaataagtttgatacagaattcccaagcgtgcttactgggaaggtcgcacccgaggaatttaaaaccagcatcggcagagtcaatgcctgcctcaaaaaagcactcccagtcaatgtcaagtggctcctatgtggctgtctctgttgttgttgcaccctgggttgtagcctgtggccagtcatttgcctgaacaaacgcactcgaaggtctattcaaaagctcattgaatgggagaacaatcgcctgtaccacaaacttgcattgcactggaaattgaccaagcggaagtgtgagaccagcaacatgatggaatatgtcatcctgatcgagtttctccccaagtaccctatcttcaggccagattag

SEQ ID NO: 32397 - protein, 267 aa, Artificial Sequence
  derived and/or modified sequence
MWDQRLVKLALLQHLRAFYGIKVKGVRGQCDRRRHETAATEIGGKIFGVPFNALPHSAVPEYGHIPSFLVDACTSLEEHIHTEGLFRKSGSVIRLKALKNKVDHGEGCLSSAPPCDIAGLLKQFFRELPEPILPADLHEALLKAQQLGTEEKNKAILLLSCLLADHTVHVLRYFFNFLRNVSLRSSENKMDSSNLAVIFAPNLLQTSEGHEKMSSNAEKKGVYQTLSWKRYQPCWVLMVSVLLHHWKALKKVNMKLLVNIREREDNV

SEQ ID NO: 32398 - DNA, 804 bp, Artificial Sequence
  derived and/or modified sequence
atgtgggaccagagactggtgaagctggccctgctgcagcacctgagagccttctacggcatcaaggtgaagggcgtgagaggccagtgcgacagaagaagacacgagaccgccgccaccgagatcggcggcaagatcttcggcgtgcccttcaacgccctgccccacagcgccgtgcccgagtacggccacatccccagcttcctggtggacgcctgcaccagcctggaggagcacatccacaccgagggcctgttcagaaagagcggcagcgtgatcagactgaaggccctgaagaacaaggtggaccacggcgagggctgcctgagcagcgcccccccctgcgacatcgccggcctgctgaagcagttcttcagagagctgcccgagcccatcctgcccgccgacctgcacgaggccctgctgaaggcccagcagctgggcaccgaggagaagaacaaggccatcctgctgctgagctgcctgctggccgaccacaccgtgcacgtgctgagatacttcttcaacttcctgagaaacgtgagcctgagaagcagcgagaacaagatggacagcagcaacctggccgtgatcttcgcccccaacctgctgcagaccagcgagggccacgagaagatgagcagcaacgccgagaagaagggcgtgtaccagaccctgagctggaagagataccagccctgctgggtgctgatggtgagcgtgctgctgcaccactggaaggccctgaagaaggtgaacatgaagctgctggtgaacatcagagagagagaggacaacgtgtag

SEQ ID NO: 32399 - DNA, 804 bp, Artificial Sequence
  derived and/or modified sequence
atgtgggatcagcgacttgttaaactagccctcctccagcacctgcgcgcattttatggtattaaagttaaaggagtgcgggggcagtgtgaccgacgacggcatgagaccgctgcgactgaaattggagggaaaatattcggtgtccccttcaacgcgctgcctcacagtgctgtaccagagtacgggcatatcccttctttcctggtggatgcctgcaccagtctggaagaacatattcatactgaagggctattccgcaaatctggttccgtgatccggttgaaggcgttgaaaaacaaggtggatcatggggaaggctgtctgagttccgcacctccttgcgacatcgcggggctattaaaacagttcttccgcgagcttcccgagcctatactccctgcagatctccatgaagcgctgctaaaggcacagcagttgggaaccgaagaaaagaacaaagcaatactgctactgtcatgcttgttggccgatcacacggttcacgtgctgcgatatttttttaacttccttcgcaacgtgtctcttcggtccagcgaaaacaagatggattcctccaacctggctgtaatctttgcgccaaacctgcttcagacaagcgaaggacacgaaaagatgtcctccaatgccgagaaaaaaggtgtttatcagacgctgagttggaagcgataccagccttgttgggtgttgatggtttctgtgctgttacaccattggaaagctttgaagaaagtgaacatgaaattgctcgttaatattcgggaaagagaggacaacgtttag

SEQ ID NO: 32400 - DNA, 804 bp, Artificial Sequence
  derived and/or modified sequence
atgtgggaccagcggttggtgaagttagctctacttcagcacctgagagcattttatggcattaaggtgaagggtgtgcgtggacagtgtgatcggaggaggcatgaaaccgcggccacagagataggtggtaagatctttggtgtgccgttcaatgctcttccacattcggccgttccagagtacggacatatcccgtcctttctagtagacgcttgtaccagccttgaagaacatattcataccgagggcctgttcagaaagtccggaagcgtgattagactgaaagccctaaaaaataaagtggatcatggagagggatgcctcagcagcgcccctccttgcgacatagctggcttactcaagcagttctttagagaactgcctgagcctattctccctgcagacctgcacgaagctctcttgaaggcccagcagctaggcacagaagagaagaacaaagcgatcttgcttctgagctgcctgctcgccgaccatacagttcacgtgctgcggtacttcttcaatttcctacgaaatgtgtctctacgctccagcgaaaacaaaatggattcatccaacctggctgttatatttgcccccaacctgttgcaaaccagtgaaggccatgagaagatgtcctcaaatgctgaaaaaaaaggagtttatcaaacactgagctggaagcgttaccaaccttgctgggtgctgatggtgagcgtgttactgcaccactggaaggcccttaagaaggtgaatatgaagcttctggtgaacatccgcgagcgggaagacaatgtttag

SEQ ID NO: 32401 - DNA, 804 bp, Artificial Sequence
  derived and/or modified sequence
atgtgggaccagaggctggtgaagctggccctgctgcagcacctgcgggccttctacggcatcaaggtgaagggcgtgcggggccagtgtgacagaagaagacatgaaacagctgccacagagatcggcggcaagatctttggagtgcccttcaatgccctgccccacagcgctgtgcctgaatatggccacatccccagcttcctggtggatgcctgcaccagcctggaggagcacatccacacagagggcctcttcaggaagagcggcagcgtcatccggctgaaggccctgaagaacaaggtggaccacggggagggctgcctgagcagcgccccaccctgtgacattgctggcctgctgaagcagttcttccgggagctgcctgagcccatcctgcctgctgacctgcacgaggccctgctgaaggcccagcagctgggcacagaggagaagaacaaggccatcctgctgctgagctgcctgctggccgaccacacagtgcacgtgctgcgctacttcttcaacttcctgagaaatgtgtccctgcggagcagcgagaacaagatggacagcagcaacctggccgtcatctttgcccccaacctgctgcagaccagcgagggccacgagaagatgagcagcaatgctgagaagaagggcgtgtaccagaccctgtcctggaagcgctaccagccctgctgggtgctgatggtgtctgtgctgctgcaccactggaaggccctgaagaaggtgaacatgaagctgctggtgaacatccgggagcgggaggacaacgtgtag

SEQ ID NO: 32402 - DNA, 804 bp, Artificial Sequence
  derived and/or modified sequence
atgtgggaccagcggctggtgaagctggccctgctgcagcacctgcgggcattttatggtatcaaggtgaagggcgtgaggggacagtgcgatcggcgcaggcatgagaccgcagccacagaaattgggggcaagatcttcggtgtgccattcaatgccttgccccacagcgctgtccctgagtatggccacatcccttcctttttagtcgatgcttgcacaagcttggaagagcacatccacactgaaggtctgttcagaaagagcgggagcgttatcaggttgaaagccctcaagaataaggtcgaccatggcgaggggtgccttagctcagcaccaccctgtgatatcgctggactgctgaagcaattttttcgcgagttgccagagcctatcctgcctgcagacctgcatgaagcactacttaaggcccagcagctgggaacagaagaaaagaataaggccattttgctgctctcctgcctcctggccgaccacaccgtccacgtgttgagatacttttttaatttcctccggaatgtgtccttgaggagtagtgaaaataagatggactctagcaatctggctgtgatctttgctcctaacttactccaaaccagcgaaggccatgaaaagatgagtagtaatgccgagaaaaagggtgtgtaccagaccctatcttggaagagatatcagccatgttgggtcctgatggtgagtgtgttgttgcaccattggaaagccctgaagaaggtgaatatgaagctcttggtgaacatcagagagcgcgaagataatgtgtag

SEQ ID NO: 32403 - DNA, 804 bp, Artificial Sequence
  derived and/or modified sequence
atgtgggaccagcggctggtgaagctggccctgctgcagcacctgcgggcgttctatggtattaaggtcaagggggtgagagggcagtgtgatcggaggcggcacgaaactgccgcgacagagataggcgggaagattttcggagtgccattcaatgcattaccacactctgctgttccggaatatggacacattccgtcatttctggtcgacgcctgcacgtctttggaggagcatattcacacagaaggcctgttccggaagtccggctccgtgattcgcttgaaagctctgaaaaataaagtcgaccatggagaggggtgcctgtcgagcgctcccccttgtgacatcgccgggctgcttaaacaatttttccgtgaactgccagagccaatcttacccgctgatcttcacgaggctctgttgaaagctcagcagctgggaactgaggagaagaataaggcgatactcctcttgtcttgcctgcttgctgaccacacggtgcacgtgctgcggtatttcttcaattttctgcgtaatgtttctttaagaagcagcgaaaataaaatggattccagcaacttggccgttatcttcgcgccaaacctgctgcaaactagcgaagggcacgagaagatgagctcaaacgctgagaaaaaaggagtctaccagacgctgagttggaagaggtaccagccttgctgggtgctgatggtcagcgttctgctgcaccattggaaggccctgaaaaaggtcaatatgaagttactggtgaatatcagggaaagggaggacaacgtgtag

SEQ ID NO: 32404 - DNA, 804 bp, Artificial Sequence
  derived and/or modified sequence
atgtgggatcagcggctggtaaaactggccttgcttcagcacctgcgggcattttacggaatcaaagtgaagggggtccggggtcagtgtgatcgaagacgccacgaaactgctgctacagagatcggcggtaaaatcttcggagtaccatttaatgccctgccccacagcgcagtgcctgaatatgggcatattcctagctttctggtcgacgcttgcacatcgctggaggagcacatacacaccgaggggcttttcagaaagtccgggtcagtgatccgtttgaaagcactcaaaaacaaagtggaccacggcgaagggtgcctcagctctgccccaccatgcgacatagccggactgctgaagcaatttttcagagagcttccagaacccatactgccagccgatctccacgaagctctgcttaaggcccaacagctgggtacagaggaaaagaataaggccatactactacttagctgcctgttggctgatcataccgtccacgtgctgcgctacttctttaacttcctacgaaatgtctccttgcgaagtagtgaaaataaaatggatagcagcaacttggctgtgatttttgctcctaacttattgcagacaagcgaggggcacgagaagatgtcatccaatgccgagaagaagggcgtctatcaaacactttcttggaagcgttaccagccatgttgggtactaatggtctcagtgctgctgcatcattggaaagcgctcaagaaggtgaacatgaaactgctggtcaatatacgcgaacgggaagataacgtctag

SEQ ID NO: 32405 - DNA, 1012 bp, Artificial Sequence
  derived and/or modified sequence
gggggtcggggccgcagaagtgccagacggggccggaaagcagccgagcggagttcaaatttgagagcgtttggaaattggaagacttggtggcgaacgagggtcaggacctgcatcctgcctcagagttatcgacgtatccggaatgtgggatcagaggctggtgaagttggccctgttgcagcatctgcgggccttctatggtattaaggtgaagggtgtccgtgggcagtgcgatcgcaggagacatgaaacagcagccacggaaatagggggtaaaatatttggagtaccttttaatgcactgccccattctgctgtaccagaatatggacacattccaagctttcttgtcgatgcttgcacatctttagaagaacatattcataccgaagggctttttcggaaatcaggatctgtgattcgcctaaaagcactaaagaataaagtggatcatggtgaaggttgcctatcttctgcacctccttgtgatattgcgggacttcttaagcagttttttagggaactgccagagcccattctcccagctgatttgcatgaagcacttttgaaagctcaacagttaggcacagaggaaaagaataaagctatactgttgctctcctgtcttctggctgaccacacagttcatgtattaagatacttctttaactttctcaggaatgtttctcttagatccagtgagaataagatggatagcagcaatcttgcagtaatatttgcaccaaatcttcttcagacaagtgaaggacatgaaaagatgtcttctaacgcagaaaagaagggcgtgtaccagactttatcctggaaaagataccagccatgttgggtattgatggtctctgtgctactccatcactggaaggctttgaagaaggtgaatatgaaactcctggtgaatataagagaaagagaagacaacgtgtaggagattttgttagtggagcactaaataaatttaaacctaacagaacaccttctattacacctc

SEQ ID NO: 32406 - DNA, 804 bp, Artificial Sequence
  derived and/or modified sequence
atgtgggaccagaggctggtcaaactggccttgctccaacacctccgggctttttatggtataaaggtgaagggcgtccgcggtcagtgcgacaggcgtcgccacgagaccgccgctaccgaaatcgggggaaaaattttcggagtgccctttaacgccttgcctcactccgccgtgcctgagtatgggcatattccctcattcctagtcgatgcatgcaccagcctagaggagcatatccacacagaggggctgttcagaaaaagcgggagtgtgatcaggctcaaggccctgaaaaataaggttgatcatggtgaggggtgcctgtcatccgcaccaccctgtgacattgctggattgctgaaacagtttttccgcgagctgcctgagcctatattacctgcggacctgcatgaggctctgctgaaagcgcagcaactgggcactgaggagaaaaacaaagcaattttgttgctcagttgcctcctagctgatcacaccgtgcatgtgctgcggtacttcttcaacttccttcggaatgtgtctttaagatcctccgagaacaagatggactcttcaaaccttgccgttatctttgcccctaatcttctgcagaccagcgaagggcacgagaagatgtcctctaatgccgagaagaagggagtttaccagaccctgtcctggaaacggtaccagccttgttgggtactcatggtttctgttctgcttcaccactggaaggccttgaagaaggtcaacatgaagttactggtgaatattcgagagcgcgaggacaacgtctag

SEQ ID NO: 32407 - DNA, 2043 bp, Artificial Sequence
  derived and/or modified sequence
ccgggatgtgcaggccgggaggtagaggcaggctgatgggggagggaacgagcagcctgtgagacggggtgacggcggctaccagcccgggcgggcaccgggactggaagagttgcctgagcagccggctggtccggcggccaggctagggcgggggcgagcgcccagttgagcctgctggggctggaggagcgagaagggttctcttcacatttcagagcgaaccagacggacagtaaggtttggaggaagggggatcgttggaagtagcaggaagtggagagaatctggcaataggcgagaaaccgaaagaatcagaaagaagtctatgtgagtagctgaaagcattgggtgaccagaaagaaggtcgctgtaagtgaaggaagagtgaggtgtggctggatcaaagggctaagagaagcgggtctgtgtaagtggatgtgagtgaggatcaaggaaaagccgtggaagtggccgggggtcggggccgcagaagtgccagacggggccggaaagcagccgagcggagttcaaatttgagagcgtttggaaattggaagacttggtggcgaacgagggtcaggacctgcatcctgcctcagagttatcgacgtatccggaatgtgggatcagaggctggtgaagttggccctgttgcagcatctgcgggccttctatggtattaaggtgaagggtgtccgtgggcagtgcgatcgcaggagacatgaaacagcagccacggaaatagggggtaaaatatttggagtaccttttaatgcactgccccattctgctgtaccagaatatggacacattccaagctttcttgtcgatgcttgcacatctttagaagaacatattcataccgaagggctttttcggaaatcaggatctgtgattcgcctaaaagcactaaagaataaagtggatcatggtgaaggttgcctatcttctgcacctccttgtgatattgcgggacttcttaagcagttttttagggaactgccagagcccattctcccagctgatttgcatgaagcacttttgaaagctcaacagttaggcacagaggaaaagaataaagctatactgttgctctcctgtcttctggctgaccacacagttcatgtattaagatacttctttaactttctcaggaatgtttctcttagatccagtgagaataagatggatagcagcaatcttgcagtaatatttgcaccaaatcttcttcagacaagtgaaggacatgaaaagatgtcttctaacgcagaaaagaagggcgtgtaccagactttatcctggaaaagataccagccatgttgggtattgatggtctctgtgctactccatcactggaaggctttgaagaaggtgaatatgaaactcctggtgaatataagagaaagagaagacaacgtgtaggagattttgttagtggagcactaaataaatttaaacctaacagaacaccttctattacacctcaacaagaaagaattgataatgaaacaaccaccatcggttaaatttgatccaaaaatattgcatctaccagcattttcagtggataagttataatttctgaaagaccaagattggaatgactttttgtaacaagtgtgctcgcagatcgactccagtgagaagagctcggggacctcctgagccaagtttaatctcctttgctatttgtgcatggtggctggtcaccaggaggtggccaccaggcttctcctttccccgctgttctaattgctaatccagtatttgcggatagctccaaactgggatatgaccaccattgtatatgcagaccattgactggaacatcatgatctatctgcacatgactgtaaataacaactattggatgtggcacagatggaagctacataaacactctatacaatatggccaattcaccgggctccctgttagtcttgtgagcaattttaaactcttccacgattctttctctgctttggagtgtttcaattaattctccattatattacaatttacatttttattaagccttta

SEQ ID NO: 32408 - protein, 404 aa, Artificial Sequence
  derived and/or modified sequence
MALSLPLGPRLGSEPLNHPPGAPREADIVGCTVCPASGEESTSPEQAQTLGQDSLGPPEHFQGGPRGNEPAAHPPRWSTPSSYEDPAGGKHCEHPISGLEVLEAEQNSLHLCLLGLGRRLQDLEQGLGHWALAQSGMVQLQALQVDLRGAAERVEALLAFGEGLAQRSEPRAWAALEQILRALGAYRDSIFRRLWQLQAQLVSYSLVFEEANTLDQDLEVEGDSDWPGPGGVWGPWAPSSLPTSTELEWDPAGDIGGLGPLGQKTARTLGVPCELCGQRGPQGRGQGLEEADTSHSRQDMLESGLGHQKRLARHQRHSLLRKPQDKKRQASPHLQDVRLEGNPGAPDPASRQPLTFLLILFLLFLLLVGAMFLLPASGGPCCSHARIPRTPYLVLSYVNGLPPV

SEQ ID NO: 32409 - DNA, 1354 bp, Artificial Sequence
  derived and/or modified sequence
ctgcagcctcaggcccgggtgactccagcggaggagctctgggacacccttgtctagggaagaggtcttactggctgccctcacctgactttgtgtccccaggcccccagccatggccctgtccctgcctctgggccctagacttggctcagagcccctcaaccacccaccgggagcacctagagaggcggacattgttggatgcaccgtctgccccgcgtccggagaggagagcacgagcccagagcaggcccagaccctgggacaggactccttgggccctcctgagcacttccagggtgggccaaggggcaatgagcctgccgctcaccccccgagatggtcaacaccctcttcctacgaggacccagctgggggcaaacactgtgagcaccccatttctggcctggaggtactagaggctgagcagaacagcctgcacctgtgcctgctggggctgggccgccggctgcaggacctggagcaaggcctggggcactgggcattggcccagagtgggatggtgcagctgcaggccctccaggtggacctacgaggggcagctgagcgtgtggaggcgctgctagcgtttggtgaggggctggcacagcggagtgagcccagggcctgggcagccctggagcagatcctgcgggccctgggagcttaccgagactccatcttccggcggctctggcagctgcaggcccagctggtcagctacagcctggtgttcgaggaggccaacacgctggaccaggacttggaggtcgagggagactcggactggccaggacctggtggggtctgggggccctgggcacccagtagcctccccacttccacagagttggagtgggatccggcgggggacattgggggccttgggcccttgggacaaaagacagcccggacactaggagtgccctgtgagctgtgtggccagagggggccccagggcaggggacaaggccttgaggaagcagacacctctcactcccgacaggacatgctggagtctggcctcggccaccagaaacgcttagcacgtcaccaaagacactccctgctccggaagcctcaggacaagaagaggcaagcatctcctcatctccaggatgtgaggctggaggggaatccaggggcccccgatcctgcatccaggcagcctctgaccttcctccttatcctcttcctcctcttcctcctcctggtgggtgccatgtttctcctgcccgcgtcaggaggcccctgctgctctcatgcccgaatacccaggacaccctacctggtgctcagctatgtcaatggtcttcccccagtctgatgtgtgtaataaatggtcactgtcaaa

SEQ ID NO: 32410 - DNA, 1215 bp, Artificial Sequence
  derived and/or modified sequence
atggccctgagcctgcccctgggccccagactgggcagcgagcccctgaaccacccccccggcgcccccagagaggccgacatcgtgggctgcaccgtgtgccccgccagcggcgaggagagcaccagccccgagcaggcccagaccctgggccaggacagcctgggcccccccgagcacttccagggcggccccagaggcaacgagcccgccgcccacccccccagatggagcacccccagcagctacgaggaccccgccggcggcaagcactgcgagcaccccatcagcggcctggaggtgctggaggccgagcagaacagcctgcacctgtgcctgctgggcctgggcagaagactgcaggacctggagcagggcctgggccactgggccctggcccagagcggcatggtgcagctgcaggccctgcaggtggacctgagaggcgccgccgagagagtggaggccctgctggccttcggcgagggcctggcccagagaagcgagcccagagcctgggccgccctggagcagatcctgagagccctgggcgcctacagagacagcatcttcagaagactgtggcagctgcaggcccagctggtgagctacagcctggtgttcgaggaggccaacaccctggaccaggacctggaggtggagggcgacagcgactggcccggccccggcggcgtgtggggcccctgggcccccagcagcctgcccaccagcaccgagctggagtgggaccccgccggcgacatcggcggcctgggccccctgggccagaagaccgccagaaccctgggcgtgccctgcgagctgtgcggccagagaggcccccagggcagaggccagggcctggaggaggccgacaccagccacagcagacaggacatgctggagagcggcctgggccaccagaagagactggccagacaccagagacacagcctgctgagaaagccccaggacaagaagagacaggccagcccccacctgcaggacgtgagactggagggcaaccccggcgcccccgaccccgccagcagacagcccctgaccttcctgctgatcctgttcctgctgttcctgctgctggtgggcgccatgttcctgctgcccgccagcggcggcccctgctgcagccacgccagaatccccagaaccccctacctggtgctgagctacgtgaacggcctgccccccgtgtag

SEQ ID NO: 32411 - DNA, 1215 bp, Artificial Sequence
  derived and/or modified sequence
atggccctgtcgctgcctcttgggcccaggctcggtagtgagccacttaaccatccgcctggggcccctagggaagccgacatagtggggtgcaccgtatgccctgcctcaggcgaagaatctaccagtccggaacaagctcagaccctaggtcaggattctctgggaccccccgagcacttccagggggggccccggggaaatgaaccggctgctcacccacctaggtggtccactccaagctcttacgaggacccggcggggggtaagcattgcgaacaccctatctccgggctggaggttctcgaggcagaacagaacagtctgcatttgtgtttacttgggctaggcagacggttgcaggatcttgaacaggggctaggccactgggcattagcacagtccggcatggtccaattacaggctcttcaggttgacctccgtggcgcagccgagcgcgttgaagccttgctagcttttggcgaggggttggctcaaaggtccgagcctcgtgcgtgggccgccctcgagcaaatcctgagggctctcggagcataccgggactctatatttcgacgactgtggcaacttcaagcgcagttggtcagctatagtttggtgttcgaagaggcaaacacattggatcaggacctggaagtagagggggacagtgactggcccgggccagggggagtgtgggggccatgggccccttccagtctgcccacatctacagagttagagtgggaccctgccggagacattggagggttgggcccgctgggacagaagacagctcgaacacttggtgtaccctgcgagctttgtgggcagcggggcccacaggggaggggtcagggcttggaagaggcagatacctcccactcaagacaagatatgttggaatccggcctcggtcaccagaagagactggctaggcatcagagacactcgctgttacggaaacctcaggataagaaacggcaggcttcacctcacctgcaggatgtgagactcgaaggaaacccaggagctccagatcccgcaagccggcaacccctcactttcctgctgattctgtttctgttatttctcctgctcgtgggagccatgtttctcctaccggcgtccgggggtccatgttgcagccacgcacgtataccaagaactccttatctggtgctgagttatgttaatggtctgccccctgtgtag

SEQ ID NO: 32412 - DNA, 1215 bp, Artificial Sequence
  derived and/or modified sequence
atggccctgagcctgcccctgggcccccggctgggcagcgagcccctgaaccaccccccaggggccccccgggaggccgacatcgtgggctgcaccgtgtgcccagccagcggggaggagagcaccagccctgagcaggcccagaccctgggccaggacagcctgggccccccagagcacttccagggcggccccagaggaaatgaacctgctgcccaccccccacgctggagcacccccagcagctatgaggaccctgctgggggcaagcactgtgagcaccccatcagcggcctggaggtgctggaggccgagcagaacagcctgcacctgtgcctgctgggcctgggccggcggctgcaggacctggagcagggcctgggccactgggccctggcccagagcggcatggtgcagctgcaggccctgcaggtggacctgcggggagctgctgagcgggtggaggccctgctggccttcggggagggcctggcccagaggtctgagccccgggcctgggccgccctggagcagatcctgcgggccctgggcgcctacagagacagcatcttccggcggctgtggcagctgcaggcccagctggtgtcctacagcctggtgtttgaggaggccaacaccctggaccaggacctggaggtggagggggacagcgactggccaggccctggaggagtgtggggcccctgggcccccagcagcctgcccaccagcacagagctggagtgggaccctgctggggacattggaggcctgggccccctgggccagaagacagcccggaccctgggcgtgccctgtgagctgtgtggccagaggggcccccagggccggggccagggcctggaggaggccgacaccagccacagccggcaggacatgctggagagcggcctgggccaccagaagaggctggcccggcaccagaggcacagcctgctgaggaagccccaggacaagaagaggcaggccagcccccacctgcaggatgtgcggctggagggcaaccctggggccccagaccctgccagccggcagcccctgaccttcctgctgatcctcttcctgctcttcctgctgctggtgggcgccatgttcctgctgcctgccagcggcggcccctgctgcagccacgcccgcatccccaggaccccctacctggtgctgtcctatgtgaatggcctgccccctgtgtag

SEQ ID NO: 32413 - DNA, 1215 bp, Artificial Sequence
  derived and/or modified sequence
atggccctgagcctgcccctgggcccccggctgggcagcgagcccctgaaccatcctcctggggcccctagggaagcagacattgttggatgcaccgtttgtcctgccagcggggaagaaagtacgtccccggagcaggcacaaacactagggcaggacagtttggggcctcccgaacactttcagggtggcccgaggggcaatgagcctgctgctcacccacctagatggagtacccctagctcctacgaggaccccgccggcggcaagcattgcgaacaccccatctctggattagaggtgctggaagctgagcagaacagcctccacctgtgtctattgggcctcggtcgtagattgcaagatcttgaacaggggctcggacactgggcccttgcacaaagcggcatggtgcagctgcaggccctacaagtggatctgagaggggctgctgagcgggttgaggcgctgctggcctttggtgagggactcgcccagcgttcagagcctcgggcttgggccgcactcgaacagattttacgggcactgggtgcttatagagacagtatctttaggaggctctggcagctgcaagcccagctcgttagttactccctagtgttcgaagaagctaacaccctggatcaagacctggaggtagagggcgactcggactggccgggccctggaggcgtgtggggcccgtgggcccccagcagcctgcccacgtctaccgagctggagtgggaccctgccggggatattggggggctgggacctctgggacagaaaactgcccggaccttgggtgtaccctgtgaactctgtggtcagcgcgggcctcaagggcgggggcagggcctggaagaggcagatacatctcactctcggcaggatatgctggagtcgggcctgggccatcagaaacgccttgcccgacaccaaaggcatagcctcctgagaaagccccaggacaagaaacggcaggcttctccacatttgcaagacgtgaggcttgagggcaatcctggcgctcctgatccagccagtcgtcagccattgacattcctccttattctgttcttgctgtttctgctgcttgtgggagccatgtttctccttccagcaagtggaggtccatgctgctcgcacgctcgaatccctcgcaccccctacctggtgctcagctacgtgaatggcttgccgcccgtttag

SEQ ID NO: 32414 - DNA, 1215 bp, Artificial Sequence
  derived and/or modified sequence
atggcattatccctccccctgggtcctagactagggtctgagccgctcaatcacccccctggcgctccaagggaagcggatattgtaggctgcactgtatgtcccgcaagcggcgaggagtcaacatccccagaacaggcgcagactctgggacaagactcgctcggtcccccagagcactttcagggcggacctcggggaaatgaacccgcagcacacccgccacggtggtccaccccttcaagctacgaggaccccgctggtgggaagcattgcgaacatcctatcagtggcctagaggtgctcgaggcagaacagaactctcttcacctctgcctcctgggactggggaggagactccaagatctcgagcaagggctgggtcactgggctctggctcagtctggcatggtgcagctgcaggccctgcaggttgatctgagaggcgcagctgagagagtggaggccctcctggcgtttggggagggccttgctcagcggagtgaacccagggcatgggccgctcttgaacaaattcttagggcgctaggtgcctatcgtgacagtatctttagaagactatggcagctccaagcacagctggtgtcttacagcttggtatttgaagaagccaatactttagatcaggacttggaggtagaaggcgactctgactggcctggccctggtggggtctgggggccttgggccccaagcagtctgccaaccagtaccgagctggagtgggaccccgctggcgatatcggaggactgggaccgctgggccagaaaacagccagaaccttgggagtgccatgtgagttatgcggccagcggggtccgcaggggagaggccagggcctggaggaagctgatacctcccacagccgtcaagatatgctagaaagcggtctggggcatcagaaacgcctggcccgtcatcagcgccacagcctgctcaggaagccgcaggataaaaagaggcaagccagtccacacctgcaggacgtccgactggaaggtaatcctggtgcccctgatcctgcctcccgtcagcccctgacgtttcttctcatcctgttcctcctgtttcttctcttggtgggagcgatgtttctactcccggcttcaggcggaccctgctgctcccatgctagaatcccgaggaccccctacctcgtccttagctacgtaaacggattgccccctgtatag

SEQ ID NO: 32415 - protein, 760 aa, Artificial Sequence
  derived and/or modified sequence
MMEERAAAAVAAAASSCRPLGSGAGPGPTGAAPVSAPAPGPGPAGKGGGGGGSPGPTAGPEPLSLPGILHFIQHEWARFEAEKARWEAERAELQAQVAFLQGERKGQENLKTDLVRRIKMLEYALKQERAKYHKLKFGTDLNQGEKKADVSEQVSNGPVESVTLENSPLVWKEGRQLLRQYLEEVGYTDTILDMRSKRVRSLLGRSLELNGAVEPSEGAPRAPPGPAGLSGGESLLVKQIEEQIKRNAAGKDGKERLGGSVLGQIPFLQNCEDEDSDEDDELDSVQHKKQRVKLPSKALVPEMEDEDEEDDSEDAINEFDFLGSGEDGEGAPDPRRCTVDGSPHELESRRVKLQGILADLRDVDGLPPKVTGPPPGTPQPRPHEGSFGFSSDVFIMDTIGGGEVSLGDLADLTVTNDNDLSCDLSDSKDAFKKTWNPKFTLRSHYDGIRSLAFHHSQSALLTASEDGTLKLWNLQKAVTAKKNAALDVEPIHAFRAHRGPVLAVAMGSNSEYCYSGGADACIHSWKIPDLSMDPYDGYDPSVLSHVLEGHGDAVWGLAFSPTSQRLASCSADGTVRIWDPSSSSPACLCTFPTASEHGVPTSVAFTSTEPAHIVASFRSGDTVLYDMEVGSALLTLESRGSSGPTQINQVVSHPNQPLTITAHDDRGIRFLDNRTGKPVHSMVAHLDAVTCLAVDPNGAFLMSGSHDCSLRLWSLDNKTCVQEITAHRKKHEEAIHAVACHPSKALIASAGADALAKVFV

SEQ ID NO: 32416 - DNA, 2283 bp, Artificial Sequence
  derived and/or modified sequence
atgatggaggagagagccgccgccgccgtggccgccgccgccagcagctgcagacccctgggcagcggcgccggccccggccccaccggcgccgcccccgtgagcgcccccgcccccggccccggccccgccggcaagggcggcggcggcggcggcagccccggccccaccgccggccccgagcccctgagcctgcccggcatcctgcacttcatccagcacgagtgggccagattcgaggccgagaaggccagatgggaggccgagagagccgagctgcaggcccaggtggccttcctgcagggcgagagaaagggccaggagaacctgaagaccgacctggtgagaagaatcaagatgctggagtacgccctgaagcaggagagagccaagtaccacaagctgaagttcggcaccgacctgaaccagggcgagaagaaggccgacgtgagcgagcaggtgagcaacggccccgtggagagcgtgaccctggagaacagccccctggtgtggaaggagggcagacagctgctgagacagtacctggaggaggtgggctacaccgacaccatcctggacatgagaagcaagagagtgagaagcctgctgggcagaagcctggagctgaacggcgccgtggagcccagcgagggcgcccccagagccccccccggccccgccggcctgagcggcggcgagagcctgctggtgaagcagatcgaggagcagatcaagagaaacgccgccggcaaggacggcaaggagagactgggcggcagcgtgctgggccagatccccttcctgcagaactgcgaggacgaggacagcgacgaggacgacgagctggacagcgtgcagcacaagaagcagagagtgaagctgcccagcaaggccctggtgcccgagatggaggacgaggacgaggaggacgacagcgaggacgccatcaacgagttcgacttcctgggcagcggcgaggacggcgagggcgcccccgaccccagaagatgcaccgtggacggcagcccccacgagctggagagcagaagagtgaagctgcagggcatcctggccgacctgagagacgtggacggcctgccccccaaggtgaccggccccccccccggcaccccccagcccagaccccacgagggcagcttcggcttcagcagcgacgtgttcatcatggacaccatcggcggcggcgaggtgagcctgggcgacctggccgacctgaccgtgaccaacgacaacgacctgagctgcgacctgagcgacagcaaggacgccttcaagaagacctggaaccccaagttcaccctgagaagccactacgacggcatcagaagcctggccttccaccacagccagagcgccctgctgaccgccagcgaggacggcaccctgaagctgtggaacctgcagaaggccgtgaccgccaagaagaacgccgccctggacgtggagcccatccacgccttcagagcccacagaggccccgtgctggccgtggccatgggcagcaacagcgagtactgctacagcggcggcgccgacgcctgcatccacagctggaagatccccgacctgagcatggacccctacgacggctacgaccccagcgtgctgagccacgtgctggagggccacggcgacgccgtgtggggcctggccttcagccccaccagccagagactggccagctgcagcgccgacggcaccgtgagaatctgggaccccagcagcagcagccccgcctgcctgtgcaccttccccaccgccagcgagcacggcgtgcccaccagcgtggccttcaccagcaccgagcccgcccacatcgtggccagcttcagaagcggcgacaccgtgctgtacgacatggaggtgggcagcgccctgctgaccctggagagcagaggcagcagcggccccacccagatcaaccaggtggtgagccaccccaaccagcccctgaccatcaccgcccacgacgacagaggcatcagattcctggacaacagaaccggcaagcccgtgcacagcatggtggcccacctggacgccgtgacctgcctggccgtggaccccaacggcgccttcctgatgagcggcagccacgactgcagcctgagactgtggagcctggacaacaagacctgcgtgcaggagatcaccgcccacagaaagaagcacgaggaggccatccacgccgtggcctgccaccccagcaaggccctgatcgccagcgccggcgccgacgccctggccaaggtgttcgtgtag

SEQ ID NO: 32417 - DNA, 2283 bp, Artificial Sequence
  derived and/or modified sequence
atgatggaagaacgcgcggccgccgccgtggccgcagctgccagcagttgcagaccgctaggcagcggcgccgggcctgggccaacgggggccgctcctgtgagcgcccccgccccgggcccaggaccagctgggaagggcgggggcggtggggggtcacctggcccaactgccggacctgagcctctgtccctgccagggatcctgcactttattcagcacgaatgggccaggtttgaagccgagaaggcccgatgggaggccgaacgcgctgagttgcaggcccaagttgccttcttgcagggggaacgcaaaggccaggagaacttaaaaaccgacctggtaaggcgcatcaagatgctggaatacgccttgaaacaagaaagagccaagtatcacaagctcaagttcggtaccgacctgaatcagggggagaaaaaagcagatgtgtctgagcaggtgtcaaacggccccgttgaatccgtcacgcttgagaattccccacttgtttggaaagaagggcgacagctgctcaggcagtacttggaggaggtagggtatactgacactatcttggatatgaggagtaaaagggtccgatctctcctgggaaggtccttggagctgaacggagccgtcgaaccgtccgagggcgccccacgggctccacccgggcccgccggtctctccgggggtgagtccttattagttaaacagatcgaggaacagattaaaaggaatgctgcagggaaagatgggaaagagcggcttggtgggtcggttctgggccagatccccttcctgcaaaattgcgaggacgaagatagtgacgaggacgatgagctggactccgtacaacacaagaaacagcgcgtgaaactcccaagtaaggctcttgttccggagatggaggatgaggacgaggaggatgattctgaggatgccatcaacgaattcgactttctggggtcaggagaggatggtgagggcgctccggatccacgccgctgcactgtggacgggtcccctcacgaactcgagagtcgccgggtcaagcttcaaggcatattggcggatctacgcgatgtagatggactgccccctaaagtgactggtcctcctcctgggacaccacagccccgcccacatgaaggctcttttggttttagtagcgacgtgtttataatggataccatcggtgggggagaggtatccttaggcgatctggccgatctcacagtaacgaatgacaatgacttaagttgcgacctgagcgacagcaaagatgccttcaagaaaacctggaacccaaaattcaccctcaggtctcattacgatgggatcaggtcccttgctttccaccattctcagagcgcccttctgacagcttccgaggacggtacgttgaaactgtggaacctccagaaggccgtcacagcaaaaaagaacgctgcattggatgtggaacctatacacgccttccgcgctcatcggggacccgtactagctgtagccatgggaagcaattctgagtactgttattcaggaggggctgacgcctgtatccacagctggaagatccctgatctgtccatggatccctatgacggctacgatccctcagtcctgtcccatgtgctggaaggccacggcgatgccgtgtggggattggcatttagtcccacatcccagcgcctggcatcttgttctgcggacggaactgtacgtatatgggacccgagctctagcagcccagcctgtctttgcacgttccctacagcatccgagcacggcgttcccactagcgtcgcctttacgagcaccgagcccgcccacatagtagcctccttcagaagcggagacaccgtgctatatgacatggaagtgggatccgccttattgacactggagtctcgaggcagcagcgggcccactcagataaaccaagtcgtttctcacccaaaccagcctctgacaatcacagcccacgacgacaggggaatacggtttctcgacaaccggactggaaagcctgttcacagtatggttgctcaccttgatgccgtaacctgcctcgccgtggatccaaatggtgcgttcctgatgtctggctctcacgactgcagcttgcggctttggtcactggacaataaaacctgtgtgcaagaaattacggctcatcgcaagaaacatgaagaagccattcatgcggtggcctgccacccctctaaggcactcattgcatctgctggcgccgacgcactagcaaaggtttttgtttag

SEQ ID NO: 32418 - DNA, 2283 bp, Artificial Sequence
  derived and/or modified sequence
atgatggaggagagagctgctgctgctgtggccgctgctgccagcagctgccggcccctgggcagcggggccggccctggccccactggagctgcccctgtgtctgccccagcccctggccctggccctgctgggaagggcggcggcggcggcggcagccctggccccacagctggccctgagcccctgagcctgcccggcatcctgcacttcatccagcacgagtgggccaggtttgaagctgagaaggcccgctgggaggccgagagagctgagctgcaggcccaggtggccttcctgcagggcgagaggaagggccaggagaacctgaagacagacctggtgcggcgcatcaagatgctggagtatgccctgaagcaggagcgggccaagtaccacaagctgaagtttggaacagacctgaaccagggcgagaagaaggcagatgtgtctgagcaggtgtccaatggacctgtggagagcgtgaccctggagaacagccccctggtgtggaaggagggccggcagctgctgcggcagtacctggaggaggtgggctacacagacaccatcctggacatgaggagcaagagggtgcgcagcctgctgggccgcagcctggagctgaatggagctgtggagcccagcgagggcgccccccgggcccctcctggccctgctggcctgagcggcggggagagcctgctggtgaagcagatcgaggagcagatcaagagaaatgctgctgggaaggatggcaaggagcggctgggcggctctgtgctgggccagatccccttcctgcagaactgtgaagatgaggacagtgatgaagatgatgagctggacagcgtgcagcacaagaagcagagggtgaagctgcccagcaaggccctggtgcctgagatggaggatgaagatgaagaagatgacagtgaagatgccatcaatgaatttgacttcctgggcagcggggaggatggagagggcgccccagacccccggcgctgcaccgtggatggcagcccccatgagctggagagcagaagagtgaagctgcagggcatcctggccgacctgagagatgtggatggcctgccccccaaggtgactggacctcctcctggcaccccccagccccggccccatgagggcagctttggcttcagcagtgatgtgttcatcatggacaccatcggcggcggggaggtgtccctgggggacctggccgacctgactgtgaccaatgacaatgacctgagctgtgacctgagtgacagcaaggatgccttcaagaagacctggaaccccaagttcaccctgcggagccactatgatggcatccgcagcctggccttccaccacagccagagcgccctgctgacagcctctgaagatggcaccctgaagctgtggaacctgcagaaggctgtgacagccaagaagaatgctgccctggatgtggagcccatccacgccttccgggcccaccggggccctgtgctggccgtggccatgggcagcaacagcgagtactgctacagcggcggcgcagatgcctgcatccacagctggaagatcccagacctgtccatggacccctatgatggctatgaccccagcgtgctgagccacgtgctggagggccatggagatgctgtgtggggcctggccttcagccccaccagccagaggctggccagctgcagcgcagatggcaccgtgcgcatctgggaccccagcagcagcagccctgcctgcctgtgcaccttccccacagccagcgagcacggcgtgcccacctctgtggccttcaccagcacagagcccgcccacatcgtggccagcttccgcagcggggacacagtgctgtatgacatggaggtgggcagcgccctgctgaccctggagagccggggcagcagcggccccacccagatcaaccaggtggtgagccaccccaaccagcccctgaccatcacagcccatgatgaccggggcatccgcttcctggacaacagaacaggcaagcctgtgcacagcatggtggcccacctggatgctgtgacctgcctggccgtggaccccaatggagccttcctgatgagcggcagccatgactgcagcctgcggctgtggagcctggacaacaagacctgtgtgcaggagatcacagcccacaggaagaagcatgaggaggccatccatgctgtggcctgccaccccagcaaggccctgattgccagcgctggagcagatgccctggccaaggtgtttgtgtag

SEQ ID NO: 32419 - DNA, 3208 bp, Artificial Sequence
  derived and/or modified sequence
acagcgggcgcgcaggccggccccggggcctccatgatggaggagcgagcggccgccgcggtcgccgccgccgcctcctcctgccgtccgctcggctcaggcgcgggccctggccccactggggcggccccggtctccgcccctgcccccgggccgggcccggcaggtaagggaggcggcggcggaggcagccccgggcccacggcgggcccggagcccctgagcctgccggggatcctgcactttatccagcacgagtgggcgcgcttcgaagccgagaaagcccgctgggaggccgagcgcgccgagttacaggctcaggtggccttccttcagggagagaggaaagggcaggagaatctaaagacggacctggtgcggcggatcaagatgctagagtatgcgctgaagcaggaaagggccaaatatcataaactgaagtttgggacagacctgaaccagggggagaagaaagcagatgtgtcagaacaagtctccaatggccccgtggaatcggtcaccctggagaacagcccgttggtgtggaaggaggggcggcagcttctccgacagtacctggaagaggtgggctacacagacaccatcctcgacatgcggtccaagcgcgtccgttccctgctgggccgctcgctggagctcaacggggcagtggagccgagtgaaggggcccccagggctccaccaggccctgcagggctcagtggtggggagtcgctgctggtgaaacagatcgaggagcagataaagaggaacgcggcaggcaaagatggcaaagagcgcttgggcggctcagtgctggggcagatccccttcctgcagaactgcgaggacgaagacagcgacgaggacgatgagctggacagcgtgcagcacaagaagcagcgtgtgaagctcccatccaaggctctggtgcccgaaatggaagacgaggatgaggaagacgactctgaggatgctatcaatgagtttgatttcctgggctcaggagaggatggggaaggggctccagaccctcggcggtgcactgtggatgggagcccccatgagctggaaagccgtcgggtcaaactccaaggcattctggctgacctgcgggatgtggatgggctgcccccaaaagtgactggcccgcctcctggcacaccccagccccggccacatgaaggttcctttggcttctcctcagacgtcttcatcatggacactatcgggggcggggaggtgagcctgggggacttggcagatctcaccgtcaccaacgacaacgacctcagctgcgatctgtctgacagcaaagatgcttttaagaagacgtggaaccccaagttcaccctgcgctcgcactacgacggcattcgttccctggccttccaccacagccagtcggctctgctcaccgcctccgaggacggcacgctcaagctctggaacctgcagaaggcggtcacggccaagaagaatgcggcgctagatgtggaacctatacatgctttccgggctcacaggggcccagtgttggctgtggctatgggcagcaacagtgaatactgctacagtggcggggcagatgcctgcatccatagttggaagattccagacctcagcatggatccctatgatggctacgacccaagcgtgctgagccacgtcctggagggccacggggacgccgtgtggggcctggccttcagtcccacctcccagcgcctggcctcctgttctgctgatggcaccgtccgcatctgggaccccagcagcagcagcccggcctgcctctgcaccttccccacagccagcgagcacggggtccccacctcagtggccttcaccagcaccgagcctgcccacatcgtggcctccttccgctctggcgacaccgtcttgtatgacatggaggttggcagtgccctcctcacgctggagtcccggggcagcagcggtccaacccagatcaaccaagtggtgagtcatccaaaccagcctctcaccatcaccgcccacgacgacaggggcatccgcttcctggacaatcggacaggtaagccggtgcactccatggttgcacacctggacgcagtcacctgcctagccgtggaccccaacggcgcattcctgatgtcaggaagccatgactgctccctgcgtctctggagcctggacaacaaaacgtgcgtgcaggagatcacggcccaccgcaagaagcacgaggaggccatccacgctgttgcctgccaccccagcaaggccctcattgccagtgctggcgctgatgccctggccaaggtcttcgtatgatgcccacctggccctgccctggccgccacgctggctggggtgtagggccgggcaggtggggctgaggggactcccagcctcgctggaggtgcagaggcctggcctctgtctgtttgccatggagcctggtggtgctaacggccctttccccaggaatccctccccaacggctgccttccccaagcatccagcctggggatgggcccctttcaggaatcacccccgaggatggcctcggggtttccccctgtgccctgacagccgctcctggtatcagagctgctttccagagggcagcacagccagggccgggtgtctttagggatcagtttttccaagactccagaaggtgccaggttctccccttgagctcctgctcccccatcccccatcctcccagacctgggcaggagctgtgctgggagaaagggtggcagccgggagcctcagagctgagccccggcctggctgcccctcccctccggccctctccactgctttccagacactaaccaaggcttccaggccagggattgcccaacactcctagggcagccctcccagcgccccatggggtcgcccatgggtagagacggctttcttgtgcccctccctggggcatggagggtggagtgggcctcgggtccccctgaactccctgtatatctgtataaataacgggattttcatggcgccgccccacccgcattatcactgtgtgatggtctcagtcagtctcctccctgtctccactctttccctctatttatttcactctcttgtttggttctaccctgcaccctcggtccccttccaggttcctgtttataagccccaacccctctgtccccatcttgtatgtgaaaacttgtctcaataaaccctttggagt

SEQ ID NO: 32420 - DNA, 2283 bp, Artificial Sequence
  derived and/or modified sequence
atgatggaggagcgggccgccgccgccgtggccgccgccgccagctcatgtcggccgctcggcagtggagccggacctggtccaaccggagccgcccccgtgagtgccccagcaccgggccctggcccggctggcaaaggaggcggcggaggaggctcccccggcccgactgccggcccagagccactatctctgcccggcattctgcatttcatccaacatgaatgggctaggttcgaggcggaaaaggcgaggtgggaagccgaaagggcagagctccaggcccaagtagctttcctccagggggagcgcaaagggcaggagaacctgaagacggatctcgtacgtcgcattaaaatgctggaatacgcattgaagcaggaaagagcgaagtatcataaactgaagttcggtacagacctcaatcaaggggaaaagaaagcagacgtaagtgagcaagtgtctaacggaccagtggaaagtgtaacactggaaaacagccctttagtgtggaaggagggaaggcagttactgaggcagtacctcgaggaggtcggatacacagacacaattctggacatgcggtcaaagagggtgcgcagtttgctgggacgatcactggagctgaatggggcagtcgaaccctctgaaggagcaccccgggcaccacctggacccgccggtttgtctggtggcgagtctttgttagtaaaacagatcgaggaacagatcaaacgcaacgctgcaggtaaagatggcaaggagcgcctcgggggatcagtcctgggtcagatcccttttctccaaaattgtgaggacgaagactccgacgaggacgacgaacttgatagtgtccagcacaagaagcagcgggtgaagctaccctctaaggccttagttccggagatggaggatgaggacgaagaggatgactccgaggacgccatcaacgagttcgactttctgggcagcggtgaggatggagagggggccccggatccgaggagatgtaccgttgacggttctcctcatgagctggaaagcagacgggtgaaattacagggaattctggccgacctgcgggatgtggatggactgccaccgaaggttacaggacctccaccaggcacccctcagcccaggccccatgaagggagcttcggcttctcttcagatgtgttcattatggatactattggcggaggcgaggtgtcccttggtgaccttgctgatctaactgtgactaacgataacgacctgtcctgcgatctgtctgacagtaaagacgccttcaagaaaacttggaatcccaagtttactctgcggtcgcattatgacgggattcgctctctggcatttcatcactctcagtcggcccttctgaccgcgagtgaggatggcacactcaaactgtggaatctccagaaggctgtgacagctaaaaaaaacgcagccctcgatgtggagccaatccacgctttcagggcccaccgaggacctgtcctggcagtggccatgggttctaattctgaatactgctactctggcggggccgacgcttgtattcactcttggaagataccagacctgagcatggatccgtacgacggatacgaccccagcgtcctgagtcatgtgttggagggtcacggcgatgcagtgtggggtctggctttctcacctacctcgcagaggctggcctcctgctccgccgacggaaccgtgagaatctgggacccatcttcttcttcaccagcctgcttgtgtacgttccctactgccagtgagcacggcgtacctacttccgttgcgtttacttccaccgaacctgcacatatcgtcgccagtttccggtcgggtgacacggtgctgtacgatatggaagtgggatccgcgctgctcaccttggagtcacgggggagttcaggccccactcagattaatcaggtcgtgtcccaccccaatcagcctttgacaatcaccgcacacgacgatcgcggcatcagattcctggacaacagaactggcaagcccgtgcatagcatggtggcacacctcgacgccgtgacctgcttagcagtagatccaaatggggcctttcttatgtccggcagccatgactgcagccttcgtttatggagtctcgacaacaaaacatgcgtccaggagatcactgcacaccgcaaaaagcacgaagaggccatccacgctgttgcatgtcatccgtctaaagcactcatcgcatccgccggcgccgatgcactcgccaaagtattcgtgtag

SEQ ID NO: 32421 - DNA, 2283 bp, Artificial Sequence
  derived and/or modified sequence
atgatggaagagagagcagctgccgcagtcgctgccgcagcctcatcttgcagacctctcggcagcggtgcaggaccaggaccaacgggtgccgctcctgtgtccgccccagcgccaggccctggacccgctggtaaaggagggggaggtggcggttcccctgggccaaccgcaggccctgaacccttgagccttcccggaatcttacatttcatacagcacgagtgggcacgtttcgaggctgaaaaggccaggtgggaggccgagcgggcagaactccaggctcaggtcgcatttctccagggggagcgtaaaggccaagaaaacctcaagaccgacctggttcgacggattaagatgctcgaatacgcgttgaagcaggagcgcgctaaataccacaaactgaagtttgggactgacctgaatcagggcgagaaaaaagcggatgtgtccgagcaggtgtctaacggcccagtagagagcgtaactctggagaattctcccttagtctggaaagaaggtaggcagctactgcgacaatacctcgaagaggtgggctatacagatactattttggacatgagatctaagagagtgcgctctcttctgggtagatctctcgagctgaacggcgctgtggagccaagcgaaggagcccctcgggctcccccagggccagctgggctcagtgggggtgagagccttctcgtcaaacagattgaggagcagatcaagaggaacgcagccggaaaggatggaaaggaacgcctgggcggtagcgtacttggccagattccattcctgcagaattgtgaagacgaggattcagacgaagacgatgaactggacagcgtgcagcacaaaaaacagcgggttaaactaccctccaaggccctagtgcccgaaatggaggatgaggacgaggaagatgacagcgaagacgccattaatgaattcgactttctaggctccggcgaggatggcgaaggcgcacctgacccaaggaggtgcacggtggatggctcaccccatgagttggagagccgcagagtgaagctccagggaatactggccgatcttcgggatgttgacggtcttcctcctaaagtgactggtccacctcccggaacaccccaaccaaggccccacgagggatccttcggattctccagtgatgtattcataatggatacgatcggcggtggtgaggtcagcctgggcgatcttgccgacctgacggttaccaatgacaatgacctgagctgtgatctttccgattctaaagacgccttcaagaagacctggaatcctaaatttacattaaggagccactatgacgggatccgatcactggcattccatcactcccagtcagcactgctgacagcgagcgaggatgggactctcaaactttggaacctccagaaggcagtgacagctaaaaagaatgccgcactcgatgtagagcccattcacgcattcagagcgcaccggggtccagtactggctgtggccatggggagcaattccgagtattgttatagtggaggtgccgacgcgtgcatccatagttggaagattccagacctctccatggacccatacgatggctatgatccctccgtcttgtcccatgttctggaaggtcacggcgacgccgtctggggtcttgccttctctccgacctctcagaggctggcctcatgttcagccgacgggaccgtgagaatttgggatccgtcatcctcgtcccctgcctgcttgtgcactttccccaccgcctctgaacatggcgtgcctaccagtgtggccttcacctctactgagcccgctcacatcgtggcatctttccgctccggtgataccgtgctgtacgatatggaagtgggcagtgctctactcaccctcgagagccgcggaagctcaggccctacccagatcaatcaagtcgtgagtcacccaaatcagccgttgaccatcactgcgcacgacgatcgtggtatcagatttctcgacaaccgcacaggtaagcctgtgcatagcatggtggcacacctggacgcagtcacttgcctggccgtcgaccctaatggagcttttctgatgtctggatcgcacgactgctcgcttcgtctgtggtccctagataacaaaacctgcgttcaggaaattacagcacacagaaaaaaacacgaagaggccatccacgctgtagcatgccatccctccaaagctttgatcgcctcagcgggagcggacgcgttggctaaggtgtttgtttag

SEQ ID NO: 32422 - DNA, 1551 bp, Artificial Sequence
  derived and/or modified sequence
aacctggccggcaatcagagaggatggggccactgctggtcgccctttctctcagagtaaaagtaattgtccaggagagtggtgtttgggtgtggaagggacgaagtctggctctgtcgcccaggctggagtgcagtggcacgatcttggcccactgcaatctccacttcccaggttcaagcgattctcctgcctcagcctcccgagtagctgggactacaggctcaggtggccttccttcagggagagaggaaagggcaggagaatctaaagacggacctggtgcggcggatcaagatgctagagtatgcgctgaagcaggaaagggccaaatatcataaactgaagtttgggacagacctgaaccagggggagaagaaagcagatgtgtcagaacaagtctccaatggccccgtggaatcggtcaccctggagaacagcccgttggtgtggaaggaggggcggcagcttctccgacagtacctggaagaggtgggctacacagacaccatcctcgacatgcggtccaagcgcgtccgttccctgctgggccgctcgctggagctcaacggggcagtggagccgagtgaaggggcccccagggctccaccaggccctgcagggctcagtggtggggagtcgctgctggtgaaacagatcgaggagcagataaagaggaacgcggcaggcaaagatggcaaagagcgcttgggcggctcagtgctggggcagatccccttcctgcagaactgcgaggacgaagacagcgacgaggacgatgagctggacagcgtgcagcacaagaagcagcgtgtgaagctcccatccaaggctctggtgcccgaaatggaagacgaggatgaggaagacgactctgaggatgctatcaatgagtttgatttcctgggctcaggagaggatggggaaggggctccagaccctcggcggtgcactgtggatgggagcccccatgagctggggccagagcttcacagccccacagagtggcagggggccctcagtgtggggaaggcgtcacctatgccagactgggttggaactgctgggtgactccggccctatgcctcgaccctgcagaaagccgtcgggtcaaactccaaggcattctggctgacctgcgggatgtggatgggctgcccccaaaagtgactggcccgcctcctggcacaccccagccccggccacatgaaggttcctttggcttctcctcagacgtcttcatcatggacactatcgggggcggggaggtgagcctgggggacttggcagatctcaccgtcaccaacgacaacgacctcagctgcgatctgtctgacagcaaagatgcttttaagaagacgtggaaccccaagttcaccctgcgctcgcactacgacggcattcgttccctggccttccaccacagccagtcggctctgctcaccgcctccgaggacggcacgctcaagctctggaacctgcagaaggcggtcacggccaagaagaatgcggcgctagatgtggaacctatacatgctttccgggctcaca

SEQ ID NO: 32423 - protein, 461 aa, Artificial Sequence
  derived and/or modified sequence
MEESHFNSNPYFWPSIPTVSGQIENTMFINKMKDQLLPEKGCGLAPPHYPTLLTVPASVSLPSGISMDTESKSDQLTPHSQASVTQNITVVPVPSTGLMTAALQVVPDLSKKVASTLTEEGGGGGGGGGSVAPKPPRGRKKKRMLESGLPEMNDPYVLSPEDDDDHQKDGKTYRCRMCSLTFYSKSEMQIHSKSHTETKPHKCPHCSKTFANSSYLAQHIRIHSGAKPYSCNFCEKSFRQLSHLQQHTRIHTGDRPYKCAHPGCEKAFTQLSNLQSHRRQHNKDKPFKCHNCHRAYTDAASLEVHLSTHTVKHAKVYTCTICSRAYTSETYLMKHMRKHNPPDLQQQVQAAAAAAAVAQAQAQAQAQAQAQAQAQAQAQASQASQQQQQQQQQQQQQQQQPPPHFQSPGAAPQGGGGGDSNPNPPPQCSFDLTPYKTAEHHKDICLTVTTSTIQVEHLASS

SEQ ID NO: 32424 - DNA, 1386 bp, Artificial Sequence
  derived and/or modified sequence
atggaggagagccacttcaacagcaacccctacttctggcccagcatccccaccgtgagcggccagatcgagaacaccatgttcatcaacaagatgaaggaccagctgctgcccgagaagggctgcggcctggcccccccccactaccccaccctgctgaccgtgcccgccagcgtgagcctgcccagcggcatcagcatggacaccgagagcaagagcgaccagctgaccccccacagccaggccagcgtgacccagaacatcaccgtggtgcccgtgcccagcaccggcctgatgaccgccgccctgcaggtggtgcccgacctgagcaagaaggtggccagcaccctgaccgaggagggcggcggcggcggcggcggcggcggcagcgtggcccccaagccccccagaggcagaaagaagaagagaatgctggagagcggcctgcccgagatgaacgacccctacgtgctgagccccgaggacgacgacgaccaccagaaggacggcaagacctacagatgcagaatgtgcagcctgaccttctacagcaagagcgagatgcagatccacagcaagagccacaccgagaccaagccccacaagtgcccccactgcagcaagaccttcgccaacagcagctacctggcccagcacatcagaatccacagcggcgccaagccctacagctgcaacttctgcgagaagagcttcagacagctgagccacctgcagcagcacaccagaatccacaccggcgacagaccctacaagtgcgcccaccccggctgcgagaaggccttcacccagctgagcaacctgcagagccacagaagacagcacaacaaggacaagcccttcaagtgccacaactgccacagagcctacaccgacgccgccagcctggaggtgcacctgagcacccacaccgtgaagcacgccaaggtgtacacctgcaccatctgcagcagagcctacaccagcgagacctacctgatgaagcacatgagaaagcacaacccccccgacctgcagcagcaggtgcaggccgccgccgccgccgccgccgtggcccaggcccaggcccaggcccaggcccaggcccaggcccaggcccaggcccaggcccaggcccaggccagccaggccagccagcagcagcagcagcagcagcagcagcagcagcagcagcagcagcagccccccccccacttccagagccccggcgccgccccccagggcggcggcggcggcgacagcaaccccaacccccccccccagtgcagcttcgacctgaccccctacaagaccgccgagcaccacaaggacatctgcctgaccgtgaccaccagcaccatccaggtggagcacctggccagcagctag

SEQ ID NO: 32425 - DNA, 1386 bp, Artificial Sequence
  derived and/or modified sequence
atggaggagtcacacttcaactcaaacccttatttttggcccagcatccccacggtttccggtcagattgagaataccatgttcattaacaagatgaaggaccagctgctacctgaaaaaggctgtggactggccccaccccactaccctactctcctgactgtgcctgcctctgtcagcctgccatcagggatctccatggataccgagtccaaatcggatcagttaactccacatagccaagcatcagtgacacagaacattactgtggtaccagtgccatctacaggactgatgactgccgctctccaagtggttcccgacctatctaaaaaagtggcttcaaccctgaccgaggaaggtggcggaggcggcggaggtggcggctccgtggcgcctaaaccaccacgcggaagaaagaaaaagcgaatgctggagtctgggctccctgaaatgaacgatccctacgtgctgtcccctgaagacgacgacgaccaccaaaaggacgggaagacctacagatgtaggatgtgttccctgactttttacagcaaatcagagatgcaaatccattcaaagagtcacacggagactaagcctcataaatgcccccactgctcaaaaactttcgccaatagcagctatctggctcaacatatccggatacactctggagcaaaaccgtattcttgcaacttttgtgaaaaaagttttcgccagttgtcgcatctgcagcagcacaccaggatccacaccggggaccgaccttataagtgcgcccatcctggctgtgagaaggcattcacgcagctttccaacctacaatcccacagaagacagcacaacaaagacaaacctttcaagtgccacaactgccatcgcgcttacaccgacgccgcctctcttgaggtgcacttgtctacacacacagtgaagcacgccaaagtctacacctgcacaatttgctcacgggcctacacatcagaaacgtaccttatgaaacatatgcgtaagcataacccacccgacctccaacagcaggtgcaggccgccgctgcagctgccgcagttgctcaggcacaagcccaggcacaggcccaggcccaggcccaggcacaggctcaagcacaggcccaggcatctcaggcctcccagcagcaacagcagcaacaacagcagcagcagcagcagcagcagcagcccccacctcatttccagtcaccaggtgctgccccgcagggaggtggtggtggcgattcaaatccgaatcccccgccacagtgcagctttgacctgactccttacaaaacagctgaacatcacaaggacatctgcttaaccgtgaccacctccactattcaggtcgaacatctcgccagcagttag

SEQ ID NO: 32426 - DNA, 1386 bp, Artificial Sequence
  derived and/or modified sequence
atggaggagagccacttcaacagcaacccctacttctggcccagcatccccaccgtgtctggccagatcgagaacaccatgttcatcaacaagatgaaggaccagctgctgcctgagaagggctgcggcctggccccaccccactaccccaccctgctgactgtgcctgcctctgtgtccctgcccagcggcatctccatggacacagagagcaagagtgaccagctgaccccccacagccaggcctctgtgacccagaacatcaccgtggtgcctgtgcccagcacaggcctgatgacagctgccctgcaggtggtgcctgacctgagcaagaaggtggccagcaccctgacagaggagggcggcggcggcggcggcggcggcggctctgtggcccccaagccaccccggggcaggaagaagaagaggatgctggagagcggcctgcctgagatgaatgacccctacgtgctgagcccagaagatgatgatgaccaccagaaggatggcaagacctaccgctgcaggatgtgcagcctgaccttctacagcaagtctgagatgcagatccacagcaagagccacacagagaccaagccccacaagtgcccccactgcagcaagacctttgccaacagcagctacctggcccagcacatccgcatccacagcggggccaagccctacagctgcaacttctgtgagaagagcttccggcagctgagccacctgcagcagcacacccgcatccacactggagaccggccctacaagtgtgcccaccctggctgtgagaaggccttcacccagctgagcaacctgcagagccaccggcggcagcacaacaaggacaagcccttcaagtgccacaactgccaccgggcctacacagatgctgccagcctggaggtgcacctgagcacccacacagtgaagcacgccaaggtgtacacctgcaccatctgcagccgggcctacaccagcgagacctacctgatgaagcacatgaggaagcacaaccccccagacctgcagcagcaggtgcaggccgctgctgctgctgctgctgtggcccaggcccaggcccaggcccaggcccaggcccaggcccaggcccaggcccaggcccaggcccaggccagccaggccagccagcagcagcagcagcagcagcagcagcagcagcagcagcagcagcagcccccaccccacttccagagccctggggccgccccccagggcggcggcggcggggacagcaaccccaaccccccaccccagtgcagctttgacctgaccccctacaagacagctgagcaccacaaggacatctgcctgactgtgaccaccagcaccatccaggtggagcacctggccagcagctag

SEQ ID NO: 32427 - DNA, 1386 bp, Artificial Sequence
  derived and/or modified sequence
atggaggagagccacttcaacagcaacccctacttctggcccagcataccgaccgtgtcaggtcagattgagaacacaatgtttatcaataaaatgaaggatcagcttctcccagagaaaggctgtggcctggcaccaccacattaccccacgttgctgacggtgcctgccagcgtgtcacttccatcagggatcagcatggataccgaaagcaaaagcgatcaattgaccccacactcgcaggctagcgtcacacagaacataaccgtggtccccgtgccaagcacaggcttgatgacagccgccctgcaagtggttccagacttatccaagaaggtggccagtaccctcacagaagaggggggcggcgggggcgggggcggaggatcagtggcgcccaagccgccacgagggagaaagaaaaaaagaatgctagagtcagggctgcccgaaatgaatgatccctacgtcctctcccccgaagacgacgacgaccatcagaaggatggcaaaacttaccggtgtaggatgtgctcactgaccttctactccaagagcgaaatgcagatacacagcaaatctcataccgagacaaaaccccataagtgcccacactgctccaagaccttcgcaaatagctcatatctcgcccagcacatccggattcattcaggggccaaaccttattcctgtaacttctgtgagaagtctttcaggcaactctctcatttgcagcagcacactcgcattcacaccggggacagaccttataaatgtgcccatcctggctgcgaaaaggcattcacccagctgtcaaacctgcagagtcacagacgacagcacaacaaagataaacctttcaagtgtcacaactgtcatcgcgcgtatacagatgccgcgagcctggaggtgcatttgtcgacgcacactgtaaaacacgctaaggtctacacatgcactatttgctctagggcctataccagtgagacatatctgatgaagcacatgcgtaaacacaatcctccagatctgcagcagcaggttcaggccgctgccgctgcggcggccgtggcccaagcccaggcacaggcgcaggctcaagctcaagcccaggcgcaagctcaggcacaggctcaagccagccaggcctcacagcagcagcagcaacagcagcaacaacaacagcagcaacagcagcagcctcctccacactttcagtcccctggcgcagcgccacagggggggggcggcggggatagcaatcctaaccccccacctcagtgctcttttgacctgacaccctataagacggccgagcatcacaaagacatctgccttacagtcactacgtccaccatccaagtggagcaccttgcctctagctag

SEQ ID NO: 32428 - DNA, 1386 bp, Artificial Sequence
  derived and/or modified sequence
atggaggagagccatttcaactccaatccttatttctggccaagtattcccacagtgtccggccagattgagaataccatgtttatcaacaagatgaaggaccagctgctgccagagaagggatgcgggctggctccgcctcactaccccaccctgctcacagtgcccgcaagcgtgagtcttcctagcggcatctccatggacacggaatcaaaatccgaccagttgacacctcactcgcaggctagtgtcacgcagaatataaccgtcgtacccgtgccctccactggccttatgacagctgctctgcaagtggttcctgacctgtcaaaaaaagtggcctcaacactgacggaggagggtgggggtggaggcggtgggggaggcagcgtggcacctaagccaccaaggggacggaagaagaaacgcatgttggaaagtggcttacctgaaatgaacgatccatatgtgcttagccctgaggatgacgacgaccaccagaaagacggcaaaacttacagatgcaggatgtgctccctcaccttctacagcaaatccgagatgcagatccactcgaagagtcatacagaaaccaaaccacataaatgcccccattgtagcaaaacattcgcaaattcatcttacctcgctcagcacattcggatccattctggggctaagccgtacagttgtaatttctgcgagaagagcttccgtcagctgtcacatctacagcagcacacccggatccacacaggggaccggccatataaatgtgcacaccccggatgtgagaaggcgttcactcaactcagcaatcttcagagccaccgcaggcagcacaataaagacaaaccgtttaaatgccacaattgtcacagggcttatactgatgctgcttcactcgaagtgcatctctccacgcacactgtaaagcatgcaaaggtctacacctgtacaatctgctcacgagcctacacttccgaaacatacctcatgaaacatatgagaaagcacaacccccctgatctgcagcagcaggtgcaagccgcagccgctgccgctgccgtcgcacaggcccaggctcaggcccaggcacaagcacaggcacaggctcaagctcaagcacaggcccaggcctcacaggccagtcagcagcagcaacaacagcaacaacaacaacagcaacagcaacagcagccccctccccatttccaaagccctggtgccgcaccacaaggcggtggaggtggtgactccaatccaaatccaccgcctcagtgctcatttgatctcacaccttacaagaccgcggagcatcacaaggatatatgtttgaccgtaaccacctcaaccattcaagtggagcaccttgcctcatcttag

SEQ ID NO: 32429 - DNA, 2514 bp, Artificial Sequence
  derived and/or modified sequence
agctcttctctgagcctgttggggggagggaggggggcgtggaggaactggggttcgcgggagcacgagctgcagcaccacttccggaaagttcaggagccctggaaaggagaaggaataagacggcaggaggaagagagagagagggtagaatggaagaatctcacttcaattctaacccgtacttctggccttctatccccacagtctcaggtcagatcgagaacacaatgttcatcaacaagatgaaggatcagctgttgccagagaagggctgtggtctggccccacctcactaccccaccttgctgacagtgcctgcctcagtgtccctgccctcaggcatcagtatggacacagagtccaagtcagaccagctgaccccacacagccaagcgtccgttacccagaatatcacggtggtccctgtgccgtctacaggactgatgactgctgccctgcaggttgtccctgacctctccaagaaggtagcatcgaccctaaccgaggaaggaggcggaggtggtggtggaggtggcagtgtggctcctaagccaccccggggccggaagaagaagcggatgctggaatcagggctgcccgagatgaatgacccttatgtcctctcccctgaggatgatgatgaccatcagaaagacggcaagacctacaggtgccggatgtgctcactgacattctactccaagtcggagatgcagatccactccaagtcacacaccgagaccaagccccacaagtgcccacattgctccaagaccttcgccaacagctcctacctggcccagcacatccgtatacactcaggggctaagccctacagttgtaacttctgtgagaaatccttccgccagctctcccaccttcagcagcacacccgaatccacactggtgatagaccatacaaatgtgcacacccaggctgtgagaaagccttcacacaactctccaatctgcagtcccacagacggcaacacaacaaagataaacccttcaagtgccacaactgtcatcgggcgtacacggatgcagcctcactagaggtgcacctgtctacgcacacagtgaagcatgccaaggtgtacacctgcactatctgcagtcgggcatacacatcagaaacataccttatgaaacatatgcgcaaacacaacccgcctgatcttcagcaacaggtgcaggcagcagcagcagcggcagcagtggcccaggcccaggctcaagctcaagcccaggctcaggctcaggctcaagcccaggcccaggcccaggcctcccaggcatcacagcagcagcagcagcagcagcagcagcagcagcagcagcagcaacagccaccaccacacttccagtctcctggggcagccccccagggtgggggtggtggggacagcaatcccaaccctccaccccagtgttcctttgacctgaccccgtataagacggcggagcatcataaggacatctgcctcactgtcaccaccagcaccatccaggtggagcacctggccagctcttagagatccgtgctgccacccactgggaagaggaagaagtagtcctggtgtcttctttctccaactcttggtgggaaaagtccttttcttccttgacaggccttggctccatctccttgggcctctgtcacggctttccttcacaggataccatcctttttctgaactcttcttcaaaaggaacatcagccctcctgattgcaaaggaatactgagctgatggtgtcatccagcagcctcccctcccaagcaaagcttctaaaactgggggtcggtgctcaagggaaggatttgctatgacctcatagaaccttgtccagtgtggccacttaccctatccttaccctccttatcctcaaagtttgggctgatgtaagactagaggctggccctcccagataacagagaaaagggagccccaaatgcaaccagcctcttgttctattcttgcctgcaaaagaacagaggtttctcaaatgcctcagtccctgagagccatttcttcccctacatcgtctcactttgcttcctattgactgctggtagaaggagatttggggtaggggctagacctccttttatttgaagggggcaagggctgagatgtggtccccaaggggccagaaattcccaagttggtcacaggtggcttagaagtgtgtgttatggttttacggatttccttgaagcctctctccttctctgcctacaaagaccctatactctcagtctccccaacccacccccaaggagctgtgggaggctttgtgttatctgtgaaactccaaaacaggggtgttgcggagaagggagagttcaaggcaaacgcaaggactggacttagctccctaggtgccacagtcagatgccggacacggatttatatataaatatatatatataaatatattatactcactcatcacggccatctttgttgtaaccatttctgtgtttataaatgcattatctctgagaa

SEQ ID NO: 32430 - protein, 230 aa, Artificial Sequence
  derived and/or modified sequence
MARLALSPVPSHWMVALLLLLSAAEPVPAARSEDRYRNPKGSACSRIWQSPRFIARKRGFTVKMHCYMNSASGNVSWLWKQEMDENPQQLKLEKGRMEESQNESLATLTIQGIRFEDNGIYFCQQKCNNTSEVYQGCGTELRVMGFSTLAQLKQRNTLKDGIIMIQTLLIILFIIVPIFLLLDKDDSKAGMEEDHTYEGLDIDQTATYEDIVTLRTGEVKWSVGEHPGQE

SEQ ID NO: 32431 - DNA, 693 bp, Artificial Sequence
  derived and/or modified sequence
atggcacggctcgcactgtcccctgttccatcacactggatggtcgcgttgttgctcctgctcagtgcagccgaacccgtcccagccgctagatcggaggacagataccgcaacccgaagggctcggcctgtagtagaatctggcagtctccacggtttatcgctcggaagagagggttcacggtaaaaatgcattgttatatgaactcagcttccgggaatgtgtcctggttgtggaagcaggaaatggatgaaaacccacagcaacttaagctggaaaagggtcggatggaagaatcccagaatgaaagcctagctaccttgacaatacaaggaatccgtttcgaggacaacggcatctatttttgccaacaaaagtgtaataacacatcagaagtgtaccaggggtgcgggacagaactgcgggttatgggattcagtacactggcacagttgaagcagcgcaacactctaaaagatggaatcatcatgatccagacactgctaataatcctgtttataattgtccccattttcttgctgctggataaagatgattccaaggcgggcatggaggaagatcacacctacgaaggacttgatatcgaccagaccgccacctatgaggatatcgtcacactgagaacaggagaggtcaagtggtccgttggtgaacatccaggccaagaatag

SEQ ID NO: 32432 - DNA, 693 bp, Artificial Sequence
  derived and/or modified sequence
atggcccggctggccctgagccctgtgcccagccactggatggtggccctgctgctgctgctgtctgctgctgagcctgtgcctgctgcccggagtgaagatcgctacagaaaccccaagggcagcgcctgcagccgcatctggcagagcccccgcttcatcgccaggaagaggggcttcaccgtgaagatgcactgctacatgaacagcgccagcggaaatgtgtcctggctgtggaagcaggagatggatgagaacccccagcagctgaagctggagaagggccgcatggaggagagccagaatgaaagcctggccaccctgaccatccagggcatccgctttgaggacaatggcatctacttctgccagcagaagtgcaacaacaccagcgaggtgtaccagggctgcggcacagagctgcgggtgatgggcttcagcaccctggcccagctgaagcagaggaacaccctgaaggatggcatcatcatgatccagaccctgctgatcatcctcttcatcatcgtgcccatcttcctgctgctggacaaggatgacagcaaggccggcatggaggaggaccacacctatgagggcctggacatcgaccagacagccacctatgaagatattgtgaccctgaggactggagaggtgaagtggagcgtgggggagcaccctggccaggagtag

SEQ ID NO: 32433 - DNA, 693 bp, Artificial Sequence
  derived and/or modified sequence
atggcccggctggccctgagccccgtgcccagccactggatggtggcgttgttgcttcttctgtccgccgctgaacccgtccctgcagccaggtcagaagatcggtatagaaacccaaagggttcagcttgctcgcgaatctggcagagcccacgcttcatcgctagaaaaagaggcttcacagtgaagatgcactgctacatgaactccgcctccgggaacgtctcctggctatggaaacaggagatggatgagaatccgcagcagctcaaactcgagaagggaaggatggaagaatcccagaacgagtctctcgctaccctgacaattcagggaattcgcttcgaggataatggcatatacttctgccagcagaagtgcaataatacaagcgaagtgtaccagggctgcggaacagagttaagagtgatgggattttcaacgttagcccagcttaaacagcggaataccctaaaggacggcataataatgattcagacactcctgatcatcctcttcatcatcgtgccgatcttccttctactggacaaggatgatagcaaagcgggtatggaggaggaccacacatacgagggactggacatcgatcaaaccgccacttacgaggacatagtgaccctgcgtaccggcgaagtcaaatggagcgttggggaacacccagggcaggagtag

SEQ ID NO: 32434 - DNA, 693 bp, Artificial Sequence
  derived and/or modified sequence
atggctcgattagccctgtcccccgtgcccagccactggatggtcgcgctgttactcctactgtccgccgcagaacctgtacccgcagctcgctcagaagatagatatcgcaacccaaaaggctctgcttgctctaggatttggcaaagtccccgtttcatcgcaagaaaacgcggattcacagtcaagatgcattgctatatgaattccgctagcggcaacgtcagctggctgtggaagcaggaaatggacgagaacccccagcagttgaagttggaaaaagggagaatggaggagtctcagaacgagtctctagccacactgactatacagggcatccggtttgaagataacggaatatatttttgtcagcaaaagtgcaacaacacaagtgaagtctatcagggatgcggcaccgaactcagggtgatgggtttttccacattagcacagcttaagcagagaaacaccttgaaagatggcataattatgatccagaccttgctgattatcctgttcattatcgtcccgattttcctgttgttagataaggacgacagcaaggctggtatggaagaggaccatacgtacgagggcctggatattgatcagaccgccacctatgaggacattgtgacactgcggaccggagaagtgaaatggagcgtaggcgaacaccccggacaggaatag

SEQ ID NO: 32435 - DNA, 1254 bp, Artificial Sequence
  derived and/or modified sequence
ggtgcagttacacgttttcctccaaggagcctcggacgttgtcacgggtttggggtcggggacagagcggtgaccatggccaggctggcgttgtctcctgtgcccagccactggatggtggcgttgctgctgctgctctcagcagctgagccagtaccagcagccagatcggaggaccggtaccggaatcccaaaggtagtgcttgttcgcggatctggcagagcccacgtttcatagccaggaaacggggcttcacggtgaaaatgcactgctacatgaacagcgcctccggcaatgtgagctggctctggaagcaggagatggacgagaatccccagcagctgaagctggaaaagggccgcatggaagagtcccagaacgaatctctcgccaccctcaccatccaaggcatccggtttgaggacaatggcatctacttctgtcagcagaagtgcaacaacacctcggaggtctaccagggctgcggcacagagctgcgagtcatgggattcagcaccttggcacagctgaagcagaggaacacgctgaaggatggtatcatcatgatccagacgctgctgatcatcctcttcatcatcgtgcctatcttcctgctgctggacaaggatgacagcaaggctggcatggaggaagatcacacctacgagggcctggacattgaccagacagccacctatgaggacatagtgacgctgcggacaggggaagtgaagtggtctgtaggtgagcacccaggccaggagtgagagccaggtcgccccatgacctgggtgcaggctccctggcctcagtgactgcttcggagctgcctggctcatggcccaacccctttcctggaccccccagctggcctctgaagctggcccaccagagctgccatttgtctccagcccctggtccccagctcttgccaaagggcctggagtagaaggacaacagggcagcaacttggagggagttctctggggatggacgggacccagccttctgggggtgctatgaggtgatccgtccccacacatgggatgggggaggcagagactggtccagagcccgcaaatggactcggagccgagggcctcccagcagagcttgggaagggccatggacccaactgggccccagaagagccacaggaacatcattcctctcccgcaaccactcccaccccagggaggccctggcctccagtgccttcccccgtggaataaacggtgtgtcctgagaaacca

SEQ ID NO: 32436 - DNA, 693 bp, Artificial Sequence
  derived and/or modified sequence
atggccagactggccctgagccccgtgcccagccactggatggtggccctgctgctgctgctgagcgccgccgagcccgtgcccgccgccagaagcgaggacagatacagaaaccccaagggcagcgcctgcagcagaatctggcagagccccagattcatcgccagaaagagaggcttcaccgtgaagatgcactgctacatgaacagcgccagcggcaacgtgagctggctgtggaagcaggagatggacgagaacccccagcagctgaagctggagaagggcagaatggaggagagccagaacgagagcctggccaccctgaccatccagggcatcagattcgaggacaacggcatctacttctgccagcagaagtgcaacaacaccagcgaggtgtaccagggctgcggcaccgagctgagagtgatgggcttcagcaccctggcccagctgaagcagagaaacaccctgaaggacggcatcatcatgatccagaccctgctgatcatcctgttcatcatcgtgcccatcttcctgctgctggacaaggacgacagcaaggccggcatggaggaggaccacacctacgagggcctggacatcgaccagaccgccacctacgaggacatcgtgaccctgagaaccggcgaggtgaagtggagcgtgggcgagcaccccggccaggagtag

SEQ ID NO: 32437 - protein, 332 aa, Artificial Sequence
  derived and/or modified sequence
MFSEELWLENEKKCAVVRKSKQGRKRQELLAVAFGVKVGVKGGFLWPPLKLFACSQISSLVRRAALTHNDNHFNYEKTHNFKVHTFRGPHWCEYCANFMWGLIAQGVRCSDCGLNVHKQCSKHVPNDCQPDLKRIKKVYCCDLTTLVKAHNTQRPMVVDICIREIEARGLKSEGLYRVSGFTEHIEDVKMAFDRDGEKADISANVYPDINIITGALKLYFRDLPIPVITYDTYSKFIDAAKISNADERLEAVHEVLMLLPPAHYETLRYLMIHLKKVTMNEKDNFMNAENLGIVFGPTLMRPPEDSTLTTLHDMRYQKLIVQILIENEDVLF

SEQ ID NO: 32438 - DNA, 999 bp, Artificial Sequence
  derived and/or modified sequence
atgttttctgaagaactctggcttgaaaatgagaaaaaatgcgccgtggtacggaaatctaagcaaggccgaaagcgccaggagctcttggctgttgcatttggggtgaaagtgggagtgaagggcggatttctgtggccacctctgaagctgttcgcctgttcacagatctcatcattagtccggcgtgcagctcttactcataacgataaccacttcaattacgaaaaaactcataacttcaaggtacacacctttcgaggcccacattggtgcgagtactgcgcaaatttcatgtggggtctcattgcccagggtgtccggtgtagcgattgtggcctgaatgttcacaagcagtgctccaagcacgtgccgaatgactgccaaccggacctgaagagaatcaaaaaggtgtactgctgcgaccttaccacactggtgaaggcccacaacactcagaggcctatggtggtagatatttgcatacgagaaattgaagccagaggcttgaagagcgagggtctgtaccgggtaagtggctttaccgaacacatagaagatgtgaaaatggcctttgaccgagacggtgagaaggctgatatctcggctaacgtgtaccccgatattaatataattactggggcgctgaaactgtatttcagagatctccccattcccgtaattacatatgacacatactctaagtttatcgatgcagcgaaaatctccaatgcggatgagcgcctggaagccgtccatgaggtactgatgctgctaccgcccgctcactacgaaaccctgaggtacctcatgattcatctgaaaaaggtaacaatgaatgagaaagataacttcatgaacgcagagaatttgggcattgtgtttgggcccacgttgatgagaccccccgaggatagcacgctgacgacgctgcacgatatgcgatatcagaaactgattgtgcagattcttattgagaatgaagatgtgctgttctag

SEQ ID NO: 32439 - DNA, 975 bp, Artificial Sequence
  derived and/or modified sequence
atggcagctagtagcaacagttcactttccggttcctccgtttcctcagacgccgaggagtatcagcccccaatctggaagtcatatctgtatcagttgcaacaggaagccccacggcccaaacgaatcatatgtcctcgggaaatttcgagcctcgtgagaagagcggcacttacccacaacgacaaccatttcaactacgaaaaaactcataactttaaggtacacaccttccggggaccccactggtgcgagtactgtgctaatttcatgtggggcctgatagcgcagggagtgcgctgttcagattgtggcctaaatgtgcacaaacaatgcagcaaacacgtccctaatgattgccaacctgatctgaagcgcattaagaaagtgtactgctgtgacctgactaccctggtaaaagctcacaacacccagaggcctatggttgtggacatttgcattcgggaaattgaagcaagggggctgaaatctgagggcctgtacagagtctcaggattcaccgagcacattgaggatgttaagatggccttcgacagggacggagagaaagccgacatcagcgctaacgtatatccggatattaacattattactggcgctcttaaattgtactttcgcgatctgcctattccagtaattacatacgatacttactcgaagtttatcgacgctgctaagattagcaacgccgacgaaagactagaagccgtgcacgaagttttgatgctgttgccaccagcgcactatgaaactctgaggtatttaatgatccatttgaagaaggtaacaatgaatgagaaggataattttatgaacgctgaaaacctgggcattgtattcgggcctaccctcatgcggcctcccgaggacagtaccctgacgacactgcacgatatgcgctatcaaaaattgatagttcaaattcttatcgaaaacgaggacgtgctgttttag

SEQ ID NO: 32440 - DNA, 999 bp, Artificial Sequence
  derived and/or modified sequence
atgttttctgaggagctgtggctggagaatgagaagaagtgtgctgtggtgaggaagagcaagcagggcaggaagaggcaggagctgctggccgtggccttcggcgtgaaggtgggcgtgaagggcggcttcctgtggccacccctgaagctgtttgcctgcagccagatcagcagcctggtgcggcgggccgccctgacccacaatgacaaccacttcaactatgagaagacccacaacttcaaggtgcacaccttccggggcccccactggtgtgagtactgtgccaacttcatgtggggcctgattgcccagggcgtgcgctgcagcgactgtggcctgaatgtgcacaagcagtgcagcaagcacgtgcccaatgactgccagcctgacctgaagaggatcaagaaggtgtactgctgtgacctgaccaccctggtgaaggcccacaacacccagaggcccatggtggtggacatctgcatccgggagattgaggcccggggcctgaagtctgagggcctgtacagagtgtctggcttcacagagcacattgaagatgtgaagatggcctttgacagagatggagagaaggctgacatcagcgccaacgtgtacccagacatcaacatcatcactggagccctgaagctgtacttccgggacctgcccatccctgtgatcacctatgacacctacagcaagttcattgatgctgccaagatcagcaatgctgatgagcggctggaggccgtgcatgaggtgctgatgctgctgcccccagcccactatgagaccctgcgctacctgatgatccacctgaagaaggtgaccatgaatgagaaggacaacttcatgaatgctgagaacctgggcatcgtgtttggccccaccctgatgaggcctcctgaggacagcaccctgaccaccctgcatgacatgagataccagaagctgattgtgcagatcctgattgaaaatgaagatgtgctcttctag

SEQ ID NO: 32441 - DNA, 975 bp, Artificial Sequence
  derived and/or modified sequence
atggccgccagcagcaacagcagcctgagcggcagctctgtgtccagtgatgctgaggagtaccagccccccatctggaagagctacctgtaccagctgcagcaggaggccccccggcccaagaggatcatctgcccccgggagatcagcagcctggtgcggcgggccgccctgacccacaatgacaaccacttcaactatgagaagacccacaacttcaaggtgcacaccttccggggcccccactggtgtgagtactgtgccaacttcatgtggggcctgattgcccagggcgtgcgctgcagcgactgtggcctgaatgtgcacaagcagtgcagcaagcacgtgcccaatgactgccagcctgacctgaagaggatcaagaaggtgtactgctgtgacctgaccaccctggtgaaggcccacaacacccagaggcccatggtggtggacatctgcatccgggagattgaggcccggggcctgaagtctgagggcctgtacagagtgtctggcttcacagagcacattgaagatgtgaagatggcctttgacagagatggagagaaggctgacatcagcgccaacgtgtacccagacatcaacatcatcactggagccctgaagctgtacttccgggacctgcccatccctgtgatcacctatgacacctacagcaagttcattgatgctgccaagatcagcaatgctgatgagcggctggaggccgtgcatgaggtgctgatgctgctgcccccagcccactatgagaccctgcgctacctgatgatccacctgaagaaggtgaccatgaatgagaaggacaacttcatgaatgctgagaacctgggcatcgtgtttggccccaccctgatgaggcctcctgaggacagcaccctgaccaccctgcatgacatgagataccagaagctgattgtgcagatcctgattgaaaatgaagatgtgctcttctag

SEQ ID NO: 32442 - DNA, 999 bp, Artificial Sequence
  derived and/or modified sequence
atgttcagcgaggagctgtggctggagaacgagaagaagtgcgccgtggtgaggaagtctaaacaaggtcgcaagcggcaggagcttctggctgtagccttcggtgttaaagtgggagtcaaggggggcttcttgtggccaccactgaagctgttcgcctgctcccagatttccagtctagtacgccgggctgccctcactcataacgataaccatttcaattacgagaagactcacaatttcaaagtgcatacattccgggggccccattggtgcgagtactgcgctaactttatgtggggactcatagctcagggagttagatgcagtgactgtggactcaacgttcataagcagtgctcaaaacacgttcccaacgactgtcagccggatctcaagcgcatcaaaaaagtttattgctgcgatcttaccaccctagttaaggcccacaacacccaacgcccgatggtggtggacatttgcataagggagattgaggctagaggattgaagtccgagggcttgtatcgagtgtctgggttcacggaacacatcgaagatgttaaaatggcctttgatcgcgatggtgaaaaagctgacattagcgccaacgtgtaccccgacatcaatattattactggagccctgaagctgtacttccgggatctgcccattcctgtgataacctacgacacctattccaagttcattgatgccgccaagatctcaaatgcggatgagagattagaggctgtccacgaggtgctgatgctgctgccgcctgctcactatgagaccttacgctacttgatgatccacttaaagaaggttactatgaatgagaaagataattttatgaatgcagaaaatctagggattgtatttggtccaaccctcatgcgaccccctgaagacagcaccctaacaactttgcacgatatgagataccagaagttgatcgtgcagatactaatcgaaaacgaggacgtccttttctag

SEQ ID NO: 32443 - DNA, 975 bp, Artificial Sequence
  derived and/or modified sequence
atggccgccagcagcaacagcagcctgagcggcagcagcgtgagcagcgatgcagaggaataccaaccaccaatttggaagtcgtacctgtaccaacttcagcaggaagcccccagacccaaacgaatcatatgcccaagggagatctcttctctagtgcggagggcggccctcactcacaacgacaaccacttcaactatgaaaagacgcacaattttaaagttcacacttttaggggacctcactggtgcgagtactgtgcgaacttcatgtgggggctgatcgcccagggagtgcgttgcagcgactgtggactgaacgtacacaagcagtgcagcaagcatgtgcctaacgactgtcagcccgacctcaagcgcatcaaaaaggtgtactgctgtgaccttaccaccctcgttaaagctcacaacacccagcggccaatggtggtggacatttgcatccgggagatcgaggcccggggacttaagtctgagggcctctacagggtttctggatttacagagcatatagaggacgtcaaaatggcttttgacagggatggagaaaaagccgatatcagtgctaatgtctaccccgacatcaacattattactggcgccctcaagttgtacttccgggatctacccattccggtgattacttacgacacgtactccaaattcatagacgctgcaaaaatcagtaatgccgatgagaggctcgaggccgtgcacgaagtgctcatgttgctgccccctgcccattatgagacccttagatacttgatgatccatctgaaaaaggtgacaatgaacgaaaaggacaattttatgaatgcagagaacttgggaattgtatttggtccaaccctcatgcggcctcctgaggattccacacttactacccttcatgacatgcgttatcagaaacttatcgtgcagattctcattgagaatgaggacgtccttttctag

SEQ ID NO: 32444 - DNA, 999 bp, Artificial Sequence
  derived and/or modified sequence
atgttctcggaagagctctggttagagaacgaaaagaaatgtgctgtggttaggaaaagtaaacagggtagaaagagacaggaactgttggccgtggctttcggggtgaaggtcggcgtgaaagggggatttctgtggccacccttaaagcttttcgcttgcagccagatctcgtcccttgtgaggcgagcggcactgacacataatgacaatcactttaactatgaaaagactcacaatttcaaagtgcacacttttcgaggccctcattggtgtgagtattgtgcaaactttatgtggggtctgattgcgcagggagtgagatgtagtgactgcggcctcaacgtgcataagcagtgctccaagcacgtgccaaacgactgccagcccgacttgaaacggataaagaaggtctattgctgcgatttaactactttagtgaaggcacataatacgcaacgccctatggtggtagacatctgtattcgtgaaatcgaggccagaggattgaaatccgagggactatacagagtgtccggcttcacagagcacatagaggatgtcaaaatggcatttgaccgggatggggaaaaagccgatattagtgcaaacgtgtaccccgatattaatataatcacaggggcacttaagctttatttccgtgatctccccattccagttatcacctacgacacgtactcgaaatttatagacgcagccaaaatttcgaacgctgatgagaggctggaagccgtacacgaggtgctcatgctgctgccccctgctcattacgagacgctccggtatttaatgatccacctaaagaaggttactatgaatgagaaagacaactttatgaatgccgagaacctcggcatcgttttcggtccgaccctgatgcgcccacccgaggactccaccctgaccactttgcacgacatgcgttaccagaaattaatcgtgcagatcctgatcgagaacgaggacgtgcttttctag

SEQ ID NO: 32445 - DNA, 975 bp, Artificial Sequence
  derived and/or modified sequence
atggccgctagctcaaactcctctttgtcgggctcctccgtgagttctgatgctgaggaataccaaccccctatttggaagtcttatctgtaccagctgcagcaggaagcgcctagacccaagagaatcatctgtcctagagagatcagtagcctcgtacgtcgcgctgccctgacacacaatgataatcactttaactacgaaaagacccataatttcaaggtgcatacctttaggggaccccactggtgcgaatattgtgctaatttcatgtgggggcttatcgcgcagggcgtccggtgttccgactgcggcctgaatgttcacaaacagtgctctaagcacgtccccaatgactgtcagccggatctcaagagaattaagaaagtgtattgctgcgatttgaccaccctcgttaaggcccacaacactcagcggccaatggttgtggatatctgtatccgtgagattgaggcacgcggactaaaatctgaagggctgtacagggtttccgggtttactgaacacattgaggatgtgaagatggcgtttgatagggacggagagaaggctgacatatccgcaaatgtttacccagacatcaacatcattacaggtgcgcttaagttgtatttccgggatctgcctatcccggtgataacctatgatacttacagtaagttcatcgacgctgccaaaatttcaaatgccgatgaaaggctggaggccgtgcacgaagtgctgatgttgctgcccccagcgcattacgagaccctgaggtacctgatgatccacctgaagaaggttacaatgaacgagaaggacaatttcatgaacgctgagaatttgggtatcgtgtttggaccaaccttaatgcgaccaccagaggactccacccttactacactgcacgacatgcgctaccagaagctcatcgtacagattctgatcgagaacgaagatgtgctgttctag

SEQ ID NO: 32446 - DNA, 2832 bp, Artificial Sequence
  derived and/or modified sequence
attgttccaggcgcacgtcggccttaagaaatagcacaaaacaggcccatccttattcagaagccgggccccctccatcactcaaactgggcctttcaggtcacatgccggaggctgctgcagacaggacccagctgcctcaaatctgccgcctaacataagctgcggttcgaaaatcctgacagcacagggcttcctgggctctgcagagcaaactggaaagagctgggatccaggcactatgttctctgaagaactgtggctggaaaatgagaaaaagtgtgctgtggttcggaagtctaagcagggcaggaaacgccaagaactgctggccgtagccttcggggtgaaggtgggtgtcaaaggcggctttctttggccccctctcaaactctttgcctgttcacagatctcctccctggttcgaagggctgccctcacacacaacgacaaccacttcaattatgagaagacacacaactttaaggtccacacgttccgaggcccacactggtgtgaatattgtgccaatttcatgtgggggctcatcgcccaaggggtccggtgctcagactgtggattgaacgtacacaaacagtgttccaagcacgttcccaatgactgccaacctgatctcaagaggatcaagaaagtgtactgttgtgacctcacaacacttgtgaaggctcacaacactcagagacccatggtggtagacatatgcattcgggaaattgaagcaagaggattaaaatcggaaggcctttacagagtctctgggttcactgaacacattgaagatgtcaaaatggcatttgacagagatggtgaaaaggccgatatatctgccaatgtctatccagacataaacatcatcactggagcccttaaactgtatttcagagacttacccatccctgtcatcacatatgatacctattccaaatttatagatgcagcaaaaatctccaatgcagatgagaggctggaagccgtccatgaagtgctgatgctgctgcctcctgcccactatgaaaccctccggtacctaatgatccacctcaaaaaggttactatgaatgaaaaagacaatttcatgaatgcagaaaatctggggatcgtgtttgggcccactctgatgaggccccctgaggacagcaccctgaccaccctgcatgatatgcggtaccaaaagctgattgtgcagattttaatagaaaacgaagacgttttattctaatccatcagggaaatgagctgaatggccccagcaccatccaagttgacacagctaaaggaataaaaacatttcttaccacttgatttgttttccaagcaagtgctagaatttcctggactgcagaggatcgctgagtggggtactgtgtctcatagacatgcgccacctccacgtgagaacaagggtgaaggtgagggaagcccctcaccttgggtcttttgctgtgcctcctatgtatgtctggtttgctggaagagtgattaatacatctttaatttattaaaaaacaatgtagacctttaaacttcagtcttattggtaataaaagggaacttaattcatacaggtacttgatacagttatacattttccacttacaaaaagaagacaattctgttaaatgaaacgtgtatcgtaaaatgtatttttattttacccacgagaatgttgttatttttagcaaatagaactcaatgcagtgcattggttattaccctgtgtaccttgtccctcattttgctgtgacaccctgaaaaagctgaccacaaatgcagtattatcttgacatacctctgtcctcctcagtgctttttaatgaaatttcacctgccccttgtgttcctgctttggatagtttttgctcttaagcattggcattcttctattgtatggtatgtatttatagcaattgtaggatggtctgaaatgtccacacactttctatgcatacaaattttgtgaattcccaaagtatgctttggaattggtcatagtcttttcgtatcatgagtgtgtatcccagaagatacagaatgcggtcattttacctgaaattatttgagaacactggatgtatctggtctgtgtaaaaagttagcacttaccctcttttcttcctggccaagccctctgaattcatctgttaatatcaaattgtatttttgccacatttctgtattggtgaaaagcgaatctgcagaataactgtcaacgtttttcattcttgttttacaaacctattttttaaagtgagaataaggttggtttttaccaaatatttgttcctccttgacaaaagtagctctgtgtggataatatgattttattactacagttccagtcacttggttatatttatcttagcatgagcctttcacaccaagatttctatattttgtaacataggtgaaatatttaaaacatcaaaaactgtaaatctagatttttaaaaaatccaactgcaatgtcttttcctttgattgagatgatttgtgtaaactcaccagtcttgctttggagtgagcagaagagaatgactattttacgtggagcatcattgtgtgactgttgacctggacagtcccaagggctatgcagatggactccattggcacagggaggtttgacctcttccctgctattatccctcctcccaactgtacagatttgtttgttgtagtttatgtacttcttgatactgtcaaaaaattatctggaaatggttttattttgtgaagtgaacaatactttgtaatttatgatagtgtaaatggaaggcaaagcatcacatgtattaaattcttctgtctatt

SEQ ID NO: 32447 - DNA, 975 bp, Artificial Sequence
  derived and/or modified sequence
atggcagcgtccagcaactccagcctgtccggctcgtcggtgtcctccgatgctgaagaataccagcctcctatatggaaatcatacttatatcagttacagcaagaggcacctcgtcccaagagaatcatttgtcctcgggagatctcctccctggttcgaagggctgccctcacacacaacgacaaccacttcaattatgagaagacacacaactttaaggtccacacgttccgaggcccacactggtgtgaatattgtgccaatttcatgtgggggctcatcgcccaaggggtccggtgctcagactgtggattgaacgtacacaaacagtgttccaagcacgttcccaatgactgccaacctgatctcaagaggatcaagaaagtgtactgttgtgacctcacaacacttgtgaaggctcacaacactcagagacccatggtggtagacatatgcattcgggaaattgaagcaagaggattaaaatcggaaggcctttacagagtctctgggttcactgaacacattgaagatgtcaaaatggcatttgacagagatggtgaaaaggccgatatatctgccaatgtctatccagacataaacatcatcactggagcccttaaactgtatttcagagacttacccatccctgtcatcacatatgatacctattccaaatttatagatgcagcaaaaatctccaatgcagatgagaggctggaagccgtccatgaagtgctgatgctgctgcctcctgcccactatgaaaccctccggtacctaatgatccacctcaaaaaggttactatgaatgaaaaagacaatttcatgaatgcagaaaatctggggatcgtgtttgggcccactctgatgaggccccctgaggacagcaccctgaccaccctgcatgatatgcggtaccaaaagctgattgtgcagattttaatagaaaacgaagacgttttattctaa

SEQ ID NO: 32448 - DNA, 999 bp, Artificial Sequence
  derived and/or modified sequence
atgttcagcgaggagctgtggctggagaacgagaagaagtgcgccgtggtgagaaagagcaagcagggcagaaagagacaggagctgctggccgtggccttcggcgtgaaggtgggcgtgaagggcggcttcctgtggccccccctgaagctgttcgcctgcagccagatcagcagcctggtgagaagagccgccctgacccacaacgacaaccacttcaactacgagaagacccacaacttcaaggtgcacaccttcagaggcccccactggtgcgagtactgcgccaacttcatgtggggcctgatcgcccagggcgtgagatgcagcgactgcggcctgaacgtgcacaagcagtgcagcaagcacgtgcccaacgactgccagcccgacctgaagagaatcaagaaggtgtactgctgcgacctgaccaccctggtgaaggcccacaacacccagagacccatggtggtggacatctgcatcagagagatcgaggccagaggcctgaagagcgagggcctgtacagagtgagcggcttcaccgagcacatcgaggacgtgaagatggccttcgacagagacggcgagaaggccgacatcagcgccaacgtgtaccccgacatcaacatcatcaccggcgccctgaagctgtacttcagagacctgcccatccccgtgatcacctacgacacctacagcaagttcatcgacgccgccaagatcagcaacgccgacgagagactggaggccgtgcacgaggtgctgatgctgctgccccccgcccactacgagaccctgagatacctgatgatccacctgaagaaggtgaccatgaacgagaaggacaacttcatgaacgccgagaacctgggcatcgtgttcggccccaccctgatgagaccccccgaggacagcaccctgaccaccctgcacgacatgagataccagaagctgatcgtgcagatcctgatcgagaacgaggacgtgctgttctag

SEQ ID NO: 32449 - DNA, 975 bp, Artificial Sequence
  derived and/or modified sequence
atggccgccagcagcaacagcagcctgagcggcagcagcgtgagcagcgacgccgaggagtaccagccccccatctggaagagctacctgtaccagctgcagcaggaggcccccagacccaagagaatcatctgccccagagagatcagcagcctggtgagaagagccgccctgacccacaacgacaaccacttcaactacgagaagacccacaacttcaaggtgcacaccttcagaggcccccactggtgcgagtactgcgccaacttcatgtggggcctgatcgcccagggcgtgagatgcagcgactgcggcctgaacgtgcacaagcagtgcagcaagcacgtgcccaacgactgccagcccgacctgaagagaatcaagaaggtgtactgctgcgacctgaccaccctggtgaaggcccacaacacccagagacccatggtggtggacatctgcatcagagagatcgaggccagaggcctgaagagcgagggcctgtacagagtgagcggcttcaccgagcacatcgaggacgtgaagatggccttcgacagagacggcgagaaggccgacatcagcgccaacgtgtaccccgacatcaacatcatcaccggcgccctgaagctgtacttcagagacctgcccatccccgtgatcacctacgacacctacagcaagttcatcgacgccgccaagatcagcaacgccgacgagagactggaggccgtgcacgaggtgctgatgctgctgccccccgcccactacgagaccctgagatacctgatgatccacctgaagaaggtgaccatgaacgagaaggacaacttcatgaacgccgagaacctgggcatcgtgttcggccccaccctgatgagaccccccgaggacagcaccctgaccaccctgcacgacatgagataccagaagctgatcgtgcagatcctgatcgagaacgaggacgtgctgttctag

SEQ ID NO: 32450 - protein, 126 aa, Artificial Sequence
  derived and/or modified sequence
MNQRSHLGTTYLDTAKGAVETFMKLRARDPASRGDRYMLVTFEEPPYAIKAGWKENHATFMNELKNLQAEGLTTLGQSLRTAFDLLNLNRLVTGIDNYGQGRNPFFLEPAIIITITDGSKLTTTSG

SEQ ID NO: 32451 - protein, 709 aa, Artificial Sequence
  derived and/or modified sequence
MSVESEQLTGVPLDDSAITPMCEVTGGRSYSVCSPRMLNQCLESLVQKVQSGVVINFEKAGPDPSPVEDGQPDISRPFGSQPWHSCHKLIYVRPNPKTGVPIGHWPVPESFWPDQNSPTLPPRTSHPVVKFSCTDCEPMVIDKLPFDKYELEPSPLTQFILERKSPQTCWQVYVSNSAKYSELGHPFGYLKASTALNCVNLFVMPYNYPVLLPLLDDLFKVHKAKPTLKWRQSFESYLKTMPPYYLGPLKKAVRMMGAPNLIADSMEYGLSYSVISYLKKLSQQAKIESDRVIGSVGKKVVQETGIKVRSRSHGLSMAYRKDFQQLLQGISEDVPHRLLDLNMKEYTGFQVALLNKDLKPQTFRNAYDIPRRNLLDHLTRMRSNLLKSTRRFLKGQDEDQVHSVPIAQMGNYQEYLKQVPSPLRELDPDQPRRLHTFGNPFKLDKKGMMIDEADEFVAGPQNKHKRPGEPNMQGIPKRRRCMSPLLRGRQQNPVVNNHIGGKGPPAPTTQAQPDLIKPLPLHKISETTNDSIIHDVVENHVADQLSSDITPNAMDTEFSASSPASLLERPTNHMEALGHDHLGTNDLTVGGFLENHEEPRDKEQCAEENIPASSLNKGKKLMHCRSHEEVNTELKAQIMKEIRKPGRKYERIFTLLKHVQGSLQTRLIFLQNVIKEASRFKKRMLIEQLENFLDEIHRRANQINHINSN

SEQ ID NO: 32452 - DNA, 2625 bp, Artificial Sequence
  derived and/or modified sequence
atgaaccagagaagccacctgggcaccacctacctggacaccgccaagggcgccgtggagaccttcatgaagctgagagccagagaccccgccagcagaggcgacagatacatgctggtgaccttcgaggagcccccctacgccatcaaggccggctggaaggagaaccacgccaccttcatgaacgagctgaagaacctgcaggccgagggcctgaccaccctgggccagagcctgagaaccgccttcgacctgctgaacctgaacagactggtgaccggcatcgacaactacggccagggcagaaaccccttcttcctggagcccgccatcatcatcaccatcaccgacggcagcaagctgaccaccaccagcggcgtgcaggacgagctgcacctgcccctgaacagccccctgcccggcagcgagctgaccaaggagcccttcagatgggaccagagactgttcgccctggtgctgagactgcccggcaccatgagcgtggagagcgagcagctgaccggcgtgcccctggacgacagcgccatcacccccatgtgcgaggtgaccggcggcagaagctacagcgtgtgcagccccagaatgctgaaccagtgcctggagagcctggtgcagaaggtgcagagcggcgtggtgatcaacttcgagaaggccggccccgaccccagccccgtggaggacggccagcccgacatcagcagacccttcggcagccagccctggcacagctgccacaagctgatctacgtgagacccaaccccaagaccggcgtgcccatcggccactggcccgtgcccgagagcttctggcccgaccagaacagccccaccctgccccccagaaccagccaccccgtggtgaagttcagctgcaccgactgcgagcccatggtgatcgacaagctgcccttcgacaagtacgagctggagcccagccccctgacccagttcatcctggagagaaagagcccccagacctgctggcaggtgtacgtgagcaacagcgccaagtacagcgagctgggccaccccttcggctacctgaaggccagcaccgccctgaactgcgtgaacctgttcgtgatgccctacaactaccccgtgctgctgcccctgctggacgacctgttcaaggtgcacaaggccaagcccaccctgaagtggagacagagcttcgagagctacctgaagaccatgcccccctactacctgggccccctgaagaaggccgtgagaatgatgggcgcccccaacctgatcgccgacagcatggagtacggcctgagctacagcgtgatcagctacctgaagaagctgagccagcaggccaagatcgagagcgacagagtgatcggcagcgtgggcaagaaggtggtgcaggagaccggcatcaaggtgagaagcagaagccacggcctgagcatggcctacagaaaggacttccagcagctgctgcagggcatcagcgaggacgtgccccacagactgctggacctgaacatgaaggagtacaccggcttccaggtggccctgctgaacaaggacctgaagccccagaccttcagaaacgcctacgacatccccagaagaaacctgctggaccacctgaccagaatgagaagcaacctgctgaagagcaccagaagattcctgaagggccaggacgaggaccaggtgcacagcgtgcccatcgcccagatgggcaactaccaggagtacctgaagcaggtgcccagccccctgagagagctggaccccgaccagcccagaagactgcacaccttcggcaaccccttcaagctggacaagaagggcatgatgatcgacgaggccgacgagttcgtggccggcccccagaacaagcacaagagacccggcgagcccaacatgcagggcatccccaagagaagaagatgcatgagccccctgctgagaggcagacagcagaaccccgtggtgaacaaccacatcggcggcaagggcccccccgcccccaccacccaggcccagcccgacctgatcaagcccctgcccctgcacaagatcagcgagaccaccaacgacagcatcatccacgacgtggtggagaaccacgtggccgaccagctgagcagcgacatcacccccaacgccatggacaccgagttcagcgccagcagccccgccagcctgctggagagacccaccaaccacatggaggccctgggccacgaccacctgggcaccaacgacctgaccgtgggcggcttcctggagaaccacgaggagcccagagacaaggagcagtgcgccgaggagaacatccccgccagcagcctgaacaagggcaagaagctgatgcactgcagaagccacgaggaggtgaacaccgagctgaaggcccagatcatgaaggagatcagaaagcccggcagaaagtacgagagaatcttcaccctgctgaagcacgtgcagggcagcctgcagaccagactgatcttcctgcagaacgtgatcaaggaggccagcagattcaagaagagaatgctgatcgagcagctggagaacttcctggacgagatccacagaagagccaaccagatcaaccacatcaacagcaactag

SEQ ID NO: 32453 - DNA, 381 bp, Artificial Sequence
  derived and/or modified sequence
atgaaccagagaagccacctgggcaccacctacctggacaccgccaagggcgccgtggagaccttcatgaagctgagagccagagaccccgccagcagaggcgacagatacatgctggtgaccttcgaggagcccccctacgccatcaaggccggctggaaggagaaccacgccaccttcatgaacgagctgaagaacctgcaggccgagggcctgaccaccctgggccagagcctgagaaccgccttcgacctgctgaacctgaacagactggtgaccggcatcgacaactacggccagggcagaaaccccttcttcctggagcccgccatcatcatcaccatcaccgacggcagcaagctgaccaccaccagcggctag

SEQ ID NO: 32454 - DNA, 393 bp, Artificial Sequence
  derived and/or modified sequence
atgaaccagagaagccacctgggcaccacctacctggacaccgccaagggcgccgtggagaccttcatgaagctgagagccagagaccccgccagcagaggcgacagatacatgctggtgaccttcgaggagcccccctacgccatcaaggccggctggaaggagaaccacgccaccttcatgaacgagctgaagaacctgcaggccgagggcctgaccaccctgggccagagcctgagaaccgccttcgacctgctgaacctgaacagactggtgaccggcatcgacaactacggccagggcagaaaccccttcttcctggagcccgccatcatcatcaccatcaccgacggcagcaagctgaccaccaccagcggcgtgcaggacgagtag

SEQ ID NO: 32455 - DNA, 2625 bp, Artificial Sequence
  derived and/or modified sequence
atgaaccagcgttcccacctcggaacaacttacttagatacggcaaaaggggccgtcgagaccttcatgaagcttagggcacgggaccccgcatcaaggggagaccgttacatgttggtcaccttcgaggagcccccatatgccatcaaggcagggtggaaggaaaatcacgcaacctttatgaatgagttgaagaacctacaggcggaggggctcactaccttaggccagtcgctcaggactgcatttgatttgctgaatcttaaccgactggtgactggcattgataactacggacagggaagaaatccatttttcctggagccagccattattatcactatcaccgatgggagtaagctcacaactacgagtggtgtccaggacgagctgcatctgcctctgaactcccctctacctgggtccgagctgactaaggagcctttcagatgggatcagagactctttgccctcgtgttacgactgcctggcacgatgtccgtggaaagcgagcagttgaccggtgtccccctggacgacagcgcaatcactccaatgtgtgaagtgacgggcggtaggagttattctgtttgttccccgaggatgctgaaccagtgcctcgaatccctggtccagaaagtgcagtctggagtagttattaattttgagaaggccggtcctgatccaagtcctgtagaggatggacagcctgacatcagccgccctttcgggagtcaaccgtggcacagctgccataaactcatttatgtgcggcccaacccaaaaactggagtgcccatcggacactggcctgtacccgagtccttctggcctgaccaaaatagcccaaccctgcccccccgaacttctcaccctgttgtgaagttctcttgtactgactgtgaacccatggtcatcgataagttgccattcgataaatacgaattggagccttccccactgacccagttcatactcgagcgaaaatctccacagacgtgctggcaggtgtacgtgtcaaatagcgcgaaatactcggaactggggcatccctttggttatttaaaagcttccaccgccctgaactgtgtgaatctgtttgttatgccctataattatcctgtcctgctacctctgctggacgatctgtttaaggtccacaaggctaagccaacactgaaatggcgacaaagctttgagtcctacctgaagacgatgcctccatactacctaggacctcttaagaaggccgttcgcatgatgggagcccctaatctgattgccgattccatggagtacggactgagctatagtgtgatctcttaccttaagaaactgagccagcaagcgaaaatcgaaagcgaccgcgtaatcggcagtgtcggaaagaaagttgtgcaggaaacaggcattaaggtgaggtcccgcagccatgggcttagtatggcttatcgcaaggactttcagcagcttctccagggcatcagcgaggatgttcctcatcgattactggacttgaatatgaaggaatatactgggttccaggtggctctgctcaataaggatctaaaaccccagacctttcggaatgcatatgacattccgcgcagaaacttactggaccacctgacacggatgaggtctaacttgctgaagagcacccgacgctttctgaaggggcaggatgaagatcaggttcacagcgttccaattgctcagatgggaaattaccaggaatacctcaagcaggtgccctctcctctccgcgagcttgatccagaccagcccagaaggctgcatacatttggcaatcccttcaagttggacaaaaagggcatgatgatagacgaggcagacgaattcgtcgccggacctcagaataaacacaaaaggcccggagaaccaaatatgcagggcattcctaaacgcaggcgctgtatgagccctctgttgcggggccgccagcaaaatccagtggtaaacaaccatatcggggggaaaggtcctcctgcacccaccactcaggcccagcccgaccttattaagcccctccccctgcataagattagcgaaaccacgaacgactcaattatccacgatgttgtagagaatcatgtggctgatcaactgtcttcagatatcacacctaatgcgatggataccgagtttagtgcaagctctcccgcctcccttttagaaagacctacaaaccacatggaggcactggggcatgaccacctggggaccaacgatttaacggtcggggggtttttggagaatcatgaggaaccccgtgacaaggagcagtgcgcggaagagaacataccagcctccagcctaaacaagggcaagaagctgatgcactgccgcagccatgaagaggtgaacactgagctgaaggcccagattatgaaggagatccgcaagcctggaaggaagtacgagagaatttttaccctgctcaagcatgtgcagggatcactccagaccaggttgattttcctgcagaacgtgattaaagaggcatcaaggttcaagaaacggatgttgatcgagcagctcgagaactttctcgacgaaatacaccggcgcgcgaatcaaattaaccatattaactccaactag

SEQ ID NO: 32456 - DNA, 381 bp, Artificial Sequence
  derived and/or modified sequence
atgaaccagagatcgcacctgggaacgacttatctcgacactgctaaaggggcggttgagacatttatgaagctccgggcccgtgaccccgcctccagaggagaccggtatatgcttgtgacattcgaggaacccccttacgctatcaaggctggatggaaggaaaatcacgcgactttcatgaatgaactaaaaaatctgcaggccgagggactaacaactctggggcagagcctcagaacagccttcgacctgctaaacctgaatcggttggtgaccgggatagacaattatggccaggggagaaacccgttctttctagagcccgcaataattatcacaattaccgatggatcaaagctcactactacatcagggtag

SEQ ID NO: 32457 - DNA, 393 bp, Artificial Sequence
  derived and/or modified sequence
atgaaccagagatcgcacctgggaactacatacctcgacactgcaaaaggtgccgttgagacgttcatgaaactacgcgcccgcgaccccgcctcaaggggcgacaggtacatgctggtcactttcgaggagcccccctacgccatcaaggctgggtggaaagaaaatcatgctacttttatgaatgagttaaaaaacctgcaggccgaaggtctgactaccctgggccagagcctcaggaccgcgtttgaccttcttaatcttaatcgcctcgtcactggcatcgataactatggacagggaaggaaccccttttttctggaacctgccatcatcattactattacggatggctcaaagttgaccacgaccagtggtgttcaggacgagtag

SEQ ID NO: 32458 - DNA, 2625 bp, Artificial Sequence
  derived and/or modified sequence
atgaaccagaggagccacctgggcaccacctacctggacacagccaagggagctgtggagaccttcatgaagctgcgggcccgggaccctgccagcagaggagaccgctacatgctggtgacctttgaggagcccccctatgccatcaaggccggctggaaggaaaatcatgccaccttcatgaatgagctgaagaacctgcaggccgagggcctgaccaccctgggccagagcctgaggacagcctttgacctgctgaacctgaaccggctggtgactggaattgacaactacggccagggcaggaaccccttcttcctggagcccgccatcatcatcaccatcacagatggcagcaagctgaccaccaccagcggcgtgcaggatgagctgcacctgcccctgaacagccccctgcccggcagcgagctgaccaaggagcccttccgctgggaccagaggctgtttgccctggtgctgcggctgcccggcaccatgtctgtggagagcgagcagctgactggagtgcccctggatgattctgccatcacccccatgtgtgaggtgactggaggccgcagctacagcgtgtgcagccccaggatgctgaaccagtgcctggagagcctggtgcagaaggtgcagagcggcgtggtgatcaactttgagaaggccggccctgaccccagccctgtggaggatggccagcctgacatcagccggcccttcggcagccagccctggcacagctgccacaagctgatctacgtgcggcccaaccccaagacaggagtgcccatcggccactggcctgtgcctgagagcttctggccagaccagaacagccccaccctgccccccaggaccagccaccctgtggtgaagttcagctgcacagactgtgagcccatggtgattgacaagctgccctttgacaagtatgagctggagcccagccccctgacccagttcatcctggagaggaagagcccccagacctgctggcaggtgtatgtgagcaacagcgccaagtacagcgagctgggccaccccttcggctacctgaaggccagcacagccctgaactgtgtgaacctgtttgtgatgccctacaactaccctgtgctgctgcccctgctggatgacctcttcaaggtgcacaaggccaagcccaccctgaagtggaggcagagctttgagagctacctgaagaccatgccaccctactacctgggccccctgaagaaggctgtgaggatgatgggcgcccccaacctgattgctgacagcatggagtatggcctgagctacagcgtcatctcctacctgaagaagctgagccagcaggccaagattgaaagtgacagagtcatcggctctgtgggcaagaaggtggtgcaggagaccggcatcaaggtgcgcagccgcagccacggcctgtccatggcctacaggaaggacttccagcagctgctgcagggcatcagtgaagatgtgccccaccggctgctggacctgaacatgaaggagtacacaggcttccaggtggccctgctgaacaaggacctgaagccccagaccttcagaaatgcctatgacatccccaggaggaacctgctggaccacctgaccaggatgaggagcaacctgctgaagagcacccggcgcttcctgaagggccaggatgaggaccaggtgcacagcgtgcccatcgcccagatgggcaactaccaggagtacctgaagcaggtgcccagccccctgcgggagctggaccctgaccagccccggcggctgcacaccttcggcaaccccttcaagctggacaagaagggcatgatgattgatgaagcagatgaatttgtggccggcccccagaacaagcacaagaggcctggagagcccaacatgcagggcatccccaagagaagacgctgcatgagccccctgctgcggggccggcagcagaaccctgtggtgaacaaccacatcggcggcaaaggacctccagcccccaccacccaggcccagcctgacctgatcaagcccctgcccctgcacaagatcagcgagaccaccaatgacagcatcatccatgatgtggtggagaaccacgtggccgaccagctgagcagtgacatcaccccaaatgccatggacacagagttcagcgccagcagccctgccagcctgctggagcggcccaccaaccacatggaggccctgggccatgaccacctgggcaccaatgacctgactgtgggcggcttcctggagaaccacgaggagccccgggacaaggagcagtgtgccgaggagaacatcccagccagcagcctgaacaagggcaagaagctgatgcactgccgcagccatgaggaggtgaacacagagctgaaggcccagatcatgaaggagatcaggaagccaggcaggaaatatgaaagaatcttcaccctgctgaagcacgtgcagggcagcctgcagaccaggctcatcttcctgcagaatgtcatcaaggaggccagccgcttcaagaagaggatgctgattgagcagctggagaacttcctggatgagatccacagaagagccaaccagatcaaccacatcaacagcaactag

SEQ ID NO: 32459 - DNA, 381 bp, Artificial Sequence
  derived and/or modified sequence
atgaaccagaggagccacctgggcaccacctacctggacacagccaagggagctgtggagaccttcatgaagctgcgggcccgggaccctgccagcagaggagaccgctacatgctggtgacctttgaggagcccccctatgccatcaaggccggctggaaggaaaatcatgccaccttcatgaatgagctgaagaacctgcaggccgagggcctgaccaccctgggccagagcctgaggacagcctttgacctgctgaacctgaaccggctggtgactggaattgacaactacggccagggcaggaaccccttcttcctggagcccgccatcatcatcaccatcacagatggcagcaagctgaccaccaccagcggctag

SEQ ID NO: 32460 - DNA, 393 bp, Artificial Sequence
  derived and/or modified sequence
atgaaccagaggagccacctgggcaccacctacctggacacagccaagggagctgtggagaccttcatgaagctgcgggcccgggaccctgccagcagaggagaccgctacatgctggtgacctttgaggagcccccctatgccatcaaggccggctggaaggaaaatcatgccaccttcatgaatgagctgaagaacctgcaggccgagggcctgaccaccctgggccagagcctgaggacagcctttgacctgctgaacctgaaccggctggtgactggaattgacaactacggccagggcaggaaccccttcttcctggagcccgccatcatcatcaccatcacagatggcagcaagctgaccaccaccagcggcgtgcaggatgaatag

SEQ ID NO: 32461 - DNA, 2625 bp, Artificial Sequence
  derived and/or modified sequence
atgaaccagcggagccacctgggcaccacctacctggacaccgccaaaggagctgtggaaacgttcatgaaactgcgtgcgagggacccagcttctcggggtgataggtatatgctcgtgacattcgaggaaccaccctatgctattaaggcgggctggaaagaaaaccacgctaccttcatgaacgagttgaagaatctgcaggcagaagggctgaccactttaggacagagtttgagaacagcctttgacctcctaaacttgaatcgcctggttacaggaatcgacaactacggtcaggggcgtaaccccttctttctggagcccgcaatcattatcactataacagacgggagcaagctgactacaacctctggagtccaggacgagctgcacctaccattaaacagtccccttcccggatccgagttaacaaaagaaccttttaggtgggaccagaggttgtttgctcttgttctgcggctacctggaaccatgtctgttgagtctgagcagctaactggggtacctcttgatgattctgctattactccaatgtgtgaagtaacaggtggacgatcttattccgtctgctcacctcggatgcttaaccaatgtctggagtccctggtgcagaaggtccagtctggcgtggttattaactttgaaaaggctggacccgatccgagcccggtggaggatgggcaacctgatatttcccgcccgttcggatctcagccatggcactcttgccataagctaatctatgtgaggccaaaccctaagactggtgttccaattggtcattggccagtgccagaatctttttggccagatcagaattccccaaccctgcccccgaggacctctcacccagtggtaaaattcagttgcacagattgtgaaccaatggtgatcgacaaactgccatttgacaaatatgaactggaaccatctccactgacgcagtttatcctggaacggaaatcccctcagacctgttggcaggtgtacgtctctaactccgctaagtattccgagctggggcaccctttcgggtacctcaaagcctctactgccctcaattgtgtgaatctgtttgtgatgccctataactaccccgttctcctcccactccttgacgatctgtttaaggttcataaggccaaacctaccctgaaatggcgccagtcctttgagagctacttgaagactatgccaccctactatctgggacctctgaagaaagctgtgagaatgatgggcgcacccaacttaatcgctgactccatggagtatggcttgtcctattcggtaatctcgtaccttaagaaactctcccagcaggccaagatagaaagtgatagggtaatcggtagcgtaggcaagaaagtggtccaggagaccggaatcaaagtgaggtcgcgcagccacgggctatcaatggcctatagaaaagactttcagcagcttctgcaaggcatctcagaggacgtaccccacagacttttggacctgaatatgaaggagtatactgggttccaggtggcgctgttaaacaaggacctcaagccgcagaccttcaggaacgcctatgacataccacggagaaatctgcttgaccatctcactcggatgagaagtaatctgctgaagtcaaccaggagattcctgaaaggccaggacgaggaccaagttcactcagtgcccatcgctcagatgggcaactatcaggaatatctcaaacaggtgccctcacccctcagagagctggaccctgatcagcccaggaggctgcacacctttgggaatccatttaagctggataaaaaaggtatgatgattgatgaagccgatgaattcgtcgcaggcccccagaataagcataaacggccgggcgagccaaatatgcaggggattccgaaaaggcgcagatgtatgagccccttgttaagaggcaggcagcagaaccccgttgtgaataatcatatcggcggtaaagggcccccagctcccactacccaagcccagccagatcttataaaaccactgcctttgcacaaaataagtgaaacgaccaatgattctattattcacgatgtcgtagagaaccacgtcgctgaccaactgagctccgatattactcccaatgccatggacactgagtttagtgcaagtagccccgcaagcctactggagcgcccaacaaaccacatggaggccctgggacatgaccatttaggcactaatgatttaactgtgggcgggttccttgaaaaccacgaagagccccgcgacaaggagcagtgtgccgaggaaaacataccagcatcttccctaaataaagggaaaaagctaatgcactgccgctctcacgaggaggtcaatactgaactgaaggcacagatcatgaaggagattagaaagcccgggcgcaagtacgagagaatcttcaccttgctcaaacacgtccagggaagcctgcagacgagacttattttcctccaaaatgtgataaaagaggccagtcgatttaagaagagaatgcttatcgagcagctcgaaaattttcttgacgagatccatcgtcgtgccaaccagatcaaccacataaactctaattag

SEQ ID NO: 32462 - DNA, 381 bp, Artificial Sequence
  derived and/or modified sequence
atgaaccagcggagccacctgggcaccacctacctggacaccgccaagggcgcagtggagaccttcatgaagctgagagcaagggatcccgccagccgcggggaccgctatatgctggtcacctttgaagagccaccctacgcgattaaagctgggtggaaggaaaatcacgcgacgttcatgaacgaactgaagaacttgcaggcagagggtctgaccaccctgggtcagagcctgcgcacagcttttgacctcttaaatcttaaccggctggtcaccggaattgataattacggacaggggaggaatccctttttccttgaaccggctattatcatcacaatcacggatggatccaaactaaccaccaccagtgggtag

SEQ ID NO: 32463 - DNA, 393 bp, Artificial Sequence
  derived and/or modified sequence
atgaaccagcggagccacctgggcaccacctacctggacaccgccaagggcgctgtggagacattcatgaaactgcgcgcgcgggatcccgcctcacgcggggatagatacatgctcgttacctttgaggaaccgccatatgccatcaaggctggctggaaagagaatcatgccacttttatgaatgaactcaagaacttgcaggccgaaggccttaccacacttggccagtctcttagaacagctttcgacctgctgaacctcaaccggctggtcactggaatcgataattacggccaaggccggaacccatttttcctcgaaccagctatcatcatcaccataacagacggcagcaagttgacaaccacaagcggggtccaagatgaatag

SEQ ID NO: 32464 - DNA, 2625 bp, Artificial Sequence
  derived and/or modified sequence
atgaaccaacgctctcatttaggtaccacttatctggacaccgcaaagggcgcagtggaaacctttatgaagctcagagctagagatccagcatcgagaggagatcgctatatgctggtaacatttgaggagccaccctatgcaatcaaagcaggatggaaggagaaccacgcaacatttatgaatgaactgaagaatctccaggccgagggcctcacaaccctcggccagtctctccgcacggctttcgacctcctcaacctcaaccggttggtgactggcattgacaattatggccaagggcgtaacccattcttccttgaaccagccattattattactataactgatggttcaaagcttacaaccacctcaggggtgcaagacgaactacatctgcctctcaactccccactccccggatctgagcttacaaaagagccattccggtgggatcagcgcctgttcgccctcgtgctacgactcccgggtaccatgagtgtcgaaagtgaacaattaaccggcgtcccactcgacgactccgcgattactccaatgtgtgaagtaaccgggggaagatcttactctgtgtgtagccctagaatgctgaaccagtgcctcgaaagtctagtgcagaaagttcagagcggagtggtcattaattttgagaaggccggtccggatccatcacctgtcgaagatggacagcccgatatctcacgcccttttggcagccagccctggcattcctgtcacaagcttatttatgtacggccaaaccccaagaccggagtgcccatcgggcactggccagttccagagtcattttggcctgaccagaattctccgaccttgcccccacgaacttctcacccagtggtcaaattcagctgtactgactgcgaaccaatggttatagacaagctgccttttgacaagtatgagctggagccctctccattaactcagtttattttggagcggaaatcccctcaaacctgttggcaggtgtacgtctctaattccgctaagtactcagaactgggtcacccatttggttatttgaaagcctctacagcccttaattgcgttaacctctttgtcatgccctacaattatccggtgttgttgcctctattggatgatctgtttaaagtgcacaaagccaagccaaccctgaagtggcgtcagtcatttgagagctatctgaagaccatgccaccatactatctgggaccgctgaaaaaggccgtccgaatgatgggggctccgaatctcatagcagattctatggaatacggactgtcctacagcgtgatttcctacttgaaaaagttgtcccaacaggccaagattgaatcagatagagtgatcggttcagtcggaaagaaagtggtgcaggaaacaggaattaaagtgcggtcccgtagccatggcttatccatggcttacagaaaagacttccaacaactgctccagggcatcagtgaagatgtgccccacagactgctagacttaaatatgaaggagtacacagggtttcaagtggcacttctaaataaggacttaaaaccacaaacgttccgcaatgcctatgacattccgagaaggaaccttctcgaccatttaacgaggatgaggagtaatctgctcaaatcgacacgacgcttcctcaagggtcaggatgaagatcaagtgcatagcgttccaatagcccagatggggaattatcaggagtatctaaaacaggttcctagtcccctcagagagctcgatcccgaccagcctagaagactccacactttcggtaatccattcaagctggacaaaaagggcatgatgatcgatgaggccgatgagtttgtggcagggccacagaacaaacacaaacgcccaggcgaacctaacatgcaggggatccctaagagacgtaggtgtatgagtcctctcctgcgaggacgccagcagaacccagtagtcaacaaccatattggcggtaaaggtcccccagcccctacgacgcaggcacagcccgacctcataaaacctttgcctctccataagataagtgagaccaccaatgacagtattattcacgatgtggttgagaatcacgtggccgatcaattgtctagcgacattacaccaaacgcaatggacacagaattttccgcctcttcgcctgcctctctgttggagcggcctaccaaccacatggaggccctgggccatgatcatcttggaacaaacgacttaaccgtggggggattcctcgagaatcatgaagagccaagggacaaggaacagtgtgcggaggaaaacattccagctagctcactgaataaggggaagaagctcatgcactgtcgctcgcacgaggaagtgaacacagagctgaaggctcaaattatgaaagaaatccgaaagcctggcaggaagtatgaacgaattttcaccctgttaaagcatgtgcaaggttcactgcagacacgactcatatttcttcaaaacgttattaaggaggccagcagattcaagaagaggatgctgatcgagcagctcgaaaacttcctcgacgagatccacaggagagcaaatcaaatcaatcatatcaactcaaactag

SEQ ID NO: 32465 - DNA, 381 bp, Artificial Sequence
  derived and/or modified sequence
atgaaccagcgatcccacttggggacaacttacctggacacagcaaagggggctgtagaaacttttatgaaacttagggctagggacccagcttcccggggagataggtatatgctagtcacatttgaagagcccccttacgccattaaagccggttggaaagagaatcatgctactttcatgaatgaattgaagaaccttcaggccgaaggactcaccactctgggacagtccctgcgaaccgctttcgacctgcttaatctgaacagactggtaactgggatcgacaattatggtcagggtcgaaatccatttttcctagagcctgccatcattatcaccatcacagatggatccaaattgacgacaaccagcggatag

SEQ ID NO: 32466 - DNA, 393 bp, Artificial Sequence
  derived and/or modified sequence
atgaaccaaaggtcgcatcttggaaccacttatctcgacacggcgaagggcgcagtcgaaacattcatgaagctgcgcgctagggacccagcctctagaggcgaccgctacatgctggtcacatttgaagagcccccatacgctatcaaagccggatggaaggagaatcatgcaacatttatgaatgaactcaaaaacttacaggcagagggcctgaccactctcgggcagagcctccggaccgctttcgaccttctgaatctcaatcgactggtcactggaatcgacaattatgggcagggcagaaaccctttctttttagaacctgcgattataatcaccatcaccgacggctccaagcttacaaccacgtctggagtgcaagacgagtag

SEQ ID NO: 32467 - DNA, 3022 bp, Artificial Sequence
  derived and/or modified sequence
gttttgtttgttgtggttttgatgttttttttcctttcagctaaaggagcagcccagtggttttcaagaagtgctaaagtgcactgactgtctcatgatgactggtgcctcagggagggtcatgattcctggatacaggatcgacctgatcctggatgtcacttcaagcagtcagatcgtggggaaaagccttgtctaatggctagccttcctcaaaagtctgatgctagtcatctcggaaggcctcagaaaaagccttaaagcttcatttacctcttaattctcctttgcctggaagtgaattgaccaaggaaccttttcgttgggatcagagactctttgcattagtgttgcggttgcctggcaccatgtcagtagaatcagaacagttgacaggtgtgcctttagatgactctgcaatcacaccaatgtgtgaagtgacaggcggccgttcatattctgtgtgttctccaagaatgcttaatcagtgtctggagtccttggtgcagaaagtacaaagtggggtggtaataaactttgaaaaagcaggaccagatccttcccctgtagaagatgggcagccagatatatcaaggccttttggatctcagccttggcatagctgtcacaaactcatatatgtcagaccaaatcctaaaactggggttcctataggtcattggcctgttccagagtctttttggccagatcaaaattcgccaacactaccacctcgtacatctcatcctgtagtgaagttttcctgtacagactgtgaaccaatggttattgataaacttccttttgacaaatatgagttggaaccttcaccactgactcaatttatcctggaaaggaaatctcctcaaacatgttggcaggtgtacgtgagcaatagtgcaaaatacagtgaacttggtcatccttttggttacttgaaagccagtacagcactgaactgtgtcaacttatttgtgatgccttacaattatccagtccttcttcccctcttagatgacttgtttaaagtgcataaagcaaaaccaacattgaagtggagacagtcatttgaaagttatttgaagacaatgcctccctactatcttgggcccttgaagaaagctgttaggatgatgggagcacctaacctaatagcagacagtatggaatatggacttagttacagtgtcatttcatacctcaaaaaactgagtcaacaggccaaaatagaatctgatcgagtcattggatctgtaggcaaaaaagtagtacaggagactggaataaaagtccggagccgatcacatggtttatcaatggcatataggaaagattttcaacaactcctccagggaatttcagaggatgtccctcacagactgctagaccttaatatgaaggaatacactgggttccaagttgctttgctgaataaggatttgaagccacagacatttagaaatgcttatgacataccaagacgaaatcttttggatcacttaacaagaatgagatctaatcttttgaagagcactcgcagatttctgaaaggacaggacgaagatcaagtgcacagtgttcctatagcacaaatggggaactaccaggaatacctcaagcaagtaccttctccactaagagaacttgatcctgatcagccacgaaggttgcatacatttggcaacccctttaagctggataagaagggtatgatgatagatgaagcagatgaatttgtggctggacctcaaaataaacataaacgacccggagaaccaaatatgcaagggatccctaaaagacgtcggtgtatgtctccactactaagaggcagacagcagaatcctgttgtaaacaatcatattgggggaaaaggaccacctgcacctacaactcaagcacagccagatcttattaaacctcttcctcttcataaaatttcagaaaccactaatgattcgataatacatgatgtggttgaaaatcatgttgcagaccaactttcatcagacattacaccaaatgctatggatacggaattttcagcatcttctccagccagtttactggaacggccaaccaatcatatggaggctcttggtcatgaccatttaggaaccaatgacctcactgttggtggatttttagaaaatcatgaggagccaagagataaagaacaatgtgctgaagagaacataccagcatcttcactcaacaaaggaaagaaattgatgcattgcagaagccatgaagaggtcaatactgaactaaaagcacaaataatgaaagagatccgaaagccaggaagaaaatatgaaagaatcttcactttactgaagcatgtgcaaggcagtttacaaacaagactaatatttttacaaaatgtcattaaagaagcatcaaggtttaaaaaacgaatgctaatagaacaactggagaacttcttggatgaaattcatcgaagagccaatcagatcaaccatattaatagcaattaaaagaaaatagaatgtggccacttatttcactatcttcttcaaatacaaagtaaatacaagactgttgtgatcttgcattcattttctgacatgcattgttggctatttgaaatactaaaagcaaatctacagatcctttttccatcattttacagtgaccttttcttcattttggtttatttttgtaatgtgaaaagtatcactctaaaaaacatttttaatttaacaaactaaaaatattcctccaaatctcttgcttgtcattgactcttgcgtgtcaatttccctcaggttctattttcttaaaccaacctttaaaattgtcacctctgttaaggttgaactttgccaaaaaaaaaagaagttactttgtaatttttggggaaaaaagcacatacattaaaactaggtaatgttttgtatatacagttattttggatatattattgtaagttgtacaaatgtattttgaagaatatttaagaaaagcacttttgttattccatcaataaatgctctatttt

SEQ ID NO: 32468 - protein, 115 aa, Artificial Sequence
  derived and/or modified sequence
MPILLFLIDTSASMNQRSHLGTTYLDTAKGAVETFMKLRARDPASRGDRYMLVTFEEPPYAIKAGWKENHATFMNELKNLQAEGLTTLGQSLRTAFDLLNLNRLVTGIDNYGQVG

SEQ ID NO: 32469 - DNA, 348 bp, Artificial Sequence
  derived and/or modified sequence
atgcccatcctgctgttcctgatcgacaccagcgccagcatgaaccagagaagccacctgggcaccacctacctggacaccgccaagggcgccgtggagaccttcatgaagctgagagccagagaccccgccagcagaggcgacagatacatgctggtgaccttcgaggagcccccctacgccatcaaggccggctggaaggagaaccacgccaccttcatgaacgagctgaagaacctgcaggccgagggcctgaccaccctgggccagagcctgagaaccgccttcgacctgctgaacctgaacagactggtgaccggcatcgacaactacggccaggtgggctag

SEQ ID NO: 32470 - DNA, 348 bp, Artificial Sequence
  derived and/or modified sequence
atgccaattttactctttcttatcgacacatccgccagtatgaaccagcgcagtcatcttggaactacatatcttgacacggctaagggagccgtggagaccttcatgaagttgcgagccagagatccagcttctcgaggggatcgctatatgctggtaactttcgaggagccaccgtatgctataaaggccggatggaaggagaaccatgctacctttatgaacgaactgaaaaacttgcaggccgagggtctgactaccctgggccagtccctgcgtacagcgttcgacctccttaatctgaatagactggtcactgggattgataactatggccaggtgggttag

SEQ ID NO: 32471 - DNA, 348 bp, Artificial Sequence
  derived and/or modified sequence
atgcccatcctgctcttcctgattgacaccagcgcctccatgaaccagaggagccacctgggcaccacctacctggacacagccaagggagctgtggagaccttcatgaagctgcgggcccgggaccctgccagcagaggagaccgctacatgctggtgacctttgaggagcccccctatgccatcaaggccggctggaaggagaaccacgccaccttcatgaatgagctgaagaacctgcaggccgagggcctgaccaccctgggccagagcctgaggacagcctttgacctgctgaacctgaaccggctggtgacaggcatcgacaactacggccaggtgggctag

SEQ ID NO: 32472 - DNA, 348 bp, Artificial Sequence
  derived and/or modified sequence
atgcccatcctgctgttcctgatcgacaccagcgccagcatgaaccaacggagccatctgggcaccacttacctggatacggctaagggcgctgtggaaacgtttatgaaactaagagcaagggatcccgccagccggggcgaccggtacatgcttgttacatttgaagaacccccgtatgcaatcaaagcaggatggaaggaaaaccacgccacctttatgaacgagcttaaaaacttgcaggctgaagggctgactaccctgggccaatcactccgaaccgcatttgatctgctcaacctgaaccgtctggtcacaggcatagataactacgggcaagtgggttag

SEQ ID NO: 32473 - DNA, 348 bp, Artificial Sequence
  derived and/or modified sequence
atgcccatcctgctgtttctaatcgataccagcgcaagtatgaaccagcggtcacacctcggcactacatatctggacaccgccaagggcgcagtcgagactttcatgaagctgcgcgctcgcgatcctgcttctcggggagacaggtacatgcttgtcacctttgaggagccaccctacgcaatcaaagccggttggaaggaaaaccacgccacattcatgaacgagttaaaaaatctccaagcagagggactgactaccttaggacaatctctgaggactgccttcgatctgctgaacctgaatcgtttagtaactggtattgacaactatggacaggtggggtag

SEQ ID NO: 32474 - DNA, 2494 bp, Artificial Sequence
  derived and/or modified sequence
agtagaacggcgaggcggtgtatcacgtggctcggggacgtgtcaggggcggagcctccgcagcccctgcccgagttaaaaccggagtgtgagagagaaaagcgcttcagtagcgagaggggctgagaaagtggtgacaccgccggggtgcggagggagtccctgaaacttctcccaacagccccagggccaatcttccctcagcccactcccctcttcgccagctcccaggtccccactcctgtaccgggggtggggtggggagccaggcccgtctcccgctgggacacacacaggggccgggagcggggacgggacccccgaggcgggggggacgaaccgacagacagacggctgggcgcccgccccagcgggcaggcaggcaggaggaggcggaggcgggggtacgacggggagcactgggtctggggagtttcctctcaactatcgggggagaaactccccgcagccggaggaaagacccagacagtgttttcctcccgggggccgtgctcccccgccccgcgtagcggcggtcgccgccaccggcgcctccacctctaccatctcctctttctccaccacctcgggccccggtgtccccggccagcactatgcccatcttactgttcctgatagacacgtctgcctctatgaaccagcgcagccatctgggcaccacctacctggacacggccaaaggcgcggtagagaccttcatgaagctccgtgcccgggaccctgccagcagaggagacaggtatatgctggtcactttcgaagagccgccctatgctatcaaggctggatggaaagaaaaccatgcaacgtttatgaatgaattgaaaaaccttcaggctgaaggacttacgactcttggccaatccctaaggacagcttttgatttattaaatttaaatagattagtaactggcatagacaactatgggcaggtaggttgaataataaggtggcaaaatagttgatttttcattttgtggaaaaacacagtccagtccaaaaactacataacatgaaatgcaagtataaaacattccaaattaaaatagaatatgcacattgttcaaaggcaaaactcttaccctactatatatattttacatccctcattttttccccctctaaaatgcattggtattcaggattagaatctgaaacttttgctataaagttgacatacattggttttaatcccttgaaagttcagtaaagacctaaaaggaaaagcatcctaccacaccacactcatgttgtatgtgcaactattatagtggcttagagacactagttcgtgttcttcgtttctatattagtaaagatgttagaggaaattaatctgtttgttgcatcagggtttaatgtgaccatgttgtataactattctgaaaggtaagaagtttttcactggagtacagtcactggctgagaacatttaagttttcttttgaagcatacacagttaacaactattgcaggaagaactctgaattaaatttcaggcccagagttttgatttaaactccaaacccttggaaaaaaagactgctggaaaatatgaaagaacccttcgtttcttaacccccacaagtccttttattgcacttactttcatgtatttgaggatgagaggagctttaaatcaacaataattcactaaggaataatgcaaggtggtctattgtaacattttatgatattattgccctggaaataaaagatactgaacaatgtataatgttacatgtaacaaaggaatattatttccaaggagctcagttcttatgttgtagtgaaaagcactattcctaattatatattgggtatatgttgtattttcccaagtcccacagtccctagttttgtgagtttcgtacatttcagggaaattctttctgtgactacaacttttatttgcttcctattgaaggaaattgacttgtttctgttttaggaaattttaagcttcttagggataacttcagtgcttaagtgtctttggaaataactgaatttagttctataacatttaaaatgtacactgaaattcagagtgagcttaccaaattgaacttccaacgtttagttaggtaaatatgtactttcttaccacattaatacttttatgtttttcccatctctgctgcttttattttgcaacttttaataatttaggtagatttgcaatgaactttttggtttgtttctgtaaaatagtagtggatttccttctcttttatattcctttgtgatatgtagtgcaacacagtcttactgcttaaggttttcatccttacctctttgagttcaaagagatatttaaaacttgccattatttggttacctttatttggttgtcatgttgttagtgtatggcagaactattagtttcctctttttctgcatcacatttcataagtggtcaaggcatttggacatattcacctcctattacctattaaaaatacttcttaaa

SEQ ID NO: 32475 - protein, 397 aa, Artificial Sequence
  derived and/or modified sequence
MAQSPPPQSLLGHDHWIFAQGWGWAGHWDSTSPASSSDSSGSCPCDGARGLPQPQPPSCSSRAAEAAATTPRRARTGPAGGQRQSASEREKLRMRTLARALHELRRFLPPSLAPAGQSLTKIETLRLAIRYIGHLSAVLGLSEESLQCRRRQRGDAGSPWGCPLCPDRGPAEAQTQAEGQGQGQGQGQGQGQGQGQGQGQGQGQGRRPGLVSAVLAEASWGSPSACPGAQAAPERLGRGVHDTDPWATPPYCPKIQSPPYSSQGTTSDASLWTPPQGCPWTQSSPEPRNPPVPWTAAPATLELAAVYQGLSVSPEPCLSLGAPSLLPHPSCQRLQPQTPGRCWSHSAEVVPNSEDQGPGAAFQLSEASPPQSSGLRFSGCPELWQEDLEGARLGIFY

SEQ ID NO: 32476 - DNA, 872 bp, Artificial Sequence
  derived and/or modified sequence
gaggaagtgccgcgtcttggtgggtctggagctggctgacaatgcaggagacaaggtctcgccatgttgcctaggatggtctcgaactcctgaactcaagtaatccaccttggcctcccaaagtgctgggattacaggcatgagccaccacgcccggccaaattgtatgggtctctctgtgtctccagagccctgtctgtcgctgggagctccatctctcctgccccacccatcatgccagagactgcagcctcagacccccgggaggtgctggagccacagtgcagaggtggtgcccaactcagaggaccagggaccgggcgccgccttccagctcagtgaagcaagccctccccagagctcaggcctgcggttcagtggctgccctgaactttggcaagaagatctggagggggcccgcctgggcatcttctactaaatggcctcggcttccctctttccatccaggaatcagtcctgtagcttgggtgccgccgttttttttaattagtggcttttcatgttctcctttagccaaggctccttttttccaagtgatgtctttcagggaagcagtgtttgaaatagatagcgggtaccttccctggatggagtcagggcgggggcactgtcctccactgctagacacccccagaatgcctggcgctctgcagagcacagtctgagctgctctaagaaggggtctcctttaccctaaaggcagctgggcagggacaggtgggagaatgggtgtaggaggcaggccccaggctctgcttcttggtgacagttggccagagccctgtatgctttgatttttttgtacttaaaaagaaaaaacacacacacacaacaaaaaaaaaaaaaaaaaa

SEQ ID NO: 32477 - DNA, 423 bp, Artificial Sequence
  derived and/or modified sequence
atggggggtcctgagactaaaggactggagggtgacccgcatatgcatcactttctgctgtttactgtgtgctgggagtcttctcgcgctctttgccagatgccacaggaggagaaccctccacaatgtaccgtgaaggacgacacagcgttactgcccaacgatacaaggccctcctggtgtctgtatatggtcgatgccggatctgtggggccaagcgtgcttggcttggtgcgcagggagtcaacccaagagcagtccgcaagcgagagatccagtgtggccccaccggctggcgctaaccgtgactctcaccgcccacttgcagattggccaactttgcccacatcactgctcacttccagcctggtgttccagaagggagagacgactataaaagacaagcgtaagggaaggtattag

SEQ ID NO: 32478 - DNA, 1194 bp, Artificial Sequence
  derived and/or modified sequence
atggcgcagtcgccaccgcctcagagcttgttaggccatgatcattggatttttgcccagggctggggatgggcagggcactgggattctacctcccctgcctcttctagtgattctagcgggtcttgcccttgcgatggagcgcgtggcctcccccagccacaaccccccagctgcagctcccgggccgccgaagccgccgcaaccacgccacgccgggccagaacaggtcccgcaggcggacagaggcagagcgcctcagagcgcgagaagctgaggatgagaactctcgctagggcactgcatgagctgaggagattcctgcctccatcactagctccagcaggccagtccttaactaagatagaaacactgcgccttgcaatccgctatatcggccatttgtcagcagtgttgggtttgtccgaggaatcactccagtgtagacgccgtcaacgcggcgacgctggttctccatggggttgccccctgtgccccgatcgcggacctgctgaagctcagacccaggccgaggggcaaggacagggacaggggcaggggcaggggcagggccagggccaagggcaggggcaggggcaaggccagggccagggccgccggccgggcctggtgagtgctgtgctggcggaggcctcgtggggaagccccagtgcctgtccaggagctcaggcggctcctgaacgcctgggcagaggcgttcacgacactgatccatgggcgacacccccctattgccctaagatacagtcgcccccctattctagccagggaaccactagcgacgctagcctgtggactccgccacaaggctgcccatggacacagtcctctccagaacccagaaacccgccagttccgtggaccgccgcccccgctactcttgaactagctgccgtttaccagggcctgtccgtatcccccgaaccctgcctctcgctgggcgccccctctctcctgccacatccgagctgccagaggctacagccacagacaccagggaggtgttggtcacactcggctgaggtggtgccgaactctgaagaccagggaccaggggcagctttccagctttccgaagcttcaccaccgcagtcgtcaggcttaaggttttcaggctgtccggagttgtggcaggaggacttggagggtgctagactgggcatcttctattag

SEQ ID NO: 32479 - DNA, 1194 bp, Artificial Sequence
  derived and/or modified sequence
atggcccagagccccccaccccagagcctgctgggccatgaccactggatctttgcccagggctggggctgggccggccactgggacagcaccagccctgccagcagcagtgacagcagcggcagctgcccctgtgatggagcccggggcctgccccagccccagccccccagctgcagcagcagagctgctgaggccgccgccaccaccccccggcgggccaggacaggccctgctgggggccagaggcagagcgccagcgagcgggagaagctgaggatgaggaccctggcccgggccctgcacgagctgcggcgcttcctgccccccagcctggccccagctggccagagcctgaccaagattgagaccctgcggctggccatccgctacatcggccacctgtctgctgtgctgggcctgtctgaggagagcctgcagtgcagaagacggcagagaggagatgctggcagcccctggggctgccccctgtgcccagaccggggccctgctgaggcccagacccaggccgagggccagggccagggccagggccagggccagggccagggccagggccagggccagggccagggccagggccagggccagggccggcggcccggcctggtgtctgctgtgctggccgaggcctcctggggcagccccagcgcctgccctggggcccaggccgcccctgagcggctgggccggggcgtgcatgacacagacccctgggccaccccaccctactgccccaagatccagagccccccctacagcagccagggcaccaccagtgatgccagcctgtggaccccaccccagggctgcccctggacccagagcagccctgagcccaggaacccccctgtgccctggacagctgccccagccaccctggagctggccgctgtgtaccagggcctgtctgtgtccccagagccctgcctgagcctgggcgcccccagcctgctgccccaccccagctgccagaggctgcagccccagaccccaggccgctgctggagccacagcgctgaggtggtgcccaacagcgaggaccagggccctggggccgccttccagctgtctgaggccagccccccccagagcagcggcctgcgcttcagcggctgcccagagctgtggcaggaggacctggagggcgcccggctgggcatcttctactag

SEQ ID NO: 32480 - DNA, 1552 bp, Artificial Sequence
  derived and/or modified sequence
atggcccagtcgcctcctccgcagagcctcctcggccacgaccactggatcttcgcccagggctggggctgggccggccactgggactccacgtccccggcctcctcctccgattcgtcgggttcgtgcccctgcgacggcgcccgcggactcccgcagccacagcctccgagctgcagctcccgagccgcagaggcagccgcgacgacgcccagacgagcgcgcaccggaccagcgggcggacagcggcagagcgccagcgagcgggagaaactgcgcatgcgcacgctggcccgcgccctgcacgagttgcgccgctttctgcctccctccttggcgccggccggccagagcctgaccaagatcgagacgctgcgcctggccatccgctacatcggccacctatcggccgtgctgggtctcagcgaggagagtctgcagtgccggcgcaggcagcgcggggacgcggggtccccttggggctgcccgctgtgccccgaccgtggccccgcagaggcgcagacgcaggcggaggggcaggggcaagggcaggggcaggggcaggggcaagggcaggggcaaggacaggggcaaggacaggggcaagggcaggggcgcaggccgggcctggtctccgccgtcctcgccgaggcgtcctggggatccccgtccgcctgccccggagcccaagccgcacccgagcgcctggggaggggggtccacgacacggatccctgggcaacacccccttactgccccaagatacagtcgcccccgtattcgtcccaagggacaacctccgacgcgtctctttggacgccaccccaaggctgtccctggacgcagtcgtccccagagccccggaacccaccagtgccctggacggcggccccagcaactttggagctggccgcagtgtaccagggtctctctgtgtctccagagccctgtctgtcgctgggagctccatctctcctgccccacccatcatgccagagactgcagcctcagacccccgggaggtgctggagccacagtgcagaggtggtgcccaactcagaggaccagggaccgggcgccgccttccagctcagtgaagcaagccctccccagagctcaggcctgcggttcagtggctgccctgaactttggcaagaagatctggagggggcccgcctgggcatcttctactaaatggcctcggcttccctctttccatccaggaatcagtcctgtagcttgggtgcctccttatttgttaattagtggcttttcatgttctcctttagccaaggctccctttttccaagtgatgtctttcagggaagcagtgtttgaaatagatagcgggtaccttccctggatggagtcagggcgggggcactgtcctccactgctagacacccccagaatgcctggcgctctgcagagcacagtctgagctgctctaagaaggggtctcctttaccctaaaggcagctgggcagggacaggtgggagaatgggtgtaggaggcaggccccaggctctgcttcttggtgacagttggcca

SEQ ID NO: 32481 - DNA, 1194 bp, Artificial Sequence
  derived and/or modified sequence
atggcccagagcccccccccccagagcctgctgggccacgaccactggatctttgcacaggggtggggttgggccgggcactgggacagcacatctccagcaagcagtagtgactcgtcaggtagctgcccctgcgacggagcacggggactaccacagccgcagccccccagctgtagtagtcgagctgctgaggcagccgcgactacacctcggcgagctaggaccggcccagctggcggacagcggcagagcgcttccgaacgtgaaaaactgcggatgagaactcttgctagagccctgcatgagctcagaaggttcctccctccatcactggcaccggctggtcaatctctgacgaagatcgagacccttagacttgccatccgatacatcggccatctcagcgctgtgctgggcctctcagaagagtccctccaatgcaggaggcgacagaggggtgacgccggcagtccctggggttgccccctttgccctgaccgcggaccggcggaggctcaaacgcaggctgagggccagggacagggtcagggccaaggtcagggtcagggtcagggtcaggggcagggacaaggccaaggccagggccagggacgacggccggggctcgttagtgccgtcctggccgaggcctcctgggggtctccttctgcctgccccggcgcccaggcagcccccgaacgactgggcagaggcgtgcacgatacagatccgtgggccacacccccgtactgtcccaaaattcagagccccccatatagctctcaggggaccactagcgatgcctcgctctggactccaccccagggttgtccttggacccagtcttcgcctgagcctcggaatcctcccgtaccttggactgctgccccagccacactcgagctggctgcggtgtaccagggtctgagcgtgtcacccgaaccatgtctctcactaggggccccatccctgttacctcatccaagttgccagcgactacagccccaaacccccggcaggtgttggtcacattccgcagaggtggtgcccaatagcgaagatcaagggcctggcgcggcttttcagttaagcgaagcctctccaccccagagctcggggcttagattttccggctgtccggagctttggcaagaggatcttgagggtgctagactgggtattttttactag

SEQ ID NO: 32482 - DNA, 1194 bp, Artificial Sequence
  derived and/or modified sequence
atggcacaatctccgcctccccagtccctcctggggcacgaccactggatttttgcgcagggatgggggtgggcgggacattgggacagtacctctccagcatccagtagcgattccagcggtagttgtccatgcgacggggctaggggtttgccccagcctcagccaccgagctgtagtagccgggcagccgaagccgcagctaccacaccacgaagggctcgcactggacccgctggagggcagcgccaatcggcctctgagagagagaaactgcggatgaggaccttagccagggctctacacgaactacggcgatttctcccgccttctttggcacctgctggccaatcactaacaaaaatcgagacccttcgccttgcaatccggtatattggtcatttatccgccgtcctcgggttaagtgaggagtccctgcagtgtcggagaaggcaaaggggggatgccggatccccttggggatgtcccttatgccccgacaggggcccagcagaagctcagacccaggcggagggccaaggccaaggacaaggccaggggcagggacagggtcagggccaaggccagggtcagggccaggggcagggccagggccgtcggcctggcctggtgagtgctgtcctggcagaagcctcctggggctcaccaagcgcttgtcccggagcccaggctgccccagagcggctcggacgcggtgtgcatgatacagacccctgggctacccctccctactgcccaaagatacagtcaccgccttactcttcccagggcaccactagcgacgctagcctttggaccccccctcagggatgtccatggacccagtcttctcccgagcctcggaatcccccagtaccctggactgccgcacctgccaccttggagctagccgctgtctaccagggtctgtccgtgtcccccgagccctgtctaagcctgggagctccctccctattgccacatccatcttgccagagactccagcctcagacccccggtcggtgctggtctcatagtgctgaggtagtcccaaatagcgaggaccagggtcccggtgccgctttccagctctctgaggctagtcctccacaatcctcgggactccggttttccggttgccctgagctgtggcaggaggacctggaaggggctcgcttgggaattttctactag

SEQ ID NO: 32483 - DNA, 1194 bp, Artificial Sequence
  derived and/or modified sequence
atggcccagagcccccccccccagagcctgctgggccacgaccactggatcttcgcccagggctggggctgggccggccactgggacagcaccagccccgccagcagcagcgacagcagcggcagctgcccctgcgacggcgccagaggcctgccccagccccagccccccagctgcagcagcagagccgccgaggccgccgccaccacccccagaagagccagaaccggccccgccggcggccagagacagagcgccagcgagagagagaagctgagaatgagaaccctggccagagccctgcacgagctgagaagattcctgccccccagcctggcccccgccggccagagcctgaccaagatcgagaccctgagactggccatcagatacatcggccacctgagcgccgtgctgggcctgagcgaggagagcctgcagtgcagaagaagacagagaggcgacgccggcagcccctggggctgccccctgtgccccgacagaggccccgccgaggcccagacccaggccgagggccagggccagggccagggccagggccagggccagggccagggccagggccagggccagggccagggccagggccagggcagaagacccggcctggtgagcgccgtgctggccgaggccagctggggcagccccagcgcctgccccggcgcccaggccgcccccgagagactgggcagaggcgtgcacgacaccgacccctgggccacccccccctactgccccaagatccagagccccccctacagcagccagggcaccaccagcgacgccagcctgtggacccccccccagggctgcccctggacccagagcagccccgagcccagaaacccccccgtgccctggaccgccgcccccgccaccctggagctggccgccgtgtaccagggcctgagcgtgagccccgagccctgcctgagcctgggcgcccccagcctgctgccccaccccagctgccagagactgcagccccagacccccggcagatgctggagccacagcgccgaggtggtgcccaacagcgaggaccagggccccggcgccgccttccagctgagcgaggccagccccccccagagcagcggcctgagattcagcggctgccccgagctgtggcaggaggacctggagggcgccagactgggcatcttctactag

SEQ ID NO: 32484 - protein, 1651 aa, Artificial Sequence
  derived and/or modified sequence
MSAGGRDEERRKLADIIHHWNANRLDLFEISQPTEDLEFHGVMRFYFQDKAAGNFATKCIRVSSTATTQDVIETLAEKFRPDMRMLSSPKYSLYEVHVSGERRLDIDEKPLVVQLNWNKDDREGRFVLKNENDAIPPKKAQSNGPEKQEKEGVIQNFKRTLSKKEKKEKKKREKEALRQASDKDDRPFQGEDVENSRLAAEVYKDMPETSFTRTISNPEVVMKRRRQQKLEKRMQEFRSSDGRPDSGGTLRIYADSLKPNIPYKTILLSTTDPADFAVAEALEKYGLEKENPKDYCIARVMLPPGAQHSDEKGAKEIILDDDECPLQIFREWPSDKGILVFQLKRRPPDHIPKKTKKHLEGKTPKGKERADGSGYGSTLPPEKLPYLVELSPGRRNHFAYYNYHTYEDGSDSRDKPKLYRLQLSVTEVGTEKLDDNSIQLFGPGIQPHHCDLTNMDGVVTVTPRSMDAETYVEGQRISETTMLQSGMKVQFGASHVFKFVDPSQDHALAKRSVDGGLMVKGPRHKPGIVQETTFDLGGDIHSGTALPTSKSTTRLDSDRVSSASSTAERGMVKPMIRVEQQPDYRRQESRTQDASGPELILPASIEFRESSEDSFLSAIINYTNSSTVHFKLSPTYVLYMACRYVLSNQYRPDISPTERTHKVIAVVNKMVSMMEGVIQKQKNIAGALAFWMANASELLNFIKQDRDLSRITLDAQDVLAHLVQMAFKYLVHCLQSELNNYMPAFLDDPEENSLQRPKIDDVLHTLTGAMSLLRRCRVNAALTIQLFSQLFHFINMWLFNRLVTDPDSGLCSHYWGAIIRQQLGHIEAWAEKQGLELAADCHLSRIVQATTLLTMDKYAPDDIPNINSTCFKLNSLQLQALLQNYHCAPDEPFIPTDLIENVVTVAENTADELARSDGREVQLEEDPDLQLPFLLPEDGYSCDVVRNIPNGLQEFLDPLCQRGFCRLIPHTRSPGTWTIYFEGADYESHLLRENTELAQPLRKEPEIITVTLKKQNGMGLSIVAAKGAGQDKLGIYVKSVVKGGAADVDGRLAAGDQLLSVDGRSLVGLSQERAAELMTRTSSVVTLEVAKQGAIYHGLATLLNQPSPMMQRISDRRGSGKPRPKSEGFELYNNSTQNGSPESPQLPWAEYSEPKKLPGDDRLMKNRADHRSSPNVANQPPSPGGKSAYASGTTAKITSVSTGNLCTEEQTPPPRPEAYPIPTQTYTREYFTFPASKSQDRMAPPQNQWPNYEEKPHMHTDSNHSSIAIQRVTRSQEELREDKAYQLERHRIEAAMDRKSDSDMWINQSSSLDSSTSSQEHLNHSSKSVTPASTLTKSGPGRWKTPAAIPATPVAVSQPIRTDLPPPPPPPPVHYAGDFDGMSMDLPLPPPPSANQIGLPSAQVAAAERRKREEHQRWYEKEKARLEEERERKRREQERKLGQMRTQSLNPAPFSPLTAQQMKPEKPSTLQRPQETVIRELQPQQQPRTIERRDLQYITVSKEELSSGDSLSPDPWKRDAKEKLEKQQQMHIVDMLSKEIQELQSKPDRSAEESDRLRKLMLEWQFQKRLQESKQKDEDDEEEEDDDVDTMLIMQRLEAERRARDEERRRQQQLEEMRKREAEDRARQEEERRRQEEERTKRDAEEKVMVL

SEQ ID NO: 32485 - DNA, 4956 bp, Artificial Sequence
  derived and/or modified sequence
atgagtgcagggggacgggatgaagagcgccgaaagctggctgatatcatccatcattggaacgcaaatcggcttgacctcttcgagatctcacaaccaacagaggacctcgaatttcatggcgtgatgaggttctactttcaagacaaagctgcaggaaatttcgcaacaaagtgcatcagagtcagttctaccgccacaactcaggatgtgatagaaaccttggcagaaaaatttaggcccgacatgagaatgctgagttcacccaagtactcactgtacgaggtccacgtgtccggcgagcgtaggctcgacatagacgaaaagcccttagtggtgcagctgaactggaacaaggacgaccgcgagggccggttcgtgctgaagaatgaaaacgatgctatccctccaaagaaagcccagagcaacggccccgagaaacaggaaaaagaaggagtcatacagaactttaaacggacactgtccaagaaggagaaaaaagaaaagaaaaagagggaaaaggaggcgctcaggcaggctagcgacaaggatgacaggccatttcagggggaagatgtggagaactcccggctggcggcagaggtgtataaagacatgccagagacttcattcaccagaacaatttcaaatccggaggtcgtgatgaaacggcgtaggcagcagaagttagagaaacggatgcaggaattcagatcaagtgatggccggcctgatagtggcgggaccctacggatctacgcggatagcttgaaaccaaatatcccctacaaaaccatcctcctctctacaaccgaccctgctgactttgccgttgccgaagccctggagaagtatgggctggaaaaggagaacccgaaggactattgcatagccagggtgatgttgccccctggcgcccaacattccgatgagaaaggggctaaggagatcattctcgatgacgacgagtgccctttgcagatctttagggagtggccctcagataaaggaatcctggtgtttcaactaaagaggcgaccccccgatcatattcccaagaaaaccaagaagcatctagagggcaagaccccgaaagggaaggagagggctgacggatctggctatggttccacattgcctccagaaaaactgccctacctggtcgagctttctcctgggcgtaggaatcacttcgcctactataattaccacacttacgaagacggaagcgactcaagagataagcctaaattgtaccggctgcagctaagcgttaccgaggtgggcacagagaaactggatgacaactctattcagttgtttgggcccggtatccagccccaccattgtgatctgactaatatggatggcgtagtcaccgtgacaccgcggtcgatggacgcagaaacctatgtcgaggggcagcgtattagtgaaaccaccatgctgcagagcggcatgaaggtccagttcggagctagtcatgtgttcaagttcgtggaccccagtcaggaccacgctctggctaagcgcagcgtggatggaggcctgatggtgaagggaccaagacataaacccgggatcgttcaggagacaacgttcgatttgggcggcgacatccactccggcactgccttacccacatctaagtctaccacacgtctagactcagaccgggtatctagcgcttcatccaccgccgaacgtggcatggtgaagccaatgatccgtgtggaacagcagcctgactaccgtaggcaggagtcccggacacaggatgccagcggaccagagctcatattgcctgcttcgatcgaattccgtgagtccagtgaggacagctttctgagcgctatcattaattacacaaattcaagcaccgtgcatttcaagctgtcgccaacttatgtgctatacatggcatgcaggtacgtcctcagcaatcaatacagaccagacatctccccaacagaaagaacacacaaggtaatcgccgtggttaataaaatggtgtcaatgatggagggcgttatacaaaagcagaagaacattgcaggtgcgttggccttctggatggctaatgccagtgagctcctgaatttcatcaagcaagacagagacctctctagaattacattagacgcccaggacgtgctggctcatctggtgcagatggccttcaagtacctcgtgcactgtcttcagtctgagctgaataactatatgcccgccttcttggatgaccctgaggaaaacagcctgcagcggccgaaaattgacgacgtgttgcacacacttacgggcgctatgagcttgctcagaaggtgtcgcgtcaatgctgccctcaccattcagctgttttcacaacttttccatttcataaatatgtggctgtttaacagattggtgacggaccctgactccgggctgtgttcccattattggggggccattatcagacagcagctaggccatattgaggcctgggccgagaagcaaggtctggaactagccgcggactgccatttaagtagaatagttcaggccactactctgttgacgatggacaagtatgcccccgatgatattcctaacattaattcgacctgcttcaaattaaatagtctccagctccaggccttgttacaaaactaccattgcgccccagatgaaccctttatcccaacagacctaatcgagaatgtagttaccgtagctgagaataccgcggacgagctggcccggtcggatggtagggaggtgcagctggaggaagacccggacctgcagctgccgtttctgctgcccgaggacggatattcctgcgatgtggtgcgaaacatacctaatggcctgcaggagttcctggacccactgtgccagcggggcttctgtcggctaataccacatacaaggtcccctgggacctggacgatctatttcgagggggccgattacgagtcccatcttctgcgtgagaataccgagctggctcagcccctcaggaaggagccggagattattacggttaccttgaagaaacaaaatgggatggggctctccattgtggccgccaaaggcgcggggcaggacaaacttggcatttacgttaaaagtgtggtcaagggcggagcggctgacgtggatggaagattggctgctggtgatcagctgttaagcgtggatgggcggagtctggtggggttatcccaggagcgggccgccgaactgatgacaaggacatcctcggtggtcacacttgaagtggcaaaacagggggctatctatcatgggcttgccacactcctaaatcagccttctcccatgatgcagcgaatctccgatagaagggggtcgggcaagccgcgccccaaatcagaggggttcgagctttataacaactcaactcaaaatggttctcctgagagcccgcagctgccttgggccgaatatagtgaacctaagaaacttcccggggacgatcgtctgatgaagaacagggcggaccaccggtcgagtcctaacgtagcgaatcagcccccgagccccggaggtaaaagtgcatacgcttccggcaccaccgccaagattacgtccgtctctacggggaacctgtgcacagaagagcagacacctcccccccggccagaagcatatcctattccaacacagacttataccagagagtattttacattccctgcctcaaagtcgcaggaccggatggcaccgcctcagaaccagtggcccaattatgaagagaagccccatatgcacacagattctaaccactcctccatcgcgatccagagagtgactcggagccaggaggaactcagagaggataaggcctaccagctggagcggcacagaatagaggcggccatggataggaagtcagacagcgacatgtggattaatcaatcatcctcactggactcctcgacatcaagccaagaacacctgaatcactcaagcaagagcgtgacacccgcgtcaacactcaccaagagcgggcctggaagatggaaaactcccgcagccattcccgctacccccgtggcggtcagtcagccaatacggacagacctgccaccacctcctccgcctccaccagtgcactacgccggcgacttcgacggcatgtccatggacttacccttgccccctccaccatccgccaatcagattggcctgccatccgcccaggtggctgcagccgagcggagaaagagggaggaacaccagcggtggtacgaaaaagagaaagcacgcctggaagaagagcgcgagaggaaaaggcgcgagcaggagaggaaactgggtcagatgaggacccaatctctcaaccctgcacccttcagcccactgacagcccagcaaatgaaaccagaaaagccttcaactctgcaacgaccacaggagactgtgatccgcgaactccagcctcagcaacaaccacggacaatcgagcgtcgtgatctgcagtatataacagtaagtaaagaagaactctcttcaggagactcgctgtcacctgatccgtggaagagagatgccaaggagaaactggaaaagcagcagcagatgcacatagtcgatatgttgtcgaaggagatccaagagctgcagagcaaacccgatcgaagtgctgaagaaagcgaccggcttcgcaagctcatgctggagtggcaatttcagaaaaggctacaagagagcaaacaaaaagatgaggatgacgaagaggaggaagatgacgacgttgacactatgcttattatgcagcggctagaagccgaacggcgcgctcgcgacgaggagagacgacgacagcagcaactggaagaaatgcgaaaacgggaggccgaagatcgcgctcgacaggaagaagaaagaaggagacaggaagaagagcgtacgaaaagggacgccgaggaaaaggtgatggtcctgtag

SEQ ID NO: 32486 - DNA, 4956 bp, Artificial Sequence
  derived and/or modified sequence
atgtctgctgggggcagagatgaggagaggaggaagctggccgacatcatccaccactggaatgccaaccggctggacctgtttgagatcagccagcccacagaggacctggagttccacggcgtgatgaggttctacttccaggacaaggccgccggcaactttgccaccaagtgcatccgggtgagcagcacagccaccacccaggacgtcatcgagaccctggccgagaagttccggccagacatgaggatgctgagcagccccaagtacagcctgtatgaggtgcacgtgtctggagagcggcggctggacattgatgagaagcccctggtggtgcagctgaactggaacaaggatgaccgggagggccgctttgtgctgaagaatgaaaatgatgccatcccccccaagaaggcccagagcaatggacctgagaagcaggagaaggagggcgtcatccagaacttcaagaggaccctgagcaagaaggagaagaaggagaagaagaagcgggagaaggaggccctgcggcaggccagtgacaaggatgaccggcccttccagggagaagatgtggagaacagccggctggccgctgaggtgtacaaggacatgcctgagaccagcttcaccaggaccatcagcaaccctgaggtggtgatgaagagaagacggcagcagaagctggagaagaggatgcaggagttccgcagcagtgatggccgcccagacagcggcggcaccctgcgcatctatgctgacagcctgaagcccaacatcccctacaagaccatcctgctgagcaccacagatcctgctgactttgctgtggccgaggccctggagaagtatggcctggagaaggagaaccccaaggactactgcatcgcccgggtgatgctgcccccaggggcccagcacagtgatgagaagggggccaaggagatcatcctggatgatgatgaatgtcccctgcagatcttccgggagtggcccagcgacaagggcatcctggtgttccagctgaagagaagacctccagaccacatccccaagaagaccaagaagcacctggagggcaagacccccaagggcaaggagcgggcagatggcagcggctacggcagcaccctgcccccagagaagctgccctacctggtggagctgagccctggaagaagaaaccactttgcctactacaactaccacacctatgaagatggcagtgacagccgggacaagcccaagctgtaccgcctgcagctgtctgtgacagaggtgggcacagagaagctggatgacaacagcatccagctgtttggacctggcatccagccccaccactgtgacctgaccaacatggatggagtggtgacagtgacccccaggtccatggatgctgagacctacgtggagggccagaggatcagcgagaccaccatgctgcagagcggcatgaaggtgcagtttggagccagccacgtgttcaagtttgtggaccccagccaggaccacgccctggccaagaggtctgtggatggcggcctgatggtgaagggccccaggcacaagccaggcatcgtgcaggagaccacctttgacctgggcggggacatccacagcggcacagccctgcccaccagcaagagcaccacccggctggacagcgacagagtgagcagcgccagcagcacagctgagcggggcatggtgaagcccatgatccgggtggagcagcagcctgactaccgccggcaggagagcaggacccaggatgccagcggccctgagctgatcctgcctgccagcattgagttccgggagagcagcgaggacagcttcctgagcgccatcatcaactacaccaacagcagcacagtgcacttcaagctgagccccacctacgtgctgtacatggcctgccgctacgtgctgagcaaccagtacagaccagacatcagccccacagagaggacccacaaggtgattgctgtggtgaacaagatggtgtccatgatggagggcgtcatccagaagcagaagaacattgctggggccctggccttctggatggccaatgccagcgagctgctgaacttcatcaagcaggaccgggacctgagccgcatcaccctggatgcccaggatgtgctggcccacctggtgcagatggccttcaagtacctggtgcactgcctgcagagcgagctgaacaactacatgcctgccttcctggatgatcctgaggagaacagcctgcagaggcccaagattgatgatgtgctgcacaccctgactggagccatgagcctgctgcggcgctgccgggtgaatgctgccctgaccatccagctgttcagccagctgttccacttcatcaacatgtggctgttcaaccggctggtgacagatcctgacagcggcctgtgcagccactactggggcgccatcatccggcagcagctgggccacatcgaggcctgggccgagaagcagggcctggagctggccgctgactgccacctgagccgcatcgtgcaggccaccaccctgctgaccatggacaagtatgccccagatgacatccccaacatcaacagcacctgcttcaagctgaacagcctgcagctgcaggccctgctgcagaactaccactgtgccccagatgagcccttcatccccacagacctgattgaaaatgtggtgacagtggctgaaaatacagcagatgagctggcccggagtgatggccgggaggtgcagctggaggaggaccctgacctgcagctgcccttcctgctgcctgaagatggctacagctgtgatgtggtgaggaacatccccaacggcctgcaggagttcctggaccccctgtgccagaggggcttctgccgcctcatcccccacaccaggagccctggcacctggaccatctactttgaaggagctgactatgagagccacctgctgagagaaaatacagagctggcccagcccctgaggaaggagcctgagatcatcaccgtgaccctgaagaagcagaatggcatgggcctgagcatcgtggccgccaagggggccggccaggacaagctgggcatctacgtgaagtctgtggtgaagggcggcgctgctgatgtggatggccgcctggccgccggggaccagctgctgtctgtggatggccgcagcctggtgggcctgagccaggagagagctgctgagctgatgaccaggaccagctctgtggtgaccctggaggtggccaagcagggcgccatctaccacggcctggccaccctgctgaaccagcccagccccatgatgcagaggatcagtgaccggcggggcagcggcaagccccggcccaagtctgagggctttgagctgtacaacaacagcacccagaatggcagccctgagagcccccagctgccctgggccgagtacagcgagcccaagaagctgcctggagatgaccggctgatgaagaacagagctgaccacaggagcagccccaacgtggccaaccagccccccagccctgggggcaagagcgcctatgccagcggcaccacagccaagatcacctctgtgtccacaggcaacctgtgcacagaggagcagaccccaccacccaggcctgaggcctaccccatccccacccagacctacacccgggagtacttcaccttccctgccagcaagagccaggacaggatggccccaccccagaaccagtggcccaactatgaggagaagccccacatgcacacagacagcaaccacagcagcatcgccatccagagggtgaccaggagccaggaggagctgcgggaggacaaggcctaccagctggagcggcaccgcatcgaggccgccatggacaggaagagtgacagcgacatgtggatcaaccagagcagcagcctggacagcagcaccagcagccaggagcacctgaaccacagcagcaagtctgtgaccccagccagcaccctgaccaagagcggccctggccgctggaagaccccagctgccatcccagccacccctgtggccgtgtcccagcccatcagaacagacctgcccccacctcctcctcctcctcctgtgcactacgccggggactttgatggcatgtccatggacctgcccctgcccccacctccttctgccaaccagatcggcctgcccagcgcccaggtggccgctgctgagaggaggaagcgggaggagcaccagcgctggtatgagaaggagaaggcccggctggaggaggagcgggagaggaagaggcgggagcaggagaggaagctgggccagatgaggacccagagcctgaacccagcccccttcagccccctgacagcccagcagatgaagccagagaagcccagcaccctgcagaggccccaggagaccgtcatccgggagctgcagccccagcagcagcccaggaccatcgagcggcgggacctgcagtacatcaccgtgtccaaggaggagctgagcagcggggacagcctgagcccagacccctggaagagagatgccaaggagaagctggagaagcagcagcagatgcacatcgtggacatgctgagcaaggagatccaggagctgcagagcaagccagacagatctgctgaggagagtgaccggctgaggaagctgatgctggagtggcagttccagaagaggctgcaggagagcaagcagaaggatgaagatgatgaggaggaggaggatgatgatgtggacaccatgctgatcatgcagaggctggaggccgagcggcgggccagagatgaggagcggcggcggcagcagcagctggaggagatgaggaagcgggaggctgaagatcgggcccggcaggaggaggagcggcggcggcaggaggaggagaggaccaagagagatgctgaggagaaggtgatggtgctgtag

SEQ ID NO: 32487 - DNA, 6812 bp, Artificial Sequence
  derived and/or modified sequence
gcggccgcggaggcggaggcagccgcggaggcggaggcggccggcggggggtggcgaggggcgccgggcccccgcggacctgtcgtcctcggcccgtcctccggccccggccccgcgcggctgaggaggcgcggccaggaccatgtcggcgggcggccgtgacgaggagcggcggaagctggccgacatcatccaccactggaacgccaaccggctggacctgttcgagatcagccagccgaccgaggatttggagttccatggagtgatgagattttattttcaagataaagctgctggaaactttgcaacaaaatgtattcgggtctctagtactgccaccactcaagatgtaatcgaaacgctcgcggagaaatttcgacctgatatgcgaatgctgtcctctcccaagtattcactctatgaagtgcatgtcagcggagaaagaagattggatatagatgagaaacctctagttgtacaactgaattggaacaaagatgatcgggaaggcagatttgttcttaagaatgagaatgacgccattcctcctaagaaggctcaaagtaatggacctgaaaagcaggaaaaagaaggggttatccagaacttcaagagaactctctcaaagaaagaaaagaaggaaaaaaagaagagagaaaaagaggcattgcgacaggcatctgataaagatgatagacctttccaaggggaggatgttgaaaattctcgactggctgctgaggtttacaaagacatgccggaaaccagctttactcgaaccatttctaatcctgaggtggttatgaaacgacggaggcagcaaaaattggaaaagagaatgcaggaatttcggagctcagatgggcggcctgattcaggtggaacattgagaatttatgcagatagtttaaaaccaaatattccctacaagacaatcctgctgtctactacagatcctgcagactttgctgtggctgaagctttagagaagtatggtctggaaaaagaaaaccctaaggattactgcatcgcccgggttatgcttcctcctggagcccagcattctgatgaaaagggtgctaaagaaattattcttgatgatgatgagtgtcctttacaaatcttcagggaatggccaagtgacaaagggattttagtctttcagttgaagaggaggccaccagaccacatcccaaagaaaaccaagaaacacttggaaggcaagacacccaagggaaaggagagagctgacgggtctggctatggctccacccttcctccggagaagctgccctatttagtagagttaagcccagggagaaggaatcactttgcctactacaactatcacacttacgaagatggttctgactctagagataagccaaagctttaccgccttcagttaagtgttactgaagttgggacagaaaagttggatgacaactctatccagttgtttggcccaggaattcagccccatcactgtgaccttaccaacatggatggagtggtcactgtgacgcccagaagtatggacgcagaaacctacgtggaaggccagcgcatctcagaaaccaccatgctgcagagtggcatgaaagtgcagtttggggcgtcccatgtatttaagtttgtggaccccagtcaggatcatgctcttgcaaaaagatctgtggatggaggcctgatggttaagggcccaagacataaacctggaattgttcaggagacaacttttgatttgggaggagatattcatagtgggacagcattaccgacaagcaagagcaccactaggctggacagcgacagagtgtcgtctgcctctagcacagccgagcggggaatggtgaagccgatgatcagagtagaacagcagccagattatcgcaggcaagaaagcagaacacaggatgcttctgggcctgagctgatactacctgcaagcattgaattcagggaaagttctgaagattcatttttgtctgccattataaattatactaatagctctacagtccactttaagttgtcccctacatatgtattatatatggcatgccggtatgtattgtccaaccagtacagacctgacatcagccctacagagcgcacacataaagtcattgcagtcgtcaacaagatggtgagcatgatggagggtgtcatccagaaacagaagaatattgcaggggcacttgccttctggatggcaaatgcatctgaacttctcaacttcattaagcaagaccgagaccttagtcggatcacactggatgctcaagatgttttagcacatttggttcaaatggcatttaaatacttggttcactgtcttcaatcagaacttaataattacatgccagcctttctagatgaccctgaagagaacagtctgcaacgaccaaaaatagatgatgtgctgcacacgctcacaggagccatgtccttgctacgacgctgcagagtcaatgccgccctgaccatccagctcttctctcagctcttccacttcatcaatatgtggctgttcaatagattggtgaccgacccagattcggggctgtgctcccattactggggtgcgattatccgtcagcagttgggccatattgaagcctgggctgagaagcaggggctggaactggctgcggactgtcatctgagcaggatcgtgcaggcaacgactttgcttaccatggataagtatgcacctgatgacattccaaatataaacagcacctgctttaagttaaattcattacaacttcaagccttattacagaactatcactgtgcacctgatgagccttttatcccaacggatcttatagaaaatgtagtgactgtggctgaaaacactgccgatgagctggcccgcagtgatggaagggaagtgcagttggaggaggatcctgatctgcagctgccgtttcttttgccagaagatggttattcttgtgatgttgtcagaaacattccaaatggtttacaagaatttttagaccctctgtgccagagaggattttgcaggttaattcctcacacacgttcaccaggtacttggacaatatattttgaaggtgcagattatgaaagtcaccttctgcgtgagaacacagagctggctcagcctctgaggaaagaacctgaaataatcactgtgaccctaaaaaagcagaatggaatgggccttagcattgttgcagcaaagggtgctggtcaagataaactaggaatctatgtgaagtcggttgtgaaaggaggtgctgcagatgtggatggacgtctagctgcaggtgatcagctcctcagtgtggatggacgaagtctggttggactctctcaggaaagggcggcagaactcatgacaagaacaagctctgtggtgacactggaagtagcaaagcagggtgccatctaccacggtctggccacccttctcaatcagccatcccccatgatgcagagaatttcagatcgtcgtggctcaggtaaaccccgaccaaagagtgaaggctttgagctctataataattcaactcaaaatgggtctcctgagagtcctcagctgccttgggcagaatatagtgaaccaaagaaattgcctggtgatgacagactgatgaaaaatagagctgatcaccgttccagccccaacgtagcaaatcagcctcctagtcctggagggaaaagtgcatatgcctctggaacaacagcgaagataacatctgtctctactggaaacctctgcactgaggagcagacgcctccgcctagacctgaagcctaccccatccccactcagacgtacaccagagagtattttaccttcccagcttccaaatcccaggatcggatggctcctcctcagaaccagtggccaaattatgaggaaaagccacatatgcacacagatagtaatcattccagtattgcaattcagcgtgttacacgttcccaagaagaacttcgagaagataaagcttaccaacttgagcggcatcgaatagaggcagctatggaccgaaagtctgatagtgatatgtggataaatcagagctcctcactggactccagtacctctagccaggagcatctgaaccattcctctaagtcggtcacccctgcttccacactgaccaaaagtggccctggccgttggaaaacaccagcagccataccggccacccctgtggccgtctcccagccaatccgaacagacctgcctccgccacccccgccacctccagtccactatgccggtgatttcgatggaatgtccatggatttgcctctcccaccacccccttccgccaaccagatagggctgccgtctgcgcaggtggctgctgctgaacggagaaagagagaagaacatcagcgttggtatgagaaggagaaggcccgcctggaggaggagcgggagaggaagcggagagagcaggagaggaagttgggccagatgcgcactcagtccttaaaccctgctccgttttctcccctgactgcacagcagatgaagcccgaaaagccttccacactccagcggccacaggaaacagtcattcgggagctgcagcctcagcagcagccccgcacgatcgagcgcagagacttgcagtacattacagtcagcaaagaggagctttcctcgggggacagtctgtcccccgacccgtggaagcgggacgccaaggagaagctggagaagcagcagcagatgcacatcgtggacatgctgagcaaggagatccaggagctccagagcaaaccggaccgcagcgccgaggagagcgaccggctgcgcaagctcatgctggagtggcagttccagaagagactccaggagtcgaagcagaaggacgaagatgacgaggaggaggaggacgatgatgtggacaccatgctgatcatgcagcgcctggaggctgaacgaagagcgagggacgaggagcggaggcggcagcagcagttagaagagatgcgcaagcgggaagcggaagaccgagcgaggcaagaggaagagcgccggcggcaggaggaggagcgaacaaaacgagacgctgaagaaaaggttatggtcctttaagggcagctagaattttaccaagttagcctgaacgtaatcgattggctggggcagagcgggctggaagttctgtgtttcttaagaagcacgaggcagagcagggcctggctcccccagctttgtgattggacctgcaactttaccccatctggcccacctacctctcttctggactgtctccagatccccttatctgccaagttttgtctccttcaaacttctgaactcttgggcgtgtgtagcagtgagcctctttgcaaagggttcgtttcctcgggcactcatctttactgaacatggcccagcttgtcattgtgaaggtgacattggttcagtgattgcttaaatggcatgtggaccgtgggaagcagtaggagcgtagtaagacagttggctgccattcaacatttcaaatagatggtttactcaaatcactcacttctggttgatggtaaagagagcagatggcttagaaaacatgatacaggaaaatttagtatgtaatccagtaaatatcctaagttatttattttcatgtgtgtgtgtgtgtttaaatcaagtaacccttttaattgaattttaaaatgacagcgaattttgacattctgagaaatggggattttgagatgtttctctccatatctccctttgtcctgtgtgtgtggccgacgccctctggatgaagaggctgtagccgttgagctccctgtgggggcctgtttcatcccgaggggactgcgtgttgctctgtgtggtttgagagaagctgctcttctctgttacttcccttctatgaaggtagaagctttcagtgttacaacttctgatggcggaaaatttagtttttattaataattccttcttggatagtctagtgaactatattaatagaacagtgtactgttcacagaaaagaacttgtagggagttttttgtagtgatatgctctattaggatacagaacaatctaagagtaagcttgatagacatgatgtgacttcacttaaatggagtagagtgaataatgtaaggacactcacctctgttgaaattggtgatttctgcattttgtagacctttgccctctaagtttatcatcatattatctgttgaatctgaacagcatttgaagtcctctcaaagagtttgagctttcaggattaggttcccctgtgagtctttcacttgtgtaatggtaagtcaacattgatgatctttctaaggaaatcagatttacaaaatgctgagccgcttgatgtctaagtgttggtggtttttgctgttgctttgctgttccatgaaagcgctccctggctgcttggagggctgtgcttttccaggtcagtgccagcttggctgtcccaggccgtgcacagtgcccattgctatagctgggcccagtcctggccacgccggagcctcggcgggggcagctgggttgtcacggcagcacagtgcacatgcagagaggaccaggccatgtttttcctgtgctgagaaactcttgggttatttaatttttccaatgtgttttcataactcatgattatttgaaatacacttgtgttagtaactgcttctataattaagtggtcactgtaaaaaggcgaataacctatttttatatcagaatgtccaaaactcatgggtttgctttgttatagaaaaatgtgccattcatttgttgggtagaataaagttgtcttgtaattgt

SEQ ID NO: 32488 - DNA, 4956 bp, Artificial Sequence
  derived and/or modified sequence
atgagcgccggcggccgggacgaggagcggcggaagctggccgacataatccatcactggaacgccaaccggctcgatctatttgagatcagccagcccactgaggatctggagttccatggagttatgcggttctacttccaggacaaagcggccggaaactttgctaccaagtgtatcagagtgtcgtccaccgctacaacccaggacgtaattgagacactggccgagaagtttcgtcctgatatgagaatgctgagctccccgaagtactccctgtacgaagtgcacgtgtctggtgagaggagactggatattgacgagaagccactggtcgtacagcttaattggaacaaagatgatagagaggggaggtttgtgttgaaaaatgaaaacgatgcaatacccccgaaaaaggcccagagcaacggcccagagaaacaggagaaggaaggagtcatccaaaattttaaacggacactctccaaaaaggagaagaaagaaaaaaagaagcgagagaaggaagcattgcgacaggcatcagacaaagatgacagacctttccagggtgaggacgtggagaatagcaggctagcagctgaagtgtacaaggatatgcctgagacctcctttacaagaacaatttctaaccccgaggtggtgatgaaaaggaggaggcagcagaagctggagaagaggatgcaggaattccgctcttctgacggaaggccagactctggaggcacgttaaggatttatgccgatagtctcaagccaaacattccctacaagacaattcttctgagcacaacagaccccgctgactttgccgtcgctgaggctctcgagaaatacgggctggagaaagagaatcccaaagattactgtattgctcgtgttatgctgccaccaggggcacagcattccgatgagaaaggcgccaaagaaatcattctggacgatgatgagtgccctttacagattttccgcgaatggcccagcgacaaagggattctcgtcttccagcttaagaggcggccgcctgatcacattccgaagaaaacaaagaagcacttggaaggtaaaactcccaaaggaaaagaaagagcagatggaagtggatatggcagcacattaccaccagaaaagctcccatacttagtggagttgtctcctgggcggcgtaatcacttcgcatattataactatcacacatacgaggacgggtccgattctagggataaacctaagctgtatagattacaactaagtgtcacagaggtgggcaccgaaaagcttgacgacaatagtatacagcttttcggtcctggaattcagcctcaccattgtgatctcacaaatatggacggagtggtaaccgtgacacctcgttccatggatgcagagacttacgtggaggggcaacggatttcagaaactacgatgctgcagtccggcatgaaggtgcaattcggcgcctcccacgtgttcaaattcgtcgatccaagtcaggaccacgcactggcaaagagaagcgtggacggcggcctgatggtgaaagggcctcgccacaaacctggaatcgtgcaggaaacaaccttcgatctcggcggtgacattcatagcgggacagctttgccgacgtccaagagcactactcggctggactcagacagagtcagttcagccagctccactgctgaaagagggatggtaaaacccatgattagagtggaacagcagccagattaccgacgccaagaaagccgaacacaggacgctagcgggcctgaattgatcttgccagcatctatcgagtttcgagaatcgtccgaagactcctttctgagcgctattattaattataccaacagctcaactgtccattttaagctcagcccaacttatgtactgtacatggcttgccgctatgtactgtctaaccagtaccgccctgacatatccccgaccgaacgaacccataaggtgattgcggtggtaaataagatggtatcaatgatggagggcgtgattcagaaacagaaaaacatagcgggggctttagcattttggatggctaatgcttcagaattgctcaatttcattaaacaggaccgcgacctatcacgtatcactctggacgcccaggatgtcttggcccacctggtgcagatggcattcaagtatttggtacactgcttgcagtccgagctgaataactacatgccagcgttcctggacgaccccgaggagaacagcttgcagcggcccaaaattgacgacgtgctccatacactgactggggcaatgtccctgctccgccggtgccgggtgaacgctgcgttgaccattcagttgttcagccagctcttccacttcattaacatgtggctttttaataggcttgttacagatcctgattccgggctgtgcagccactattggggcgctattattcggcagcaactcggacatattgaggcatgggctgagaagcagggactggagctcgcggcagattgtcatctcagtcgcatagtgcaggccacaacattgctgacaatggataaatacgccccagacgacataccaaacattaatagtacgtgttttaagctgaattctttacaactacaggcattgcttcagaactatcactgtgctccagatgaaccctttattcccacagaccttatcgagaatgtggtcactgtggccgaaaacaccgccgatgagttggcccgctcagatggaagggaagtacaactggaagaggatcctgatctgcaactcccttttttgctgcccgaggatgggtactcctgcgatgtagtccgcaacatccctaatggactgcaggaatttcttgatcccctgtgccagagaggattctgccggctgatcccacacacaaggtcgccgggcacatggacaatatatttcgaaggcgctgattacgagagccacctattacgcgagaacaccgagttggcccagcctctgcggaaagagcccgaaatcatcaccgtgacgctaaagaaacaaaacggcatggggctcagcattgtcgccgccaagggagcagggcaggacaagctgggaatttacgtgaaatctgtggtgaaggggggagccgctgatgtggacgggagactggctgccggcgaccagttgctctccgtggatggacgcagtctggttggtttatcacaggagcgagccgcagagctcatgacccgtacaagcagcgtcgtgactctggaagtagctaagcagggcgccatctaccatggtctggccacccttctgaaccaacctagccccatgatgcagcggatcagcgataggaggggctctggtaaaccccgcccaaagtctgaaggatttgagctttacaataactccacacagaacggcagtcccgaatccccccaacttccttgggctgaatacagcgaacccaagaaactccccggggatgatcgactcatgaagaacagggccgatcatagatcatccccaaatgtggctaaccaaccaccatcaccgggggggaaatccgcatacgcgtctggaaccaccgcaaaaattacaagtgttagcacaggaaatctgtgcaccgaggaacaaaccccccctcctaggccggaagcctacccaattcctacacagacctatactagagaatacttcactttccctgcctctaagtcccaggatagaatggcccccccacagaaccaatggccaaactacgaagaaaaaccgcacatgcacacagactccaaccattcctctattgctatacagcgtgtcaccagatcacaggaagagctgcgagaggataaagcttaccagctcgaaaggcaccggattgaggccgccatggacaggaagtccgattccgatatgtggattaaccaatcatcatctctggactcgtcaacaagtagccaggagcatcttaaccactccagcaagtccgtgacccccgcctccacccttaccaagtccggacccggcagatggaaaaccccagccgccattcctgccacacccgtcgcagtgtcacagcccatcaggactgatctccctccacccccaccccctcctcctgttcattacgccggggactttgatggaatgagcatggatctgccactccctcctcctccgtcagcgaaccagatcggactgccttcggcccaggtggccgccgctgaacgacgcaagagggaggaacatcagaggtggtatgagaaagagaaagctaggctggaggaggagcgtgaacggaagcgtagggagcaggagcggaaattgggtcaaatgcgcactcaatccctgaacccagccccattttcccctctcactgcacagcagatgaagcctgaaaaaccaagcacactgcagcggccccaagaaaccgtgatacgcgaactccagccacaacaacagccgcgcaccatcgagcgtagagacctgcaatatatcactgtctctaaggaagaactgtcctcaggcgacagcctaagccccgatccttggaaacgcgacgccaaggagaagttggagaagcagcaacaaatgcacatcgtcgacatgctcagcaaagaaatccaggagcttcaatctaaacctgatcggtccgcagaagaatcagataggcttaggaagctgatgcttgagtggcagttccagaagaggttgcaagagagcaagcagaaagacgaggacgacgaagaggaagaagacgatgacgtagacaccatgctcatcatgcagagactggaggcggagagacgcgccagggatgaggagcgtcggcgacagcagcaacttgaagagatgcgtaaaagagaagctgaggatcgcgccaggcaggaagaagaaagacgaaggcaggaagaagagagaacaaagcgcgacgccgaagagaaagtgatggtactgtag

SEQ ID NO: 32489 - DNA, 4955 bp, Artificial Sequence
  derived and/or modified sequence
atgagcgcgggtggccgagacgaagagcgcaggaaactggccgatataatacatcactggaacgctaatcgcctggacctcttcgagatctcccaaccaactgaggacctggaattccatggcgttatgaggttctattttcaggataaggccgctgggaattttgcaactaagtgcattagagtgtcgagtacagctaccacgcaggacgtaatcgaaacactggctgagaagttccggcctgatatgcggatgctgtcttcccccaaatattccctatacgaagtgcacgtgagcggagagagacgtttggatatcgacgagaaaccgctcgtcgttcagcttaactggaacaaggacgatcgagaggggcgttttgtcttgaaaaatgaaaacgatgctatcccacctaagaaggctcagtcaaacgggcctgaaaagcaagagaaagaaggagtcatacaaaacttcaaaagaaccttatctaagaaagaaaaaaaggaaaaaaaaaagagggaaaaagaggccctgagacaggctagtgacaaggatgatcgtcccttccagggtgaggacgtcgaaaattcacggctggctgcggaggtgtataaggatatgccggaaacgtctttcactaggacaatctctaaccctgaggtggttatgaaacggcgacggcagcagaaacttgaaaaacggatgcaggagttcaggtcatcagatgggcgtcctgatagcggtgggaccctccgtatttacgccgattctctgaaacccaacatcccatataagaccatcctgttatctactaccgaccccgcagatttcgccgtcgctgaggccctggaaaagtacggcttggagaaagagaaccctaaggactactgtattgccagagtgatgttacctccaggtgctcagcacagtgatgaaaaaggagctaaggagattattctcgacgatgacgagtgtcctctgcagatcttccgcgaatggccctccgataaaggcatcctggtctttcagctgaagcggaggccacctgatcacatccccaagaaaaccaagaagcatctcgaaggtaagacacccaagggtaaagaaagagccgacgggagtggctacgggtccaccctgccccctgaaaagctgccgtaccttgtcgaactgtctccgggacggagaaaccactttgcctattacaactaccatacatatgaagacggttcggatagtagggataaaccgaaactgtatcgactacaactctcagtaaccgaagtggggaccgagaagctggatgacaatagcatacagttgttcggacccggtattcagcctcatcattgcgacttgacaaacatggacggcgtggtgaccgtgacacctcgctctatggacgcagaaacctacgtagagggacagcggatctcagaaacaaccatgctccagtcaggcatgaaagtgcaattcggcgcatcccatgtgtttaaattcgtggatccctctcaggatcatgctttggcaaaacggtctgtagacgggggtctgatggtgaaggggcctcggcacaaaccagggatcgttcaggaaactaccttcgatctcgggggtgacattcactctgggaccgccctccccactagtaaaagtacaactcgcctggacagtgatagagtgtcatccgcgagttccaccgctgagcgcggtatggtcaagccaatgatccgagttgagcaacagcctgactaccggcgacaggagtcccggacccaggatgcatctggaccagaactgattctgcccgctagtattgaattccgcgagagtagcgaggactcatttctgtccgcgattatcaattacacgaatagctctacagtgcatttcaagctgagccccacctacgtattatatatggcctgtagatatgtcctttcaaaccagtataggcctgatattagtccaactgagagaactcacaaggtgattgcggtcgtcaacaaaatggttagcatgatggaaggggtgatacagaagcaaaagaacatcgccggagcgctcgccttctggatggcaaatgcatccgaacttctcaacttcatcaagcaagatcgggatctgtccaggataaccctggatgctcaggacgttctggctcacctagttcagatggcttttaagtacctcgtgcactgtctccagtctgaactcaacaactacatgcccgcttttctggatgatcccgaggagaactcactccagcgccctaagatagacgatgttctgcacacacttaccggagctatgtcccttcttcggcgttgccgcgttaatgccgcattaacaatccaactattttcccagttgttccatttcattaatatgtggttattcaatcgtcttgtcacagacccagacagcgggttgtgctctcattattggggtgcaataatccgccagcagctcggtcacattgaagcctgggcggaaaagcaaggtcttgaattggctgctgattgccacttgtcccgcattgttcaagcgaccactctgctcacgatggacaagtatgccccagacgatataccgaacattaactcaacctgcttcaaactcaactcacttcaactccaggctctcttgcagaattatcactgcgcgcctgacgaaccttttattcctaccgatctcattgaaaatgttgtcacagtggccgagaacactgctgatgagctcgctcggagcgatggccgtgaggtgcagctggaggaggatcctgacctgcagttgccttttctcttacccgaagacggatattcctgcgacgtggtgcgcaacattcctaatggtctacaagaattcctagatccactatgccagcggggtttctgtcgtctgatcccacacacgcggtctcccggaacatggaccatatactttgagggcgcagattacgaaagccacctcttgcgtgagaatactgagctggcccagccattaagaaaggaacctgaaatcatcactgtgactctcaaaaaacagaatggaatgggtctgtctattgtcgccgcaaaaggtgccggacaggataagctaggtatttacgtgaagtcggtcgtaaagggtggcgctgcagatgtcgatggacgcctcgccgctggcgaccagctgttgagcgtcgacggcagatcccttgtgggactgtcacaagagagggcagctgagctgatgactagaacctccagcgttgtgactctggaagtggctaagcagggcgctatataccatggccttgcaacgctgcttaatcaaccaagtccaatgatgcaacgaatctccgaccggaggggaagtggcaagccacggcctaagagtgagggattcgagctttataacaacagcacgcagaatggcagcccagaaagcccccaactcccctgggctgaatattcggagcctaagaagctgcctggcgacgacaggctgatgaagaatcgcgctgaccacaggtctagccctaacgtggcgaaccagccgccttcgccgggaggtaaatcagcctacgcctctggcaccacagctaagatcactagcgtgtccactggtaatctgtgcaccgaggagcagaccccaccccctcgccctgaagcctaccccatcccgacccagacatacactcgggagtactttacttttcctgcttcaaagtctcaagacagaatggcaccaccacagaaccagtggcccaactacgaagaaaagccacacatgcatacagactccaatcatagcagtatagcgatccagcgcgttactcggtctcaggaggagctgagggaggacaaagcgtaccaactggagagacaccgcatcgaagccgcaatggatcgcaaatccgacagcgatatgtggatcaaccagtctagctctctagattctagcacttcctcccaggagcacctgaaccacagctctaagtcagtaacaccagcctcaactctgaccaagtcaggccctggcagatggaaaactccagctgccatacctgccacaccggtggctgtcagccagccaatcaggacggatttaccacccccacctccacccccaccagtccactatgcaggggattttgatggtatgagcatggacctgccgctcccccctcccccttccgctaatcagattgggctaccttccgcccaggtcgcagccgcagaaagacgcaagagagaggagcatcagcgttggtacgagaaggaaaaggctcgcctggaggaggagagggaaagaaagcggagggagcaggaacgtaagctcggtcagatgcgaacccagagcctcaaccccgctccctttagccccttgaccgcccagcagatgaagcctgagaaaccctcgaccttgcaaaggccccaggagaccgtgattcgcgaactgcagccccagcagcagccacggaccattgagagacgggacttgcagtacattaccgtgagcaaagaggagctctcttccggcgacagcctctcaccggatccctggaagagagacgccaaagagaagctggaaaaacagcagcagatgcatatcgtcgacatgcttagtaaggagatccaggagctacaaagcaagccagacagatctgcagaagagagcgacaggctgcgaaagctaatgcttgaatggcagttccaaaagcggttacaagagagcaagcagaaggacgaagacgatgaggaggaggaagacgatgatgttgacactatgctgatcatgcagagacttgaagctgaacgcagggcgagggatgaagaacggcgaaggcagcagcagctcgaagagatgcgcaagcgtgaagccgaagacagagctagacaggaggaggagcggcgtcgccaggaagaagagcggactaagcgggatgctgaagagaaagtgatggtcctgta

SEQ ID NO: 32490 - DNA, 4956 bp, Artificial Sequence
  derived and/or modified sequence
atgagcgccggcggcagagacgaggagagaagaaagctggccgacatcatccaccactggaacgccaacagactggacctgttcgagatcagccagcccaccgaggacctggagttccacggcgtgatgagattctacttccaggacaaggccgccggcaacttcgccaccaagtgcatcagagtgagcagcaccgccaccacccaggacgtgatcgagaccctggccgagaagttcagacccgacatgagaatgctgagcagccccaagtacagcctgtacgaggtgcacgtgagcggcgagagaagactggacatcgacgagaagcccctggtggtgcagctgaactggaacaaggacgacagagagggcagattcgtgctgaagaacgagaacgacgccatcccccccaagaaggcccagagcaacggccccgagaagcaggagaaggagggcgtgatccagaacttcaagagaaccctgagcaagaaggagaagaaggagaagaagaagagagagaaggaggccctgagacaggccagcgacaaggacgacagacccttccagggcgaggacgtggagaacagcagactggccgccgaggtgtacaaggacatgcccgagaccagcttcaccagaaccatcagcaaccccgaggtggtgatgaagagaagaagacagcagaagctggagaagagaatgcaggagttcagaagcagcgacggcagacccgacagcggcggcaccctgagaatctacgccgacagcctgaagcccaacatcccctacaagaccatcctgctgagcaccaccgaccccgccgacttcgccgtggccgaggccctggagaagtacggcctggagaaggagaaccccaaggactactgcatcgccagagtgatgctgccccccggcgcccagcacagcgacgagaagggcgccaaggagatcatcctggacgacgacgagtgccccctgcagatcttcagagagtggcccagcgacaagggcatcctggtgttccagctgaagagaagaccccccgaccacatccccaagaagaccaagaagcacctggagggcaagacccccaagggcaaggagagagccgacggcagcggctacggcagcaccctgccccccgagaagctgccctacctggtggagctgagccccggcagaagaaaccacttcgcctactacaactaccacacctacgaggacggcagcgacagcagagacaagcccaagctgtacagactgcagctgagcgtgaccgaggtgggcaccgagaagctggacgacaacagcatccagctgttcggccccggcatccagccccaccactgcgacctgaccaacatggacggcgtggtgaccgtgacccccagaagcatggacgccgagacctacgtggagggccagagaatcagcgagaccaccatgctgcagagcggcatgaaggtgcagttcggcgccagccacgtgttcaagttcgtggaccccagccaggaccacgccctggccaagagaagcgtggacggcggcctgatggtgaagggccccagacacaagcccggcatcgtgcaggagaccaccttcgacctgggcggcgacatccacagcggcaccgccctgcccaccagcaagagcaccaccagactggacagcgacagagtgagcagcgccagcagcaccgccgagagaggcatggtgaagcccatgatcagagtggagcagcagcccgactacagaagacaggagagcagaacccaggacgccagcggccccgagctgatcctgcccgccagcatcgagttcagagagagcagcgaggacagcttcctgagcgccatcatcaactacaccaacagcagcaccgtgcacttcaagctgagccccacctacgtgctgtacatggcctgcagatacgtgctgagcaaccagtacagacccgacatcagccccaccgagagaacccacaaggtgatcgccgtggtgaacaagatggtgagcatgatggagggcgtgatccagaagcagaagaacatcgccggcgccctggccttctggatggccaacgccagcgagctgctgaacttcatcaagcaggacagagacctgagcagaatcaccctggacgcccaggacgtgctggcccacctggtgcagatggccttcaagtacctggtgcactgcctgcagagcgagctgaacaactacatgcccgccttcctggacgaccccgaggagaacagcctgcagagacccaagatcgacgacgtgctgcacaccctgaccggcgccatgagcctgctgagaagatgcagagtgaacgccgccctgaccatccagctgttcagccagctgttccacttcatcaacatgtggctgttcaacagactggtgaccgaccccgacagcggcctgtgcagccactactggggcgccatcatcagacagcagctgggccacatcgaggcctgggccgagaagcagggcctggagctggccgccgactgccacctgagcagaatcgtgcaggccaccaccctgctgaccatggacaagtacgcccccgacgacatccccaacatcaacagcacctgcttcaagctgaacagcctgcagctgcaggccctgctgcagaactaccactgcgcccccgacgagcccttcatccccaccgacctgatcgagaacgtggtgaccgtggccgagaacaccgccgacgagctggccagaagcgacggcagagaggtgcagctggaggaggaccccgacctgcagctgcccttcctgctgcccgaggacggctacagctgcgacgtggtgagaaacatccccaacggcctgcaggagttcctggaccccctgtgccagagaggcttctgcagactgatcccccacaccagaagccccggcacctggaccatctacttcgagggcgccgactacgagagccacctgctgagagagaacaccgagctggcccagcccctgagaaaggagcccgagatcatcaccgtgaccctgaagaagcagaacggcatgggcctgagcatcgtggccgccaagggcgccggccaggacaagctgggcatctacgtgaagagcgtggtgaagggcggcgccgccgacgtggacggcagactggccgccggcgaccagctgctgagcgtggacggcagaagcctggtgggcctgagccaggagagagccgccgagctgatgaccagaaccagcagcgtggtgaccctggaggtggccaagcagggcgccatctaccacggcctggccaccctgctgaaccagcccagccccatgatgcagagaatcagcgacagaagaggcagcggcaagcccagacccaagagcgagggcttcgagctgtacaacaacagcacccagaacggcagccccgagagcccccagctgccctgggccgagtacagcgagcccaagaagctgcccggcgacgacagactgatgaagaacagagccgaccacagaagcagccccaacgtggccaaccagccccccagccccggcggcaagagcgcctacgccagcggcaccaccgccaagatcaccagcgtgagcaccggcaacctgtgcaccgaggagcagacccccccccccagacccgaggcctaccccatccccacccagacctacaccagagagtacttcaccttccccgccagcaagagccaggacagaatggcccccccccagaaccagtggcccaactacgaggagaagccccacatgcacaccgacagcaaccacagcagcatcgccatccagagagtgaccagaagccaggaggagctgagagaggacaaggcctaccagctggagagacacagaatcgaggccgccatggacagaaagagcgacagcgacatgtggatcaaccagagcagcagcctggacagcagcaccagcagccaggagcacctgaaccacagcagcaagagcgtgacccccgccagcaccctgaccaagagcggccccggcagatggaagacccccgccgccatccccgccacccccgtggccgtgagccagcccatcagaaccgacctgccccccccccccccccccccccccgtgcactacgccggcgacttcgacggcatgagcatggacctgcccctgccccccccccccagcgccaaccagatcggcctgcccagcgcccaggtggccgccgccgagagaagaaagagagaggagcaccagagatggtacgagaaggagaaggccagactggaggaggagagagagagaaagagaagagagcaggagagaaagctgggccagatgagaacccagagcctgaaccccgcccccttcagccccctgaccgcccagcagatgaagcccgagaagcccagcaccctgcagagaccccaggagaccgtgatcagagagctgcagccccagcagcagcccagaaccatcgagagaagagacctgcagtacatcaccgtgagcaaggaggagctgagcagcggcgacagcctgagccccgacccctggaagagagacgccaaggagaagctggagaagcagcagcagatgcacatcgtggacatgctgagcaaggagatccaggagctgcagagcaagcccgacagaagcgccgaggagagcgacagactgagaaagctgatgctggagtggcagttccagaagagactgcaggagagcaagcagaaggacgaggacgacgaggaggaggaggacgacgacgtggacaccatgctgatcatgcagagactggaggccgagagaagagccagagacgaggagagaagaagacagcagcagctggaggagatgagaaagagagaggccgaggacagagccagacaggaggaggagagaagaagacaggaggaggagagaaccaagagagacgccgaggagaaggtgatggtgctgtag

SEQ ID NO: 32491 - DNA, 420 bp, Artificial Sequence
  derived and/or modified sequence
atgggtactagctccctggggctggtcgacaccacaggaggtccaggagatgattacggagtcctggggagcaccgctaatgagacagagaaaaagtcttcgcgtagaaggaaagagtcctcagataaccaagagaatcgaggaaaaccagagggctctagcaaggcacgcaaggagagaactgcctttactaaagagcagctgcgtgaactcgaagcggaattcgcacaccacaattacctaacccgcctgaggcgctatgagattgccgtcaatctagacttgagtgagagacaggtaaaagtgtggtttcagaatcggcggatgaagtggaagcgggtgaaaggcggccagcccatcagtcctaatgggcaggatcctgaggatggcgattccactgcgagtcctagttcggaatag

SEQ ID NO: 32492 - DNA, 420 bp, Artificial Sequence
  derived and/or modified sequence
atgggcaccagcagcctgggcctggtggacaccaccggcggccctggagatgattatggagtgctgggcagcacagccaatgaaacagagaagaagagcagcagaagaaggaaggagagcagtgacaaccaggagaacagaggcaagccagagggcagcagcaaggccaggaaggagaggacagccttcaccaaggagcagctgcgggagctggaggccgagtttgcccaccacaactacctgacccggctgcggcgctatgaaattgctgtgaacctggacctgtctgagcggcaggtgaaggtgtggttccagaacagaaggatgaagtggaagagggtgaagggcggccagcccatcagccccaacggccaggaccctgaagatggagacagcacagccagccccagcagcgagtag

SEQ ID NO: 32493 - DNA, 420 bp, Artificial Sequence
  derived and/or modified sequence
atgggcaccagcagcctgggcctggtggacaccaccggcggccccggagacgactatggcgttctcggtagtaccgcaaatgagactgagaagaaatcctcacgacgccgcaaggagagttccgacaaccaggagaatagggggaaacctgaaggatcttccaaagcacgcaaagagcgcaccgccttcaccaaagagcaacttagagagctggaggcagaatttgcacaccataattatttgacccgcttgcgacggtacgaaatcgccgtcaatttggatttatctgaacgccaggtaaaagtgtggttccaaaatcgtaggatgaagtggaagcgggtgaaagggggacagcctatcagtcccaatggccaggatcccgaggacggcgacagcaccgcgagcccttctagcgagtag

SEQ ID NO: 32494 - DNA, 420 bp, Artificial Sequence
  derived and/or modified sequence
atgggaacgtcttcactggggctggtcgatactacagggggtcccggagatgattatggggtgctcggtagcaccgccaacgagaccgaaaaaaaatcgagccgaaggcgaaaagaaagttctgacaatcaagagaatcggggaaagccggagggatcatctaaggctcggaaagaacgcaccgcatttacaaaggagcagcttagggagctcgaggctgagtttgcccatcataattatctgacaagactgaggagatacgagatagccgtgaatctggacttgtccgaacggcaggttaaggtttggttccagaacaggcggatgaaatggaagagggtaaaggggggtcaaccaatctcacctaatggccaggaccccgaggacggcgacagtactgcttccccctcatctgaatag

SEQ ID NO: 32495 - DNA, 420 bp, Artificial Sequence
  derived and/or modified sequence
atgggcaccagcagcctgggcctggtggacaccaccggcggccccggcgacgactacggcgtgctgggcagcaccgccaacgagaccgagaagaagagcagcagaagaagaaaggagagcagcgacaaccaggagaacagaggcaagcccgagggcagcagcaaggccagaaaggagagaaccgccttcaccaaggagcagctgagagagctggaggccgagttcgcccaccacaactacctgaccagactgagaagatacgagatcgccgtgaacctggacctgagcgagagacaggtgaaggtgtggttccagaacagaagaatgaagtggaagagagtgaagggcggccagcccatcagccccaacggccaggaccccgaggacggcgacagcaccgccagccccagcagcgagtag

SEQ ID NO: 32496 - protein, 1077 aa, Artificial Sequence
  derived and/or modified sequence
MAERGGDGGESERFNPGELRMAQQQALRFRGPAPPPNAVMRGPPPLMRPPPPFGMMRGPPPPPRPPFGRPPFDPNMPPMPPPGGIPPPMGPPHLQRPPFMPPPMSSMPPPPGMMFPPGMPPVTAPGTPALPPTEEIWVENKTPDGKVYYYNARTRESAWTKPDGVKVIQQSELTPMLAAQAQVQAQAQAQAQAQAQAQAQAQAQAQAQAQAQAQAQAQAQAQAQAQAQAQAQAQAQAQAQAQVQAQVQAQVQAQAVGASTPTTSSPAPAVSTSTSSSTPSSTTSTTTTATSVAQTVSTPTTQDQTPSSAVSVATPTVSVSTPAPTATPVQTVPQPHPQTLPPAVPHSVPQPTTAIPAFPPVMVPPFRVPLPGMPIPLPGVLPGMAPPIVPMIHPQVAIAASPATLAGATAVSEWTEYKTADGKTYYYNNRTLESTWEKPQELKEKEKLEEKIKEPIKEPSEEPLPMETEEEDPKEEPIKEIKEEPKEEEMTEEEKAAQKAKPVATAPIPGTPWCVVWTGDERVFFYNPTTRLSMWDRPDDLIGRADVDKIIQEPPHKKGMEELKKLRHPTPTMLSIQKWQFSMSAIKEEQELMEEINEDEPVKAKKRKRDDNKDIDSEKEAAMEAEIKAARERAIVPLEARMKQFKDMLLERGVSAFSTWEKELHKIVFDPRYLLLNPKERKQVFDQYVKTRAEEERREKKNKIMQAKEDFKKMMEEAKFNPRATFSEFAAKHAKDSRFKAIEKMKDREALFNEFVAAARKKEKEDSKTRGEKIKSDFFELLSNHHLDSQSRWSKVKDKVESDPRYKAVDSSSMREDLFKQYIEKIAKNLDSEKEKELERQARIEASLREREREVQKARSEQTKEIDREREQHKREEAIQNFKALLSDMVRSSDVSWSDTRRTLRKDHRWESGSLLEREEKEKLFNEHIEALTKKKREHFRQLLDETSAITLTSTWKEVKKIIKEDPRCIKFSSSDRKKQREFEEYIRDKYITAKADFRTLLKETKFITYRSKKLIQESDQHLKDVEKILQNDKRYLVLDCVPEERRKLIVAYVDDLDRRGPPPPPTASEPTRRSTK

SEQ ID NO: 32497 - DNA, 3234 bp, Artificial Sequence
  derived and/or modified sequence
atggccgagagaggcggcgacggcggcgagagcgagagattcaaccccggcgagctgagaatggcccagcagcaggccctgagattcagaggccccgcccccccccccaacgccgtgatgagaggccccccccccctgatgagaccccccccccccttcggcatgatgagaggccccccccccccccccagaccccccttcggcagaccccccttcgaccccaacatgccccccatgcccccccccggcggcatccccccccccatgggccccccccacctgcagagaccccccttcatgcccccccccatgagcagcatgccccccccccccggcatgatgttcccccccggcatgccccccgtgaccgcccccggcacccccgccctgccccccaccgaggagatctgggtggagaacaagacccccgacggcaaggtgtactactacaacgccagaaccagagagagcgcctggaccaagcccgacggcgtgaaggtgatccagcagagcgagctgacccccatgctggccgcccaggcccaggtgcaggcccaggcccaggcccaggcccaggcccaggcccaggcccaggcccaggcccaggcccaggcccaggcccaggcccaggcccaggcccaggcccaggcccaggcccaggcccaggcccaggcccaggcccaggcccaggcccaggcccaggcccaggcccaggcccaggcccaggtgcaggcccaggtgcaggcccaggtgcaggcccaggccgtgggcgccagcacccccaccaccagcagccccgcccccgccgtgagcaccagcaccagcagcagcacccccagcagcaccaccagcaccaccaccaccgccaccagcgtggcccagaccgtgagcacccccaccacccaggaccagacccccagcagcgccgtgagcgtggccacccccaccgtgagcgtgagcacccccgcccccaccgccacccccgtgcagaccgtgccccagccccacccccagaccctgccccccgccgtgccccacagcgtgccccagcccaccaccgccatccccgccttcccccccgtgatggtgccccccttcagagtgcccctgcccggcatgcccatccccctgcccggcgtgctgcccggcatggccccccccatcgtgcccatgatccacccccaggtggccatcgccgccagccccgccaccctggccggcgccaccgccgtgagcgagtggaccgagtacaagaccgccgacggcaagacctactactacaacaacagaaccctggagagcacctgggagaagccccaggagctgaaggagaaggagaagctggaggagaagatcaaggagcccatcaaggagcccagcgaggagcccctgcccatggagaccgaggaggaggaccccaaggaggagcccatcaaggagatcaaggaggagcccaaggaggaggagatgaccgaggaggagaaggccgcccagaaggccaagcccgtggccaccgcccccatccccggcaccccctggtgcgtggtgtggaccggcgacgagagagtgttcttctacaaccccaccaccagactgagcatgtgggacagacccgacgacctgatcggcagagccgacgtggacaagatcatccaggagcccccccacaagaagggcatggaggagctgaagaagctgagacaccccacccccaccatgctgagcatccagaagtggcagttcagcatgagcgccatcaaggaggagcaggagctgatggaggagatcaacgaggacgagcccgtgaaggccaagaagagaaagagagacgacaacaaggacatcgacagcgagaaggaggccgccatggaggccgagatcaaggccgccagagagagagccatcgtgcccctggaggccagaatgaagcagttcaaggacatgctgctggagagaggcgtgagcgccttcagcacctgggagaaggagctgcacaagatcgtgttcgaccccagatacctgctgctgaaccccaaggagagaaagcaggtgttcgaccagtacgtgaagaccagagccgaggaggagagaagagagaagaagaacaagatcatgcaggccaaggaggacttcaagaagatgatggaggaggccaagttcaaccccagagccaccttcagcgagttcgccgccaagcacgccaaggacagcagattcaaggccatcgagaagatgaaggacagagaggccctgttcaacgagttcgtggccgccgccagaaagaaggagaaggaggacagcaagaccagaggcgagaagatcaagagcgacttcttcgagctgctgagcaaccaccacctggacagccagagcagatggagcaaggtgaaggacaaggtggagagcgaccccagatacaaggccgtggacagcagcagcatgagagaggacctgttcaagcagtacatcgagaagatcgccaagaacctggacagcgagaaggagaaggagctggagagacaggccagaatcgaggccagcctgagagagagagagagagaggtgcagaaggccagaagcgagcagaccaaggagatcgacagagagagagagcagcacaagagagaggaggccatccagaacttcaaggccctgctgagcgacatggtgagaagcagcgacgtgagctggagcgacaccagaagaaccctgagaaaggaccacagatgggagagcggcagcctgctggagagagaggagaaggagaagctgttcaacgagcacatcgaggccctgaccaagaagaagagagagcacttcagacagctgctggacgagaccagcgccatcaccctgaccagcacctggaaggaggtgaagaagatcatcaaggaggaccccagatgcatcaagttcagcagcagcgacagaaagaagcagagagagttcgaggagtacatcagagacaagtacatcaccgccaaggccgacttcagaaccctgctgaaggagaccaagttcatcacctacagaagcaagaagctgatccaggagagcgaccagcacctgaaggacgtggagaagatcctgcagaacgacaagagatacctggtgctggactgcgtgcccgaggagagaagaaagctgatcgtggcctacgtggacgacctggacagaagaggccccccccccccccccaccgccagcgagcccaccagaagaagcaccaagtag

SEQ ID NO: 32498 - DNA, 3234 bp, Artificial Sequence
  derived and/or modified sequence
atggccgagaggggaggcgacggcggggagtctgaacgcttcaaccctggggagctgcgcatggcccagcagcaagccttgagattcagagggccagcccccccacctaatgctgtgatgcgtggtcccccaccattaatgcggccaccaccaccattcggcatgatgcgcgggcctccccccccgcccagacctcccttcgggcgtccacccttcgacccaaatatgccaccaatgccccctcccggcggcattcctccccccatgggcccaccacatttacagcgcccgccctttatgccccctcctatgagcagcatgcccccgcctcctggaatgatgttcccacccgggatgcccccagtcacagctccaggaacgccagcgttgccacccacagaggaaatttgggtcgagaacaaaacccctgacggaaaagtctattactataatgcccgcactcgtgagagtgcatggacaaaacccgatggggtaaaagttattcaacagtccgagttgactccgatgctcgctgcacaagcacaggtgcaggcgcaggcccaggctcaagcccaggcccaggctcaggcccaggctcaggctcaggcacaggcgcaggcccaggcccaagctcaggcacaagcgcaggcccaggcgcaagctcaagcgcaagcacaggcacaggcgcaggcccaggcccaggctcaggcccaggctcaggctcaggtccaggctcaagtccaggcccaggtgcaggcccaggcagttggcgcatccacacccaccacgtcaagccccgcccctgcagtgagtacctccacatcctccagcacacctagcagcaccacatctaccacaactacagcaacatccgtggctcagaccgtttcaacaccgactacgcaagaccagactccatcgtccgccgtttccgtggctactcctacggtaagtgtgagcaccccagccccgaccgcgacaccagtccagacagtgccgcagccccatccacagaccctcccccccgccgtcccacattctgtgccccaacctacaacagcgattcccgccttccctccagtgatggtccctccattccgcgtccccctgccgggaatgcctatacctctacctggcgttctcccagggatggccccacctattgtcccgatgatccacccacaggtagccattgcagcatctcccgcgactctggcaggagcaaccgccgtgtcggagtggacagaatacaaaactgctgacggtaagacatattactataacaatagaacccttgagtctacctgggagaaacctcaggagctgaaagagaaagagaaattggaggagaagattaaggagcctatcaaagagccctctgaggagcccctccctatggagacagaagaggaggatccaaaagaggagccaattaaagagatcaaggaggagcccaaggaagaggaaatgaccgaggaagagaaagccgcgcagaaagcaaaaccagtggccaccgcgccaatcccgggcactccctggtgcgtcgtatggacaggggatgagcgtgtgttcttttacaatccgacaaccaggctctccatgtgggataggcctgacgacctaatcggacgcgctgacgtcgataagattatccaggaacctccgcataagaaaggtatggaggaacttaagaaattgcgccatccaacgcccactatgctgtcgatacagaagtggcagtttagcatgtcagctattaaagaggaacaagagctgatggaggaaattaatgaggatgaacccgtgaaagccaaaaaacgaaagagagacgacaataaggatattgactccgagaaggaagccgctatggaagctgagataaaagccgcccgcgagcgggcaatagtgcccttggaggcgcggatgaagcagtttaaagatatgctgctcgagagaggggttagtgctttctctacttgggaaaaagagctccacaagattgtgttcgatccccgctatttgctacttaatcccaaagagcgcaagcaggtcttcgaccaatatgtaaaaacacgcgctgaagaagaaagacgggagaagaaaaataagatcatgcaggcaaaggaggatttcaagaagatgatggaagaggccaagttcaatccaagagctaccttttccgagttcgccgccaagcatgctaaggattctcgctttaaagccatagagaagatgaaagatagagaagccctgttcaatgaattcgtcgctgcggcaagaaagaaggaaaaggaagatagcaaaactcggggagagaagattaaatctgacttctttgagcttttgagtaatcaccaccttgattcacagtcccggtggtctaaagtcaaagataaggtggagtctgacccccggtataaggccgtcgattccagttcaatgagggaagatttgtttaagcaatacatagagaagatcgctaagaacctggacagcgagaaggaaaaagagttagaacgccaggccaggattgaggcaagtttgcgggaaagggagcgggaagtgcagaaagcaaggtcagagcagacaaaagagatcgatagggagcgcgaacagcacaagcgggaagaggctatacagaatttcaaagcgctgttatccgacatggtgaggagctccgacgtcagttggagcgatacgcgcagaactcttaggaaagatcaccgatgggaatctggctctctcctggaacgcgaagagaaagaaaagttattcaatgaacatatcgaggcactgacaaaaaaaaagcgcgagcatttccggcaactgttagatgagacatctgccataaccctgacatccacatggaaagaagtcaaaaagattatcaaggaagaccctaggtgcatcaaatttagttcatctgacaggaagaaacaacgggaattcgaagagtatatccgagacaaatacattactgccaaggcagactttcgcactttgcttaaggaaacaaaatttatcacctaccgctcgaagaaattaatccaggagtcagaccagcacctgaaggacgtggaaaagatcctgcagaatgataaacgttatctggttcttgattgcgttcccgaagaacgcaggaaactcatcgtagcatacgtggatgatctcgaccgacggggtccccctcctccccccactgcctctgagcccacaaggagatcaaccaagtag

SEQ ID NO: 32499 - DNA, 3234 bp, Artificial Sequence
  derived and/or modified sequence
atggccgagagaggaggagatggaggagagagcgagcgcttcaaccctggagagctgaggatggcccagcagcaggccctgcgcttccggggccctgcccctcctccaaatgctgtgatgaggggccccccacccctgatgaggcctcctcctccatttggcatgatgaggggccccccacctccaccccggcccccatttggccggcccccatttgaccccaacatgccacccatgcctcctcctgggggcatccccccacccatgggccccccccacctgcagaggcctcccttcatgcccccacccatgagctccatgcctcctcctcctggcatgatgttccccccaggcatgcctcctgtgacagcccctggcaccccagccctgcccccaacagaggagatctgggtggagaacaagaccccagatggcaaggtgtactactacaatgcccggacccgggagagcgcctggaccaagccagatggagtgaaggtgatccagcagagcgagctgacccccatgctggccgcccaggcccaggtgcaggcccaggcccaggcccaggcccaggcccaggcccaggcccaggcccaggcccaggcccaggcccaggcccaggcccaggcccaggcccaggcccaggcccaggcccaggcccaggcccaggcccaggcccaggcccaggcccaggcccaggcccaggcccaggcccaggcccaggtgcaggcccaggtgcaggcccaggtgcaggcccaggccgtgggcgccagcacccccaccaccagcagccctgccccagctgtgtccaccagcaccagcagcagcacccccagcagcaccaccagcaccaccaccacagccacctctgtggcccagacagtgtccacccccaccacccaggaccagacccccagcagcgctgtgtctgtggccacccccaccgtgtctgtgtccaccccagcccccacagccacccctgtgcagacagtgccccagccccacccccagaccctgcccccagctgtgccccacagcgtgccccagcccaccacagccatcccagccttcccccctgtgatggtgccccccttccgggtgcccctgcccggcatgcccatccccctgcccggggtgctgcccggcatggccccacccatcgtgcccatgatccacccccaggtggccatcgccgccagccctgccaccctggccggggccacagctgtgtctgagtggacagagtacaagacagcagatggcaagacctactactacaacaacagaaccctggagagcacctgggagaagccccaggagctgaaggagaaggagaagctggaggagaagatcaaggagcccatcaaggagcccagcgaggagcccctgcccatggagacagaggaggaggaccccaaggaggagcccatcaaggagatcaaggaggagcccaaggaggaggagatgacagaggaggagaaggccgcccagaaggccaagcctgtggccacagcccccatccctggcaccccctggtgtgtggtgtggacaggagatgagagggtcttcttctacaaccccaccacccggctgtccatgtgggacagaccagatgacctgattggccgggcagatgtggacaagatcatccaggagcccccccacaagaagggcatggaggagctgaagaagctgcggcaccccacccccaccatgctgagcatccagaagtggcagttctccatgtctgccatcaaggaggagcaggagctgatggaggagatcaatgaagatgagcctgtgaaggccaagaagaggaagagagatgacaacaaggacattgattctgagaaggaggccgccatggaggccgagatcaaggccgcccgggagcgggccatcgtgcccctggaggccaggatgaagcagttcaaggacatgctgctggagcggggcgtgtctgccttcagcacctgggagaaggagctgcacaagatcgtgtttgacccccgctacctgctgctgaaccccaaggagaggaagcaggtgtttgaccagtatgtgaagaccagggctgaggaggagcggcgggagaagaagaacaagatcatgcaggccaaggaggacttcaagaagatgatggaggaggccaagttcaacccccgggccaccttcagcgagtttgctgccaagcacgccaaggacagccgcttcaaggccatcgagaagatgaaggaccgggaggccctcttcaatgaatttgtggccgccgccaggaagaaggagaaggaggacagcaagaccagaggagagaagatcaagagtgacttctttgagctgctgagcaaccaccacctggacagccagagccgctggagcaaggtgaaggacaaggtggagagtgacccccgctacaaggctgtggacagcagctccatgagggaggacctcttcaagcagtacatcgagaagatcgccaagaacctggacagcgagaaggagaaggagctggagcggcaggcccgcatcgaggccagcctgcgggagcgggagcgggaggtgcagaaggcccggtctgagcagaccaaggagattgaccgggagcgggagcagcacaagcgggaggaggccatccagaacttcaaggccctgctgagtgacatggtgcgcagcagtgatgtgtcctggagcgacaccaggaggaccctgaggaaggaccaccgctgggagagcggcagcctgctggagcgggaggagaaggagaagctgttcaatgagcacatcgaggccctgaccaagaagaagcgggagcacttccggcagctgctggatgagaccagcgccatcaccctgaccagcacctggaaggaggtgaagaagatcatcaaggaggacccccgctgcatcaagttcagcagcagtgacaggaagaagcagcgggagtttgaggagtacatccgggacaagtacatcacagccaaggctgacttccgcaccctgctgaaggagaccaagttcatcacctaccgcagcaagaagctgatccaggagagtgaccagcacctgaaggatgtggagaagatcctgcagaatgacaagcgctacctggtgctggactgtgtgcctgaggagaggaggaagctgattgtggcctacgtggatgacctggacagaagaggccccccacctccacccacagccagcgagcccaccaggaggagcaccaagtag

SEQ ID NO: 32500 - DNA, 3234 bp, Artificial Sequence
  derived and/or modified sequence
atggccgagcggggcggcgacggcggcgagagcgagcggttcaaccccggcgaactgcgcatggcccagcagcaggctcttcgctttagaggtcctgcaccaccccccaacgcagtgatgcggggcccaccccccctaatgcggccgccacccccctttggaatgatgcgcggaccaccaccacctccccggcccccattcggacgtcctcctttcgatcccaacatgccacctatgcctcccccagggggaatccccccacctatggggccccctcacctgcagagacctccctttatgccaccacccatgtcgtctatgccccctcctccaggcatgatgttccccccgggcatgcccccggtaaccgctcccggcacccccgcactgcctcctacagaggagatttgggtggagaacaagacacccgatggaaaggtgtactactacaacgcccgaacaagggaaagcgcctggaccaagcctgacggggtgaaagttatccagcagagtgagttaacgcctatgctggccgcgcaggctcaggtgcaggcccaggctcaggcccaagctcaggcccaggctcaagcccaggcacaggcccaggcccaagcgcaggcacaggcgcaggcccaggcccaggctcaggcgcaggcccaggcccaggcccaggctcaggcgcaggctcaagctcaggctcaggcccaggcccaagcccaggcacaggtgcaggcccaagtccaggcccaggtccaagcgcaggcggttggcgcttcgacgcctacaacttcctctccagccccagcagtttctacctcaacaagctccagtactccttcatcaactacctccaccacaaccacagctacttctgtggctcaaaccgttagcacacccaccactcaggatcagactcccagcagcgcagtctccgtcgcaacgcccacagtaagtgtttctacacccgccccgacagccactcccgtgcagacagtgcctcagccgcatcctcagacacttccacccgcagtcccccacagcgtgccgcagcccacaaccgccatccctgctttcccacctgttatggtcccacccttccgtgtaccccttcctgggatgcctatcccgcttccaggggtactccctggaatggccccacccattgtccctatgattcatccgcaggtggcaatcgccgccagtcctgccacccttgcgggcgcgaccgctgtctccgagtggacagaatacaagaccgctgacggaaagacctactactataataaccgcacgcttgagagcacttgggagaagcctcaggaactgaaggagaaggaaaaactggaggagaaaataaaagaaccgattaaggaacctagcgaggagcccctccccatggaaacagaagaggaagacccaaaggaggaaccaattaaagaaattaaagaggagcctaaggaggaagagatgacagaggaagagaaggcagctcagaaagccaagcctgtggccactgcccccatacccggcaccccatggtgtgttgtatggacaggggatgagcgcgtgttcttctataaccccactacccgcctgtctatgtgggacagacccgacgatcttatcggccgcgctgatgtggacaaaattatacaagagccccctcataagaaaggtatggaagaactgaaaaaactccggcatccaaccccaacaatgttgtctatacagaaatggcagttctccatgtccgcgatcaaggaggaacaggagctcatggaggagattaatgaagacgaacctgtgaaggccaagaaacgcaagagggatgacaataaggacatagatagcgagaaggaggccgctatggaggctgaaataaaggcggcccgcgagcgggccattgtgccccttgaggcccggatgaagcaattcaaggacatgctactggaacgcggagtgtccgctttctctacatgggaaaaggaactgcacaagattgtgtttgatccacgctatcttttgctcaatcctaaggaaagaaagcaggtcttcgatcagtacgtgaagacaagagccgaggaggagcgtcgagaaaaaaagaacaagattatgcaggctaaggaggactttaaaaagatgatggaagaggccaagttcaatccacgcgcaacattctctgagttcgctgcaaaacacgctaaggattcccgttttaaggcaattgaaaagatgaaagatagagaggctttgtttaatgaatttgtggccgctgctaggaagaaggaaaaggaagacagcaagacccgtggtgagaagattaaaagcgattttttcgagctcctcagcaatcatcatctggattcccagagccggtggagcaaagtgaaggacaaagtggagtctgatcctaggtacaaggcagttgatagctctagcatgcgtgaggatctctttaaacaatatattgagaaaatcgccaagaatcttgattctgaaaaggagaaagagctggagaggcaggctcgcatcgaggctagcctgcgagagcgagaaagggaagtccagaaggctcgaagtgaacagacaaaggagattgacagggagcgcgaacagcataagcgagaggaggctatccagaatttcaaggccctactaagcgacatggtgcgcagctccgacgtgtcttggtcagacaccagacggacattaagaaaggatcaccgctgggagtctgggtcactcctggagagagaagaaaaggagaagttattcaatgaacacattgaggcgctcaccaaaaagaagagggaacattttcgtcagctactggacgaaacttctgcaattactctgacctctacatggaaggaggtgaaaaaaatcataaaagaggaccctagatgcattaaattttcttccagtgataggaagaagcagcgggagtttgaagaatatattcgagataaatacattactgctaaggctgatttccggaccctgctgaaagagaccaagttcataacgtacaggtccaaaaaactgattcaggaatcagatcaacatctcaaggatgttgagaaaatcctgcagaacgataagcggtacctagttctcgattgcgtgcctgaagaaaggaggaaacttatcgttgcatatgtagacgacctagaccgccgtggccccccccctccccctacagcttccgagccgactcggcgcagtaccaagtag

SEQ ID NO: 32501 - DNA, 3234 bp, Artificial Sequence
  derived and/or modified sequence
atggctgagcggggtggcgatgggggagaatcagagaggttcaatcctggagagcttaggatggcgcagcagcaagctcttcggttccgtggacctgcaccgccacccaacgcggtaatgcgaggcccaccaccacttatgcggccaccgccaccctttggcatgatgaggggaccccctccacccccacgccctcccttcgggaggccccctttcgatcccaacatgccacctatgccaccccctggcggaatccctcccccaatggggcctccccatcttcagcgccctccatttatgcctcctcctatgtcatcgatgcctcccccaccgggtatgatgtttccacctggcatgccaccggtgaccgcgcctgggacccctgccctgccccctaccgaggagatttgggtcgaaaacaaaacaccagacgggaaggtgtattattacaatgctcgaacccgcgaaagcgcttggaccaagcctgacggagtcaaggtcattcagcagtctgagctgactccgatgctcgcagcgcaggcccaggtgcaggcccaggctcaagcccaggcccaagcccaggcccaagcccaagctcaagcccaagcccaagcccaagcacaggcacaggcccaggcccaagctcaggcacaggcacaggctcaggcacaggctcaggctcaggctcaggctcaggcccaggctcaggcccaggcccaggctcaggttcaggcgcaggttcaggcacaggtccaggcccaggcagtgggagcctcaacaccgacaacctcttcacctgcccctgccgtgagtacctctacctccagctcaacgccatcttcaactacatctactaccaccaccgccactagcgtggctcaaacggtgagcactccaaccacccaggaccagaccccatcgtccgcagtgtccgtagcgacaccaactgtctcagtgtccactccagccccaactgccactccagtacagacggtcccgcaacctcatccacagaccctgcctcccgcagttcctcattcagtgccgcagcctacaacggccattcccgcttttcctcccgttatggtgcccccatttagggtccccctcccaggtatgccaattcctttacctggtgtcctccccggaatggcccctcccattgtaccaatgatccatccccaagtggccatcgcagccagccccgcaacgttagccggagccaccgctgtctcggagtggaccgagtacaagaccgcagatggtaaaacttactattataacaaccgtaccctggagtccacctgggaaaaacctcaggaactgaaggagaaagagaaattggaggagaagatcaaagaacctatcaaggagcccagcgaagagcctctgccaatggaaactgaggaagaggaccccaaggaagagcccattaaggaaattaaagaagagcccaaggaggaggagatgaccgaggaggagaaagctgcccagaaggctaagcccgtggctaccgcacccattccagggactccctggtgtgtggtttggacaggtgatgagagagtatttttttacaacccaaccacaaggctatcaatgtgggatcgacctgacgacctgattggtagagccgacgtggataaaataattcaggaacccccacataagaagggaatggaagaattgaaaaaattgcggcaccccacacctactatgttaagtatccagaagtggcagttctctatgagcgccattaaggaagaacaggagctcatggaggagataaacgaagatgagcctgttaaggctaaaaaaagaaagcgtgacgacaataaggacatcgacagcgaaaaggaggctgcaatggaggccgagataaaggccgcacgggagcgcgctatagttccgcttgaagctagaatgaagcagttcaaagatatgctgctggaaagaggggtttctgcattttctacatgggagaaagagttgcataaaattgtctttgaccccagatacctgctgttgaacccgaaagaaaggaagcaggttttcgaccagtacgtgaaaacacgcgctgaggaagagcgaagggaaaagaaaaataaaatcatgcaggcaaaagaagacttcaagaagatgatggaggaagctaaatttaacccgagggcaaccttctcagaattcgccgcaaagcacgccaaagacagtcgtttcaaggccattgagaaaatgaaagacagagaggctctgtttaatgaatttgttgccgcagccagaaagaaagaaaaagaagactcaaaaactagaggagagaaaatcaagagtgacttctttgagcttttgtctaaccaccatcttgactcccagagtaggtggagcaaggtaaaggacaaggtggagtctgacccgcgttacaaagcagtcgattccagctctatgagagaagacttattcaagcagtatattgagaaaatcgccaagaatctggacagcgagaaggagaaggagctcgagcgtcaagctcgcatcgaagcatcgttgagggaacgcgagagggaggtgcaaaaggccaggtccgaacagactaaagaaatcgatagggaaagagagcagcataagcgagaggaggctatccagaacttcaaggctctgttgagcgacatggtgcggtcgtctgacgtctcatggtctgacacaaggcggaccctccgaaaagaccaccgctgggaaagtggttcgctccttgagagggaggagaaggaaaagttgtttaatgagcatattgaggcgttgactaaaaaaaagcgagagcacttccgtcaactgttggacgagacctcagccattactctcacatccacttggaaggaggtgaagaagattatcaaggaggatccacgatgcatcaaatttagctcaagcgacagaaagaagcagagggagttcgaagagtacatcagagataagtacatcaccgctaaggctgacttcagaactctgctgaaggagactaaattcatcacttatcggtccaaaaagctgattcaggaaagcgaccagcatctcaaagacgttgagaaaattctgcaaaacgacaagagatacctcgtgctggactgtgtaccggaggaaaggcgcaagctcattgttgcctacgtcgatgacctcgacaggcggggtcctccacctccgcctacagcctccgagcctactaggcggtcaacaaagtag

SEQ ID NO: 32502 - DNA, 3633 bp, Artificial Sequence
  derived and/or modified sequence
tgaacgcggccctctgtaatggcggagcgtggcggggacgggggcgagagtgaacgattcaacccgggggagctcaggatggcccaacagcaggccttgaggttccgaggtccggctcccccaccaaatgcagtgatgcgaggcccaccacctctgatgcgacctcctccaccttttggtatgatgcgaggccctcctccaccaccacggccgccctttggacgtcctccttttgatcctaatatgccgccaatgcctcctccaggagggatacctccacctatgggccctccacacctccagagaccacctttcatgcctcctcccatgagttccatgcctcctcctccgggtatgatgtttccaccaggaatgcctcctgtgactgctcctggtactccagcactacctcctacggaggagatatgggttgaaaataaaactccagatgggaaggtttattattataatgctcggacacgtgaatctgcatggaccaagccagatggagttaaggttattcagcaatcagaactgacacctatgcttgcagcccaggcacaggttcaggctcaggcccaggcgcaggctcaggcccaggcgcaggctcaggcccaggcacaagctcaggcccaggctcaggctcaggcccaggcccaggcccaggcccaggcccaggcccaagcccaagcccaggcccaggctcaggctcaggcacaagctcaggcccaggcccaggctcaggtccaggcccaggtccaggcacaagtgcaagcacaagcagttggagcttccacccctacgaccagtagcccagcacctgcagtatccacttcaacatcatcatccaccccttcctctaccacttctaccacaacaactgctacttcagttgcgcagacagtatcaacacccacaacacaagatcagaccccaagttctgctgtttcagttgccacgcctacagttagtgtttcaactcctgctcctacagccacacctgtgcaaaccgttccccagccgcaccctcagacgttacctcctgctgttcctcattcagtacctcagccaacaacagcaatacctgcttttccaccagtaatggtacctccgtttcgtgttccccttcctggcatgccaattccacttccaggtgtattgccaggaatggcccctcctatcgtacccatgatacatccccaggttgctattgcagcttcacctgctaccttagctggagcaacagcagtttctgaatggactgaatataaaacagcagatgggaagacatattattataataatagaacattagaatcaacctgggaaaaaccccaagaactaaaggaaaaagaaaagttagaagagaagattaaagagccaattaaagaaccctctgaagagcctctgccaatggagacggaggaggaggatcctaaagaagagcctataaaggagataaaggaggagcccaaagaagaggagatgactgaagaagaaaaggctgcccagaaggcaaagccagttgctactgctcctattcctggtactccatggtgtgtcgtttggactggtgatgagcgggtcttcttttataatcccaccactcgtctttctatgtgggaccgacctgatgatctgattggcagggcagatgttgacaaaattattcaggagccccctcataaaaaaggaatggaggaattgaagaaactaaggcacccaactccgacaatgctgtcgatccaaaagtggcaattctctatgagtgcaattaaagaggaacaagaattaatggaagaaattaatgaagatgagcctgttaaagcaaaaaaacggaagagagacgataataaagacattgactcagagaaagaagctgccatggaagctgaaattaaagctgcccgagaaagggccattgtccctctggaggctcgaatgaagcagttcaaggacatgctgctagagagaggggtgtctgctttttcaacgtgggagaaggagttgcacaagatagtttttgatccccggtacttacttctcaatcctaaagagagaaaacaggtgtttgatcagtatgtaaagaccagggcagaggaagaacgcagggaaaagaaaaataaaataatgcaagccaaggaagatttcaaaaaaatgatggaagaagcaaaatttaatccaagagcaacttttagtgaatttgcagccaagcatgctaaagattcaagattcaaagcaattgaaaagatgaaagaccgagaagccttgtttaatgagtttgtggccgctgctaggaagaaagagaaagaagattcgaagaccagaggtgagaagattaaatcggatttctttgaactattatctaatcatcacttggacagtcagtctcgatggagcaaagtaaaagacaaagtagaaagtgatccacgttacaaagcagtagatagttcatcaatgagagaagaccttttcaaacagtacattgaaaaaatagccaagaatttagactcagaaaaagaaaaggagcttgaaaggcaagcccgcattgaggcaagccttcgagaacgagaaagggaggttcaaaaggcccgttcagaacaaacaaaagaaatagatcgagagagagagcagcacaaacgagaagaagctatccagaatttcaaagctcttctgtctgacatggtacgttcttcagatgtgtcatggtctgatactcgtaggaccctccgaaaagatcaccgctgggaatctggatccttattggaaagagaggagaaagagaagctttttaatgaacacattgaagcacttaccaaaaaaaagagagagcactttaggcaacttctggatgaaacttctgcaattaccttaacatccacgtggaaagaagtaaaaaaaatcattaaggaagatcctcgatgtattaagttctcctccagtgacaggaaaaaacaaagagaatttgaagaatatatcagagacaaatatatcacagccaaagctgacttcaggacgcttttgaaagagaccaaatttataacatatagatccaaaaaattaatccaagaatcagatcagcacctgaaagatgtagaaaaaattttacagaatgacaaacggtatctagtactggactgtgtgccagaggagaggcgtaaactgattgtggcatatgttgatgacctggatcgccggggtccacccccacctcccacagcatcggagcccacgagacgatcaacaaaataattctaaatactcttccataggggcatctattcaaaatgcttgcatgagccaattttcaggtttttacatatatgtgcattagtcaacctattgcgaaaccatctgacaaacagaaggagaagcatttgtgaacagtttctgaacagaacactttggaaatatttatgcttttctttgtgtggcatgactgacatacatactcaaatataggctgtctctagtaaatcttaaaatcttgaagctaaaattcatccttttatgaggtgtggaagtcagtgacttggtgacgttcttcctagcagtgttaatacatgcaagaagtaagagcatttgtggcttgaacttgccagatgcaaataccacagactccaagaaaacccg

SEQ ID NO: 32503 - protein, 172 aa, Artificial Sequence
  derived and/or modified sequence
MRAPLCLLLLVAHAVDMLALNRRKKQVGTGLGGNCTGCIICSEENGCSTCQQRLFLFIRREGIRQYGKCLHDCPPGYFGIRGQEVNRCKKCGATCESCFSQDFCIRCKRQFYLYKGKCLPTCPPGTLAHQNTRECQERSPGQKKGRKDRRPRKDRKLDRRLDVRPRQPGLQP

SEQ ID NO: 32504 - DNA, 519 bp, Artificial Sequence
  derived and/or modified sequence
atgcgagcccctctatgtctgttattattggtggcccacgccgtggacatgttggcccttaatagacgaaagaagcaggtggggacagggctgggcggaaactgtactggatgtatcatctgcagcgaggaaaatggctgttcgacatgccaacagcggctgttcttgttcatcaggagagaagggatacggcagtatggcaagtgcctgcacgactgtccccccgggtatttcggtattaggggccaggaagtgaatcgctgcaagaaatgtggcgccacttgtgaatcctgcttttctcaagatttctgtatcagatgtaagcggcagttttacctgtataagggcaagtgcctaccaacgtgccccccaggcaccttagcccaccagaacacacgggaatgccaggaacgtagtcccggtcagaagaagggcagaaaagacagacgcccacggaaagatcgcaaactggatagaagattagacgtcaggcctcgccaacctggcctccaaccttag

SEQ ID NO: 32505 - DNA, 519 bp, Artificial Sequence
  derived and/or modified sequence
atgagggcccccctgtgcctgctgctgctggtggcccatgctgtggacatgctggccctgaacagaaggaagaagcaggtgggcaccggcctgggcggcaactgcaccggctgcatcatctgcagcgaggagaatggctgcagcacctgccagcagaggctcttcctgttcatcagaagagagggcatccggcagtatggcaagtgcctgcatgactgccccccaggctacttcggcatccggggccaggaggtgaaccgctgcaagaagtgtggggccacctgtgagagctgcttcagccaggacttctgcatccgctgcaagaggcagttctacctgtacaagggcaagtgcctgcccacctgccccccaggcaccctggcccaccagaacacccgggagtgccaggagaggagccctggccagaagaagggcaggaaggacagaagacccaggaaggacaggaagctggaccggcggctggatgtgcggccccggcagcccggcctgcagccctag

SEQ ID NO: 32506 - DNA, 519 bp, Artificial Sequence
  derived and/or modified sequence
atgcgggcccccctgtgcctgctgctgctggtggcccacgccgtggacatgcttgctctgaaccgacggaaaaagcaggtgggaacaggactcggtgggaactgtacgggctgcatcatttgctctgaggaaaacggctgttccacctgccaacaaaggctcttcttgttcatccgtagggaagggattagacagtatgggaaatgcttgcatgattgccccccgggctatttcggtatccgaggtcaggaggtaaaccgttgtaagaaatgcggcgccacatgtgaatcctgtttctcacaggacttctgcatacgttgtaagaggcagttctacctctataaggggaaatgtctgcccacttgtccacccggaactctggctcatcagaacactagagagtgtcaggagagaagccctggacagaaaaaagggagaaaagatcgcagaccacggaaagaccgcaagctcgataggaggcttgacgtgcgccctagacagcctggacttcaaccatag

SEQ ID NO: 32507 - DNA, 519 bp, Artificial Sequence
  derived and/or modified sequence
atgcgtgccccactgtgcctcctactcctcgttgctcatgctgtggacatgctggccctgaaccgtagaaagaagcaagtcgggacaggactcgggggtaattgtaccggatgcattatttgcagcgaagagaatggttgtagtacatgtcagcagcgcctcttcttgttcatccgtagggagggcatcaggcagtacgggaagtgtttgcacgattgccccccaggttactttggcattaggggccaagaagtgaaccggtgtaagaaatgcggagctacctgcgaaagctgtttttctcaggatttttgcattaggtgcaaacggcagttttacctttacaagggaaaatgtttgccaacctgcccgcctggcactctcgcacaccagaacactagggagtgtcaggaacgaagtcccggacagaaaaaggggaggaaggataggaggcccaggaaagaccgcaagttggataggcgcttagatgtgcgacccaggcagccaggattgcaaccctag

SEQ ID NO: 32508 - DNA, 722 bp, Artificial Sequence
  derived and/or modified sequence
gcccacagcagcccccgcgcccgccgtgccgccgccgggacgtggggcccttgggccgtcgggccgcctggggagcgccagcccggatccggctgcccagatgcgggcgccactctgcctgctcctgctcgtcgcccacgccgtggacatgctcgccctgaaccgaaggaagaagcaagtgggcactggcctggggggcaactgcacaggctgtatcatctgctcagaggagaacggctgttccacctgccagcagaggctcttcctgttcatccgccgggaaggcatccgccagtacggcaagtgcctgcacgactgtccccctgggtacttcggcatccgcggccaggaggtcaacaggtgcaaaaaatgtggggccacttgtgagagctgcttcagccaggacttctgcatccggtgcaagaggcagttttacttgtacaaggggaagtgtctgcccacctgcccgccgggcactttggcccaccagaacacacgggagtgccaggagaggagccccggccagaagaagggcaggaaggaccggcgcccacgcaaggacaggaagctggaccgcaggctggacgtgaggccgcgccagcccggcctgcagccctgaccgccggctctcccgactctctggtcctagtcctcggcccctgcacacctcctcctgctccttctcctcctctcctcttactctttctcctctgtcttctcca

SEQ ID NO: 32509 - DNA, 519 bp, Artificial Sequence
  derived and/or modified sequence
atgagagcccccctgtgcctgctgctgctggtggcccacgccgtggacatgctggccctgaacagaagaaagaagcaggtgggcaccggcctgggcggcaactgcaccggctgcatcatctgcagcgaggagaacggctgcagcacctgccagcagagactgttcctgttcatcagaagagagggcatcagacagtacggcaagtgcctgcacgactgcccccccggctacttcggcatcagaggccaggaggtgaacagatgcaagaagtgcggcgccacctgcgagagctgcttcagccaggacttctgcatcagatgcaagagacagttctacctgtacaagggcaagtgcctgcccacctgcccccccggcaccctggcccaccagaacaccagagagtgccaggagagaagccccggccagaagaagggcagaaaggacagaagacccagaaaggacagaaagctggacagaagactggacgtgagacccagacagcccggcctgcagccctag

SEQ ID NO: 32510 - protein, 357 aa, Artificial Sequence
  derived and/or modified sequence
MAAAAAQGGGGGEPRRTEGVGPGVPGEVEMVKGQPFDVGPRYTQLQYIGEGAYGMVSSAYDHVRKTRVAIKKISPFEHQTYCQRTLREIQILLRFRHENVIGIRDILRASTLEAMRDVYIVQDLMETDLYKLLKSQQLSNDHICYFLYQILRGLKYIHSANVLHRDLKPSNLLINTTCDLKICDFGLARIADPEHDHTGFLTEYVATRWYRAPEIMLNSKGYTKSIDIWSVGCILAEMLSNRPIFPGKHYLDQLNHILGILGSPSQEDLNCIINMKARNYLQSLPSKTKVAWAKLFPKSDSKALDLLDRMLTFNPNKRITVEEALAHPYLEQYYDPTDEVGQSPAAVGLGAGEQGGT

SEQ ID NO: 32511 - DNA, 1074 bp, Artificial Sequence
  derived and/or modified sequence
atggccgccgccgccgcccagggcggcggcggcggcgagcccagaagaaccgagggcgtgggccccggcgtgcccggcgaggtggagatggtgaagggccagcccttcgacgtgggccccagatacacccagctgcagtacatcggcgagggcgcctacggcatggtgagcagcgcctacgaccacgtgagaaagaccagagtggccatcaagaagatcagccccttcgagcaccagacctactgccagagaaccctgagagagatccagatcctgctgagattcagacacgagaacgtgatcggcatcagagacatcctgagagccagcaccctggaggccatgagagacgtgtacatcgtgcaggacctgatggagaccgacctgtacaagctgctgaagagccagcagctgagcaacgaccacatctgctacttcctgtaccagatcctgagaggcctgaagtacatccacagcgccaacgtgctgcacagagacctgaagcccagcaacctgctgatcaacaccacctgcgacctgaagatctgcgacttcggcctggccagaatcgccgaccccgagcacgaccacaccggcttcctgaccgagtacgtggccaccagatggtacagagcccccgagatcatgctgaacagcaagggctacaccaagagcatcgacatctggagcgtgggctgcatcctggccgagatgctgagcaacagacccatcttccccggcaagcactacctggaccagctgaaccacatcctgggcatcctgggcagccccagccaggaggacctgaactgcatcatcaacatgaaggccagaaactacctgcagagcctgcccagcaagaccaaggtggcctgggccaagctgttccccaagagcgacagcaaggccctggacctgctggacagaatgctgaccttcaaccccaacaagagaatcaccgtggaggaggccctggcccacccctacctggagcagtactacgaccccaccgacgaggtgggccagagccccgccgccgtgggcctgggcgccggcgagcagggcggcacctag

SEQ ID NO: 32512 - DNA, 1074 bp, Artificial Sequence
  derived and/or modified sequence
atggccgccgccgctgctcagggaggtggaggaggagaaccccgccgtacagagggggtcgggcctggagtgccaggagaagtggagatggttaaaggacagccgttcgacgtcggcccccggtacacccagctccagtacatcggtgagggcgcatatggaatggtgagctcagcttatgaccatgtgcgaaagacaagagtggcaattaagaagatctcacccttcgagcatcagacatattgtcagcggacactgagagagattcaaatccttttgcgcttcagacatgagaacgtgattgggattcgagatattctgcgggctagcactctagaggcgatgcgggatgtctacatagtacaggatctcatggaaactgacttatacaagctacttaagagccagcagctgtccaatgatcacatctgttattttctgtatcagatactccgcggactaaaatacatccattctgccaatgttctccatcgcgacctgaagccatctaatttgctcatcaatactacatgcgatctgaagatctgcgacttcggactggctcgtatcgctgaccctgagcacgaccacacaggcttccttacagagtatgtcgctacgcgctggtatcgcgccccggagattatgctgaactctaaaggatataccaaatctatcgacatctggtccgtcgggtgtattctcgcagagatgctgagcaataggcccatttttcctggaaaacactacttggatcagctgaaccatattctgggtatcttgggcagcccctctcaggaggatttaaactgtattattaatatgaaggcacgcaattacttgcagtcgttgccatctaagacgaaagtggcttgggctaagttattcccaaagagcgatagtaaggctctagacttgctggacaggatgctcacttttaatcccaacaagagaattactgtggaagaggctctggcccacccctacttagagcagtattacgatccaaccgatgaggtgggccaaagtcccgctgccgtagggctgggagccggtgagcagggtggtacctag

SEQ ID NO: 32513 - DNA, 1074 bp, Artificial Sequence
  derived and/or modified sequence
atggctgctgctgctgcccagggcggcggcggcggggagcccaggagaacagaaggagtgggccctggggtgcctggagaggtggagatggtgaagggccagccctttgatgtgggcccccgctacacccagctgcagtacatcggggagggcgcctacggcatggtgagcagcgcctatgaccacgtgaggaagaccagggtggccatcaagaagatcagcccctttgagcaccagacctactgccagaggaccctgcgggagatccagatcctgctgcgcttcagacatgaaaatgtgattggcatccgggacatcctgcgggccagcaccctggaggccatgagagatgtgtacatcgtgcaggacctgatggagacagacctgtacaagctgctgaagagccagcagctgagcaatgaccacatctgctacttcctgtaccagatcctgcggggcctgaagtacatccacagcgccaacgtgctgcaccgggacctgaagcccagcaacctgctgatcaacaccacctgtgacctgaagatctgtgactttggcctggccagaattgctgaccctgagcatgaccacacaggcttcctgacagaatatgtggccacccgctggtaccgggcccctgagatcatgctgaacagcaagggctacaccaagagcattgacatctggagcgtgggctgcatcctggccgagatgctgagcaaccggcccatcttccctgggaagcactacctggaccagctgaaccacatcctgggcatcctgggcagccccagccaggaggacctgaactgcatcatcaacatgaaggccaggaactacctgcagagcctgcccagcaagaccaaggtggcctgggccaagctgttccccaagagtgacagcaaggccctggacctgctggacaggatgctgaccttcaaccccaacaagaggatcaccgtggaggaggccctggcccacccctacctggagcagtactatgaccccacagatgaggtgggccagagccctgctgctgtgggcctgggcgctggggagcagggcggcacctag

SEQ ID NO: 32514 - DNA, 1074 bp, Artificial Sequence
  derived and/or modified sequence
atggccgccgccgccgcccagggcggcggcggcggcgagccccggcgtacagagggcgtgggccctggggtgccgggggaggtcgaaatggttaagggccagccgttcgacgtgggacctcgatacacccaacttcagtatattggcgagggagcatacgggatggttagttctgcttacgatcacgtcaggaaaacacgagtcgccattaagaagatctctccctttgagcaccagacctattgtcaacgaacactgcgggaaatccagatcctcctgcggttccgccacgagaacgtcatagggattcgggatattctccgagcaagcaccttggaagccatgagggatgtttatattgtgcaagatctcatggagacagatctctataaactgctgaaaagtcaacagctgtccaatgatcatatatgctatttcttatatcaaattcttaggggactgaaatacatccattcagctaacgtgctacaccgggacttaaagccgtcaaatctgctgattaacactacctgcgacctcaaaatttgtgatttcggcctcgcccgtatcgctgatcccgagcatgatcacacaggattccttaccgagtacgtcgctaccaggtggtaccgggcccccgagataatgctgaacagcaagggttacacaaagagtatagacatatggagcgtaggatgcattctagccgagatgctcagtaatcgacctatctttccggggaaacactatctggatcagcttaatcacatccttggcatcctcggaagcccgtcacaggaggacttaaattgcatcataaacatgaaggctaggaattatctgcaatcactcccctcaaaaactaaagtggcctgggccaagctgttccccaaatcggacagcaaggcgctcgacctgctcgatcgcatgctcacctttaatccaaacaaaagaatcacagttgaggaggcccttgcccacccatacctagagcaatactacgaccccaccgacgaagttggacagtctcccgccgccgtcggcctgggagcgggcgaacaggggggaacctag

SEQ ID NO: 32515 - DNA, 1978 bp, Artificial Sequence
  derived and/or modified sequence
ctggcgcgcgcggccctgcgggtgacaggcaggcgggaaggggcggggcctcgggcggggccgccgtggggaggagggcggtgggaggggaggagtggagatggcggcggcggcggctcaggggggcgggggcggggagccccgtagaaccgagggggtcggcccgggggtcccgggggaggtggagatggtgaaggggcagccgttcgacgtgggcccgcgctacacgcagttgcagtacatcggcgagggcgcgtacggcatggtcagctcggcctatgaccacgtgcgcaagactcgcgtggccatcaagaagatcagccccttcgaacatcagacctactgccagcgcacgctccgggagatccagatcctgctgcgcttccgccatgagaatgtcatcggcatccgagacattctgcgggcgtccaccctggaagccatgagagatgtctacattgtgcaggacctgatggagactgacctgtacaagttgctgaaaagccagcagctgagcaatgaccatatctgctacttcctctaccagatcctgcggggcctcaagtacatccactccgccaacgtgctccaccgagatctaaagccctccaacctgctcatcaacaccacctgcgaccttaagatttgtgatttcggcctggcccggattgccgatcctgagcatgaccacaccggcttcctgacggagtatgtggctacgcgctggtaccgggccccagagatcatgctgaactccaagggctataccaagtccatcgacatctggtctgtgggctgcattctggctgagatgctctctaaccggcccatcttccctggcaagcactacctggatcagctcaaccacattctgggcatcctgggctccccatcccaggaggacctgaattgtatcatcaacatgaaggcccgaaactacctacagtctctgccctccaagaccaaggtggcttgggccaagcttttccccaagtcagactccaaagcccttgacctgctggaccggatgttaacctttaaccccaataaacggatcacagtggaggaagcgctggctcacccctacctggagcagtactatgacccgacggatgaggtgggccagtccccagcagcagtggggctgggggcaggggagcaggggggcacgtaggcatcccccatgccaggcctgagccttgctgtctctaccaccccagccagtggccgaggagcccttcaccttcgccatggagctggatgacctacctaaggagcggctgaaggagctcatcttccaggagacagcacgcttccagcccggagtgctggaggccccctagcccagacagacatctctgcaccctggggcctggacctgcctcctgcctgcccctctcccgccagactgttagaaaatggacactgtgcccagcccggaccttggcagcccaggccggggtggagcatgggcctggccacctctctcctttgctgaggcctccagcttcaggcaggccaaggccttctcctccccacccgccctccccacggggcctcgggacctcaggtggccccagttcaatctcccgctgctgctgctgcgcccttaccttccccagcgtcccagtctctggcagttctggaatggaagggttctggctgccccaacctgctgaagggcagaggtggagggtggggggcgctgagtagggactcagggccatgcctgcccccctcatctcattcaaaccccaccctagtttccctgaaggaacattccttagtctcaagggctagcatccctgaggagccaggccgggccgaatcccctccctgtcaaagctgtcacttcgcgtgccctcgctgcttctgtgtgtggtgagcagaagtggagctggggggcgtggagagcccggcgcccctgccacctccctgacccgtctaatatataaatatagagatgtgtctatggctg

SEQ ID NO: 32516 - DNA, 1074 bp, Artificial Sequence
  derived and/or modified sequence
atggctgccgctgctgcccagggcggtggagggggtgagcccagaaggactgagggggtgggacccggtgtaccaggtgaagttgagatggtgaaaggccagccgtttgacgtgggtcctcgctatacccaactacaatacatcggcgagggcgcatacggaatggtttcaagtgcttatgaccatgtgagaaaaactcgtgttgcgattaagaaaatctcccccttcgagcaccagacctactgtcagcggacccttagagaaatccagattctgcttagattccggcacgagaacgtgatcgggatccgagatatcctaagagcatccaccctggaggctatgagggacgtttacattgttcaagatctgatggaaacagacttgtataagctcttgaaaagtcagcagctgagcaatgatcacatttgctacttcttgtaccaaatcttgcgcggacttaagtatatccactccgcaaatgtccttcacagagatctcaagccttccaatctgctgatcaacaccacttgcgatctgaagatttgtgactttggcctagcacggatcgcagaccctgaacatgaccacaccgggtttctgactgaatacgttgccacacgttggtaccgagcccctgagatcatgttgaatagcaaggggtacacaaagagcatagatatttggagcgttggatgcatcctggcagaaatgttgtcaaacagacccatatttcctggtaagcactacttggatcagctgaatcacatcctcggcatattaggaagcccctcccaggaggatctgaactgtatcatcaatatgaaggcacgcaactaccttcagtccctaccctctaaaaccaaagtggcatgggcaaaactgtttcccaaatctgactctaaggcgttggatttgctggaccggatgctcacttttaaccctaacaaaaggattactgttgaggaggctcttgcccacccatatcttgagcagtactacgatcccacagacgaggtgggccagagtcccgcagccgtgggcctaggagccggagagcaggggggaacctag

SEQ ID NO: 32517 - protein, 292 aa, Artificial Sequence
  derived and/or modified sequence
MRIAVICFCLLGITCAIPVKQADSGSSEEKQLYNKYPDAVATWLNPDPSQKQNLLAPQNAVSSEETNDFKQETLPSKSNESHDHMDDMDDEDDDDHQSDESHHSDESDELVTDFPTDLPATEVFTPVVPTVDTYDGRGDSVVYGLRSKSKKFRRPDIQYPDATDEDITSHMESEELNGAYKAIPVAQDLNAPSDWDSRGKDSYETSQLDDQSAETHSHKQSRLYKRKANDESNEHSDVIDSQELSKVSREFHSHEFHSHEDMLVVDPKSKEEDKHLKFRISHELDSASSEVN

SEQ ID NO: 32518 - protein, 314 aa, Artificial Sequence
  derived and/or modified sequence
MRIAVICFCLLGITCAIPVKQADSGSSEEKQLYNKYPDAVATWLNPDPSQKQNLLAPQNAVSSEETNDFKQETLPSKSNESHDHMDDMDDEDDDDHVDSQDSIDSNDSDDVDDTDDSHQSDESHHSDESDELVTDFPTDLPATEVFTPVVPTVDTYDGRGDSVVYGLRSKSKKFRRPDIQYPDATDEDITSHMESEELNGAYKAIPVAQDLNAPSDWDSRGKDSYETSQLDDQSAETHSHKQSRLYKRKANDESNEHSDVIDSQELSKVSREFHSHEFHSHEDMLVVDPKSKEEDKHLKFRISHELDSASSEVN

SEQ ID NO: 32519 - DNA, 879 bp, Artificial Sequence
  derived and/or modified sequence
atgagaatcgccgtgatctgcttctgcctgctgggcatcacctgcgccatccccgtgaagcaggccgacagcggcagcagcgaggagaagcagctgtacaacaagtaccccgacgccgtggccacctggctgaaccccgaccccagccagaagcagaacctgctggccccccagaacgccgtgagcagcgaggagaccaacgacttcaagcaggagaccctgcccagcaagagcaacgagagccacgaccacatggacgacatggacgacgaggacgacgacgaccaccagagcgacgagagccaccacagcgacgagagcgacgagctggtgaccgacttccccaccgacctgcccgccaccgaggtgttcacccccgtggtgcccaccgtggacacctacgacggcagaggcgacagcgtggtgtacggcctgagaagcaagagcaagaagttcagaagacccgacatccagtaccccgacgccaccgacgaggacatcaccagccacatggagagcgaggagctgaacggcgcctacaaggccatccccgtggcccaggacctgaacgcccccagcgactgggacagcagaggcaaggacagctacgagaccagccagctggacgaccagagcgccgagacccacagccacaagcagagcagactgtacaagagaaaggccaacgacgagagcaacgagcacagcgacgtgatcgacagccaggagctgagcaaggtgagcagagagttccacagccacgagttccacagccacgaggacatgctggtggtggaccccaagagcaaggaggaggacaagcacctgaagttcagaatcagccacgagctggacagcgccagcagcgaggtgaactag

SEQ ID NO: 32520 - DNA, 945 bp, Artificial Sequence
  derived and/or modified sequence
atgagaatcgccgtgatctgcttctgcctgctgggcatcacctgcgccatccccgtgaagcaggccgacagcggcagcagcgaggagaagcagctgtacaacaagtaccccgacgccgtggccacctggctgaaccccgaccccagccagaagcagaacctgctggccccccagaacgccgtgagcagcgaggagaccaacgacttcaagcaggagaccctgcccagcaagagcaacgagagccacgaccacatggacgacatggacgacgaggacgacgacgaccacgtggacagccaggacagcatcgacagcaacgacagcgacgacgtggacgacaccgacgacagccaccagagcgacgagagccaccacagcgacgagagcgacgagctggtgaccgacttccccaccgacctgcccgccaccgaggtgttcacccccgtggtgcccaccgtggacacctacgacggcagaggcgacagcgtggtgtacggcctgagaagcaagagcaagaagttcagaagacccgacatccagtaccccgacgccaccgacgaggacatcaccagccacatggagagcgaggagctgaacggcgcctacaaggccatccccgtggcccaggacctgaacgcccccagcgactgggacagcagaggcaaggacagctacgagaccagccagctggacgaccagagcgccgagacccacagccacaagcagagcagactgtacaagagaaaggccaacgacgagagcaacgagcacagcgacgtgatcgacagccaggagctgagcaaggtgagcagagagttccacagccacgagttccacagccacgaggacatgctggtggtggaccccaagagcaaggaggaggacaagcacctgaagttcagaatcagccacgagctggacagcgccagcagcgaggtgaactag

SEQ ID NO: 32521 - DNA, 879 bp, Artificial Sequence
  derived and/or modified sequence
atgcggattgctgttatttgcttttgcttgttaggtataacgtgtgccattcctgtgaaacaggcggattctggttcctccgaggaaaagcagctctacaataagtacccagatgcagtcgccacctggcttaaccctgacccatcacagaaacagaacctgttggctcctcaaaatgccgtatcatcagaggagaccaatgattttaaacaggaaacacttccctccaaatctaacgagtcccatgaccacatggatgacatggacgacgaggatgatgacgaccaccagagtgacgaatcccaccatagcgacgagtccgatgagctcgtgacagactttcctaccgacctccctgctaccgaggtctttactcctgtggtaccgactgtcgatacatacgacggaagaggagatagcgttgtatatgggctcagatctaagagcaaaaaatttcgtcgtcccgatatccagtaccctgacgcgacagacgaggacatcaccagccacatggagagtgaagagctgaatggtgcctacaaggcgatccccgtggctcaggatttaaacgccccctctgattgggattctcgagggaaggacagctatgaaacatctcagttagatgaccaatcggcagagactcattcccataagcaaagcagactttacaaacgaaaggccaacgacgagtcaaatgaacactctgatgtcatcgatagtcaggaactcagtaaggtcagtcgcgagtttcacagccacgaattccacagtcacgaggatatgctcgttgttgacccaaaaagtaaagaagaagataaacacttgaagttcagaatttcccacgagctcgactccgccagctcagaggtgaactag

SEQ ID NO: 32522 - DNA, 945 bp, Artificial Sequence
  derived and/or modified sequence
atgcgcatcgccgtgatttgtttctgtctgctgggcattacctgcgccatcccggtcaagcaggctgactcgggttcaagcgaggagaaacagctgtataacaaatatcctgacgctgtggccacatggttaaatcctgatccgtcgcaaaagcagaatctgctcgccccacaaaacgccgtgagcagcgaggagacaaatgattttaagcaggaaactttgccttcaaaaagtaacgagtctcacgatcatatggacgatatggacgatgaggatgacgacgatcacgtggattcgcaggactcgatcgatagcaacgactctgacgatgtagatgataccgacgacagccatcaatccgacgagagccaccactccgacgagagtgatgaactggtgaccgactttcccaccgatctgcccgcgaccgaagttttcacacccgtggtgccaacagtcgacacttatgacggacgcggcgactcagttgtgtacggcctgcggtcaaagagcaaaaaattcagacgaccggacatccagtatcctgatgctaccgacgaggacataacatcacatatggagtctgaggaactcaacggcgcatataaggcaatccctgtcgcccaagacctcaacgctccttccgattgggactctaggggaaaggatagttacgaaaccagtcagttggatgatcagagcgccgagacccacagtcataagcagtctcgcctgtacaagagaaaagctaatgatgagtcaaacgagcacagcgacgtgatcgattcccaggaactgtcaaaagtgagccgggagttccactctcatgagttccacagtcacgaagacatgctcgtggtcgatcccaagagtaaagaagaggacaaacacctgaagtttagaatttcacatgagttagactcggctagtagcgaggtgaactag

SEQ ID NO: 32523 - DNA, 879 bp, Artificial Sequence
  derived and/or modified sequence
atgagaattgctgtgatctgcttctgcctgctgggcatcacctgtgccatccctgtgaagcaggccgacagcggcagcagcgaggagaagcagctgtacaacaagtacccagatgctgtggccacctggctgaacccagaccccagccagaagcagaacctgctggccccccagaatgctgtgtcctctgaggagaccaatgacttcaagcaggagaccctgcccagcaagagcaatgaaagccatgaccacatggatgacatggatgatgaagatgatgatgaccaccagagtgatgagagccaccacagtgatgaaagtgatgagctggtgacagacttccccacagacctgcctgccacagaggtgttcacccctgtggtgcccaccgtggacacctatgatggccgcggggacagcgtggtgtatggcctgcggagcaagagcaagaagttcagaagaccagacatccagtacccagatgccacagatgaggacatcaccagccacatggagagcgaggagctgaatggagcctacaaggccatccctgtggcccaggacctgaatgcccccagcgactgggacagccggggcaaggacagctatgagaccagccagctggatgaccagagcgctgagacccacagccacaagcagagccggctgtacaagaggaaggccaatgatgagagcaatgagcacagtgatgtgattgacagccaggagctgagcaaggtgtcccgggagttccacagccatgagttccacagccatgaggacatgctggtggtggaccccaagagcaaggaggaggacaagcacctgaagttccgcatcagccatgagctggacagcgccagcagcgaggtgaactag

SEQ ID NO: 32524 - DNA, 945 bp, Artificial Sequence
  derived and/or modified sequence
atgagaattgctgtgatctgcttctgcctgctgggcatcacctgtgccatccctgtgaagcaggccgacagcggcagcagcgaggagaagcagctgtacaacaagtacccagatgctgtggccacctggctgaacccagaccccagccagaagcagaacctgctggccccccagaatgctgtgtcctctgaggagaccaatgacttcaagcaggagaccctgcccagcaagagcaatgaaagccatgaccacatggatgacatggatgatgaagatgatgatgaccacgtggacagccaggacagcattgacagcaatgacagtgatgatgtggatgacacagatgacagccaccagagtgatgagagccaccacagtgatgaaagtgatgagctggtgacagacttccccacagacctgcctgccacagaggtgttcacccctgtggtgcccaccgtggacacctatgatggccgcggggacagcgtggtgtatggcctgcggagcaagagcaagaagttcagaagaccagacatccagtacccagatgccacagatgaggacatcaccagccacatggagagcgaggagctgaatggagcctacaaggccatccctgtggcccaggacctgaatgcccccagcgactgggacagccggggcaaggacagctatgagaccagccagctggatgaccagagcgctgagacccacagccacaagcagagccggctgtacaagaggaaggccaatgatgagagcaatgagcacagtgatgtgattgacagccaggagctgagcaaggtgtcccgggagttccacagccatgagttccacagccatgaggacatgctggtggtggaccccaagagcaaggaggaggacaagcacctgaagttccgcatcagccatgagctggacagcgccagcagcgaggtgaactag

SEQ ID NO: 32525 - DNA, 879 bp, Artificial Sequence
  derived and/or modified sequence
atgcggatcgccgtgatctgcttctgcctgctgggcatcacctgcgccatccccgttaaacaggccgattccggcagtagtgaagaaaaacagctgtacaataagtatcccgacgcagtggcaacatggctaaatcccgatccctcacaaaaacagaacctccttgcaccccagaatgcggtttcatcagaagagaccaatgattttaagcaggagaccttaccaagcaaatctaacgaatcacatgaccacatggacgacatggacgatgaggacgatgacgatcatcagtccgacgagtcccatcactcagatgagtccgacgagctggtgaccgatttcccaacagatctcccagccacagaggttttcaccccggtggtccccactgttgatacatacgatggccgaggagactctgtggtctatggccttagatctaagagcaagaagttccgacggcccgacatccagtaccccgatgcaaccgacgaggatatcacctcccacatggagtcagaggaactcaatggcgcatacaaggcgattccagtggctcaggatttgaacgcgccaagtgattgggacagtcgagggaaagacagctacgaaacatcccaacttgatgatcagagcgcggaaacgcatagccataaacaatccagactgtataaaaggaaggccaacgatgagagcaacgaacacagtgacgtgatcgattcccaggagctgtctaaagtgagccgggagtttcactcccacgaatttcattcccacgaggacatgttagttgtcgacccaaagtctaaagaggaggataaacatctgaaattcagaatctcgcatgaattggattcagcttcatccgaggtcaactag

SEQ ID NO: 32526 - DNA, 945 bp, Artificial Sequence
  derived and/or modified sequence
atgcggatcgccgtgatctgcttctgcctgctgggcatcacctgcgccatcccagtcaagcaggccgactccgggagttcagaagagaaacagctgtataataagtaccccgacgctgtggcaacatggctgaatcccgacccttcacaaaaacagaatctgttagcaccccaaaatgctgtatctagcgaagagacaaacgacttcaaacaggagactctgccaagcaagagcaacgagtcacatgaccatatggatgatatggacgacgaggacgacgacgatcacgtggacagccaagactctattgactccaacgatagtgacgatgttgatgataccgatgacagtcaccagagcgatgaatcccatcattctgacgagtccgacgaacttgtgaccgactttcccaccgatcttccggcaaccgaggtctttacaccggtcgtacctacagtggacacctacgacgggagaggagattctgtggtgtacgggctgcgatctaaatctaagaagtttcgccgaccagacattcagtaccctgacgccacagatgaggacatcacctcccacatggagtccgaagaacttaatggtgcctataaagccatacccgtagcccaggaccttaatgcaccaagtgactgggacagccggggcaaggacagttacgaaacgagtcagcttgacgaccagagtgcggaaacccatagtcacaagcagtctcgattgtataagcggaaagcgaatgacgaatctaacgagcacagtgacgtgattgatagccaggagctttccaaggtcagccgggagttccacagccacgaatttcattcccatgaagatatgttggtggttgacccaaagtcaaaggaagaagataagcacctcaagttcagaatctctcatgagcttgatagtgccagcagtgaggttaactag

SEQ ID NO: 32527 - DNA, 879 bp, Artificial Sequence
  derived and/or modified sequence
atgcgcatcgctgtcatctgcttttgcctcttgggaattacctgtgcaattcccgtgaagcaggcagattccggatccagtgaagaaaagcagctttataataagtacccagacgccgttgccacttggttaaatcccgacccatcacagaagcagaacttactggcaccgcagaatgcagtcagctccgaggaaactaatgattttaagcaggagacactgccaagcaagtctaacgaatctcacgaccacatggatgatatggatgacgaagatgatgacgatcaccagtccgatgaatcacaccatagcgatgagtcagatgagcttgtgaccgattttcctaccgatttacccgcaaccgaagtatttacgcccgtggtccctactgtggatacttacgacggcaggggggactcggtagtgtatgggttacggtcaaagagtaaaaagtttagaaggccagatatccaatatccggatgctacggatgaggatatcacgtcccacatggagagcgaggagctgaatggcgcttacaaggcaattccagttgcacaagatctcaacgccccttccgattgggattcgagggggaaggattcatatgagacgagccagctggacgaccaatcagctgagactcactcccacaagcagtctcgcttgtacaagagaaaggctaatgacgagagcaatgagcacagcgatgtgatcgactcacaggagctgtccaaggtcagcagggaatttcactcccacgagtttcactcgcacgaggacatgttggtggtggatccgaagtctaaagaggaagacaagcatctcaagtttaggatttcacacgagctcgattccgcttcttcagaggttaactag

SEQ ID NO: 32528 - DNA, 945 bp, Artificial Sequence
  derived and/or modified sequence
atgcgcatcgcagtaatttgcttttgtctgttaggaattacctgtgctatacccgtaaagcaggctgactccggatcaagcgaagagaagcagctgtataacaaatatccagacgcggtcgctacatggctgaaccccgatccaagccagaaacaaaacctgttggctccccagaatgctgtttcttcagaagagacaaatgactttaagcaggaaacactcccttccaagagcaatgaatcgcacgaccatatggatgatatggacgacgaggatgatgatgaccacgttgactcacaggactctattgactctaacgattcagacgacgtagatgatacagacgactcccaccagtcggacgaaagtcaccactccgacgaatccgatgaactcgtgacagactttccaaccgacttaccagccacagaggtgtttaccccggtggttccaaccgtggacacctatgatggccgaggcgacagcgtggtgtatgggttgcgctctaaaagcaagaagttcagacggcctgacatccagtatcctgatgccaccgacgaggacatcacttctcacatggaaagcgaggaactaaacggagcctacaaagctataccggtggcccaggacctgaatgctccatccgactgggatagtcggggaaaggatagttatgagacttcccagttggatgaccagtcagctgaaacacacagtcataagcagagtcgcctctacaagagaaaggccaatgacgaatcaaatgagcattcagacgtcatcgactcccaagagctgagcaaagtaagccgtgagttccatagccacgagtttcactcacacgaagatatgttggtggtcgacccaaagtctaaagaggaggataagcatctaaaatttcggatctcacacgagttggatagcgccagttccgaggtgaactag

SEQ ID NO: 32529 - DNA, 1558 bp, Artificial Sequence
  derived and/or modified sequence
ctccctgtgttggtggaggatgtctgcagcagcatttaaattctgggagggcttggttgtcagcagcagcaggaggaggcagagcacagcatcgtcgggaccagactcgtctcaggccagttgcagccttctcagccaaacgccgaccaaggaaaactcactaccatgagaattgcagtgatttgcttttgcctcctaggcatcacctgtgccataccagttaaacaggctgattctggaagttctgaggaaaagcagctttacaacaaatacccagatgctgtggccacatggctaaaccctgacccatctcagaagcagaatctcctagccccacagaatgctgtgtcctctgaagaaaccaatgactttaaacaagagacccttccaagtaagtccaacgaaagccatgaccacatggatgatatggatgatgaagatgatgatgaccatcagtctgatgagtctcaccattctgatgaatctgatgaactggtcactgattttcccacggacctgccagcaaccgaagttttcactccagttgtccccacagtagacacatatgatggccgaggtgatagtgtggtttatggactgaggtcaaaatctaagaagtttcgcagacctgacatccagtaccctgatgctacagacgaggacatcacctcacacatggaaagcgaggagttgaatggtgcatacaaggccatccccgttgcccaggacctgaacgcgccttctgattgggacagccgtgggaaggacagttatgaaacgagtcagctggatgaccagagtgctgaaacccacagccacaagcagtccagattatataagcggaaagccaatgatgagagcaatgagcattccgatgtgattgatagtcaggaactttccaaagtcagccgtgaattccacagccatgaatttcacagccatgaagatatgctggttgtagaccccaaaagtaaggaagaagataaacacctgaaatttcgtatttctcatgaattagatagtgcatcttctgaggtcaattaaaaggagaaaaaatacaatttctcactttgcatttagtcaaaagaaaaaatgctttatagcaaaatgaaagagaacatgaaatgcttctttctcagtttattggttgaatgtgtatctatttgagtctggaaataactaatgtgtttgataattagtttagtttgtggcttcatggaaactccctgtaaactaaaagcttcagggttatgtctatgttcattctatagaagaaatgcaaactatcactgtattttaatatttgttattctctcatgaatagaaatttatgtagaagcaaacaaaatacttttacccacttaaaaagagaatataacattttatgtcactataatcttttgttttttaagttagtgtatattttgttgtgattatctttttgtggtgtgaataaatcttttatcttgaatgtaataagaatttggtggtgtcaattgcttatttgttttcccacggttgtccagcaattaataaaacataaccttttttactgcct

SEQ ID NO: 32530 - DNA, 1473 bp, Artificial Sequence
  derived and/or modified sequence
aattctgggagggcttggttgtcagcagcagcaggaggaggcagagcacagcatcgtcgggaccagactcgtctcaggccagttgcagccttctcagccaaacgccgaccaaggaaaactcactaccatgagaattgcagtgatttgcttttgcctcctaggcatcacctgtgccataccagttaaacaggctgattctggaagttctgaggaaaagcagctttacaacaaatacccagatgctgtggccacatggctaaaccctgacccatctcagaagcagaatctcctagccccacagaatgctgtgtcctctgaagaaaccaatgactttaaacaagagacccttccaagtaagtccaacgaaagccatgaccacatggatgatatggatgatgaagatgatgatgaccatgtggacagccaggactccattgactcgaacgactctgatgatgtagatgacactgatgattctcaccagtctgatgagtctcaccattctgatgaatctgatgaactggtcactgattttcccacggacctgccagcaaccgaagttttcactccagttgtccccacagtagacacatatgatggccgaggtgatagtgtggtttatggactgaggtcaaaatctaagaagtttcgcagacctgacatccagtaccctgatgctacagacgaggacatcacctcacacatggaaagcgaggagttgaatggtgcatacaaggccatccccgttgcccaggacctgaacgcgccttctgattgggacagccgtgggaaggacagttatgaaacgagtcagctggatgaccagagtgctgaaacccacagccacaagcagtccagattatataagcggaaagccaatgatgagagcaatgagcattccgatgtgattgatagtcaggaactttccaaagtcagccgtgaattccacagccatgaatttcacagccatgaagatatgctggttgtagaccccaaaagtaaggaagaagataaacacctgaaatttcgtatttctcatgaattagatagtgcatcttctgaggtcaattaaaaggagaaaaaatacaatttctcactttgcatttagtcaaaagaaaaaatgctttatagcaaaatgaaagagaacatgaaatgcttctttctcagtttattggttgaatgtgtatctatttgagtctggaaataactaatgtgtttgataattagtttagtttgtggcttcatggaaactccctgtaaactaaaagcttcagggttatgtctatgttcattctatagaagaaatgcaaactatcactgtattttaatatttgttattctctcatgaatagaaatttatgtagaagcaaacaaaatacttttacccacttaaaaagagaatataacattttatgtcactataatcttttgttttttaagttagtgtatattttgttgtgattatctttttgt

SEQ ID NO: 32531 - protein, 297 aa, Artificial Sequence
  derived and/or modified sequence
MRLAVLFSGALLGLLAESTGTTSHRTTKSHKTTTHRTTTTGTTSHGPTTATHNPTTTSHGNATVHPTSNSTATSPGFTSSAHPEPPPPSPSPSPTSKETIGDYTWTNGSQPCVHLQAQIQIRVMYTTQGGGEAWGISVLNPNKTKVQGSCEGAHPHLLLSFPYGHLSFGFMQDLQQKVVYLSYMAVEYNVSFPHAAQWTFSAQNASLRDLQAPLGQSFSCSNSSIILSPAVHLDLLSLRLQAAQLPHTGVFGQSFSCPSDRSILLPLIIGLILLGLLALVLIAFCIIRRRPSAYQAL

SEQ ID NO: 32532 - DNA, 894 bp, Artificial Sequence
  derived and/or modified sequence
atgcggctggcggtgctgttttcgggggcgttgttgggcctgctagctgaaagcacagggacaacctcccacaggaccaccaaatcgcataagaccaccactcacaggacaacaacaactgggactaccagccacggacccacaacagcaacacataatcctacaaccacttcccatggaaacgccactgttcaccctacttccaacagcactgccacatcccctggatttacttcctcagcccaccccgagcctccccctcctagtccaagcccaagtccgacgtctaaggaaaccatcggcgactatacctggacaaatggttctcagccctgcgtgcacctgcaagcacagattcaaatacgcgtcatgtatactactcagggtgggggcgaagcatggggcatttccgtgcttaatcctaataaaaccaaggtgcagggcagttgtgaaggcgcccacccacatcttctcctgtccttcccttatgggcatctgtcattcgggtttatgcaggatcttcaacaaaaagtggtatatttgtcctacatggcggtagaatacaacgtctcattcccgcacgctgctcagtggaccttctctgcccagaatgcatctcttcgcgaccttcaagcaccactgggccagagtttctcttgttcgaattcctctattatcctcagtccagcggtgcatcttgatctgctaagcctgcgccttcaggccgcccagctgcctcataccggagtcttcggccaatccttctcgtgccctagtgaccgctctatcctgctgccactgatcattggactgatccttctgggactgctcgctctggtgttgatagccttctgtatcatcaggaggcgcccatcggcctaccaggcactctag

SEQ ID NO: 32533 - DNA, 894 bp, Artificial Sequence
  derived and/or modified sequence
atgaggctggccgtgctcttcagcggggccctgctgggcctgctggccgagagcacaggcaccaccagccacaggaccaccaagagccacaagaccaccacccacaggaccaccaccaccggcaccaccagccacggccccaccacagccacccacaaccccaccaccaccagccatggaaatgccaccgtgcaccccaccagcaacagcacagccaccagccctggcttcaccagcagcgcccaccctgagcccccaccacccagccccagccccagccccaccagcaaggagaccatcggggactacacctggaccaacggcagccagccctgtgtgcacctgcaggcccagatccagatccgggtgatgtacaccacccagggcggcggggaggcctggggcatctctgtgctgaaccccaacaagaccaaggtgcagggcagctgtgagggcgcccacccccacctgctgctgtccttcccctacggccacctgagctttggcttcatgcaggacctgcagcagaaggtggtgtacctgagctacatggctgtggagtacaacgtgtccttcccccatgctgcccagtggaccttcagcgcccagaatgccagcctgcgggacctgcaggcccccctgggccagagcttcagctgcagcaacagcagcatcatcctgagccctgctgtgcacctggacctgctgagcctgcggctgcaggccgcccagctgccccacactggagtgtttggccagagcttcagctgccccagcgacaggagcatcctgctgcccctcatcatcggcctcatcctgctgggcctgctggccctggtgctgattgccttctgcatcatcagaagaagacccagcgcctaccaggccctgtag

SEQ ID NO: 32534 - DNA, 894 bp, Artificial Sequence
  derived and/or modified sequence
atgcggctggccgtgctgttcagcggcgccctgctgggcctgctggcagagtcaactggaaccacttctcaccggaccactaagtcacacaaaactacaacccatcgcaccacaactacagggacaacatcccatggcccaaccacagccactcacaatcccacaacaacttcccatggaaacgctaccgtgcacccgacgagtaacagtaccgcgacatcccccgggttcacatcttcagcccatcccgagccccctcccccatctccttctcctagccctacttcaaaggagactatcggtgactacacatggacgaatggatcccagccctgcgtgcatctgcaggcccagatacagatacgtgtgatgtacactactcagggcggcggtgaggcctggggcatctcagtcctcaaccccaacaagaccaaggtccagggatcatgtgaaggtgcccatccgcatctccttttgtccttcccctatgggcacctctctttcggatttatgcaggatctacagcagaaggttgtctaccttagttacatggccgtggagtataatgtcagctttcctcacgccgcacaatggaccttcagtgcccagaacgcctctctcagagacttgcaggcaccactgggccagtccttctcatgttcaaactcatctatcatcctgtccccagcagtgcaccttgacctgttgagcttgcgactgcaggcggcgcagctcccgcatactggagtgttcgggcaatcctttagttgccctagcgaccgtagcatactactacctctcattatcggtctgatcctattagggctgttggccttagtcctaatcgcattctgcataattaggcgtcgcccctctgcctaccaggctctatag

SEQ ID NO: 32535 - DNA, 894 bp, Artificial Sequence
  derived and/or modified sequence
atgagactcgccgtgcttttttctggcgctctccttgggcttctagccgagtctaccggcacgactagccatcgtaccactaagtctcataaaaccaccactcacaggactactacaaccggcacgacaagccacggacctacgaccgcgacccacaatccgaccacaacatcccacggcaatgccactgtgcaccccacaagcaattctacagcaacctcaccgggtttcaccagctcagcacaccctgagccccctcctccctcccccagcccctcccctaccagcaaggagacaattggcgattatacatggacgaacggcagccagccttgtgtccatttgcaagcacagattcagattagagtcatgtacactacccaaggtggtggcgaagcatggggcatcagcgtgctcaatccaaacaagacaaaggtacaaggtagttgtgagggggctcacccacatctcttactctctttcccttacggacacctcagttttgggtttatgcaagatctgcagcagaaagtggtctatctgagctacatggcagtcgaatataacgtgtcatttccccatgctgcccagtggaccttcagtgcccagaatgcatcgctcagggacctgcaggcgcctttaggacagtcgttctcttgcagcaactcctccattattttatcccctgccgtccatctagatctcctgagtttacggttacaggctgcccagctgccacatacaggcgtgttcggtcagtcctttagttgccccagcgaccgatctatccttctccccctgataattggcctcatccttctggggctgctcgccctggtgctgattgcgttttgtattatcagaagacgtccctccgcttaccaagcactctag

SEQ ID NO: 32536 - DNA, 1532 bp, Artificial Sequence
  derived and/or modified sequence
cagacagcctagctggactttgggtgaggcggttcagccatgaggctggctgtgcttttctcgggggccctgctggggctactggcagagagcactggaacaaccagccacaggactaccaagagccacaaaaccaccactcacaggacaaccaccacaggcaccaccagccacggacccacgactgccactcacaaccccaccaccaccagccatggaaatgccacggttcatccaacaagcaacagcactgccaccagcccaggattcaccagttctgcccacccagaaccacctccaccctctccgagtcctagcccaacctccaaggagaccattggagactacacgtggaccaatggttcccagccctgtgtccacctccaagcccagattcagattcgagtcatgtacacaacccagggtggaggagaggcctggggcatctctgtactgaaccccaacaaaaccaaggtccagggaagctgtgagggtgcccatccccacctgcttctctcattcccctatggacacctcagctttggattcatgcaggacctccagcagaaggttgtctacctgagctacatggcggtggagtacaatgtgtccttcccccacgcagcacagtggacattctcggctcagaatgcatcccttcgagatctccaagcacccctggggcagagcttcagttgcagcaactcgagcatcattctttcaccagctgtccacctcgacctgctctccctgaggctccaggctgctcagctgccccacacaggggtctttgggcaaagtttctcctgccccagtgaccggtccatcttgctgcctctcatcatcggcctgatccttcttggcctcctcgccctggtgcttattgctttctgcatcatccggagacgcccatccgcctaccaggccctctgagcatttgcttcaaaccccagggcactgagggggttggggtgtggtgggggggtacccttatttcctcgacacgcaactggctcaaagacaatgttattttccttccctttcttgaagaacaaaaagaaagccgggcatgacggctcatgcctgtaatcccagcactttgggaggctgaggcaggtggatcactggaggtcaggagtttgagaccagcctggccaacatggtgaaaccctgtctctactaaaaatacaattagccaggtgtggcggcgtaatcccagctggcctgtaatcccagctacttgggaggctgaggcagaactgcttgaacccaggaggtggaggttgcagtgagccgtcatcgcgccactaagccaagatcgcgccactgcactccagcctgggcgacagagccagactgtctcaaataaataaatatgagataatgcagtcgggagaagggagggagagaattttattaaatgtgacgaactgccccccccccccccccagcaggagagcagcaaaatttatgcaaatctttgacggggttttccttgtcctgccaggattaaaagccatgagtttcttgtc

SEQ ID NO: 32537 - DNA, 894 bp, Artificial Sequence
  derived and/or modified sequence
atgagactggccgtgctgttcagcggcgccctgctgggcctgctggccgagagcaccggcaccaccagccacagaaccaccaagagccacaagaccaccacccacagaaccaccaccaccggcaccaccagccacggccccaccaccgccacccacaaccccaccaccaccagccacggcaacgccaccgtgcaccccaccagcaacagcaccgccaccagccccggcttcaccagcagcgcccaccccgagccccccccccccagccccagccccagccccaccagcaaggagaccatcggcgactacacctggaccaacggcagccagccctgcgtgcacctgcaggcccagatccagatcagagtgatgtacaccacccagggcggcggcgaggcctggggcatcagcgtgctgaaccccaacaagaccaaggtgcagggcagctgcgagggcgcccacccccacctgctgctgagcttcccctacggccacctgagcttcggcttcatgcaggacctgcagcagaaggtggtgtacctgagctacatggccgtggagtacaacgtgagcttcccccacgccgcccagtggaccttcagcgcccagaacgccagcctgagagacctgcaggcccccctgggccagagcttcagctgcagcaacagcagcatcatcctgagccccgccgtgcacctggacctgctgagcctgagactgcaggccgcccagctgccccacaccggcgtgttcggccagagcttcagctgccccagcgacagaagcatcctgctgcccctgatcatcggcctgatcctgctgggcctgctggccctggtgctgatcgccttctgcatcatcagaagaagacccagcgcctaccaggccctgtag

SEQ ID NO: 32538 - protein, 287 aa, Artificial Sequence
  derived and/or modified sequence
MRIAVICFCLLGITCAIPVKQADSGSSEEKQNAVSSEETNDFKQETLPSKSNESHDHMDDMDDEDDDDHVDSQDSIDSNDSDDVDDTDDSHQSDESHHSDESDELVTDFPTDLPATEVFTPVVPTVDTYDGRGDSVVYGLRSKSKKFRRPDIQYPDATDEDITSHMESEELNGAYKAIPVAQDLNAPSDWDSRGKDSYETSQLDDQSAETHSHKQSRLYKRKANDESNEHSDVIDSQELSKVSREFHSHEFHSHEDMLVVDPKSKEEDKHLKFRISHELDSASSEVN

SEQ ID NO: 32539 - DNA, 864 bp, Artificial Sequence
  derived and/or modified sequence
atgagaatcgccgtgatctgcttctgcctgctgggcatcacctgcgccatccccgtgaagcaggccgacagcggcagcagcgaggagaagcagaacgccgtgagcagcgaggagaccaacgacttcaagcaggagaccctgcccagcaagagcaacgagagccacgaccacatggacgacatggacgacgaggacgacgacgaccacgtggacagccaggacagcatcgacagcaacgacagcgacgacgtggacgacaccgacgacagccaccagagcgacgagagccaccacagcgacgagagcgacgagctggtgaccgacttccccaccgacctgcccgccaccgaggtgttcacccccgtggtgcccaccgtggacacctacgacggcagaggcgacagcgtggtgtacggcctgagaagcaagagcaagaagttcagaagacccgacatccagtaccccgacgccaccgacgaggacatcaccagccacatggagagcgaggagctgaacggcgcctacaaggccatccccgtggcccaggacctgaacgcccccagcgactgggacagcagaggcaaggacagctacgagaccagccagctggacgaccagagcgccgagacccacagccacaagcagagcagactgtacaagagaaaggccaacgacgagagcaacgagcacagcgacgtgatcgacagccaggagctgagcaaggtgagcagagagttccacagccacgagttccacagccacgaggacatgctggtggtggaccccaagagcaaggaggaggacaagcacctgaagttcagaatcagccacgagctggacagcgccagcagcgaggtgaactag

SEQ ID NO: 32540 - DNA, 864 bp, Artificial Sequence
  derived and/or modified sequence
atgcgcatcgctgtgatttgcttctgccttctgggcatcacctgtgccattccggtcaaacaggctgacagcgggagtagtgaggagaaacaaaatgccgtttctagcgaagaaacaaacgatttcaagcaggagacactgcctagcaagtcaaacgagagccacgatcatatggatgacatggatgacgaggatgacgacgaccatgtggatagtcaagattcaatcgactcaaacgactctgatgacgtggatgatactgatgattcacaccaaagtgatgagagtcaccattccgatgaatccgatgaattagttactgattttccaactgatttgccggcaacagaggtttttacccccgtagttcctacggtcgatacatacgatggaaggggcgattccgtggtgtacgggttgaggtccaagagcaaaaagtttagacggcctgacattcagtaccccgatgcaaccgatgaggacatcacctcacacatggaatccgaggaactgaatggcgcctataaagcaatccccgtcgcacaggatctgaatgcaccatcagattgggacagcagggggaaggatagctatgagacttcccagcttgacgatcagagcgccgagactcatagtcataaacagtctcgtctgtacaagagaaaggctaacgatgaatctaatgagcattccgacgtaatcgacagtcaggaactcagcaaagtatctcgtgaatttcatagtcatgaatttcatagccacgaggatatgttagttgtggaccctaaaagtaaggaggaagacaagcacttaaagttccggatatctcacgagcttgactcagcctcctccgaggtgaactag

SEQ ID NO: 32541 - DNA, 864 bp, Artificial Sequence
  derived and/or modified sequence
atgagaattgctgtgatctgcttctgcctgctgggcatcacctgtgccatccctgtgaagcaggccgacagcggcagcagcgaggagaagcagaatgctgtgagcagcgaggagaccaatgacttcaagcaggagaccctgcccagcaagagcaatgaaagccatgaccacatggatgacatggatgatgaagatgatgatgaccacgtggacagccaggacagcattgacagcaatgacagtgatgatgtggatgacacagatgacagccaccagagtgatgagagccaccacagtgatgaaagtgatgagctggtgacagacttccccacagacctgcctgccacagaggtgttcacccctgtggtgcccaccgtggacacctatgatggccgcggggacagcgtggtgtatggcctgcggagcaagagcaagaagttccggcggccagacatccagtacccagatgccacagatgaggacatcaccagccacatggagagcgaggagctgaatggagcctacaaggccatccctgtggcccaggacctgaatgcccccagcgactgggacagccggggcaaggacagctatgagaccagccagctggatgaccagagcgctgagacccacagccacaagcagagccggctgtacaagaggaaggccaatgatgagagcaatgagcacagtgatgtgattgacagccaggagctgagcaaggtgtcccgggagttccacagccatgagttccacagccatgaggacatgctggtggtggaccccaagagcaaggaggaggacaagcacctgaagttccgcatcagccatgagctggacagcgccagcagcgaggtgaactag

SEQ ID NO: 32542 - DNA, 864 bp, Artificial Sequence
  derived and/or modified sequence
atgcggatcgccgtgatctgcttctgcctgctgggcatcacctgcgcaataccagtcaaacaggcagactctggcagcagcgaagaaaagcagaatgcggtgtcatccgaagaaacaaacgatttcaaacaggaaacacttccttctaaatcgaacgagagccacgaccacatggacgacatggatgatgaggatgacgacgatcacgtggatagccaggatagcattgactcaaatgatagcgatgatgtcgatgatactgatgactcgcaccagtcagacgagagccaccactctgacgaaagtgacgagttggttactgatttcccgactgatttaccagcaactgaagtcttcacccctgttgtgcccaccgtggatacctatgacgggcgcggtgactctgtcgtgtacggcctaagatccaaatccaaaaagttcagaagaccggacattcagtacccggacgccacagatgaggatataacgtctcacatggagagcgaagaactgaacggcgcctacaaagccattcccgtggctcaggatctaaacgctcctagcgattgggactctaggggcaaggactcttacgagacgtcacaattggacgatcagtccgccgagactcattcacacaagcagagcaggctgtataagagaaaagccaatgatgagagcaatgagcattcagacgttatcgatagccaagaactctctaaagtaagtcgcgagtttcattcccatgaattccactcacatgaggatatgctggtcgtggatcctaaaagcaaggaggaagacaagcatttgaagttccggatcagccacgaactggacagcgcgagtagcgaagtcaactag

SEQ ID NO: 32543 - DNA, 864 bp, Artificial Sequence
  derived and/or modified sequence
atgaggatcgcagtgatctgtttctgccttctgggtatcacctgcgccataccagttaagcaggcagactccgggtccagtgaggagaaacaaaatgccgtgagttcagaggaaactaacgactttaaacaggagactctgccaagtaaatccaacgagagtcatgatcacatggacgatatggatgatgaagacgacgacgatcacgtcgactcacaagattctatcgactcgaacgattcagatgacgtggacgacacagacgactcccatcagagcgatgagagccaccactccgatgagtctgacgagctggttacagactttccaacagacttgcccgctaccgaagtgtttactccagttgtgcccacagtggacacttacgacgggagaggcgacagtgtggtatatgggttgcgatcaaagtcaaaaaagttcaggagaccagacatccagtacccagatgccaccgatgaggacattacttcacatatggaatctgaggagttaaatggcgcttacaaagcaattcccgtggctcaagatttaaacgctccctcagactgggattcccgaggtaaggatagctatgagaccagccaactcgatgaccagagcgcagaaactcactctcataaacagagcaggctgtataagcggaaggcaaacgatgaatccaacgagcactccgacgtgattgacagtcaagagctgagtaaggtctcaagagagtttcacagtcacgaattccacagtcacgaagatatgctggtcgtagacccaaaaagcaaggaggaggataagcatctgaagttcaggatctcacacgaactggattcagcatcctctgaggtgaattag

SEQ ID NO: 32544 - DNA, 1196 bp, Artificial Sequence
  derived and/or modified sequence
agcagcaggaggaggcagagcacagcatcgtcgggaccagactcgtctcaggccagttgcagccttctcagccaaacgccgaccaaggaaaactcactaccatgagaattgcagtgatttgcttttgcctcctaggcatcacctgtgccataccagttaaacaggctgattctggaagttctgaggaaaagcagaatgctgtgtcctctgaagaaaccaatgactttaaacaagagacccttccaagtaagtccaacgaaagccatgaccacatggatgatatggatgatgaagatgatgatgaccatgtggacagccaggactccattgactcgaacgactctgatgatgtagatgacactgatgattctcaccagtctgatgagtctcaccattctgatgaatctgatgaactggtcactgattttcccacggacctgccagcaaccgaagttttcactccagttgtccccacagtagacacatatgatggccgaggtgatagtgtggtttatggactgaggtcaaaatctaagaagtttcgcagacctgacatccagtaccctgatgctacagacgaggacatcacctcacacatggaaagcgaggagttgaatggtgcatacaaggccatccccgttgcccaggacctgaacgcgccttctgattgggacagccgtgggaaggacagttatgaaacgagtcagctggatgaccagagtgctgaaacccacagccacaagcagtccagattatataagcggaaagccaatgatgagagcaatgagcattccgatgtgattgatagtcaggaactttccaaagtcagccgtgaattccacagccatgaatttcacagccatgaagatatgctggttgtagaccccaaaagtaaggaagaagataaacacctgaaatttcgtatttctcatgaattagatagtgcatcttctgaggtcaattaaaaggagaaaaaatacaatttctcactttgcatttagtcaaaagaaaaaatgctttatagcaaaatgaaagagaacatgaaatgcttctttctcagtttattggttgaatgtgtatctatttgagtctggaaataactaatgtgtttgataattagtttagtttgtggcttcatggaaactccctgtaaactaaaagcttcagggttatgtctatgttcattctatagaaga

SEQ ID NO: 32545 - protein, 327 aa, Artificial Sequence
  derived and/or modified sequence
MAWWKSWIEQEGVTVKSSSHFNPDPDAETLYKAMKGIGTNEQAIIDVLTKRSNTQRQQIAKSFKAQFGKDLTETLKSELSGKFERLIVALMYPPYRYEAKELHDAMKGLGTKEGVIIEILASRTKNQLREIMKAYEEDYGSSLEEDIQADTSGYLERILVCLLQGSRDDVSSFVDPGLALQDAQDLYAAGEKIRGTDEMKFITILCTRSATHLLRVFEEYEKIANKSIEDSIKSETHGSLEEAMLTVVKCTQNLHSYFAERLYYAMKGAGTRDGTLIRNIVSRSEIDLNLIKCHFKKMYGKTLSSMIMEDTSGDYKNALLSLVGSDP

SEQ ID NO: 32546 - DNA, 984 bp, Artificial Sequence
  derived and/or modified sequence
atggcctggtggaagagctggatcgagcaggagggcgtgaccgtgaagagcagcagccacttcaaccccgaccccgacgccgagaccctgtaccaggccatgaagggcatcggcaccaacgagcaggccatcatcgacgtgctgaccaagagaagcaacacccagagacagcagatcgccaagagcttcaaggcccagttcggcaaggacctgaccgagaccctgaagagcgagctgagcggcaagttcgagagactgatcgtggccctgatgtaccccccctacagatacgaggccaaggagctgcacgacgccatgaagggcctgggcaccaaggagggcgtgatcatcgagatcctggccagcagaaccaagaaccagctgagagagatcatgaaggcctacgaggaggactacggcagcagcctggaggaggacatccaggccgacaccagcggctacctggagagaatcctggtgtgcctgctgcagggcagcagagacgacgtgagcagcttcgtggaccccggcctggccctgcaggacgcccaggacctgtacgccgccggcgagaagatcagaggcaccgacgagatgaagttcatcaccatcctgtgcaccagaagcgccacccacctgctgagagtgttcgaggagtacgagaagatcgccaacaagagcatcgaggacagcatcaagagcgagacccacggcagcctggaggaggccatgctgaccgtggtgaagtgcacccagaacctgcacagctacttcgccgagagactgtactacgccatgaagggcgccggcaccagagacggcaccctgatcagaaacatcgtgagcagaagcgagatcgacctgaacctgatcaagtgccacttcaagaagatgtacggcaagaccctgagcagcatgatcatggaggacaccagcggcgactacaagaacgccctgctgagcctggtgggcagcgacccctag

SEQ ID NO: 32547 - DNA, 984 bp, Artificial Sequence
  derived and/or modified sequence
atggcctggtggaagtcttggatcgaacaagagggcgtgacggtcaaaagctctagccattttaatccggatccagatgctgagacactgtatcaagccatgaaggggatcgggacaaacgagcaagcaattatagatgtgttgactaagcgttccaatactcagcggcaacaaattgcgaaatcctttaaggcacagttcggcaaagatctcacagagacacttaagagtgagctcagtgggaaattcgaaagactcattgtggccttaatgtaccccccctatcggtatgaagctaaggagctccacgacgcgatgaaaggactcggaacaaaagagggggtcataattgaaattcttgctagtcggactaaaaaccagttgcgtgagatcatgaaagcatacgaagaggattatggctcaagccttgaagaagatatacaggctgatacgtccggttacctggagcgcattcttgtgtgtctccttcagggaagccgagatgacgtttctagctttgtggatcccggtcttgcgctgcaagacgctcaggatctttatgccgctggagagaagattcgcggcactgatgaaatgaagtttataacaatactgtgcacccgttctgccacccacttgttgcgggtgtttgaggaatacgagaaaatagccaataagtctatcgaagattccattaaatctgaaacacatggcagtctggaggaggcaatgttgaccgtggtgaaatgcacgcagaacctgcactcctatttcgcagagcggctgtattatgcgatgaaaggggcaggtacccgggacggcactctgatccggaatatagtgtctcgttcagagatagacttgaatctaatcaagtgccatttcaagaaaatgtatggcaaaaccctgtcatcaatgattatggaagacacctcgggtgattataagaacgcacttctgtcgctggtcggttctgacccttag

SEQ ID NO: 32548 - DNA, 984 bp, Artificial Sequence
  derived and/or modified sequence
atggcctggtggaagtcctggattgagcaggagggcgtgacagtgaagagcagcagccacttcaacccagaccctgatgctgagaccctgtaccaggccatgaagggcatcggcaccaatgagcaggccatcattgatgtgctgaccaagaggagcaacacccagaggcagcagatcgccaagagcttcaaggcccagtttgggaaggacctgacagagaccctgaagtctgagctgagcggcaagtttgagcggctgattgtggccctgatgtacccaccctaccgctatgaggccaaggagctgcatgatgccatgaagggcctgggcaccaaggagggcgtcatcatcgagatcctggccagcaggaccaagaaccagctgcgggagatcatgaaggcctatgaagaagattatggcagcagcctggaggaggacatccaggccgacaccagcggctacctggagcgcatcctggtgtgcctgctgcagggcagcagagatgatgtgagcagctttgtggaccccggcctggccctgcaggatgcccaggacctgtatgctgctggggagaagatccggggcacagatgagatgaagttcatcaccatcctgtgcaccaggtctgccacccacctgctgcgggtgtttgaggagtatgagaagatcgccaacaagagcattgaagattccatcaagtctgagacccacggcagcctggaggaggccatgctgactgtggtgaagtgcacccagaacctgcacagctactttgctgagcggctgtactatgccatgaagggagctggcaccagagatggcaccctcatccggaacatcgtgagccgctcagaaattgacctgaacctgatcaagtgccacttcaagaagatgtatggcaagaccctgagctccatgatcatggaggacaccagcggggactacaagaatgccctgctgagcctggtgggcagtgacccctag

SEQ ID NO: 32549 - DNA, 984 bp, Artificial Sequence
  derived and/or modified sequence
atggcctggtggaagagctggatcgagcaggagggcgtgaccgtgaagagtagcagccacttcaatcccgatccggacgccgaaactctctaccaggctatgaagggtatcgggaccaatgagcaggctatcatcgatgttctgactaagcgctccaacacccagcgccaacagatcgctaaatcattcaaggcacagtttggaaaagatctgacggaaacgctgaagagtgaattatccgggaagttcgagcgcctgatcgtggcgttgatgtaccctccctatcggtacgaagccaaggagttgcacgacgcaatgaagggcctcggaacaaaagaaggagttataatagagatcctggcctcgcgtacaaaaaaccagttaagagaaattatgaaagcctatgaggaagattatggtagcagtcttgaagaggacatccaggcggatactagtggctacttggaacggatcctcgtgtgccttcttcagggctcccgcgatgacgtttcctcattcgtggatccaggtctggcgctccaggacgcccaggacttgtacgccgccggggagaagatccggggtaccgatgagatgaagtttattaccatcctctgtaccagaagcgccactcacctgctgcgcgtattcgaagaatacgaaaagattgctaataagagtattgaggattccattaaaagcgaaacgcacgggagtcttgaggaggccatgctcacagtggtgaaatgcactcagaatctccattcatactttgctgagaggctctattacgccatgaaaggtgctgggactagggacgggactctgatcagaaatatcgtttcccgctcagaaatcgacctgaaccttatcaagtgccattttaaaaaaatgtacgggaagactctaagcagtatgataatggaggatacaagcggggactataaaaatgccctgctgtcactggtcgggagtgacccttag

SEQ ID NO: 32550 - DNA, 984 bp, Artificial Sequence
  derived and/or modified sequence
atggcttggtggaagtcctggatcgaacaggagggagtgactgtgaagagtagttcacacttcaaccctgacccggacgcagaaacattgtatcaggcaatgaagggaataggaaccaatgagcaggccatcattgatgtgctcactaaaagatctaacacccagaggcagcagatcgctaagtcttttaaagcacagtttggcaaagatttgactgaaaccctgaagtctgagctttccggcaaattcgagaggcttatcgtggcattaatgtatccaccgtaccgatacgaggcaaaggagctacatgatgccatgaaggggcttggcaccaaggagggcgtcattatcgaaatcctggcctctaggacaaaaaatcaattaagagagatcatgaaagcctatgaagaggattacggaagttctctggaagaagacattcaagctgataccagtggctatctagagcgtattctcgtgtgtctgctgcagggttcccgtgatgacgtgtcatcattcgtagaccccggactcgctctacaagacgcccaggatctctatgctgcaggcgaaaagatcagaggcacagacgaaatgaaattcatcacaattctgtgcacccggtcagcgacccatctcctgagggtgtttgaggaatacgaaaagattgcaaataagagcatcgaggattccattaaatctgagacgcacgggtctctggaagaggcgatgctaactgtggttaaatgcactcagaacctgcactcctattttgcagagagactgtactatgccatgaaaggggcaggaactcgcgacggaacattgatacgcaatatcgtgtcccgtagtgagatagacctgaacttaattaaatgtcattttaaaaagatgtatggcaagacattatcgtccatgatcatggaagatacttccggtgattataaaaatgccctgctttcactggtcggcagtgacccttag

SEQ ID NO: 32551 - DNA, 984 bp, Artificial Sequence
  derived and/or modified sequence
atggcatggtggaagagttggatcgagcaggagggagtgaccgttaagtcttcttctcacttcaacccagacccggatgccgagacactgtataaagctatgaaggggattgggaccaacgaacaagccatcattgacgtcctgacgaaacgatccaacacccagagacaacagatcgctaagtccttcaaggcccaattcggcaaggacctcacagagactttgaagagcgaactgtctgggaagttcgaacgcttgatagtagcactgatgtatccaccgtatcgttatgaagctaaggaactccacgatgccatgaagggactcgggactaaagagggggtgatcatagagatcctcgcctcacgaactaagaaccaactgcgcgaaattatgaaggcatatgaggaagactacgggagcagcctcgaggaggatattcaggccgacacaagcggttatcttgagcgtattttagtgtgccttctccaggggtcccgggatgatgtcagcagcttcgtcgaccccggtctcgctcttcaggacgctcaagatctttatgctgcgggcgagaaaatccgcggtacagatgagatgaagtttatcactattctctgcaccagaagtgccacacacctcctgcgcgtcttcgaggagtacgagaagatagcgaacaaatccattgaagactcaatcaagagcgagacccacggcagcctggaggaggctatgttgaccgtagtgaagtgcacccaaaacctgcactcatatttcgcggaacgtttgtactacgctatgaagggagccggaacacgggatggcactctgataaggaacatcgtgagtagatccgaaatagacttgaacctcattaaatgtcatttcaagaagatgtatggtaagaccctgagttccatgattatggaagatacaagcggcgactacaagaatgccctgctcagtttggtaggatcagatccctag

SEQ ID NO: 32552 - DNA, 984 bp, Artificial Sequence
  derived and/or modified sequence
atggcctggtggaagtcctggattgagcaggagggcgtgacagtgaagagcagcagccacttcaacccagaccctgatgctgagaccctgtacaaggccatgaagggcatcggcaccaatgagcaggccatcattgatgtgctgaccaagaggagcaacacccagaggcagcagatcgccaagagcttcaaggcccagtttgggaaggacctgacagagaccctgaagtctgagctgagcggcaagtttgagcggctgattgtggccctgatgtacccaccctaccgctatgaggccaaggagctgcatgatgccatgaagggcctgggcaccaaggagggcgtcatcatcgagatcctggccagcaggaccaagaaccagctgcgggagatcatgaaggcctatgaagaagattatggcagcagcctggaggaggacatccaggccgacaccagcggctacctggagcgcatcctggtgtgcctgctgcagggcagcagagatgatgtgagcagctttgtggaccccggcctggccctgcaggatgcccaggacctgtatgctgctggggagaagatccggggcacagatgagatgaagttcatcaccatcctgtgcaccaggtctgccacccacctgctgcgggtgtttgaggagtatgagaagatcgccaacaagagcattgaagattccatcaagtctgagacccacggcagcctggaggaggccatgctgactgtggtgaagtgcacccagaacctgcacagctactttgctgagcggctgtactatgccatgaagggagctggcaccagagatggcaccctcatccggaacatcgtgagccgctcagaaattgacctgaacctgatcaagtgccacttcaagaagatgtatggcaagaccctgagctccatgatcatggaggacaccagcggggactacaagaatgccctgctgagcctggtgggcagtgacccctag

SEQ ID NO: 32553 - DNA, 984 bp, Artificial Sequence
  derived and/or modified sequence
atggcctggtggaagagctggatcgagcaggagggcgtgaccgtgaagagctccagccatttcaatccagacccagatgccgagacactctacaaggccatgaaaggtatcgggacaaatgagcaggcgatcattgacgtactgacaaagcggtcaaatactcaaagacagcaaatcgcaaagtcctttaaggcccaatttggcaaagatctgactgagacactcaaatccgagctcagcgggaagttcgagcgtctcatcgtcgcactcatgtaccccccctaccgctatgaggcaaaggagctccatgacgccatgaagggactgggcaccaaggaaggggtgatcatcgaaatactggctagccggaccaaaaaccagctaagagaaatcatgaaggcgtatgaggaagactatggcagttccctggaagaagatatacaggccgacacctcagggtacctggaacggattctggtctgtctactgcaaggcagtcgagacgacgtgtcatcgtttgtagatcccggcctcgccctccaggacgctcaggacctctatgcagcgggtgagaagattcgtggaaccgatgagatgaagtttataactatcctgtgtaccaggagtgcaacacatctgctacgcgtcttcgaagaatacgaaaaaatagcaaataaatccatagaagatagtatcaaaagcgagacgcacggcagcctcgaggaagctatgctgaccgtcgtgaagtgcactcaaaacctgcatagctattttgcggagagactctactatgccatgaaaggggcgggtacaagagacggaaccctcattcggaacatcgtgtcaaggtctgagatcgacctgaacctcattaaatgtcactttaagaagatgtatgggaaaacattgtcctctatgataatggaagacacgtcaggggattacaagaacgcattactctcccttgttggttccgacccctag

SEQ ID NO: 32554 - DNA, 984 bp, Artificial Sequence
  derived and/or modified sequence
atggcatggtggaagtcatggattgaacaggaaggggtgacagtgaagtcctctagccacttcaaccctgacccagacgcagagaccctttataaggctatgaagggaattgggacaaatgaacaggccataatcgacgtgttaactaaacgctctaacacccagaggcagcaaatcgcaaagtcctttaaggcccaattcgggaaggacctgaccgagactctcaagagtgaactgtccggcaagtttgagcgcctgattgtggccctgatgtatccaccctatcggtacgaggcgaaagagctccatgatgccatgaaagggctgggaactaaagagggggtgattatcgaaattctggctagccgaaccaagaatcaactccgcgagataatgaaagcctatgaagaagactatggctcctcgcttgaagaggacatacaggcggacacttctggctatttggagaggattttggtgtgtctgttacagggtagccgagatgacgtgagtagctttgttgacccgggactagcactccaggacgctcaagacctgtatgcagccggagagaagatccgtggcacggacgaaatgaaattcatcacaattctgtgtactcggagtgccacccatctgctgagggtctttgaggagtacgaaaagatcgcaaacaagtcaattgaggacagcataaagtctgagacccacggctccctggaagaggccatgttgaccgtcgtgaaatgtacccaaaacctgcattcctatttcgcagagcggctgtattacgcgatgaagggagctggaacacgcgatggtaccttgatcaggaatattgtgtctcggtccgagatcgaccttaatctgattaaatgccactttaagaagatgtacggaaaaaccctgagttcaatgatcatggaggatacaagcggcgactataaaaacgcattgttatcactcgtagggtcagacccttag

SEQ ID NO: 32555 - DNA, 984 bp, Artificial Sequence
  derived and/or modified sequence
atggcctggtggaagagctggatcgagcaggagggcgtgaccgtgaagagcagcagccacttcaaccccgaccccgacgccgagaccctgtacaaggccatgaagggcatcggcaccaacgagcaggccatcatcgacgtgctgaccaagagaagcaacacccagagacagcagatcgccaagagcttcaaggcccagttcggcaaggacctgaccgagaccctgaagagcgagctgagcggcaagttcgagagactgatcgtggccctgatgtaccccccctacagatacgaggccaaggagctgcacgacgccatgaagggcctgggcaccaaggagggcgtgatcatcgagatcctggccagcagaaccaagaaccagctgagagagatcatgaaggcctacgaggaggactacggcagcagcctggaggaggacatccaggccgacaccagcggctacctggagagaatcctggtgtgcctgctgcagggcagcagagacgacgtgagcagcttcgtggaccccggcctggccctgcaggacgcccaggacctgtacgccgccggcgagaagatcagaggcaccgacgagatgaagttcatcaccatcctgtgcaccagaagcgccacccacctgctgagagtgttcgaggagtacgagaagatcgccaacaagagcatcgaggacagcatcaagagcgagacccacggcagcctggaggaggccatgctgaccgtggtgaagtgcacccagaacctgcacagctacttcgccgagagactgtactacgccatgaagggcgccggcaccagagacggcaccctgatcagaaacatcgtgagcagaagcgagatcgacctgaacctgatcaagtgccacttcaagaagatgtacggcaagaccctgagcagcatgatcatggaggacaccagcggcgactacaagaacgccctgctgagcctggtgggcagcgacccctag

SEQ ID NO: 32556 - protein, 863 aa, Artificial Sequence
  derived and/or modified sequence
MARRSSFQSCQIISLFTFAVGVNICLGFTAHRIKRAEGWEEGPPTVLSDSPWTNISGSCKGRCFELQEAGPPDCRCDNLCKSYTSCCHDFDELCLKTARGWECTKDRCGEVRNEENACHCSEDCLARGDCCTNYQVVCKGESHWVDDDCEEIKAAECPAGFVRPPLIIFSVDGFRASYMKKGSKVMPNIEKLRSCGTHSPYMRPVYPTKTFPNLYTLATGLYPESHGIVGNSMYDPVFDATFHLRGREKFNHRWWGGQPLWITATKQGVKAGTFFWSVVIPHERRILTILQWLTLPDHERPSVYAFYSEQPDFSGHKYGPFGPEMTNPLREIDKIVGQLMDGLKQLKLHRCVNVIFVGDHGMEDVTCDRTEFLSNYLTNVDDITLVPGTLGRIRSKFSNNAKYDPKAIIANLTCKKPDQHFKPYLKQHLPKRLHYANNRRIEDIHLLVERRWHVARKPLDVYKKPSGKCFFQGDHGFDNKVNSMQTVFVGYGSTFKYKTKVPPFENIELYNVMCDLLGLKPAPNNGTHGSLNHLLRTNTFRPTMPEEVTRPNYPGIMYLQSDFDLGCTCDDKVEPKNKLDELNKRLHTKGSTEERHLLYGRPAVLYRTRYDILYHTDFESGYSEIFLMPLWTSYTVSKQAEVSSVPDHLTSCVRPDVRVSPSFSQNCLAYKNDKQMSYGFLFPPYLSSSPEAKYDAFLVTNMVPMYPAFKRVWNYFQRVLVKKYASERNGVNVISGPIFDYDYDGLHDTEDKIKQYVEGSSIPVPTHYYSIITSCLDFTQPADKCDGPLSVSSFILPHRPDNEESCNSSEDESKWVEELMKMHTARVRDIEHLTSLDFFRKTSRSYPEILTLKTYLHTYESEI

SEQ ID NO: 32557 - DNA, 2592 bp, Artificial Sequence
  derived and/or modified sequence
atggccagacgatcctcttttcagtcttgccagatcatctctctgttcacattcgcagtgggcgtgaacatctgtttggggttcactgcacatagaatcaagcgggccgagggttgggaagaaggccctccaacggtgctgtctgatagtccttggacaaatatttccgggtcatgtaagggccgttgctttgaactgcaagaggccggaccaccagactgtcggtgcgacaatctgtgcaaatcgtatacctcttgctgtcacgacttcgatgaactatgcctaaaaactgctagaggttgggaatgtaccaaggataggtgtggcgaggtgaggaacgaggaaaatgcctgccactgcagtgaggattgtctggctaggggcgactgttgcacgaactaccaggttgtgtgtaaaggggagagccactgggtggatgatgattgcgaggagattaaggcagctgagtgcccagctggattcgtgaggccacccctgattatcttttcagtggacggattccgggcatcttacatgaaaaaggggtcaaaggtgatgcccaacattgagaagttacgcagctgcggaactcacagtccgtatatgcgccctgtctacccaactaagacgtttccgaatctatatactttggcaaccgggttataccccgaaagccacgggatcgtgggtaactctatgtacgacccagtgtttgacgctacgttccatctgaggggaagagaaaagttcaaccacaggtggtggggcggacagcccctatggataaccgccactaaacagggggtgaaggcaggcactttcttttggtcagttgtcattccgcatgagagaagaatcctgacaatactccaatggctgacgttgcctgaccacgagcggccatcagtatatgccttttacagtgagcagccagatttcagcgggcataagtacggaccctttggacccgagatgaccaacccactgcgggaaattgacaaaattgtgggccagttgatggacggcctaaagcagttaaaattacataggtgtgttaacgtcatctttgtgggcgaccatggcatggaggatgtgacctgtgatcgtaccgagttcctcagcaactacctcaccaacgtggatgatatcacccttgttcctggaaccctgggcagaatcaggtctaagttttcgaacaatgccaagtacgacccaaaagcaattatcgcaaatctgacatgcaagaagcccgatcagcactttaagccatacctgaaacagcatctgcccaaacgactgcactatgcaaataacagaagaattgaagacatccatctcttggtcgagcgccggtggcacgtggcacggaagcctctggacgtctataaaaaacctagcggcaagtgttttttccagggcgaccacggttttgataacaaagtgaacagtatgcagacagtttttgtgggctatggctcaaccttcaaatataagaccaaggttcccccttttgagaacatagaattgtataatgtgatgtgcgacctcctgggtctcaaacccgcccctaataacggcactcacggctccctgaaccatctattacgcactaataccttccggcccaccatgcccgaagaagttacacggccaaactatcccgggataatgtacttgcagagcgactttgatctggggtgcacctgtgacgataaggtcgagcccaaaaataaactcgatgagctgaacaaaaggcttcatacaaagggttcaacagaggaaagacacctgctctatgggcggccagctgttctgtatcgcacacgctacgatatcttgtaccataccgactttgagtcaggctatagcgagatttttctgatgccgctttggacgtcttacacggtgagtaagcaggccgaggtgtcttccgttccagaccatctgactagctgtgtaagaccggatgtacgggtgagcccgtccttttctcaaaattgtctggcctacaagaatgacaaacagatgtcttatggctttttgttccctccctaccttagctcctctcctgaggcgaaatatgatgccttccttgtgactaatatggttcccatgtatccggctttcaagagagtatggaattacttccagcgcgtcctcgtgaaaaagtatgcttcggaacggaacggggtgaacgtaatctctgggccgatcttcgactacgattacgatggtctgcacgacaccgaggacaagatcaagcagtatgtggaggggtcctctattccagtccccacccactactactcgataatcacttcatgcctggattttactcagcccgctgataagtgcgatggccccctgagtgtgtcttcgtttatcctgcctcaccggccggacaatgaagagtcgtgtaactcgagtgaggacgagagcaagtgggtcgaggagctcatgaagatgcacaccgctcgagtacgggacatcgaacatctgacttctctggatttctttaggaagaccagccgaagctaccccgaaatcctgaccctaaaaacgtatctccacacatacgaaagcgaaatctag

SEQ ID NO: 32558 - DNA, 2592 bp, Artificial Sequence
  derived and/or modified sequence
atggcccggcgcagcagcttccagagctgccagatcatcagcctcttcacctttgctgtgggcgtgaacatctgcctgggcttcaccgcccaccgcatcaagagagctgagggctgggaggagggccccccaacagtgctgagtgacagcccctggaccaacatcagcggcagctgcaagggccgctgctttgagctgcaggaggccggccccccagactgccgctgtgacaacctgtgcaagagctacaccagctgctgccacgactttgatgagctgtgcctgaagacagcccggggctgggagtgcaccaaggacagatgtggggaggtgagaaatgaagaaaatgcctgccactgcagcgaggactgcctggcccggggggactgctgcaccaactaccaggtggtgtgcaagggggagagccactgggtggatgatgactgtgaggagatcaaggctgctgagtgcccagctggctttgtgcggcccccactcatcatcttctctgtggatggcttccgggccagctacatgaagaagggcagcaaggtgatgcccaacatcgagaagctgcggagctgtggcacccacagcccctacatgaggcctgtgtaccccaccaagaccttccccaacctgtacaccctggccaccggcctgtacccagagagccacggcatcgtgggcaacagcatgtatgaccctgtgtttgatgccaccttccacctgcggggccgggagaagttcaaccaccgctggtggggcggccagcccctgtggatcacagccaccaagcagggcgtgaaggccggcaccttcttctggagcgtggtgatcccccatgagcggcgcatcctgaccatcctgcagtggctgaccctgcctgaccacgagcggcccagcgtgtatgccttctacagcgagcagcctgacttcagcggccacaagtatggcccctttggacctgagatgaccaaccccctgcgggagattgacaagatcgtgggccagctgatggatggcctgaagcagctgaagctgcaccgctgtgtgaatgtcatctttgtgggggaccacggcatggaggatgtgacctgtgacagaacagagttcctgagcaactacctgaccaacgtggatgacatcaccctggtgcccggcaccctgggccgcatccgcagcaagttcagcaacaatgccaagtatgaccccaaggccatcatcgccaacctgacctgcaagaagccagaccagcacttcaagccctacctgaagcagcacctgcccaagaggctgcactacgccaacaacagaagaattgaggacatccacctgctggtggagcggcgctggcacgtggccaggaagcccctggatgtgtacaagaagcccagcggcaagtgcttcttccagggcgaccacggctttgacaacaaggtgaacagcatgcagacagtgtttgtgggctacggcagcaccttcaagtacaagaccaaggtgcccccatttgaaaatattgagctgtacaacgtgatgtgtgacctgctgggcctgaagccagcccccaacaacggcacccacggcagcctgaaccacctgctgcggaccaacaccttccggcccaccatgcctgaggaggtgacccggcccaactacccaggcatcatgtacctgcagagcgactttgacctgggctgcacctgtgatgacaaggtggagcccaagaacaagctggatgagctgaacaagaggctgcacaccaagggcagcacagaggagcggcacctgctgtatggccggcctgctgtgctgtaccgcaccaggtatgacatcctgtaccacacagactttgagagcggctacagcgagatcttcctgatgcccctgtggaccagctacacagtgtccaagcaggccgaggtgtcctctgtgcctgaccacctgaccagctgtgtgcggccagatgtgcgggtgagccccagcttcagccagaactgcctggcctacaagaatgacaagcagatgtcctatggcttcctgtttcctccctacctgagcagcagccctgaggccaagtatgatgccttcctggtgaccaacatggtgcccatgtacccagccttcaagagggtgtggaactacttccagagggtgctggtgaagaagtatgccagcgagagaaatggagtgaatgtcatcagcggccccatctttgattatgactatgatggcctgcatgacacagaggacaagatcaagcagtatgtggagggcagcagcatccctgtgcccacccactactacagcatcatcaccagctgcctggacttcacccagcctgctgacaagtgtgatggccccctgtctgtgtcctccttcatcctgccccacaggccagacaatgaggagagctgcaacagcagtgaagatgagagcaagtgggtggaggagctgatgaagatgcacacagcccgggtgcgggacatcgagcacctgaccagcctggacttcttcaggaagaccagccgcagctacccagagatcctgaccctgaagacctacctgcacacctatgaaagtgagatctag

SEQ ID NO: 32559 - DNA, 2592 bp, Artificial Sequence
  derived and/or modified sequence
atggcccggcggagcagcttccagagctgccagatcatcagcctgttcacctttgctgtgggagtgaatatctgtctgggcttcacagctcatagaatcaaaagggctgaaggatgggaggaaggaccccctacagtcttatccgattcaccctggaccaacatatcgggatcatgtaagggtcgatgctttgagctgcaggaggctgggcccccagattgcagatgtgataacctgtgcaagagttataccagctgttgccatgattttgatgaattgtgtctaaagactgccaggggttgggaatgtacgaaagaccggtgtggcgaagtgaggaacgaggagaatgcctgccactgcagtgaggattgtttagcaagaggggattgctgtactaactaccaagtagtatgcaagggggaaagccactgggttgacgacgattgcgaagagattaaagccgccgagtgtcccgccgggtttgtgcgtccacctctgatcatctttagtgttgacggatttcgcgcctcttatatgaagaaaggctctaaggtgatgcctaacattgaaaagctgaggagctgtgggacacattccccgtatatgaggcccgtgtaccccactaaaacatttcctaacttgtacaccctcgcgaccggcctgtatcccgaaagtcacggcatcgtgggcaatagcatgtacgaccctgtcttcgatgccacgttccacttacggggaagagagaaattcaaccacagatggtggggcggacaacccttgtggattacggcgacaaagcaaggagtgaaggccggtaccttcttctggagcgtcgtaatcccgcacgagcggaggatactgaccatcctacagtggttgactttacctgaccacgaaaggcctagcgtatacgcgttttactcagagcagcccgatttctccggccataagtacggcccctttggacccgagatgaccaaccctctgagagagatcgataaaattgtgggacagttaatggatgggctcaagcagctgaagcttcacaggtgcgtcaacgtgatatttgtaggtgaccatgggatggaggacgtcacatgtgaccggactgagtttctgagcaattatcttactaatgtggacgatattacgctggtcccgggaactctggggcggattcgcagcaagtttagtaataacgcaaagtacgatccaaaggcaattatcgcaaacctaacatgtaagaagccggaccagcactttaagccctatctgaagcaacatctgcctaaaagattacactacgccaacaatagacgcattgaagacatacacctgctggtggagcggagatggcacgtagcccggaaacctctggatgtgtataagaagccttcaggtaagtgttttttccagggagaccacgggtttgacaataaagttaacagtatgcagacggtcttcgtgggctacggctccacctttaagtacaagacaaaagtgcctccattcgagaacatcgaactatacaacgtgatgtgcgatctgttgggattgaagccagctcctaacaacggtacccacggctccttgaatcacctactgaggactaatacattccgtcccacaatgcccgaagaagttacccgacctaattatccggggataatgtacttacagtctgatttcgatttgggttgcacctgcgatgacaaggtggaaccaaaaaataaactggatgaactcaataagcgcctgcacacaaaaggcagcacagaagagcggcatcttttatacggcaggcctgccgtcctgtaccgcacccgttacgatatcctttaccacacggactttgaaagtggatactctgaaattttcctgatgcccctttggacctcttacactgtgtccaagcaggctgaggtttcctccgtgccagaccacctcaccagctgcgtgagaccagatgtaagagtttctccgagcttttcccagaactgtctagcctataagaatgacaagcagatgtcttacggattcctgttcccgccatacctatccagcagtcccgaagctaagtacgatgcctttttggtgaccaatatggtgcccatgtacccagcctttaagcgggtgtggaattactttcagagagtactcgttaagaagtatgcaagcgagcggaacggagtaaatgtgatctcagggcccatatttgactacgattatgacgggctccacgacaccgaggataaaatcaaacagtacgtagagggatcctcaattcccgtccctacgcattactactctataattactagctgtttagacttcacacagccggccgacaagtgcgacggcccattgagtgtcagctccttcattttgccacatagacctgacaacgaagaatcttgtaatagcagcgaggacgaaagcaaatgggtagaagagcttatgaaaatgcatacggcccgcgtgagggacatagagcatctcacatctcttgattttttcaggaagactagccggtcttacccagaaatccttaccttaaagacctacctacacacctatgagagtgagatatag

SEQ ID NO: 32560 - DNA, 2592 bp, Artificial Sequence
  derived and/or modified sequence
atggcaagacggagtagtttccagagttgtcaaattatcagcctattcaccttcgcagtgggcgtgaatatctgtttggggtttacagcccacagaatcaagcgcgctgaaggatgggaagaggggcctccaaccgtactgtctgacagcccgtggaccaacatttctggatcttgtaaggggaggtgcttcgaactgcaagaagctgggcctcccgattgccgctgtgataacctctgcaaaagttataccagctgttgccacgattttgatgaattatgcttgaaaaccgctcgaggctgggaatgcaccaaggacaggtgtggcgaggtgcggaacgaagagaacgcatgccactgttccgaggactgtctcgccaggggcgactgttgcactaattatcaggtcgtatgtaaaggggagtcacattgggtggacgacgactgtgaggagattaaagcagccgagtgcccggctgggtttgtgcgccctcctctgataatattttccgttgatgggtttagggccagctacatgaagaagggctctaaagtgatgcctaacatcgagaagctgcgctcttgcggcacacacagcccttacatgaggcctgtttatcccaccaagacctttccaaacttatataccttggctacaggcttatatcctgaaagtcacggtattgttgggaacagcatgtatgaccccgtttttgacgcaacctttcacctgcgcggtcgagagaagttcaatcacagatggtggggtggccagcccctgtggattacagctacaaaacagggagttaaggccggaacattcttctggagtgttgtaattccccatgaacggaggatcctcaccattctgcagtggctgactctgcctgaccatgaacgcccttcagtgtatgccttttactccgagcaacccgacttcagcggccacaagtatggccctttcggcccagagatgacgaatcctctgcgcgagatcgacaaaatcgtgggtcagttaatggacggcctcaagcaactgaaactgcatagatgtgtgaatgtcatcttcgtcggtgaccatggcatggaggacgtgacttgtgaccgtaccgaatttctgtctaactacctgactaatgttgacgacataactctggtccctggcaccttgggcagaatccggagtaaatttagtaataatgccaagtatgatcccaaagcgatcatcgctaacctgacctgcaagaagccagaccagcactttaagccttatttaaaacagcacctgccaaaacggctgcattatgcgaataaccggagaatcgaagacatccatctgctggttgagaggcggtggcacgtggccaggaaaccactggacgtgtacaagaagccctctggaaagtgcttttttcagggggaccacggatttgacaacaaggttaattcaatgcagaccgttttcgtaggatacggctcaaccttcaagtacaaaacaaaagtgccacctttcgaaaacatcgagctgtacaacgtcatgtgtgatttgctgggcctcaagcccgcacctaacaatggtacccacggctccttgaatcatctcctgagaactaatacttttagaccaacaatgccagaagaggttacaagacccaattatcctggcatcatgtatctccagagcgactttgaccttggctgcacttgcgatgataaggtcgagccgaagaataagctagatgagttaaataaacggctgcatacaaaaggttccaccgaagaacggcacttgctgtatgggagacctgcggtgttgtatcggacaaggtatgacattctgtaccacacagatttcgagtccgggtactccgaaatcttccttatgccactgtggacctcttataccgtttctaagcaggccgaagtgagtagtgttcctgatcatctaacgagctgcgttagacctgacgttagagtgtcaccatcctttagtcagaattgcctggcttacaaaaacgacaagcaaatgagctacgggtttctcttcccaccctacctgagcagctcgcccgaggcaaaatacgacgccttcttagtcaccaatatggtgcccatgtatcctgcttttaaacgagtttggaactatttccaacgggtcctggtcaagaaatatgcttctgaaagaaatggagtgaatgtgatcagtggcccaatttttgactacgattatgatggacttcatgatacggaggataagatcaagcagtacgttgaggggagttctatcccagtcccaactcactactactccatcatcacaagctgcctggacttcacccagccagctgacaagtgcgatggaccgctgtctgtgtcatccttcatcctgccgcaccggcctgacaatgaagagtcgtgtaacagtagcgaagatgagagcaagtgggtcgaggaactcatgaagatgcacactgcgagggtgagagacatagagcatcttacctcgctggacttcttccgaaagaccagtcgttcttatcctgagatcctgacgttgaaaacatacttgcatacatacgagagtgagatctag

SEQ ID NO: 32561 - DNA, 2592 bp, Artificial Sequence
  derived and/or modified sequence
atggcccgcagaagttccttccaaagttgtcaaatcatttctctcttcactttcgccgtgggggtaaatatctgtctcgggttcactgcccatagaataaagcgggcagagggctgggaagaaggcccgcctacagtcctatcagatagcccttggactaacatttccggaagttgtaaaggacgctgtttcgagctccaggaagccggtccccctgactgccgctgtgacaacctctgtaagtcttatacctcctgctgtcatgatttcgacgagctgtgcttaaagaccgcgcgcggctgggaatgcaccaaagaccggtgtggggaggtgcgcaatgaggaaaacgcgtgccactgtagtgaggactgtttggcccggggggattgctgcacaaactatcaggtcgtgtgtaaaggtgagagtcactgggtcgatgatgactgtgaggagattaaggccgccgagtgccccgcagggttcgtccggccccctctcattatatttagcgtggatggctttcgcgcaagttacatgaagaagggctcgaaagttatgcccaacattgaaaagctaaggagctgcggcacgcattctccctatatgagacctgtctatcccacgaagacttttcctaacctctatactttggccacagggttgtacccagaatctcacgggatagtcggaaacagcatgtatgaccccgtgttcgacgctaccttccaccttcgcggacgtgaaaaatttaaccatcgttggtgggggggacagcctttgtggattaccgctaccaagcagggcgtgaaggccgggacttttttctggtcggtcgttatccctcatgagcgcagaatattgaccatactgcagtggctaactctgcctgatcatgagagaccttccgtctatgccttttacagcgagcaacccgatttttccggccataagtacggccccttcggtcccgagatgacgaaccctctgcgcgaaatagataagatcgtcggccagctaatggatgggctcaaacagctgaaactccaccgctgtgtcaacgtgatcttcgtgggagatcacggaatggaagatgttacatgcgaccgaaccgaattcctttctaactaccttacaaatgttgatgatatcactctggtcccaggaacccttggacggatccggagtaagttctccaacaatgcgaagtatgacccaaaggccataatagctaacctgacttgtaagaagccagatcagcatttcaaaccgtatctcaagcagcacctgcctaagcgcctgcactacgccaataatcggagaatcgaggatattcacctgttggtagaaagaaggtggcacgtggccagaaaaccattggacgtgtataaaaaaccatcagggaaatgtttcttccaaggcgatcatggatttgacaacaaggtgaattccatgcaaactgtcttcgtggggtacggctccacctttaaatacaaaaccaaggttcctccgttcgagaatatagagctttacaacgtgatgtgtgatctgttgggactaaaacctgcccctaacaacggcactcacggcagcctgaatcatctgctacggacaaatactttcaggccgacaatgcccgaggaagtcaccaggcctaattatcccgggatcatgtaccttcagtccgattttgatcttggctgcacttgcgatgataaagttgaacccaaaaacaagctagacgaactgaacaagcggctgcataccaaaggaagcaccgaagaaagacacctcttgtacgggcgtcctgcggtgctatacagaactcgttatgatatcctgtaccataccgacttcgagtcaggctactcagagatattcttgatgcccttgtggacttcttacaccgtaagcaaacaggcggaagtgtcaagtgtgcccgaccacctgacaagctgtgtgagaccagatgtccgcgtatccccctccttttcacagaattgtcttgcttacaaaaacgataaacaaatgagttacggctttcttttcccaccctatctgtcttcctctcccgaagccaagtatgacgccttcctcgtgacaaatatggtccccatgtaccccgccttcaaaagggtctggaattattttcaaagagtgctggtgaagaaatatgcttcggaaagaaatggcgtcaacgttatcagcgggcccattttcgattacgactatgacggtctccatgacactgaggataaaattaagcagtacgtcgagggatcatccattcccgtacctacacattactatagcattataacttcgtgcctcgactttacacaacccgcagataagtgtgatggacccttaagcgtctcttcgttcattctcccacataggcctgataatgaggagtcttgtaacagctctgaggatgagtccaagtgggtggaggagttaatgaaaatgcacaccgctcgagtgcgtgacattgaacatctgacctcactggactttttcaggaagactagcaggtcctatcctgaaatcctgaccttgaagacctatctccatacttacgaaagtgaaatctag

SEQ ID NO: 32562 - DNA, 2592 bp, Artificial Sequence
  derived and/or modified sequence
atggcacgccgaagcagctttcagtcctgtcagatcatttcactatttacatttgccgtaggagtcaatatctgcttgggattcaccgcccacaggattaaacgcgccgaaggatgggaggaaggcccaccaactgtattgtctgattctccctggacgaatatttccgggagctgtaaaggaaggtgtttcgaactgcaggaagcaggaccccctgattgtcgatgcgacaatctctgcaagagttacaccagctgttgccacgacttcgatgaactgtgtcttaaaactgctcggggctgggaatgtaccaaagacaggtgcggcgaggtgagaaacgaggagaatgcatgccattgtagtgaagattgcttagcccgaggcgactgttgcaccaactaccaggtcgtatgcaagggagagagtcattgggtggatgacgactgcgaggaaattaaagctgcagagtgcccagcagggtttgtgaggccaccgctcatcatattttccgtcgacggctttagagctagctacatgaaaaagggcagtaaggtgatgccaaacattgagaaactcagatcttgtggtacccacagcccttatatgcgccccgtctaccctacaaagacattccccaatctctacacattagccaccggtttgtatccggagagccacggaatagtgggcaattccatgtacgacccagtcttcgatgctacatttcacttgagagggcgtgagaagttcaaccacagatggtggggaggtcagcctctttggataactgctaccaaacagggggtgaaagctggtacttttttctggtcagtggtgattccccatgagagacgcatcctgacgatattgcagtggttgaccttgcctgaccatgaacggccaagcgtgtacgccttttattccgagcagcccgatttctctggccacaagtacgggccattcggacctgagatgaccaaccctctgcgggaaattgacaaaattgtgggccagctgatggacggtctgaaacagcttaagctccatcgctgtgtgaatgtgattttcgtgggagatcatggtatggaagatgttacctgtgaccggacagagtttctaagcaactatcttactaatgtggacgacatcaccctggtgcctggaacccttgggagaattaggagtaaatttagcaacaatgccaagtacgatcctaaagccattatcgccaaccttacttgcaagaagccagaccaacactttaaaccgtatctcaaacagcaccttcccaagcgcctgcattatgctaacaaccgccgcatagaagacatccatctgctggtggaaaggaggtggcacgtagcgcggaaacctctggatgtgtacaagaaacctagcggcaaatgtttttttcagggggatcatggtttcgataacaaggtgaattctatgcaaactgttttcgtcgggtacggctcaacttttaaatacaagaccaaagtgcccccttttgagaacatcgagttgtacaacgttatgtgtgacctgctcggtttgaaaccagcgccgaacaatgggactcacggttccttaaatcatctgctaagaacaaatacttttagaccaactatgccagaggaggtaactcggccaaactatcccgggatcatgtacctgcagagtgattttgatttaggctgcacctgtgacgataaagttgaacctaagaataagctagacgaacttaataaacggcttcacaccaagggcagcacagaagaaagacatctcctctacggtaggcctgcagtcctgtataggacccggtatgatatactctatcacacagacttcgaatcaggctactctgagatttttctgatgcccctttggaccagctacactgtgagcaaacaggccgaggtcagcagcgttccggatcacttaacttcttgcgttcgtcctgacgtccgagtatctccttccttttcacaaaattgcctagcatataagaacgacaaacagatgagttacggttttttatttcctccttatctttctagctcccctgaagccaaatacgatgcattcctggtcacgaatatggtgcctatgtatcccgcctttaaaagagtttggaactacttccagcgagtgctcgtgaagaagtacgcttctgagagaaacggcgtaaacgtgatttctggccccatcttcgattacgattatgacggactgcatgacaccgaagataagattaagcagtacgttgaaggctctagtatacccgtcccaactcactattactccattatcaccagctgtctggacttcacacagcccgctgacaagtgtgatggccccttatcagtcagttcattcattctacctcatcgaccagacaacgaagagtcctgcaattctagcgaggatgaatccaagtgggtcgaagagcttatgaagatgcatactgcaagagtgcgcgatatcgaacacttaactagcctcgatttcttcagaaaaacaagtcggagttaccccgaaattctcacactaaaaacctacctccatacttacgagtccgagatatag

SEQ ID NO: 32563 - DNA, 2592 bp, Artificial Sequence
  derived and/or modified sequence
atggccagaagaagcagcttccagagctgccagatcatcagcctgttcaccttcgccgtgggcgtgaacatctgcctgggcttcaccgcccacagaatcaagagagccgagggctgggaggagggcccccccaccgtgctgagcgacagcccctggaccaacatcagcggcagctgcaagggcagatgcttcgagctgcaggaggccggcccccccgactgcagatgcgacaacctgtgcaagagctacaccagctgctgccacgacttcgacgagctgtgcctgaagaccgccagaggctgggagtgcaccaaggacagatgcggcgaggtgagaaacgaggagaacgcctgccactgcagcgaggactgcctggccagaggcgactgctgcaccaactaccaggtggtgtgcaagggcgagagccactgggtggacgacgactgcgaggagatcaaggccgccgagtgccccgccggcttcgtgagaccccccctgatcatcttcagcgtggacggcttcagagccagctacatgaagaagggcagcaaggtgatgcccaacatcgagaagctgagaagctgcggcacccacagcccctacatgagacccgtgtaccccaccaagaccttccccaacctgtacaccctggccaccggcctgtaccccgagagccacggcatcgtgggcaacagcatgtacgaccccgtgttcgacgccaccttccacctgagaggcagagagaagttcaaccacagatggtggggcggccagcccctgtggatcaccgccaccaagcagggcgtgaaggccggcaccttcttctggagcgtggtgatcccccacgagagaagaatcctgaccatcctgcagtggctgaccctgcccgaccacgagagacccagcgtgtacgccttctacagcgagcagcccgacttcagcggccacaagtacggccccttcggccccgagatgaccaaccccctgagagagatcgacaagatcgtgggccagctgatggacggcctgaagcagctgaagctgcacagatgcgtgaacgtgatcttcgtgggcgaccacggcatggaggacgtgacctgcgacagaaccgagttcctgagcaactacctgaccaacgtggacgacatcaccctggtgcccggcaccctgggcagaatcagaagcaagttcagcaacaacgccaagtacgaccccaaggccatcatcgccaacctgacctgcaagaagcccgaccagcacttcaagccctacctgaagcagcacctgcccaagagactgcactacgccaacaacagaagaatcgaggacatccacctgctggtggagagaagatggcacgtggccagaaagcccctggacgtgtacaagaagcccagcggcaagtgcttcttccagggcgaccacggcttcgacaacaaggtgaacagcatgcagaccgtgttcgtgggctacggcagcaccttcaagtacaagaccaaggtgccccccttcgagaacatcgagctgtacaacgtgatgtgcgacctgctgggcctgaagcccgcccccaacaacggcacccacggcagcctgaaccacctgctgagaaccaacaccttcagacccaccatgcccgaggaggtgaccagacccaactaccccggcatcatgtacctgcagagcgacttcgacctgggctgcacctgcgacgacaaggtggagcccaagaacaagctggacgagctgaacaagagactgcacaccaagggcagcaccgaggagagacacctgctgtacggcagacccgccgtgctgtacagaaccagatacgacatcctgtaccacaccgacttcgagagcggctacagcgagatcttcctgatgcccctgtggaccagctacaccgtgagcaagcaggccgaggtgagcagcgtgcccgaccacctgaccagctgcgtgagacccgacgtgagagtgagccccagcttcagccagaactgcctggcctacaagaacgacaagcagatgagctacggcttcctgttccccccctacctgagcagcagccccgaggccaagtacgacgccttcctggtgaccaacatggtgcccatgtaccccgccttcaagagagtgtggaactacttccagagagtgctggtgaagaagtacgccagcgagagaaacggcgtgaacgtgatcagcggccccatcttcgactacgactacgacggcctgcacgacaccgaggacaagatcaagcagtacgtggagggcagcagcatccccgtgcccacccactactacagcatcatcaccagctgcctggacttcacccagcccgccgacaagtgcgacggccccctgagcgtgagcagcttcatcctgccccacagacccgacaacgaggagagctgcaacagcagcgaggacgagagcaagtgggtggaggagctgatgaagatgcacaccgccagagtgagagacatcgagcacctgaccagcctggacttcttcagaaagaccagcagaagctaccccgagatcctgaccctgaagacctacctgcacacctacgagagcgagatctag

SEQ ID NO: 32564 - DNA, 2651 bp, Artificial Sequence
  derived and/or modified sequence
agtgcactccgtgaaggcaaagagaacacgctgcaaaaggctttccaagaatcctcgacatggcaaggaggagctcgttccagtcgtgtcagataatatccctgttcacttttgccgttggagtcaatatctgcttaggattcactgcacatcgaattaagagagcagaaggatgggaggaaggtcctcctacagtgctatcagactccccctggaccaacatctccggatcttgcaagggcaggtgctttgaacttcaagaggctggacctcctgattgtcgctgtgacaacttgtgtaagagctataccagttgctgccatgactttgatgagctgtgtttgaagacagcccgtggctgggagtgtactaaggacagatgtggagaagtcagaaatgaagaaaatgcctgtcactgctcagaggactgcttggccaggggagactgctgtaccaattaccaagtggtttgcaaaggagagtcgcattgggttgatgatgactgtgaggaaataaaggccgcagaatgccctgcagggtttgttcgccctccattaatcatcttctccgtggatggcttccgtgcatcatacatgaagaaaggcagcaaagtcatgcctaatattgaaaaactaaggtcttgtggcacacactctccctacatgaggccggtgtacccaactaaaacctttcctaacttatacactttggccactgggctatatccagaatcacatggaattgttggcaattcaatgtatgatcctgtatttgatgccacttttcatctgcgagggcgagagaaatttaatcatagatggtggggaggtcaaccgctatggattacagccaccaagcaaggggtgaaagctggaacattcttttggtctgttgtcatccctcacgagcggagaatattaaccatattgcagtggctcaccctgccagatcatgagaggccttcggtctatgccttctattctgagcaacctgatttctctggacacaaatatggccctttcggccctgagatgacaaatcctctgagggaaatcgacaaaattgtggggcaattaatggatggactgaaacaactaaaactgcatcggtgtgtcaacgtcatctttgtcggagaccatggaatggaagatgtcacatgtgatagaactgagttcttgagtaattacctaactaatgtggatgatattactttagtgcctggaactctaggaagaattcgatccaaatttagcaacaatgctaaatatgaccccaaagccattattgccaatctcacgtgtaaaaaaccagatcagcactttaagccttacttgaaacagcaccttcccaaacgtttgcactatgccaacaacagaagaattgaggatatccatttattggtggaacgcagatggcatgttgcaaggaaacctttggatgtttataagaaaccatcaggaaaatgctttttccagggagaccacggatttgataacaaggtcaacagcatgcagactgtttttgtaggttatggctcaacatttaagtacaagactaaagtgcctccatttgaaaacattgaactttacaatgttatgtgtgatctcctgggattgaagccagctcctaataatgggacccatggaagtttgaatcatctcctgcgcactaataccttcaggccaaccatgccagaggaagttaccagacccaattatccagggattatgtaccttcagtctgattttgacctgggctgcacttgtgatgataaggtagagccaaagaacaagttggatgaactcaacaaacggcttcatacaaaagggtctacagaagagagacacctcctctatgggcgacctgcagtgctttatcggactagatatgatatcttatatcacactgactttgaaagtggttatagtgaaatattcctaatgccactctggacatcatatactgtttccaaacaggctgaggtttccagcgttcctgaccatctgaccagttgcgtccggcctgatgtccgtgtttctccgagtttcagtcagaactgtttggcctacaaaaatgataagcagatgtcctacggattcctctttcctccttatctgagctcttcaccagaggctaaatatgatgcattccttgtaaccaatatggttccaatgtatcctgctttcaaacgggtctggaattatttccaaagggtattggtgaagaaatatgcttcggaaagaaatggagttaacgtgataagtggaccaatcttcgactatgactatgatggcttacatgacacagaagacaaaataaaacagtacgtggaaggcagttccattcctgttccaactcactactacagcatcatcaccagctgtctggatttcactcagcctgccgacaagtgtgacggccctctctctgtgtcctccttcatcctgcctcaccggcctgacaacgaggagagctgcaatagctcagaggacgaatcaaaatgggtagaagaactcatgaagatgcacacagctagggtgcgtgacattgaacatctcaccagcctggacttcttccgaaagaccagccgcagctacccagaaatcctgacactcaagacatacctgcatacatatgagagcgagatttaa

SEQ ID NO: 32565 - protein, 76 aa, Artificial Sequence
  derived and/or modified sequence
MDLRRVKEYFSWLYYQYQIISCCAVLEPWERSMFNTILLTIIAMVVYTAYVFIPIHIRLAWEFFSKICGYHSTISN

SEQ ID NO: 32566 - DNA, 231 bp, Artificial Sequence
  derived and/or modified sequence
atggacctgagaagagtgaaggagtacttcagctggctgtactaccagtaccagatcatcagctgctgcgccgtgctggagccctgggagagaagcatgttcaacaccatcctgctgaccatcatcgccatggtggtgtacaccgcctacgtgttcatccccatccacatcagactggcctgggagttcttcagcaagatctgcggctaccacagcaccatcagcaactag

SEQ ID NO: 32567 - DNA, 231 bp, Artificial Sequence
  derived and/or modified sequence
atggacctcaggagggtgaaagagtatttctcatggctatactatcagtaccagatcatttcatgctgcgcagtgctggagccttgggaacggtccatgttcaacaccatcttactgaccatcatcgctatggtggtgtacaccgcatacgtatttattccaattcacatccgactcgcttgggagtttttttcaaagatttgtggttaccatagtactatctccaactag

SEQ ID NO: 32568 - DNA, 231 bp, Artificial Sequence
  derived and/or modified sequence
atggatcttagacgggtgaaagagtatttttcttggctctattaccagtatcagattatttcatgctgtgcagttctggaaccctgggagcggtctatgtttaacacaatccttctcacaattattgcaatggtggtgtacacagcttacgtatttatacccatacacatacgactcgcctgggaatttttttcaaagatttgcggatatcattcaactatttcaaactag

SEQ ID NO: 32569 - DNA, 231 bp, Artificial Sequence
  derived and/or modified sequence
atggacctgcggcgggtgaaggagtacttctcctggctgtactaccagtaccagatcatcagctgctgtgctgtgctggagccctgggagaggtccatgttcaacaccatcctgctgaccatcatcgccatggtggtgtacacagcctacgtgttcatccccatccacatccggctggcctgggagttcttcagcaagatctgtggctaccacagcaccatcagcaactag

SEQ ID NO: 32570 - DNA, 231 bp, Artificial Sequence
  derived and/or modified sequence
atggacctgcggcgggtgaaggagtacttcagctggctgtactaccagtatcaaattattagctgttgtgcggtacttgagccttgggagcgttctatgttcaacactatccttttaactatcatcgcaatggtcgtctatactgcatacgtattcattcctatacacataagactggcctgggagttcttcagcaagatctgtggttatcattcgacaatatctaattag

SEQ ID NO: 32571 - DNA, 231 bp, Artificial Sequence
  derived and/or modified sequence
atggacctgcggcgggtgaaggagtacttcagctggctgtactaccagtatcagatcatcagctgctgtgctgtgttagagccttgggagcgaagtatgtttaatacgatacttctcaccatcatcgctatggtggtgtacactgcatacgtcttcattcctatccatattaggttggcctgggaattcttttccaaaatctgcggataccactcgacaattagcaactag

SEQ ID NO: 32572 - DNA, 231 bp, Artificial Sequence
  derived and/or modified sequence
atggaccttaggcgcgtgaaggagtacttcagctggctgtactaccagtaccagattatatcgtgctgcgctgtgctcgagccctgggagcgtagcatgtttaatactatattactcaccattatcgccatggtagtttatactgcatatgtgtttatcccgattcacatccgtctggcctgggagttcttctcaaagatttgcgggtaccactcaactatatcaaattag

SEQ ID NO: 32573 - DNA, 231 bp, Artificial Sequence
  derived and/or modified sequence
atggatctgagaagggttaaggagtactttagttggctctactaccaataccagatcatatcttgttgcgccgtgctcgagccttgggaaagaagcatgtttaataccattttgttgacgataatcgccatggttgtttacacagcctatgtgtttattccaattcatatccggctggcttgggaattcttcagcaaaatttgtgggtatcattctactatttccaactag

SEQ ID NO: 32574 - DNA, 880 bp, Artificial Sequence
  derived and/or modified sequence
agcagctggggaggagccaaagcctcggcgctcacctaagccgcagggagatacacccaactgggagatgaggaaacagcaacccagagaggagaactaacccacacaggatcatttcgtgaaggagcaaggctgaagaaccagacctggactttcttagtgctcattcctgggccctcgatcactgcatgtttgttacatggtccagtttgctgcttcctggaagagcatctcctgactgtgatgcctttgagaataaagtctttccgaagccattaatattcagaaggagccacatggacaaacttactgcagcttgaaggagccaaccatggatttgaggcgtgtgaaggaatatttctcctggctctactatcaataccaaatcattagctgctgtgctgttttagagccctgggagcgatctatgtttaacaccatcttactaaccattattgctatggtggtatacactgcctatgtctttattccaatccacattcgcctggcttgggaatttttctcaaaaatatgtggatatcacagtacaatttctaattgatcctgttcacattcagtgaaatggcattgcatatttatatgttgcttacagcttattgatttaggtaactattgtgtcttccttcactatctgacctgaaaagcactctcttctctatgcactcttatattctgcctttctgcctggagtttgaaatacatgtctctttagtttcttttgcacatgctacattgtgctttagaccggagataatacagtgactttacctcacaaatcatattctgtcaacacaaatctatgaatttagtttatttaaaatcagaacaatttcctacaaaatttttctggaaaatagac

SEQ ID NO: 32575 - protein, 4493 aa, Artificial Sequence
  derived and/or modified sequence
MPRPGTMALCLLTLVLSLLPPQAAAEQDLSVNRAVWDGGGCISQGDVLNRQCQQLSQHVRTGSAANTATGTTSTNVVEPRMYLSCSTNPEMTSIESSVTSDTPGVSSTRMTPTESRTTSESTSDSTTLFPSSTEDTSSPTTPEGTDVPMSTPSEESISSTMAFVSTAPLPSFEAYTSLTYKVDMSTPLTTSTQASSSPTTPESTTIPKSTNSEGSTPLTSMPASTMKVASSEAITLLTTPVEISTPVTISAQASSSPTTAEGPSLSNSAPSGGSTPLTRMPLSVMLVVSSEASTLSTTPAATNIPVITSTEASSSPTTAEGTSIPTSTYTEGSTPLTSTPASTMPVATSEMSTLSITPVDTSTLVTTSTEPSSLPTTAEATSMLTSTLSEGSTPLTNMPVSTILVASSEASTTSTIPVDSKTFVTTASEASSSPTTAEDTSIATSTPSEGSTPLTSMPVSTTPVASSEASNLSTTPVDSKTQVTTSTEASSSPPTAEVNSMPTSTPSEGSTPLTSMSVSTMPVASSEASTLSTTPVDTSTPVTTSSEASSSSTTPEGTSIPTSTPSEGSTPLTNMPVSTRLVVSSEASTTSTTPADSNTFVTTSSEASSSSTTAEGTSMPTSTYSERGTTITSMSVSTTLVASSEASTLSTTPVDSNTPVTTSTEATSSSTTAEGTSMPTSTYTEGSTPLTSMPVNTTLVASSEASTLSTTPVDTSTPVTTSTEASSSPTTADGASMPTSTPSEGSTPLTSMPVSKTLLTSSEASTLSTTPLDTSTHITTSTEASCSPTTTEGTSMPISTPSEGSPLLTSIPVSITPVTSPEASTLSTTPVDSNSPVTTSTEVSSSPTPAEGTSMPTSTYSEGRTPLTSMPVSTTLVATSAISTLSTTPVDTSTPVTNSTEARSSPTTSEGTSMPTSTPGEGSTPLTSMPDSTTPVVSSEARTLSATPVDTSTPVTTSTEATSSPTTAEGTSIPTSTPSEGTTPLTSTPVSHTLVANSEASTLSTTPVDSNTPLTTSTEASSPPPTAEGTSMPTSTPSEGSTPLTRMPVSTTMVASSETSTLSTTPADTSTPVTTYSQASSSSTTADGTSMPTSTYSEGSTPLTSVPVSTRLVVSSEASTLSTTPVDTSIPVTTSTEASSSPTTAEGTSIPTSPPSEGTTPLASMPVSTTLVVSSEANTLSTTPVDSKTQVATSTEASSPPPTAEVTSMPTSTPGERSTPLTSMPVRHTPVASSEASTLSTSPVDTSTPVTTSAETSSSPTTAEGTSLPTSTTSEGSTLLTSIPVSTTLVTSPEASTLLTTPVDTKGPVVTSNEVSSSPTPAEGTSMPTSTYSEGRTPLTSIPVNTTLVASSAISILSTTPVDNSTPVTTSTEACSSPTTSEGTSMPNSNPSEGTTPLTSIPVSTTPVVSSEASTLSATPVDTSTPGTTSAEATSSPTTAEGISIPTSTPSEGKTPLKSIPVSNTPVANSEASTLSTTPVDSNSPVVTSTAVSSSPTPAEGTSIAISTPSEGSTALTSIPVSTTTVASSEINSLSTTPAVTSTPVTTYSQASSSPTTADGTSMQTSTYSEGSTPLTSLPVSTMLVVSSEANTLSTTPIDSKTQVTASTEASSSTTAEGSSMTISTPSEGSPLLTSIPVSTTPVASPEASTLSTTPVDSNSPVITSTEVSSSPTPAEGTSMPTSTYTEGRTPLTSITVRTTPVASSAISTLSTTPVDNSTPVTTSTEARSSPTTSEGTSMPNSTPSEGTTPLTSIPVSTTPVLSSEASTLSATPIDTSTPVTTSTEATSSPTTAEGTSIPTSTLSEGMTPLTSTPVSHTLVANSEASTLSTTPVDSNSPVVTSTAVSSSPTPAEGTSIATSTPSEGSTALTSIPVSTTTVASSETNTLSTTPAVTSTPVTTYAQVSSSPTTADGSSMPTSTPREGRPPLTSIPVSTTTVASSEINTLSTTLADTRTPVTTYSQASSSPTTADGTSMPTPAYSEGSTPLTSMPLSTTLVVSSEASTLSTTPVDTSTPATTSTEGSSSPTTAGGTSIQTSTPSERTTPLAGMPVSTTLVVSSEGNTLSTTPVDSKTQVTNSTEASSSATAEGSSMTISAPSEGSPLLTSIPLSTTPVASPEASTLSTTPVDSNSPVITSTEVSSSPIPTEGTSMQTSTYSDRRTPLTSMPVSTTVVASSAISTLSTTPVDTSTPVTNSTEARSSPTTSEGTSMPTSTPSEGSTPFTSMPVSTMPVVTSEASTLSATPVDTSTPVTTSTEATSSPTTAEGTSIPTSTLSEGTTPLTSIPVSHTLVANSEVSTLSTTPVDSNTPFTTSTEASSPPPTAEGTSMPTSTSSEGNTPLTRMPVSTTMVASFETSTLSTTPADTSTPVTTYSQAGSSPTTADDTSMPTSTYSEGSTPLTSVPVSTMPVVSSEASTHSTTPVDTSTPVTTSTEASSSPTTAEGTSIPTSPPSEGTTPLASMPVSTTPVVSSEAGTLSTTPVDTSTPMTTSTEASSSPTTAEDIVVPISTASEGSTLLTSIPVSTTPVASPEASTLSTTPVDSNSPVVTSTEISSSATSAEGTSMPTSTYSEGSTPLRSMPVSTKPLASSEASTLSTTPVDTSIPVTTSTETSSSPTTAKDTSMPISTPSEVSTSLTSILVSTMPVASSEASTLSTTPVDTRTLVTTSTGTSSSPTTAEGSSMPTSTPGERSTPLTNILVSTTLLANSEASTLSTTPVDTSTPVTTSAEASSSPTTAEGTSMRISTPSDGSTPLTSILVSTLPVASSEASTVSTTAVDTSIPVTTSTEASSSPTTAEVTSMPTSTPSETSTPLTSMPVNHTPVASSEAGTLSTTPVDTSTPVTTSTKASSSPTTAEGIVVPISTASEGSTLLTSIPVSTTPVASSEASTLSTTPVDTSIPVTTSTEGSSSPTTAEGTSMPISTPSEVSTPLTSILVSTVPVAGSEASTLSTTPVDTRTPVTTSAEASSSPTTAEGTSMPISTPGERRTPLTSMSVSTMPVASSEASTLSRTPADTSTPVTTSTEASSSPTTAEGTGIPISTPSEGSTPLTSIPVSTTPVAIPEASTLSTTPVDSNSPVVTSTEVSSSPTPAEGTSMPISTYSEGSTPLTGVPVSTTPVTSSAISTLSTTPVDTSTPVTTSTEAHSSPTTSEGTSMPTSTPSEGSTPLTYMPVSTMLVVSSEDSTLSATPVDTSTPVTTSTEATSSTTAEGTSIPTSTPSEGMTPLTSVPVSNTPVASSEASILSTTPVDSNTPLTTSTEASSSPPTAEGTSMPTSTPSEGSTPLTSMPVSTTTVASSETSTLSTTPADTSTPVTTYSQASSSPPIADGTSMPTSTYSEGSTPLTNMSFSTTPVVSSEASTLSTTPVDTSTPVTTSTEASLSPTTAEGTSIPTSSPSEGTTPLASMPVSTTPVVSSEVNTLSTTPVDSNTLVTTSTEASSSPTIAEGTSLPTSTTSEGSTPLSIMPLSTTPVASSEASTLSTTPVDTSTPVTTSSPTNSSPTTAEVTSMPTSTAGEGSTPLTNMPVSTTPVASSEASTLSTTPVDSNTFVTSSSQASSSPATLQVTTMRMSTPSEGSSSLTTMLLSSTYVTSSEASTPSTPSVDRSTPVTTSTQSNSTPTPPEVITLPMSTPSEVSTPLTIMPVSTTSVTISEAGTASTLPVDTSTPVITSTQVSSSPVTPEGTTMPIWTPSEGSTPLTTMPVSTTRVTSSEGSTLSTPSVVTSTPVTTSTEAISSSATLDSTTMSVSMPMEISTLGTTILVSTTPVTRFPESSTPSIPSVYTSMSMTTASEGSSSPTTLEGTTTMPMSTTSERSTLLTTVLISPISVMSPSEASTLSTPPGDTSTPLLTSTKAGSFSIPAEVTTIRISITSERSTPLTTLLVSTTLPTSFPGASIASTPPLDTSTTFTPSTDTASTPTIPVATTISVSVITEGSTPGTTIFIPSTPVTSSTADVFPATTGAVSTPVITSTELNTPSTSSSSTTTSFSTTKEFTTPAMTTAAPLTYVTMSTAPSTPRTTSRGCTTSASTLSATSTPHTSTSVTTRPVTPSSESSRPSTITSHTIPPTFPPAHSSTPPTTSASSTTVNPEAVTTMTTRTKPSTRTTSFPTVTTTAVPTNTTIKSNPTSTPTVPRTTTCFGDGCQNTASRCKNGGTWDGLKCQCPNLYYGELCEEVVSSIDIGPPETISAQMELTVTVTSVKFTEELKNHSSQEFQEFKQTFTEQMNIVYSGIPEYVGVNITKLRLGSVVVEHDVLLRTKYTPEYKTVLDNATEVVKEKITKVTTQQIMINDICSDMMCFNTTGTQVQNITVTQYDPEEDCRKMAKEYGDYFVVEYRDQKPYCISPCEPGFSVSKNCNLGKCQMSLSGPQCLCVTTETHWYSGETCNQGTQKSLVYGLVGAGVVLMLIILVALLMLVFRSKREVKRQKYRLSQLYKWQEEDSGPAPGTFQNIGFDICQDDDSIHLESIYSNFQPSLRHIDPETKIRIQRPQVMTTSF

SEQ ID NO: 32576 - DNA, 1573 bp, Artificial Sequence
  derived and/or modified sequence
gggaaataagagagaaaagaagagtaagaagaaatataagagccaccatggtatccaagggggaggaggacaacatggcgatcatcaaggagttcatgcgattcaaggtgcacatggaaggttcggtcaacggacacgaatttgaaatcgaaggagagggtgaaggaaggccctatgaagggacacagaccgcgaaactcaaggtcacgaaagggggaccacttcctttcgcctgggacattctttcgccccagtttatgtacgggtccaaagcatatgtgaagcatcccgccgatattcctgactatctgaaactcagctttcccgagggattcaagtgggagcgggtcatgaactttgaggacgggggtgtagtcaccgtaacccaagactcaagcctccaagacggcgagttcatctacaaggtcaaactgcgggggactaactttccgtcggatgggccggtgatgcagaagaaaacgatgggatgggaagcgtcatcggagaggatgtacccagaagatggtgcattgaagggggagatcaagcagagactgaagttgaaagatgggggacattatgatgccgaggtgaaaacgacatacaaagcgaaaaagccggtgcagcttcccggagcgtataatgtgaatatcaagttggatattacttcacacaatgaggactacacaattgtcgaacagtacgaacgcgctgagggtagacactcgacgggaggcatggacgagttgtacaaaggaagcggagctactaacttcagcctgctgaagcaggctggagacgtggaggagaaccctggacctatggtgtccaagggtgaggaattgtttaccggggtggtgcctattctcgtcgaacttgacggggatgtgaatggacacaagttttcggtatccggagaaggagagggtgacgccacatacggaaagcttacactcaaattcatctgtacgacggggaaactgcccgtaccctggcctacgctcgtaaccacgctgacttatggagtgcagtgctttagcagataccccgaccatatgaagcagcacgacttcttcaagtcggcgatgcccgaggggtacgtgcaagagaggaccattttcttcaaagacgatggcaattacaaaacacgcgcagaagtcaagtttgagggcgatactctggtcaatcggatcgaattgaagggaatcgatttcaaagaagatggaaacatccttggccataagctcgagtacaactataactcgcataatgtctatatcatggctgacaagcagaaaaacggtatcaaagtcaactttaagatccgacacaatattgaggacggttcggtgcagcttgcggaccactatcaacagaatacgccgattggggatggtccggtccttttgccggataaccattatctctcaacccagtcagccctgagcaaagatccaaacgagaagagggaccacatggtcttgctcgaattcgtgacagcggcagggatcactctgggaatggacgagttgtacaagtgataatggtctttgaataaagcctgagtaggaag

SEQ ID NO: 32577 - DNA, 678 bp, Artificial Sequence
  derived and/or modified sequence
aaactcctggtacttgagcactgatctgctttggagaacctgattctgagactccagcaggatgtcttatcaacagcagcagtgcaagcagccctgccagccacctcctgtgtgccccacgccaaagtgcccagagccatgtccacccccgaagtgccctgagccctgcccaccaccaaagtgtccacagccctgcccacctcagcagtgccagcaaaaatgtcctcctgtgacaccttccccaccctgccagccaaagtgtccacccaagagcaagtaacagcttcagaattcatcaggagcatgaaaggataaggataattggctcaccttgttccacagcttcacctgcatcttctcatcaaagcctaccatggatacacagttagcttctttcctcttagccagtgatctgcccatgatgatccctgatagcaaaaggtttcctttctgaggctgccatattgccactgtccaggtggagactgagaaaggaagtcctcagcagtgtcagttcccagagctttggaagaaggaccagcagctctgtccctgggaaccatcaaaaaatgctgttgatgttttctgtgtctgtctgtcacctgggcatgggcttctaacacctgtgcaattgtcacttttctttcactccctgaataaaatatctttgcatacgta

SEQ ID NO: 32578 - DNA, 189 bp, Artificial Sequence
  derived and/or modified sequence
atgtgtggaagctattatggtaactactacggagaccatggctacgggtgttgtggctacgaggggctcggatatggttacgggtccctcaggtgtggatattctagctgctgtggctacggccatggatacggctctaggtttttctgtggatgcggatacgggtgtggatcgggctattactactag

SEQ ID NO: 32579 - DNA, 499 bp, Artificial Sequence
  derived and/or modified sequence
ctttttgcacacacacgaatacaaagagccatacgaccttcgggtatcctttttccattttttttcctccttaatcttgtgtgtgttttcaaattttttaaaaatagagatctgtagcagtgttggggttgcactagtcgggggttccatgctggggggcagaaggaatgctctctaccgtctgaaaccgttcatcaggaaggccttgatttgtgatgtgctaggagagcacaggatctgcaaatagaaggcacctgtctcccttctgcaggccgaggagaggccgccatggactgtgtgcttcttcatggcttgtttactcttctttcacagaccctacagcttggggcctgggctcctctgaccatcctcattgagaaaggaaagtgagtccagagaagttgatgcttcctacctgttggagcggcccagcagtgtaagcgtggttgttactgccccatccgccatgtccttcagtgccaccattctcttctcccct

SEQ ID NO: 32580 - DNA, 13482 bp, Artificial Sequence
  derived and/or modified sequence
atgccccggcctggtactatggccctctgccttctgaccctcgtcctgagcctgctgcccccacaggccgcagcagagcaagacctgagcgtgaatcgcgccgtctgggatggcggcggatgtatttcccaaggtgatgttcttaaccgacagtgccagcagctgtcccagcacgttcggaccggttccgctgcgaacacggcaaccggcactacaagcacaaatgtcgttgaacctcggatgtacctgtcgtgctcaaccaacccagaaatgacttcgattgaaagctccgtcacgtccgacaccccaggggtcagttctacaaggatgacccctactgaaagcaggacaaccagtgagagcacctccgattctaccaccttgtttcctagctcaactgaggacacgtctagccctaccacccctgaaggcacagacgtgcctatgagtacgcctagcgaagaatctatctccagcaccatggccttcgtctccacagcgcccttaccttcctttgaggcgtatacaagtcttacttacaaggtggacatgtccacgcctcttactacctcaactcaggcctccagttcccccaccactccagagtctacaacgatacccaaaagcactaacagcgaaggatcaactccactgaccagcatgccagcgagcaccatgaaagtagcgagctctgaagctattacgcttctaaccacccccgtggagatctccactcccgtgacaatttccgcacaggcatcaagctctccaaccacagccgagggcccttcactgtccaactcagctcccagcggggggtccacgccattgacccgaatgcccctgtctgttatgttggttgtctcgagtgaggcaagcaccctgagcactacccctgcagccaccaacatccctgtcattacctccacagaagcctcctcttcaccaacaacagctgagggtacctcaatccccacaagtacatacaccgaggggagtaccccattgacctccacaccagccagcacgatgcccgtcgcaaccagcgagatgagcacattgagcatcacaccggtggacacctctaccttggtgaccactagtacagaaccatctagcctccccactacggcagaagccactagcatgttgaccagtaccttgtcggagggcagcaccccattgacaaacatgccggtgtcaacaatcttagtggcatcttcagaagctagcacaacctcaaccatccccgttgacagcaaaacatttgttacaactgcctcagaagcctcaagcagcccaacaaccgcggaagacacctctatcgccacttcaaccccctcggaaggctctaccccacttaccagtatgccagtgtctacaacccccgttgcatcctctgaggcctcaaacctcagcactacgccggtggatagtaaaacacaggtcactacgtccactgaggcttcttccagtcctccaacggctgaggtgaattccatgcctacctccacaccttctgagggttcaacacccctgactagcatgagtgtctccaccatgcccgtggccagctccgaagcctctacgttatcgacgacacctgtggatacctccacccccgtgaccacctcttctgaggcatcttcctcgtctacaacccccgagggcaccagcattcccacgagcacccctagcgaggggagtacaccactgactaacatgcccgtatccacacgacttgtcgtgtcttctgaggcttcaacaacaagcaccactccagccgactcaaacacttttgtgacaacttctagtgaagccagtagctcaagcaccaccgcagaaggaaccagcatgcccaccagtacatactcagaacgaggcactaccatcacatcaatgtcagtatctaccaccctggtggcaagtagcgaggcctctactctgagcacaacaccagtcgattccaacacacccgttaccacgagcacagaggcgacatcatcctccaccacggccgaggggactagcatgccaacatctacctatacggaaggctccaccccacttaccagcatgcccgttaatactacattggtggcatctagcgaggccagtacattgagcaccacaccagtcgatacatcaaccccggtcaccacttccaccgaggctagctcatcccccactacggctgacggtgccagcatgccgacatctactcccagcgagggttccaccccccttacctctatgcctgttagcaaaacgctcctaacctctagcgaggcaagcaccctgagcacaacaccactggacacttccacccacatcacaacatcgaccgaggccagttgtagtcccaccaccaccgaaggcactagcatgcctatatctacccctagtgaggggagcccgctcctgacgtccatccctgtgagcatcactcctgtgacatctcctgaggcgagtactcttagtactaccccagttgacagcaatagcccagttacgacatctactgaagtctcctctagtcccacaccagctgagggcacaagtatgccaacaagtacttattcagaaggtagaacccccctgacctctatgcccgtgagtaccacattggtggctacttctgctatttccacattgagtactacccccgtggacacatccactccagtaactaatagtactgaggcgcgtagttcaccaactacttctgagggcacttcaatgccaacaagtacccccggcgagggaagtacccccctcactagcatgccagatagcaccactccagtcgtgagctccgaggcccgaacgctcagcgctacccccgtagatacgtcgactccagtgaccacctcaaccgaagccactagttctcccaccaccgctgagggcacaagcatccccacaagtaccccaagcgaaggaacaaccccactgacaagcacgcctgtaagtcacacactcgttgcaaacagtgaggccagcacactatctacaacacccgtagattctaatacgccgctaactaccagcacagaggcatcctccccgcctcctactgctgagggtacttcaatgcccaccagcactccctcggagggcagcactcctctcacacggatgcccgtgagcaccactatggtggcgagcagcgagacatctacattgtcgacaacgccggccgacacctccacgcccgttaccacatacagccaggcttcatcgagctccacaaccgccgacggtacttctatgcccacttctacatattcagaaggctccacccctcttacgagcgttccagtgtccactcgactggtggtaagtagcgaggcctccacactaagcacgactccagtcgatacaagcatacccgttaccacctctaccgaagcttccagcagtcccaccacagccgaaggtaccagtatcccaacttctccaccatctgaaggcacgactccactggctagcatgcctgtgagcacaactctggtagtttcctccgaggccaacactctcagcaccacaccggtcgacagtaagacccaggtggccacttccacggaggcctcatcacctccgcctactgctgaggttacaagtatgccaacctccactcccggtgagcggagcacaccattgacaagcatgccagtccgccacacacccgtggcatcgagtgaggcttcgacgctgagtactagccctgtagacaccagcacgcccgtcaccacaagtgctgaaacttctagttctcctaccactgcagagggaacatctctccccacgagcactacaagtgaggggtccaccctcctgacatcaattcccgtgtctaccacactggtcaccagccccgaggcaagcacgctcctcacgacacccgtggacacaaaaggtcctgtcgttacctccaatgaagttagctccagccctacaccagccgagggaactagcatgcctacctccacttatagcgagggccgaacccccctgacgtctatccctgtcaacacaactctcgtagcatccagcgccatctctatcctttctactacaccagtagacaactctactccggtgacgacatccaccgaggcatgctcctcccctaccacgagtgagggcacaagcatgcctaatagtaatcccagtgaggggactacaccgctgacaagtatcccagtgagcactacgccagtcgtgagtagcgaagcatcaacattatctgctacgccagtagataccagcacgcctggcaccacctctgcggaggctaccagctctccaaccacggccgaaggtatctctatccccaccagcaccccctctgagggtaaaacccctctgaagagcataccagtgtccaatactccagtcgccaattcggaggctagcacgttaagtacaacgcccgttgactctaatagtcctgtggttacaagcaccgcagtgtcatctagcccaacccctgctgaggggacatctatcgcaattagtactccatccgagggcagcaccgcgctgacaagcatcccagtaagtaccactaccgttgccagttctgaaatcaactccctttcaacaacccccgcagttacatcaacaccggtcactacgtattcacaggctagttcgtcacccaccactgctgatgggaccagcatgcaaaccagtacatactccgagggatccaccccactgacctccttgcccgtgagcaccatgttagttgtgtcatccgaggctaacacgctgtcgacgaccccgatcgatagtaaaactcaggtgaccgcctcgacagaggcctctagcagcactactgcagaggggtcttcaatgacaattagtactccaagtgagggaagccccctgctgactagcataccggttagcacgactcctgttgcatctcctgaagcctcaaccctgtctactacaccagttgactcgaattcccccgtgattaccagcacggaagtgtcgtcaagcccgacccctgccgaaggcacttctatgcccacctctacctacaccgaaggcaggactcccctaacctctatcactgtgaggaccactccggttgctagctccgcaatttctactctctcaactacgccggtcgataactctacccccgtgaccacttctacggaagcaagatcctcaccgacaacatctgaggggacctctatgccaaactccaccccttcagaggggacgactccactgacatctatcccagtcagtactactcccgtcttaagctccgaagcgagcactcttagtgcaaccccgatcgacacatccaccccagttacaacttccactgaggcgaccagctcaccaaccaccgccgaaggcacctcgatccccacctcaaccctcagtgagggcatgacccctctgaccagcacccccgtgtcccatactctggtggcaaactccgaggccagtaccctcagcacaacaccagtggatagcaattctcccgtcgtgactagcacagcagtgtcgagcagtccaacaccagctgagggaacatcgatcgcgacatcgactccatcggagggaagtacagctctcacaagcatcccagtgagcacaacaacagtggcctcctcggagacaaatacattgagcacaacgcctgccgtaacatcaacccccgtcaccacctatgcgcaagtttcttcatctcctacaacagcggatggatcttcaatgcccacaagcacccctagggaagggcgacctcctctcacatctatcccggtttctacaactacggttgccagctcggaaataaatactctgtctacaacactcgctgatacacggacacccgttactacctacagccaggcaagttctagcccaacaacagccgacggaacctccatgcccacacctgcctactctgagggttcaacgccgctgacctccatgccactctcaacgacgcttgtcgtgtcgtccgaggccagcactctgtctaccactccggtggatacaagcacaccagccaccacatctaccgaaggatcttccagccccaccacagcgggcgggacatcaatacagacttccactccttctgagcgaacaaccccactggctgggatgcccgtgagcacaacattggtagtatcaagtgaaggaaataccctaagcacaactcccgtggatagcaaaacccaagtgactaactcaacagaggcttcttccagtgccacggctgaaggctcctcaatgacaatttccgcaccatctgagggaagcccactgctaacttctatcccccttagcaccacacccgtggcaagcccggaggcatctacgctgtctaccaccccagtcgactcaaactctccagtgattacgtcaaccgaagtgtcttcctctcccatccccactgaaggaacaagtatgcagacatctacatactccgacagaagaactccgctgaccagcatgcccgtcagcacgacagttgtcgcctctagcgccatcagtacactgtcaaccacgcctgtcgatacatcaacccctgtcactaacagtaccgaagctaggagtagcccaaccacctcagagggcacaagcatgcccacgtcaaccccatccgaagggtctaccccctttaccagtatgcctgtgtccacaatgcctgtcgtcacatccgaggccagcactctgtccgcaacccccgtagatacttctacacccgtcaccacttctaccgaggcaacatccagtccaacaacagccgagggaaccagtattcctacatctactcttagtgagggcactacaccgcttacatccatcccagtctcccacaccctcgtggccaattcggaagtgtctacattgtctactactccggtcgacagcaataccccgttcactaccagcaccgaggccagcagtcccccccctacagccgagggcacttccatgcccactagcacgagtagcgagggaaacacaccattaactaggatgcccgtcagcactacaatggtcgcttcattcgagacatccacactctccacaactcctgccgacacctccacacctgtcacaacatattcccaggcaggctcaagcccaacaaccgcagacgacacatctatgcctaccagtacctatagcgaaggatcaacaccgctcactagcgtgcccgtgtcaacaatgcccgtcgtgtctagcgaggcctcgacacatagcactacgcctgtcgataccagcacccccgtgaccaccagtacagaagccagttcatctcctaccaccgctgagggcacctctatacctacatctcccccatccgaaggtacaacaccactggcatcaatgccggtttctaccacgcctgtggtgtcaagcgaagccggtacattgagtacgacccctgtcgatacatctacccccatgactacaagcaccgaagcctcatccagtcccacaaccgcagaagatattgtggttcctattagcaccgcttcagaagggtctaccctgctgacatcaatccccgtctccacaacccccgtcgcatccccagaggcttcaacactctccacaaccccggtggattccaatagtcccgttgtgacctctacagagataagtagttccgctacttccgcggagggtacatctatgcctacttctacatatagcgaaggatccactcctctgcgttccatgcctgtaagcaccaagccactggctagttccgaggcttctaccctgtccactacaccagtggatacatcgataccagttaccactagcaccgagacctcgtctagcccaacaaccgcaaaggacacaagcatgcccattagtactccttccgaggtgtccacgtctcttacaagcatattggtcagcacgatgccggtcgcctccagcgaggcctcaaccctttctaccactcccgttgacacacggactctggtgaccaccagcaccggcaccagcagttctcctacaactgcagaaggatcctctatgccaacttctacgcccggtgaacggtcaacccctctgaccaacatcctggtctcgacaacccttttagccaattcggaagcatcaacgttgtccacgactccagtggacacaagcacccccgttacgacatccgcggaggcctcttcttctcctactacggcagagggaacgtccatgaggatttctacccctagcgacggatctactcccctgacatctattctggtgtctactttacccgttgcttcaagtgaagcgtcaacggtttccactacagcagtggatacctcgatccctgtaacaacctcaactgaggcctctagcagccccaccaccgccgaggtaacttctatgccgacaagcacccctagcgaaactagcactcccctcacaagcatgccggtgaaccatacaccggtagcctcatctgaagctggcaccctgagcacaacgccagtagacaccagtacccccgtgactaccagcacaaaagcctcgagcagcccaactaccgcagagggtatagtggtgccaataagcactgcatctgaaggatctaccttgctgacatccatcccggtctctacaacccccgtggcctcaagtgaagcttccacgctgtcgacaacgcccgtcgacaccagcatacccgtgactacatcaacggagggatcatcatctccgaccaccgccgaaggtaccagcatgccaatttctacgcctagcgaggtgagcactccactgacaagtattctggtgagcaccgtacccgtcgcagggtctgaggcaagtactctgtcgaccactcctgtcgacacaaggacgcctgtgacaaccagcgcagaggcttcctcatcccctaccactgccgagggcacttccatgcccatttcaacacctggagagcgccgaaccccactcaccagtatgagcgtctccaccatgcccgtcgcatcttctgaggcatctacactttcacgcacacccgcggacacttctacccccgtgactacatccaccgaggcttcttctagcccaaccactgccgagggaacagggatcccaatctcaacaccttccgaaggctcaacacccctaacctccattcctgttagtaccacgcccgtggccattccagaggcgagcaccctgtcaacaacaccggtggacagtaacagtcccgtggttacaagcactgaagtgtcctctagtccaacacccgccgagggcacttccatgcctatttctacctattccgaagggtctacccccctgaccggagtgcccgtctcaactacgccggtgacttcatctgctatatccacactctcaacaactcccgtggatacatctacccccgtcactacatcaactgaagcacatagctcccctactacctcagagggcacatctatgcctaccagtacacccagtgaaggaagcactcctctgacatatatgcctgtgagtacgatgttggtagtgtcctctgaagattcaaccttgagcgctacccccgtcgacacgtctacaccagtgaccacctcaaccgaagctacatcaagcaccactgctgaggggacatctatccccaccagcactccgtccgagggaatgaccccgcttacatctgtacctgtcagtaatacccctgtcgcgagcagtgaggcttccatcctgtctacaacccctgttgactccaataccccactgacaacaagtacagaagcgtcatcttccccccctactgctgagggtactagcatgccaactagtactccctccgagggatctactcctctcaccagtatgcctgtatcgacgacaaccgtcgcttcatcggagacctcaaccctgagtacaacccctgccgacacctccacgccagtcaccacctactcccaagcgagcagtagccccccaatagctgacgggacctctatgcccacctctacttatagcgaggggagcaccccactaacgaacatgagcttcagcacaacccctgtagtgagctcagaggcttcaacactcagtactacccctgtggatacatccacccccgtgaccacatctaccgaggcctctctgtctcctacgacggctgaagggacatcaattcctaccagtagtccctcagaggggaccacccctctagccagcatgccggtcagcacaacccccgtggtcagtagtgaagttaataccttgtccacgacaccagtggatagtaatacacttgttacaacctccacagaggcctctagctccccaaccatcgccgagggcaccagcctgcctacgtctaccacatctgaagggagcacgccgctcagtattatgccattaagtaccaccccagtggcctcatctgaagccagcacactgtccaccacacctgttgatacatctaccccagtgaccacgagttctcctacaaactcatcacctacgactgctgaagtaaccagtatgccaacaagcacagctggggaagggtcgacccctctcacaaacatgcccgtcagtacaactcccgtggccagttccgaggcgtcgacattgagtactacacctgttgactccaacaccttcgtaacaagtagtagccaggcctccagctcccccgcgacacttcaggtgactacgatgagaatgtcgactccaagtgaaggaagcagctctttgaccactatgttactcagcagtacatacgtgacctccagtgaggcctctacaccatccacaccaagcgttgaccggtcaacccctgttaccacatccactcagtccaactctacccccaccccacccgaggtaattacgttgcccatgagtactccctccgaggtgtctacaccccttaccatcatgccagtctccacaacaagcgttacaatcagtgaagcagggacagcgtctactctgccagttgacacttctacaccagtcatcacaagcacccaggttagcagcagccctgtcactcctgagggtaccacgatgcctatatggacgcctagtgagggttctacacccttgactaccatgcccgttagtaccacaagggtcacttcatcagaggggtctacccttagtactccctccgtagtgacatcaacccccgtgactacctcaaccgaggcaatctcttctagcgccacacttgactcgaccacaatgagcgtttccatgccaatggagatatccacgctgggaaccaccatcctcgtctcgaccacacccgtaacccgtttcccagagtccagtaccccctcaatcccgtctgtttacacatctatgagcatgactacagcgtccgaagggtcaagttctccaaccacattggaagggaccaccaccatgcccatgagcaccacctctgagagatctaccctcctgactactgtgttaattagtcctatatctgtgatgagcccctccgaagctagtaccctgtctactcctccgggggacacgtctacgcccctgctgacaagtaccaaagcagggtcatttagtatcccagcagaggtcaccacgattagaattagtatcacgtctgagcgatctaccccactcaccactcttctggtatcaacaacgttgccaacctcattccccggcgcaagcatcgccagtaccccgcccttggacactagcactacgtttactccctcaactgatacggcctcaaccccgacgattcccgtggccactactatttccgtctccgtcatcacggaagggtcaacaccaggaacgaccatatttattccatctaccccggtgaccagctcaaccgccgacgtgtttcccgccaccacaggagcagtcagcacacccgtaatcacgagcaccgagctcaatacccctagcacctcttctagtagtactaccaccagtttttctacaacaaaagagtttacaacccccgctatgacaaccgccgctcctctcacttatgtaaccatgtctacagccccgagcactcctaggaccactagtaggggttgcactacctctgcctccaccttgtcagcaacttccacaccacacacgagcacaagcgtgacaacgcggcccgtgaccccaagctccgagagcagccgcccatccaccattactagccacacgatacctccgacattcccccccgctcatagctctactccccctacaacatccgccagttcgacgaccgttaacccggaggcagtgactactatgacgactaggacaaagccaagtacccgcactactagtttccccaccgtgacgacgactgccgttcccacaaacacaactattaaatccaaccctacctctacacccaccgtgccgcgcactacgacctgctttggggacggttgtcagaataccgcaagcaggtgcaagaatggaggcacctgggacggtcttaaatgtcaatgcccaaatctgtattacggtgagctgtgtgaggaggtggtgagttccatcgatatcggacctccggagaccataagtgctcaaatggaactaacggtgactgttaccagtgtcaagtttaccgaagagctcaaaaaccactctagtcaggaatttcaggagtttaagcagacctttacggaacaaatgaacatcgtttatagcggcattcccgagtacgtgggcgtcaacataaccaagctccgactgggaagtgtggttgtggaacacgatgtcttactacgtactaaatacacacccgaatacaaaaccgtccttgacaacgccacagaggtcgtgaaggaaaagattacgaaagtcacgacgcagcagattatgataaacgatatttgcagtgatatgatgtgctttaacaccaccggcactcaagtacagaatatcactgtcacccaatatgacccagaagaggattgtcgcaagatggccaaggaatacggcgactattttgtggtagagtatcgtgaccagaaaccttattgcatcagcccatgtgaaccgggcttttcagttagtaagaactgcaatctgggtaagtgccaaatgtcattgtccgggcctcagtgcctgtgcgtgactaccgaaacccactggtactccggcgaaacttgcaaccagggaacacaaaagtcgctcgtgtatggcctagtgggcgctggcgtggtcctgatgttgataatcctggtcgccttgctgatgctggtgtttagaagcaaaagggaagtgaaacggcagaaatatagactgtcacaactctacaaatggcaggaggaagattctgggcccgcaccgggaacatttcagaacatcggtttcgacatttgtcaggacgacgacagcatacatctggaaagcatttactccaattttcagccgagcctgcgccatatcgaccctgaaacaaaaattcggatccaacgtccccaagtaatgaccacttcattttag

SEQ ID NO: 32581 - DNA, 13482 bp, Artificial Sequence
  derived and/or modified sequence
atgccccggcccggcaccatggccctgtgcctgctgaccctggtgctgagcctgctgcccccccaggccgctgctgagcaggacctgtctgtgaacagagctgtgtgggatggcggcggctgcatcagccagggagatgtgctgaaccggcagtgccagcagctgagccagcacgtgaggactggatctgctgccaacacagccaccggcaccaccagcaccaacgtggtggagcccaggatgtacctgagctgcagcaccaaccctgagatgaccagcattgagagctctgtgaccagtgacaccccaggagtgagcagcaccaggatgacccccacagagagcaggaccaccagcgagagcaccagtgacagcaccaccctcttccccagcagcacagaggacaccagcagccccaccaccccagagggcacagatgtgcccatgagcaccccatctgaggagagcatcagcagcaccatggcctttgtgtccacagcccccctgcccagctttgaggcctacaccagcctgacctacaaggtggacatgagcacccccctgaccaccagcacccaggccagcagcagccccaccaccccagagagcaccaccatccccaagagcaccaacagcgagggcagcacccccctgacctccatgcctgccagcaccatgaaggtggccagcagcgaggccatcaccctgctgaccacccctgtggagatcagcacccctgtgaccatcagcgcccaggccagcagcagccccaccacagctgagggccccagcctgagcaacagcgcccccagcggcggcagcacccccctgaccaggatgcccctgtctgtgatgctggtggtgagcagcgaggccagcaccctgagcaccaccccagctgccaccaacatccctgtgatcaccagcacagaggccagcagcagccccaccacagctgagggcaccagcatccccaccagcacctacacagagggcagcacccccctgaccagcaccccagccagcaccatgcctgtggccaccagcgagatgagcaccctgagcatcacccctgtggacaccagcaccctggtgaccaccagcacagagcccagcagcctgcccaccacagctgaggccacctccatgctgaccagcaccctgtctgagggcagcacccccctgaccaacatgcctgtgtccaccatcctggtggccagcagcgaggccagcaccaccagcaccatccctgtggacagcaagacctttgtgaccacagccagcgaggccagcagcagccccaccacagctgaggacaccagcatcgccaccagcacccccagcgagggcagcacccccctgacctccatgcctgtgtccaccacccctgtggccagcagcgaggccagcaacctgagcaccacccctgtggacagcaagacccaggtgaccaccagcacagaggccagcagcagccccccaacagctgaggtgaacagcatgcccaccagcaccccatctgagggcagcacccccctgacctccatgtctgtgtccaccatgcctgtggccagcagcgaggccagcaccctgagcaccacccctgtggacaccagcacccctgtgaccaccagcagcgaggccagcagcagcagcaccaccccagagggcaccagcatccccaccagcacccccagcgagggcagcacccccctgaccaacatgcctgtgtccacccggctggtggtgtcctctgaggccagcaccaccagcaccaccccagctgacagcaacacctttgtgaccaccagcagcgaggccagcagcagcagcaccacagctgagggcacctccatgcccaccagcacctacagcgagcggggcaccaccatcacctccatgtctgtgtccaccaccctggtggccagcagcgaggccagcaccctgagcaccacccctgtggacagcaacacccctgtgaccaccagcacagaggccaccagcagcagcaccacagctgagggcacctccatgcccaccagcacctacacagagggcagcacccccctgacctccatgcctgtgaacaccaccctggtggccagcagcgaggccagcaccctgagcaccacccctgtggacaccagcacccctgtgaccaccagcacagaggccagcagcagccccaccacagcagatggagcctccatgcccaccagcaccccatctgagggcagcacccccctgacctccatgcctgtgtccaagaccctgctgaccagcagcgaggccagcaccctgagcaccacccccctggacaccagcacccacatcaccaccagcacagaggccagctgcagccccaccaccacagagggcacctccatgcccatcagcacccccagcgagggcagccccctgctgaccagcatccctgtgtccatcacccctgtgaccagccctgaggccagcaccctgagcaccacccctgtggacagcaacagccctgtgaccaccagcacagaggtgagcagcagccccaccccagctgagggcacctccatgcccaccagcacctacagcgagggccgcacccccctgacctccatgcctgtgtccaccaccctggtggccaccagcgccatcagcaccctgagcaccacccctgtggacaccagcacccctgtgaccaacagcacagaggcccggagcagccccaccaccagcgagggcacctccatgcccaccagcaccccaggagagggcagcacccccctgacctccatgccagacagcaccacccctgtggtgtcctctgaggcccggaccctgagcgccacccctgtggacaccagcacccctgtgaccaccagcacagaggccaccagcagccccaccacagctgagggcaccagcatccccaccagcaccccatctgagggcaccacccccctgaccagcacccctgtgagccacaccctggtggccaacagcgaggccagcaccctgagcaccacccctgtggacagcaacacccccctgaccaccagcacagaggccagcagccccccacccacagctgagggcacctccatgcccaccagcacccccagcgagggcagcacccccctgaccaggatgcctgtgtccaccaccatggtggccagcagcgagaccagcaccctgagcaccaccccagctgacaccagcacccctgtgaccacctacagccaggccagcagcagcagcaccacagcagatggcacctccatgcccaccagcacctacagcgagggcagcacccccctgacctctgtgcctgtgtccacccggctggtggtgagcagcgaggccagcaccctgagcaccacccctgtggacaccagcatccctgtgaccaccagcacagaggccagcagcagccccaccacagctgagggcaccagcatccccaccagcccccccagcgagggcaccacccccctggcctccatgcctgtgtccaccaccctggtggtgtcctctgaggccaacaccctgagcaccacccctgtggacagcaagacccaggtggccaccagcacagaggccagcagccccccacccacagctgaggtgacctccatgcccaccagcaccccaggagagaggagcacccccctgacctccatgcctgtgcgccacacccctgtggccagcagcgaggccagcaccctgagcaccagccctgtggacaccagcacccctgtgaccaccagcgctgagaccagcagcagccccaccacagctgagggcaccagcctgcccaccagcaccaccagcgagggcagcaccctgctgaccagcatccctgtgtccaccaccctggtgaccagccctgaggccagcaccctgctgaccacccctgtggacaccaagggccctgtggtgaccagcaatgaggtgagcagcagccccaccccagctgagggcacctccatgcccaccagcacctacagcgagggccgcacccccctgaccagcatccctgtgaacaccaccctggtggccagcagcgccatcagcatcctgagcaccacccctgtggacaacagcacccctgtgaccaccagcacagaggcctgcagcagccccaccaccagcgagggcacctccatgcccaacagcaaccccagcgagggcaccacccccctgaccagcatccctgtgtccaccacccctgtggtgtcctctgaggccagcaccctgagcgccacccctgtggacaccagcaccccaggcaccaccagcgctgaggccaccagcagccccaccacagctgagggcatcagcatccccaccagcaccccatctgagggcaagacccccctgaagagcatccctgtgagcaacacccctgtggccaacagcgaggccagcaccctgagcaccacccctgtggacagcaacagccctgtggtgaccagcacagctgtgagcagcagccccaccccagctgagggcaccagcatcgccatcagcacccccagcgagggcagcacagccctgaccagcatccctgtgtccaccaccaccgtggccagcagcgagatcaacagcctgagcaccaccccagctgtgaccagcacccctgtgaccacctacagccaggccagcagcagccccaccacagcagatggcacctccatgcagaccagcacctacagcgagggcagcacccccctgaccagcctgcctgtgtccaccatgctggtggtgagcagcgaggccaacaccctgagcaccacccccatcgacagcaagacccaggtgacagccagcacagaggccagcagcagcaccacagctgagggcagctccatgaccatcagcaccccatctgagggcagccccctgctgaccagcatccctgtgtccaccacccctgtggccagccctgaggccagcaccctgagcaccacccctgtggacagcaacagccctgtgatcaccagcacagaggtgagcagcagccccaccccagctgagggcacctccatgcccaccagcacctacacagagggccgcacccccctgaccagcatcaccgtgaggaccacccctgtggccagcagcgccatcagcaccctgagcaccacccctgtggacaacagcacccctgtgaccaccagcacagaggcccggagcagccccaccaccagcgagggcacctccatgcccaacagcaccccatctgagggcaccacccccctgaccagcatccctgtgtccaccacccctgtgctgagcagcgaggccagcaccctgagcgccacccccatcgacaccagcacccctgtgaccaccagcacagaggccaccagcagccccaccacagctgagggcaccagcatccccaccagcaccctgtctgagggcatgacccccctgaccagcacccctgtgagccacaccctggtggccaacagcgaggccagcaccctgagcaccacccctgtggacagcaacagccctgtggtgaccagcacagctgtgagcagcagccccaccccagctgagggcaccagcatcgccaccagcaccccatctgagggcagcacagccctgaccagcatccctgtgtccaccaccaccgtggccagcagcgagaccaacaccctgagcaccaccccagctgtgaccagcacccctgtgaccacctacgcccaggtgagcagcagccccaccacagcagatggcagctccatgcccaccagcaccccccgggagggccggccccccctgaccagcatccctgtgtccaccaccaccgtggccagcagcgagatcaacaccctgagcaccaccctggccgacaccaggacccctgtgaccacctacagccaggccagcagcagccccaccacagcagatggcacctccatgcccaccccagcctacagcgagggcagcacccccctgacctccatgcccctgagcaccaccctggtggtgagcagcgaggccagcaccctgagcaccacccctgtggacaccagcaccccagccaccaccagcacagagggcagcagcagccccaccacagctgggggcaccagcatccagaccagcacccccagcgagaggaccacccccctggccggcatgcctgtgtccaccaccctggtggtgtcctctgagggcaacaccctgagcaccacccctgtggacagcaagacccaggtgaccaacagcacagaggccagcagcagcgccacagctgagggcagctccatgaccatcagcgcccccagcgagggcagccccctgctgaccagcatccccctgagcaccacccctgtggccagccctgaggccagcaccctgagcaccacccctgtggacagcaacagccctgtgatcaccagcacagaggtgagcagcagccccatccccacagagggcacctccatgcagaccagcacctacagcgacaggaggacccccctgacctccatgcctgtgtccaccaccgtggtggccagcagcgccatcagcaccctgagcaccacccctgtggacaccagcacccctgtgaccaacagcacagaggcccggagcagccccaccaccagcgagggcacctccatgcccaccagcacccccagcgagggcagcacccccttcacctccatgcctgtgtccaccatgcctgtggtgaccagcgaggccagcaccctgagcgccacccctgtggacaccagcacccctgtgaccaccagcacagaggccaccagcagccccaccacagctgagggcaccagcatccccaccagcaccctgtctgagggcaccacccccctgaccagcatccctgtgagccacaccctggtggccaacagcgaggtgtccaccctgagcaccacccctgtggacagcaacacccccttcaccaccagcacagaggccagcagccccccacccacagctgagggcacctccatgcccaccagcaccagcagcgagggcaacacccccctgaccaggatgcctgtgtccaccaccatggtggccagctttgagaccagcaccctgagcaccaccccagctgacaccagcacccctgtgaccacctacagccaggccggcagcagccccaccacagcagatgacacctccatgcccaccagcacctacagcgagggcagcacccccctgacctctgtgcctgtgtccaccatgcctgtggtgagcagcgaggccagcacccacagcaccacccctgtggacaccagcacccctgtgaccaccagcacagaggccagcagcagccccaccacagctgagggcaccagcatccccaccagcccccccagcgagggcaccacccccctggcctccatgcctgtgtccaccacccctgtggtgtcctctgaggccggcaccctgagcaccacccctgtggacaccagcacccccatgaccaccagcacagaggccagcagcagccccaccacagcagaagatattgtggtgcccatcagcacagccagcgagggcagcaccctgctgaccagcatccctgtgtccaccacccctgtggccagccctgaggccagcaccctgagcaccacccctgtggacagcaacagccctgtggtgaccagcacagagatcagcagcagcgccaccagcgctgagggcacctccatgcccaccagcacctacagcgagggcagcacccccctgcgctccatgcctgtgtccaccaagcccctggccagcagcgaggccagcaccctgagcaccacccctgtggacaccagcatccctgtgaccaccagcacagagaccagcagcagccccaccacagccaaggacacctccatgcccatcagcaccccatctgaggtgtccaccagcctgaccagcatcctggtgtccaccatgcctgtggccagcagcgaggccagcaccctgagcaccacccctgtggacaccaggaccctggtgaccaccagcacaggcaccagcagcagccccaccacagctgagggcagctccatgcccaccagcaccccaggagagaggagcacccccctgaccaacatcctggtgtccaccaccctgctggccaacagcgaggccagcaccctgagcaccacccctgtggacaccagcacccctgtgaccaccagcgctgaggccagcagcagccccaccacagctgagggcacctccatgaggatcagcacccccagtgatggcagcacccccctgaccagcatcctggtgtccaccctgcctgtggccagcagcgaggccagcacagtgtccaccacagctgtggacaccagcatccctgtgaccaccagcacagaggccagcagcagccccaccacagctgaggtgacctccatgcccaccagcacccccagcgagaccagcacccccctgacctccatgcctgtgaaccacacccctgtggccagcagcgaggccggcaccctgagcaccacccctgtggacaccagcacccctgtgaccaccagcaccaaggccagcagcagccccaccacagctgagggcatcgtggtgcccatcagcacagccagcgagggcagcaccctgctgaccagcatccctgtgtccaccacccctgtggccagcagcgaggccagcaccctgagcaccacccctgtggacaccagcatccctgtgaccaccagcacagagggcagcagcagccccaccacagctgagggcacctccatgcccatcagcacccccagcgaggtgtccacccccctgaccagcatcctggtgtccacagtgcctgtggccggcagcgaggccagcaccctgagcaccacccctgtggacaccaggacccctgtgaccaccagcgctgaggccagcagcagccccaccacagctgagggcacctccatgcccatcagcaccccaggagagaggaggacccccctgacctccatgtctgtgtccaccatgcctgtggccagcagcgaggccagcaccctgagcaggaccccagctgacaccagcacccctgtgaccaccagcacagaggccagcagcagccccaccacagctgagggcaccggcatccccatcagcacccccagcgagggcagcacccccctgaccagcatccctgtgtccaccacccctgtggccatccctgaggccagcaccctgagcaccacccctgtggacagcaacagccctgtggtgaccagcacagaggtgagcagcagccccaccccagctgagggcacctccatgcccatcagcacctacagcgagggcagcacccccctgactggagtgcctgtgtccaccacccctgtgaccagcagcgccatcagcaccctgagcaccacccctgtggacaccagcacccctgtgaccaccagcacagaggcccacagcagccccaccaccagcgagggcacctccatgcccaccagcacccccagcgagggcagcacccccctgacctacatgcctgtgtccaccatgctggtggtgtcctctgaggacagcaccctgagcgccacccctgtggacaccagcacccctgtgaccaccagcacagaggccaccagcagcaccacagctgagggcaccagcatccccaccagcacccccagcgagggcatgacccccctgacctctgtgcctgtgagcaacacccctgtggccagcagcgaggccagcatcctgagcaccacccctgtggacagcaacacccccctgaccaccagcacagaggccagcagcagccccccaacagctgagggcacctccatgcccaccagcaccccatctgagggcagcacccccctgacctccatgcctgtgtccaccaccaccgtggccagcagcgagaccagcaccctgagcaccaccccagctgacaccagcacccctgtgaccacctacagccaggccagcagcagcccccccatcgcagatggcacctccatgcccaccagcacctacagcgagggcagcacccccctgaccaacatgtccttcagcaccacccctgtggtgtcctctgaggccagcaccctgagcaccacccctgtggacaccagcacccctgtgaccaccagcacagaggccagcctgagccccaccacagctgagggcaccagcatccccaccagcagccccagcgagggcaccacccccctggcctccatgcctgtgtccaccacccctgtggtgagcagcgaggtgaacaccctgagcaccacccctgtggacagcaacaccctggtgaccaccagcacagaggccagcagcagccccaccatcgccgagggcaccagcctgcccaccagcaccaccagcgagggcagcacccccctgagcatcatgcccctgagcaccacccctgtggccagcagcgaggccagcaccctgagcaccacccctgtggacaccagcacccctgtgaccaccagcagccccaccaacagcagccccaccacagctgaggtgacctccatgcccaccagcacagctggggagggcagcacccccctgaccaacatgcctgtgtccaccacccctgtggccagcagcgaggccagcaccctgagcaccacccctgtggacagcaacacctttgtgaccagcagcagccaggccagcagcagccctgccaccctgcaggtgaccaccatgaggatgagcacccccagcgagggcagcagcagcctgaccaccatgctgctgagcagcacctacgtgaccagcagcgaggccagcacccccagcacccccagcgtggacaggagcacccctgtgaccaccagcacccagagcaacagcacccccaccccacctgaggtgatcaccctgcccatgagcaccccatctgaggtgtccacccccctgaccatcatgcctgtgtccaccacctctgtgaccatcagcgaggccggcacagccagcaccctgcctgtggacaccagcacccctgtgatcaccagcacccaggtgagcagcagccctgtgaccccagagggcaccaccatgcccatctggacccccagcgagggcagcacccccctgaccaccatgcctgtgtccaccaccagggtgaccagcagcgagggcagcaccctgagcacccccagcgtggtgaccagcacccctgtgaccaccagcacagaggccatcagcagcagcgccaccctggacagcaccaccatgtctgtgtccatgcccatggagatcagcaccctgggcaccaccatcctggtgtccaccacccctgtgacccgcttccctgagagcagcacccccagcatccccagcgtgtacacctccatgtccatgaccacagccagcgagggcagcagcagccccaccaccctggagggcaccaccaccatgcccatgagcaccaccagcgagaggagcaccctgctgaccaccgtgctgatcagccccatctctgtgatgagccccagcgaggccagcaccctgagcaccccacctggggacaccagcacccccctgctgaccagcaccaaggccggcagcttcagcatcccagctgaggtgaccaccatccgcatcagcatcaccagcgagaggagcacccccctgaccaccctgctggtgtccaccaccctgcccaccagcttccctggggccagcatcgccagcaccccacccctggacaccagcaccaccttcacccccagcacagacacagccagcacccccaccatccctgtggccaccaccatctctgtgtctgtcatcacagagggcagcaccccaggcaccaccatcttcatccccagcacccctgtgaccagcagcacagcagatgtgtttcctgccaccaccggggctgtgtccacccctgtgatcaccagcacagagctgaacacccccagcaccagcagcagcagcaccaccaccagcttcagcaccaccaaggagttcaccaccccagccatgaccacagctgcccccctgacctacgtgaccatgagcacagcccccagcacccccaggaccaccagccggggctgcaccaccagcgccagcaccctgagcgccaccagcaccccccacaccagcacctctgtgaccaccaggcctgtgacccccagcagcgagagcagccggcccagcaccatcaccagccacaccatcccccccaccttccccccagcccacagcagcaccccacccaccaccagcgccagcagcaccaccgtgaaccctgaggccgtgaccaccatgaccaccaggaccaagcccagcaccaggaccaccagcttccccaccgtgaccaccacagctgtgcccaccaacaccaccatcaagagcaaccccaccagcacccccaccgtgcccaggaccaccacctgctttggagatggctgccagaacacagccagccgctgcaagaatggaggcacctgggatggcctgaagtgccagtgccccaacctgtactatggagagctgtgtgaggaggtggtgagcagcattgacatcggccccccagagaccatcagcgcccagatggagctgactgtgacagtgacctctgtgaagttcacagaggagctgaagaaccacagcagccaggagttccaggagttcaagcagaccttcacagagcagatgaacatcgtgtacagcggcatcccagaatatgtgggcgtgaacatcaccaagctgcggctgggctctgtggtggtggagcatgatgtgctgctgcggaccaagtacaccccagagtacaagacagtgctggacaatgccacagaggtggtgaaggagaagatcaccaaggtgaccacccagcagatcatgatcaatgacatctgcagcgacatgatgtgcttcaacaccaccggcacccaggtgcagaacatcaccgtgacccagtatgaccctgaggaggactgcaggaagatggccaaggagtatggagactactttgtggtggagtacagagaccagaagccctactgcatcagcccctgtgagcccggcttctctgtgtccaagaactgcaacctgggcaagtgccagatgagcctgagcggcccccagtgcctgtgtgtgaccacagagacccactggtacagcggggagacctgcaaccagggcacccagaagagcctggtgtatggcctggtgggcgccggcgtggtgctgatgctgatcatcctggtggccctgctgatgctggtgttccgcagcaagcgggaggtgaagaggcagaagtaccgcctgagccagctgtacaagtggcaggaggaggacagcggccctgcccctggcaccttccagaacatcggctttgacatctgccaggatgatgacagcatccacctggagagcatctacagcaacttccagcccagcctgcggcacattgatcctgagaccaagatccgcatccagaggccccaggtgatgaccaccagcttctag

SEQ ID NO: 32582 - DNA, 14241 bp, Artificial Sequence
  derived and/or modified sequence
tctgaggctcatttcgccagctcctctgggggtgacaggcaagtgagacgtgctcagagctccgatgccaaggccagggaccatggcgctgtgtctgctgaccttggtcctctcgctcttgcccccacaagctgctgcagaacaggacctcagtgtgaacagggctgtgtgggatggaggagggtgcatctcccaaggggacgtcttgaaccgtcagtgccagcagctgtctcagcacgttaggacaggttctgcggcaaacaccgccacaggtacaacatctacaaatgtcgtggagccaagaatgtatttgagttgcagcaccaaccctgagatgacctcgattgagtccagtgtgacttcagacactcctggtgtctccagtaccaggatgacaccaacagaatccagaacaacttcagaatctaccagtgacagcaccacacttttccccagttctactgaagacacttcatctcctacaactcctgaaggcaccgacgtgcccatgtcaacaccaagtgaagaaagcatttcatcaacaatggcttttgtcagcactgcacctcttcccagttttgaggcctacacatctttaacatataaggttgatatgagcacacctctgaccacttctactcaggcaagttcatctcctactactcctgaaagcaccaccatacccaaatcaactaacagtgaaggaagcactccattaacaagtatgcctgccagcaccatgaaggtggccagttcagaggctatcacccttttgacaactcctgttgaaatcagcacacctgtgaccatttctgctcaagccagttcatctcctacaactgctgaaggtcccagcctgtcaaactcagctcctagtggaggaagcactccattaacaagaatgcctctcagcgtgatgctggtggtcagttctgaggctagcaccctttcaacaactcctgctgccaccaacattcctgtgatcacttctactgaagccagttcatctcctacaacggctgaaggcaccagcataccaacctcaacttatactgaaggaagcactccattaacaagtacgcctgccagcaccatgccggttgccacttctgaaatgagcacactttcaataactcctgttgacaccagcacacttgtgaccacttctactgaacccagttcacttcctacaactgctgaagctaccagcatgctaacctcaactcttagtgaaggaagcactccattaacaaatatgcctgtcagcaccatattggtggccagttctgaggctagcaccacttcaacaattcctgttgactccaaaacttttgtgaccactgctagtgaagccagctcatctcccacaactgctgaagataccagcattgcaacctcaactcctagtgaaggaagcactccattaacaagtatgcctgtcagcaccactccagtggccagttctgaggctagcaacctttcaacaactcctgttgactccaaaactcaggtgaccacttctactgaagccagttcatctcctccaactgctgaagttaacagcatgccaacctcaactcctagtgaaggaagcactccattaacaagtatgtctgtcagcaccatgccggtggccagttctgaggctagcaccctttcaacaactcctgttgacaccagcacacctgtgaccacttctagtgaagccagttcatcttctacaactcctgaaggtaccagcataccaacctcaactcctagtgaaggaagcactccattaacaaacatgcctgtcagcaccaggctggtggtcagttctgaggctagcaccacttcaacaactcctgctgactccaacacttttgtgaccacttctagtgaagctagttcatcttctacaactgctgaaggtaccagcatgccaacctcaacttacagtgaaagaggcactacaataacaagtatgtctgtcagcaccacactggtggccagttctgaggctagcaccctttcaacaactcctgttgactccaacactcctgtgaccacttcaactgaagccacttcatcttctacaactgcggaaggtaccagcatgccaacctcaacttatactgaaggaagcactccattaacaagtatgcctgtcaacaccacactggtggccagttctgaggctagcaccctttcaacaactcctgttgacaccagcacacctgtgaccacttcaactgaagccagttcctctcctacaactgctgatggtgccagtatgccaacctcaactcctagtgaaggaagcactccattaacaagtatgcctgtcagcaaaacgctgttgaccagttctgaggctagcaccctttcaacaactcctcttgacacaagcacacatatcaccacttctactgaagccagttgctctcctacaaccactgaaggtaccagcatgccaatctcaactcctagtgaaggaagtcctttattaacaagtatacctgtcagcatcacaccggtgaccagtcctgaggctagcaccctttcaacaactcctgttgactccaacagtcctgtgaccacttctactgaagtcagttcatctcctacacctgctgaaggtaccagcatgccaacctcaacttatagtgaaggaagaactcctttaacaagtatgcctgtcagcaccacactggtggccacttctgcaatcagcaccctttcaacaactcctgttgacaccagcacacctgtgaccaattctactgaagcccgttcgtctcctacaacttctgaaggtaccagcatgccaacctcaactcctggggaaggaagcactccattaacaagtatgcctgacagcaccacgccggtagtcagttctgaggctagaacactttcagcaactcctgttgacaccagcacacctgtgaccacttctactgaagccacttcatctcctacaactgctgaaggtaccagcataccaacctcgactcctagtgaaggaacgactccattaacaagcacacctgtcagccacacgctggtggccaattctgaggctagcaccctttcaacaactcctgttgactccaacactcctttgaccacttctactgaagccagttcacctcctcccactgctgaaggtaccagcatgccaacctcaactcctagtgaaggaagcactccattaacacgtatgcctgtcagcaccacaatggtggccagttctgaaacgagcacactttcaacaactcctgctgacaccagcacacctgtgaccacttattctcaagccagttcatcttctacaactgctgacggtaccagcatgccaacctcaacttatagtgaaggaagcactccactaacaagtgtgcctgtcagcaccaggctggtggtcagttctgaggctagcaccctttccacaactcctgtcgacaccagcatacctgtcaccacttctactgaagccagttcatctcctacaactgctgaaggtaccagcataccaacctcacctcccagtgaaggaaccactccgttagcaagtatgcctgtcagcaccacgctggtggtcagttctgaggctaacaccctttcaacaactcctgtggactccaaaactcaggtggccacttctactgaagccagttcacctcctccaactgctgaagttaccagcatgccaacctcaactcctggagaaagaagcactccattaacaagtatgcctgtcagacacacgccagtggccagttctgaggctagcaccctttcaacatctcccgttgacaccagcacacctgtgaccacttctgctgaaaccagttcctctcctacaaccgctgaaggtaccagcttgccaacctcaactactagtgaaggaagtactctattaacaagtatacctgtcagcaccacgctggtgaccagtcctgaggctagcacccttttaacaactcctgttgacactaaaggtcctgtggtcacttctaatgaagtcagttcatctcctacacctgctgaaggtaccagcatgccaacctcaacttatagtgaaggaagaactcctttaacaagtatacctgtcaacaccacactggtggccagttctgcaatcagcatcctttcaacaactcctgttgacaacagcacacctgtgaccacttctactgaagcctgttcatctcctacaacttctgaaggtaccagcatgccaaactcaaatcctagtgaaggaaccactccgttaacaagtatacctgtcagcaccacgccggtagtcagttctgaggctagcaccctttcagcaactcctgttgacaccagcacccctgggaccacttctgctgaagccacttcatctcctacaactgctgaaggtatcagcataccaacctcaactcctagtgaaggaaagactccattaaaaagtatacctgtcagcaacacgccggtggccaattctgaggctagcaccctttcaacaactcctgttgactctaacagtcctgtggtcacttctacagcagtcagttcatctcctacacctgctgaaggtaccagcatagcaatctcaacgcctagtgaaggaagcactgcattaacaagtatacctgtcagcaccacaacagtggccagttctgaaatcaacagcctttcaacaactcctgctgtcaccagcacacctgtgaccacttattctcaagccagttcatctcctacaactgctgacggtaccagcatgcaaacctcaacttatagtgaaggaagcactccactaacaagtttgcctgtcagcaccatgctggtggtcagttctgaggctaacaccctttcaacaacccctattgactccaaaactcaggtgaccgcttctactgaagccagttcatctacaaccgctgaaggtagcagcatgacaatctcaactcctagtgaaggaagtcctctattaacaagtatacctgtcagcaccacgccggtggccagtcctgaggctagcaccctttcaacaactcctgttgactccaacagtcctgtgatcacttctactgaagtcagttcatctcctacacctgctgaaggtaccagcatgccaacctcaacttatactgaaggaagaactcctttaacaagtataactgtcagaacaacaccggtggccagctctgcaatcagcaccctttcaacaactcccgttgacaacagcacacctgtgaccacttctactgaagcccgttcatctcctacaacttctgaaggtaccagcatgccaaactcaactcctagtgaaggaaccactccattaacaagtatacctgtcagcaccacgccggtactcagttctgaggctagcaccctttcagcaactcctattgacaccagcacccctgtgaccacttctactgaagccacttcgtctcctacaactgctgaaggtaccagcataccaacctcgactcttagtgaaggaatgactccattaacaagcacacctgtcagccacacgctggtggccaattctgaggctagcaccctttcaacaactcctgttgactctaacagtcctgtggtcacttctacagcagtcagttcatctcctacacctgctgaaggtaccagcatagcaacctcaacgcctagtgaaggaagcactgcattaacaagtatacctgtcagcaccacaacagtggccagttctgaaaccaacaccctttcaacaactcccgctgtcaccagcacacctgtgaccacttatgctcaagtcagttcatctcctacaactgctgacggtagcagcatgccaacctcaactcctagggaaggaaggcctccattaacaagtatacctgtcagcaccacaacagtggccagttctgaaatcaacaccctttcaacaactcttgctgacaccaggacacctgtgaccacttattctcaagccagttcatctcctacaactgctgatggtaccagcatgccaaccccagcttatagtgaaggaagcactccactaacaagtatgcctctcagcaccacgctggtggtcagttctgaggctagcactctttccacaactcctgttgacaccagcactcctgccaccacttctactgaaggcagttcatctcctacaactgcaggaggtaccagcatacaaacctcaactcctagtgaacggaccactccattagcaggtatgcctgtcagcactacgcttgtggtcagttctgagggtaacaccctttcaacaactcctgttgactccaaaactcaggtgaccaattctactgaagccagttcatctgcaaccgctgaaggtagcagcatgacaatctcagctcctagtgaaggaagtcctctactaacaagtatacctctcagcaccacgccggtggccagtcctgaggctagcaccctttcaacaactcctgttgactccaacagtcctgtgatcacttctactgaagtcagttcatctcctatacctactgaaggtaccagcatgcaaacctcaacttatagtgacagaagaactcctttaacaagtatgcctgtcagcaccacagtggtggccagttctgcaatcagcaccctttcaacaactcctgttgacaccagcacacctgtgaccaattctactgaagcccgttcatctcctacaacttctgaaggtaccagcatgccaacctcaactcctagtgaaggaagcactccattcacaagtatgcctgtcagcaccatgccggtagttacttctgaggctagcaccctttcagcaactcctgttgacaccagcacacctgtgaccacttctactgaagccacttcatctcctacaactgctgaaggtaccagcataccaacttcaactcttagtgaaggaacgactccattaacaagtatacctgtcagccacacgctggtggccaattctgaggttagcaccctttcaacaactcctgttgactccaacactcctttcactacttctactgaagccagttcacctcctcccactgctgaaggtaccagcatgccaacctcaacttctagtgaaggaaacactccattaacacgtatgcctgtcagcaccacaatggtggccagttttgaaacaagcacactttctacaactcctgctgacaccagcacacctgtgactacttattctcaagccggttcatctcctacaactgctgacgatactagcatgccaacctcaacttatagtgaaggaagcactccactaacaagtgtgcctgtcagcaccatgccggtggtcagttctgaggctagcacccattccacaactcctgttgacaccagcacacctgtcaccacttctactgaagccagttcatctcctacaactgctgaaggtaccagcataccaacctcacctcctagtgaaggaaccactccgttagcaagtatgcctgtcagcaccacgccggtggtcagttctgaggctggcaccctttccacaactcctgttgacaccagcacacctatgaccacttctactgaagccagttcatctcctacaactgctgaagatatcgtcgtgccaatctcaactgctagtgaaggaagtactctattaacaagtatacctgtcagcaccacgccagtggccagtcctgaggctagcaccctttcaacaactcctgttgactccaacagtcctgtggtcacttctactgaaatcagttcatctgctacatccgctgaaggtaccagcatgcctacctcaacttatagtgaaggaagcactccattaagaagtatgcctgtcagcaccaagccgttggccagttctgaggctagcactctttcaacaactcctgttgacaccagcatacctgtcaccacttctactgaaaccagttcatctcctacaactgcaaaagataccagcatgccaatctcaactcctagtgaagtaagtacttcattaacaagtatacttgtcagcaccatgccagtggccagttctgaggctagcaccctttcaacaactcctgttgacaccaggacacttgtgaccacttccactggaaccagttcatctcctacaactgctgaaggtagcagcatgccaacctcaactcctggtgaaagaagcactccattaacaaatatacttgtcagcaccacgctgttggccaattctgaggctagcaccctttcaacaactcctgttgacaccagcacacctgtcaccacttctgctgaagccagttcttctcctacaactgctgaaggtaccagcatgcgaatctcaactcctagtgatggaagtactccattaacaagtatacttgtcagcaccctgccagtggccagttctgaggctagcaccgtttcaacaactgctgttgacaccagcatacctgtcaccacttctactgaagccagttcctctcctacaactgctgaagttaccagcatgccaacctcaactcctagtgaaacaagtactccattaactagtatgcctgtcaaccacacgccagtggccagttctgaggctggcaccctttcaacaactcctgttgacaccagcacacctgtgaccacttctactaaagccagttcatctcctacaactgctgaaggtatcgtcgtgccaatctcaactgctagtgaaggaagtactctattaacaagtatacctgtcagcaccacgccggtggccagttctgaggctagcaccctttcaacaactcctgttgataccagcatacctgtcaccacttctactgaaggcagttcttctcctacaactgctgaaggtaccagcatgccaatctcaactcctagtgaagtaagtactccattaacaagtatacttgtcagcaccgtgccagtggccggttctgaggctagcaccctttcaacaactcctgttgacaccaggacacctgtcaccacttctgctgaagctagttcttctcctacaactgctgaaggtaccagcatgccaatctcaactcctggcgaaagaagaactccattaacaagtatgtctgtcagcaccatgccggtggccagttctgaggctagcaccctttcaagaactcctgctgacaccagcacacctgtgaccacttctactgaagccagttcctctcctacaactgctgaaggtaccggcataccaatctcaactcctagtgaaggaagtactccattaacaagtatacctgtcagcaccacgccagtggccattcctgaggctagcaccctttcaacaactcctgttgactccaacagtcctgtggtcacttctactgaagtcagttcatctcctacacctgctgaaggtaccagcatgccaatctcaacttatagtgaaggaagcactccattaacaggtgtgcctgtcagcaccacaccggtgaccagttctgcaatcagcaccctttcaacaactcctgttgacaccagcacacctgtgaccacttctactgaagcccattcatctcctacaacttctgaaggtaccagcatgccaacctcaactcctagtgaaggaagtactccattaacatatatgcctgtcagcaccatgctggtagtcagttctgaggatagcaccctttcagcaactcctgttgacaccagcacacctgtgaccacttctactgaagccacttcatctacaactgctgaaggtaccagcattccaacctcaactcctagtgaaggaatgactccattaactagtgtacctgtcagcaacacgccggtggccagttctgaggctagcatcctttcaacaactcctgttgactccaacactcctttgaccacttctactgaagccagttcatctcctcccactgctgaaggtaccagcatgccaacctcaactcctagtgaaggaagcactccattaacaagtatgcctgtcagcaccacaacggtggccagttctgaaacgagcaccctttcaacaactcctgctgacaccagcacacctgtgaccacttattctcaagccagttcatctcctccaattgctgacggtactagcatgccaacctcaacttatagtgaaggaagcactccactaacaaatatgtctttcagcaccacgccagtggtcagttctgaggctagcaccctttccacaactcctgttgacaccagcacacctgtcaccacttctactgaagccagtttatctcctacaactgctgaaggtaccagcataccaacctcaagtcctagtgaaggaaccactccattagcaagtatgcctgtcagcaccacgccggtggtcagttctgaggttaacaccctttcaacaactcctgtggactccaacactctggtgaccacttctactgaagccagttcatctcctacaatcgctgaaggtaccagcttgccaacctcaactactagtgaaggaagcactccattatcaattatgcctctcagtaccacgccggtggccagttctgaggctagcaccctttcaacaactcctgttgacaccagcacacctgtgaccacttcttctccaaccaattcatctcctacaactgctgaagttaccagcatgccaacatcaactgctggtgaaggaagcactccattaacaaatatgcctgtcagcaccacaccggtggccagttctgaggctagcaccctttcaacaactcctgttgactccaacacttttgttaccagttctagtcaagccagttcatctccagcaactcttcaggtcaccactatgcgtatgtctactccaagtgaaggaagctcttcattaacaactatgctcctcagcagcacatatgtgaccagttctgaggctagcacaccttccactccttctgttgacagaagcacacctgtgaccacttctactcagagcaattctactcctacacctcctgaagttatcaccctgccaatgtcaactcctagtgaagtaagcactccattaaccattatgcctgtcagcaccacatcggtgaccatttctgaggctggcacagcttcaacacttcctgttgacaccagcacacctgtgatcacttctacccaagtcagttcatctcctgtgactcctgaaggtaccaccatgccaatctggacgcctagtgaaggaagcactccattaacaactatgcctgtcagcaccacacgtgtgaccagctctgagggtagcaccctttcaacaccttctgttgtcaccagcacacctgtgaccacttctactgaagccatttcatcttctgcaactcttgacagcaccaccatgtctgtgtcaatgcccatggaaataagcacccttgggaccactattcttgtcagtaccacacctgttacgaggtttcctgagagtagcaccccttccataccatctgtttacaccagcatgtctatgaccactgcctctgaaggcagttcatctcctacaactcttgaaggcaccaccaccatgcctatgtcaactacgagtgaaagaagcactttattgacaactgtcctcatcagccctatatctgtgatgagtccttctgaggccagcacactttcaacacctcctggtgataccagcacacctttgctcacctctaccaaagccggttcattctccatacctgctgaagtcactaccatacgtatttcaattaccagtgaaagaagcactccattaacaactctccttgtcagcaccacacttccaactagctttcctggggccagcatagcttcgacacctcctcttgacacaagcacaacttttaccccttctactgacactgcctcaactcccacaattcctgtagccaccaccatatctgtatcagtgatcacagaaggaagcacacctgggacaaccatttttattcccagcactcctgtcaccagttctactgctgatgtctttcctgcaacaactggtgctgtatctacccctgtgataacttccactgaactaaacacaccatcaacctccagtagtagtaccaccacatctttttcaactactaaggaatttacaacacccgcaatgactactgcagctcccctcacatatgtgaccatgtctactgcccccagcacacccagaacaaccagcagaggctgcactacttctgcatcaacgctttctgcaaccagtacacctcacacctctacttctgtcaccacccgtcctgtgaccccttcatcagaatccagcaggccgtcaacaattacttctcacaccatcccacctacatttcctcctgctcactccagtacacctccaacaacctctgcctcctccacgactgtgaaccctgaggctgtcaccaccatgaccaccaggacaaaacccagcacacggaccacttccttccccacggtgaccaccaccgctgtccccacgaatactacaattaagagcaaccccacctcaactcctactgtgccaagaaccacaacatgctttggagatgggtgccagaatacggcctctcgctgcaagaatggaggcacctgggatgggctcaagtgccagtgtcccaacctctattatggggagttgtgtgaggaggtggtcagcagcattgacatagggccaccggagactatctctgcccaaatggaactgactgtgacagtgaccagtgtgaagttcaccgaagagctaaaaaaccactcttcccaggaattccaggagttcaaacagacattcacggaacagatgaatattgtgtattccgggatccctgagtatgtcggggtgaacatcacaaagctacgtcttggcagtgtggtggtggagcatgacgtcctcctaagaaccaagtacacaccagaatacaagacagtattggacaatgccaccgaagtagtgaaagagaaaatcacaaaagtgaccacacagcaaataatgattaatgatatttgctcagacatgatgtgtttcaacaccactggcacccaagtgcaaaacattacggtgacccagtacgaccctgaagaggactgccggaagatggccaaggaatatggagactacttcgtagtggagtaccgggaccagaagccatactgcatcagcccctgtgagcctggcttcagtgtctccaagaactgtaacctcggcaagtgccagatgtctctaagtggacctcagtgcctctgcgtgaccacggaaactcactggtacagtggggagacctgtaaccagggcacccagaagagtctggtgtacggcctcgtgggggcaggggtcgtgctgatgctgatcatcctggtagctctcctgatgctcgttttccgctccaagagagaggtgaaacggcaaaagtacagattgtctcagttatacaagtggcaagaagaggacagtggaccagctcctgggaccttccaaaacattggctttgacatctgccaagatgatgattccatccacctggagtccatctatagtaatttccagccctccttgagacacatagaccctgaaacaaagatccgaattcagaggcctcaggtaatgacgacatcattttaaggcatggagctgagaagtctgggagtgaggagatcccagtccggctaagcttggtggagcattttcccattgagagccttccatgggaactcaatgttcccattgtaagtacaggaaacaagccctgtacttaccaaggagaaagaggagagacagcagtgctgggagattctcaaatagaaacccgtggacgctccaatgggcttgtcatgatatcaggctaggctttcctgctcatttttcaaagacgctccagatttgagggtactctgactgcaacatctttcaccccattgatcgccaggattgatttggttgatctggctgagcaggcgggtgtccccgtcctccctcactgccccatatgtgtccctcctaaagctgcatgctcagttgaagaggacgagaggacgaccttctctgatagaggaggaccacgcttcagtcaaaggcatacaagtatctatctggacttccctgctagcacttccaaacaagctcagagatgttcctcccctcatctgcccgggttcagtaccatggacagcgccctcgacccgctgtttacaaccatgaccccttggacactggactgcatgcactttacatatcacaaaatgctctcataagaattattgcataccatcttcatgaaaaacacctgtatttaaatatagagcatttaccttttggta

SEQ ID NO: 32583 - DNA, 13482 bp, Artificial Sequence
  derived and/or modified sequence
atgccccggcccggcaccatggccctgtgcctgctgaccctggtgctgtcccttctccccccccaggccgccgctgagcaagacttaagcgtgaatagggctgtatgggatggaggaggctgcataagtcagggggatgtcttgaaccgccaatgtcagcagctgtcgcagcatgtgaggacagggagcgccgcgaataccgctacgggtaccactagcacaaacgtggtcgaaccacggatgtacctgagttgtagcaccaatcctgaaatgacatccatcgaatcgtctgtgacaagcgatactcccggggtctcctccacccgcatgactccaaccgagtcccggaccacgagcgaaagtacctctgattcaacgactttattcccctcgagtactgaagacaccagctcaccaaccacaccagaaggcacagatgtcccgatgagcactccgtcagaagaatctatcagctccaccatggcttttgtgtctaccgcgccactgccctcatttgaagcctacacatccttgacatataaagtagatatgtcgacacctttaaccaccagtacccaagctagctcttcccctaccacccctgagagtacaactattcccaaatcaacaaattccgagggatcaacccccttgacatccatgccagcatctactatgaaagtagccagtagcgaagctattaccttgctgactacacctgtggaaatctccacgccagttactatctcagcccaggcgagtagctctccaaccaccgcggagggcccaagcctatccaattctgcgccttcaggagggagtactcctctcaccagaatgcctttatctgttatgctcgtcgttagtagtgaggcctccacactgtccaccacgccagcagccactaatattcctgtaatcacctcgactgaagcttcttcctcgcccaccacagcagaaggaacatccatacctacatcaacctatactgagggcagcacccccttgacgtccaccccagcatcaactatgccagtggccacatctgagatgagtactctatccattacccctgtggacacatccactctcgtaacgacttcgaccgaaccctcatcactgcctaccactgccgaagcaaccagcatgctgacgtctactctgtctgagggctctacacctctgacaaacatgcctgtgagtaccatacttgtggctagcagtgaagcaagcacaacaagcactatacctgtcgattctaagacctttgttactacagctagtgaggcatcttcctccccaacgacagccgaagacacctccatcgcgacttccacccctagcgaaggctctaccccgctgaccagcatgccagtgtcgacaacccctgtggcttctagcgaggcttctaacctctctacgacgcccgtcgattccaagacccaggtgactacttctacagaggcctcgtcgtctcctcccaccgctgaagtgaattctatgcccacgagcactccctcagaaggaagcactccccttacatcaatgagtgtatccaccatgcccgttgctagttccgaagctagcaccctatcgacaacacctgtcgacactagcacccctgtcactaccagctctgaggcaagcagctcttccacaacaccagaagggacatctattcctacctcaaccccatccgagggaagcacacccttaacaaatatgcccgtctccacccgattagtggtgtctagcgaggcttccaccacctctacgactcccgctgattccaatacctttgtaactacatctagcgaggctagcagctctagtacaaccgccgagggaacctccatgcctacaagtacatattcggaacggggtaccacaatcacgagcatgtccgtaagtacgacactggtggccagttctgaagcaagtactctttcaaccacccctgtggactccaataccccagtaactactagcaccgaggccacttcaagcagcaccactgctgaagggacgagtatgccgacatctacctatacagagggcagcacacccttgacaagcatgcctgtcaacacaacacttgtcgcaagctctgaggcctcaacattgagtacgactcctgttgacactagcactccagtgaccacttctacggaggctagctctagccccactactgccgatggagcctctatgccaacgtctacaccttctgaagggtctaccccattgacttccatgcctgtgtcaaaaaccctgctcacttcaagcgaggcgtcaactttgtctactactcccctggacacttccactcacattactaccagtacggaggcatcctgttcccccactaccacagagggtacttctatgccaatttccacacccagcgagggctcgccactgctgaccagcataccggtcagcattactccagtgactagtccggaggcttctacgctgagcacaactcctgtcgactccaacagcccggtaacaaccagcactgaagtgagctcctctccaaccccggccgaagggacctccatgcccacaagcacatatagcgagggcaggacccccctcacttccatgcccgtctccactacactcgtcgctacttctgctatctccaccctcagcaccacccctgtcgacacctccacaccagtgactaattcaacagaagctcgcagcagccctaccactagtgaggggacatccatgcctacctctacccctggggagggctctacgccccttacctctatgcctgacagtacaacccccgtggtgtcttctgaggccaggactctgtcggctaccccagtggatacatctacgccggttaccactagcaccgaggccacaagttctcctactacagcagagggtacaagtataccaacctctaccccttcagagggaactactcctttgacgtcaacccccgttagtcacactctggtggcaaattctgaagcatcaaccctgagcactacacccgtggatagcaatacccctctcacgacatccacagaggcgtcttctccgccacctactgctgagggaacttctatgcctacatcaaccccctctgagggatccacacctctgacccgcatgcccgtttctaccaccatggtcgcttcctctgaaacatccaccttgagtaccacccccgcggacacgagcacccctgtgacgacatactcacaagcctcttcaagttccaccaccgctgacggtacctctatgcccacttccacctactccgagggatccactcccttgacatcggttcctgtgtctaccagactcgtagtgtcttcagaggcctcaacacttagcaccaccccagtcgacacttcgatacctgtgacaaccagcactgaggcttccagctccccaaccaccgctgagggaacttccatcccgacaagccctccatctgaaggcaccacccctttggcctctatgccggtctctaccacccttgtggtgagttctgaagctaacactctgtctaccactcccgtggactcaaaaacccaggtggcaacttctactgaggcttctagccctcctccaaccgccgaggtgacctcgatgcctactagcacccctggagaaaggtctacccctttgacgagcatgccagtacggcacacccccgttgcatcttctgaggccagtactctgtccacatcacccgtggatacctctaccccagtcacaacatctgccgagacatccagctctccaaccacagctgaaggaaccagcttgccaacctcgactacttccgagggcagcaccttgctcactagtattccagtaagcacaaccttggttacctccccagaagccagtacactgcttacaacacccgtagatactaaagggcctgtcgtgactagcaatgaggtaagtagctcgcccacgccagctgaggggacatctatgcccacatccacttactcagagggcagaacacccctgacgtctatccccgtcaacactacattggttgcttctagcgccatcagtatcctaagtaccacacctgtggacaacagtacccccgtgactacaagtaccgaagcttgtagctcccccacgacctcggagggcacttcaatgcctaactccaatccctccgaagggactacaccactgacttcaataccagtctctacgacgcctgtggtgtcatctgaggcatcaacactgtcggctaccccagtggacacatcaacacccggaacgactagcgccgaggcgacttctagccctaccactgctgagggaatctcgatccctacctccacgccctcagagggaaaaacacctcttaagtccatccctgtatccaatactcccgtggccaacagtgaagcatccacactatccactactccagtggactccaatagcccagttgtcactagcaccgccgtttcctcttctcctacacccgccgagggtacctccatcgcaataagtacccctagtgagggcagcactgcactgacttcaatacccgtgtcaactacaacagtggcctcttctgaaatcaacagcctgtccacaacaccagcagttacatccactcccgtaacaacctacagccaggcttcctcttcccccacaactgccgatggcacatcaatgcagaccagtacatactcggaaggtagtacaccactgacatcgttgcctgtgtccactatgttggttgtctcctccgaggctaacactctgagtaccaccccaatagactcaaaaacacaggtgaccgcttccactgaggcttcaagttcaaccaccgctgagggttccagcatgactataagtacacccagcgaaggctctcccttgttgactagcatacccgtgtcaacaactccagtggctagtcccgaagcctccaccttgagtactacccccgtggactcaaacagcccagtgatcacatccacagaagttagctcatctcccactcccgcagaaggaacatcaatgccaaccagtacttacactgagggccggaccccactaacttccattaccgtaaggactacccccgtcgcgagctctgccattagtactctaagcactactcctgtggataacagtaccccggttactactagtactgaagcaagaagtagtccaacgacctctgagggaacgtcaatgccgaactctacccctagcgagggaactactcctctgacctccatcccagtaagcacgactcctgtccttagctccgaggcgtcaacactgtctgccacaccgatcgataccagcaccccggttactactagcactgaagcaacaagttcaccaaccactgcggaaggtaccagtatcccaacatctacactgtctgaaggaatgacccctctgacttcgactcctgtttctcacacactggttgccaattccgaggcgtcaaccctgagcacaaccccggttgactctaactcacccgttgtgaccagcaccgcagtgagttctagcccaactcctgccgaaggcacatcaatcgcaactagtactccttctgaagggagcaccgcacttaccagtatccctgttagcacgaccacagtcgccagttccgagacgaacaccttgtccactactcctgctgttacaagtacccccgtgaccacatatgcccaagtgtccagcagtcccactacagctgatggatcaagcatgccaacatcaaccccaagggagggacgccccccccttacatctatccctgtcagcaccactaccgtggcgtcatcggaaatcaacactctgtccaccaccctagccgatacgagaacgccagtcaccacctatagtcaggcaagttcctcaccaacgactgccgacggaacctccatgccgacacctgcttattcagaggggtcaacccctctcacaagcatgccgctaagcactaccctcgtggttagtagtgaggcatctaccctgtcaactactccagtcgacactagcaccccagccactaccagcacagaaggaagtagcagccctacgaccgcaggcggaacctccatccagaccagcacacccagcgaacggacgactcctctggccgggatgccggtaagtactactctggttgtgtcaagcgagggtaacactttgagcaccacacccgtagactctaagacccaggttaccaattccaccgaggcatcatcctcagccaccgccgaaggctcgtctatgactatctcagcacctagcgagggctccccgctgctgacatctattcctcttagcacaacccctgtcgctagcccagaagcatctaccctgtccacaaccccggtagattctaactctcccgttattacaagtacagaagtgagctcctctcccattcctacagagggaacttctatgcagacctccacttactctgatcggcggacccctctgaccagcatgccagtttcaacaactgtggtggctagcagcgctatcagtacactgagtacaacacctgttgacaccagtaccccagtgactaacagcacagaggctagatcctctccaactacatccgaaggcaccagtatgcccacatcaactccgagcgaggggtcaacaccatttaccagtatgcctgtgtcaacaatgcccgtggtgacatctgaagccagcaccctctccgccacacccgttgatacctctaccccggtaacaacctccactgaggcaacctccagtccaacgacagctgaaggaaccagcatcccaacaagcacactatctgagggaacaacccctctgacaagtattcccgtttctcacaccttagtggcgaacagcgaggtgtccacattgtcgacaacacctgttgattctaacaccccttttacgacttcaactgaagcgagctctccgccgccaacggctgagggcacaagcatgcccacgtcaacctccagcgaaggcaataccccactgactcgtatgcctgtctccacaacgatggtcgctagctttgagacatccacattatctacaacccccgccgatacatcgacccccgttactacctattcacaggcagggtcttctcccaccacagcagatgatacttctatgccaacctccacgtatagcgaggggagcacccccctcacatccgtgccagtgtccaccatgcctgtggtgtcctccgaggccagcacccacagcactaccccggtggatacatctacccccgtcacgacttccacagaggccagctcttcgccaaccactgccgaaggcacttccatcccgacgagccccccatcagaaggcacaactcccctggcctccatgccagtgtctacaaccccagtggtctcatccgaagcaggcactcttagcacaacaccagtggatacatccacgccaatgactacttctacagaggcaagttcctcaccaaccaccgcggaggacattgtcgtgcctattagtacagcgtccgagggctctaccctgcttaccagtatcccggtttcaacaacacctgtggccagccctgaagcttccaccctttccacaacaccagttgattcaaactcacctgtcgtcacttccactgagatcagtagctccgctacctcagccgaaggtaccagcatgccaactagcacttactcagagggcagcacccctctccggtccatgccagtgtcaacaaagcctttggctagttccgaggcctccaccctgagcactactcctgttgacactagcatacccgtgaccaccagcactgagacgtcttcaagccccaccactgcaaaagacacttcaatgcctatctcaacaccctcagaggtctccactagcttaacctcgatacttgtgtccaccatgccagtggcctccagcgaagcctcgacacttagcacaacccctgtagatacaagaactttggtaaccacatccacaggcacgagctcctctcctaccactgcggaagggtctagtatgccgacctcgacccctggtgaaaggagcacccccctgaccaatatcctggtgtcgactacattgttggctaatagcgaggcaagtaccctgagcacgacaccagtcgatacatcaacgcccgtgacaacaagtgccgaggcaagctcaagcccaaccaccgccgaagggacaagtatgcggatttctactccttccgacggaagtacacccctcaccagtatcctggttagtactttgccagtagccagctccgaagcctcaacggtgagcactaccgccgtggatacttccattcctgtgaccacgagtacggaggcctcatcctcccccaccaccgctgaagtcacctcaatgcctacaagtaccccttccgaaacgtcaaccccactgacttctatgccagttaatcacacccccgtggccagcagtgaggccggcaccctaagcacaactcctgtggataccagtactccagtgaccactagcacaaaggcgagttcaagccccaccacagctgagggcatcgtggtacctatttctactgcaagtgaaggcagtaccctgctgacaagcatccctgtgagcaccacccccgttgcctcaagcgaggcatctaccctgagcaccacacctgtcgatactagtattcctgtgacaacttccactgagggaagctccagccccacaaccgccgagggaactagcatgcccatcagcacaccgtcagaggttagtacacctttgacctcaattttggtctctactgttcccgtggcaggatccgaggctagtaccctgtcaacaaccccagtcgacacccgcacccccgttactacaagtgctgaagccagctcttcccctacaactgctgagggcaccagcatgccaatcagcacaccaggcgagcgccgtactccgcttacgtctatgtctgtgtccaccatgcctgttgctagctcggaagcttccacactgagtaggacgccagcagacacgtctaccccggtaaccacaagtacagaggcttcaagcagcccaacgaccgccgagggaacagggatccccatttccactccaagtgagggatcaacaccactcacgtctatccccgtttcaaccactcctgtggctataccggaagctagcaccctttccaccactcccgttgattcaaacagtcccgtcgtaacttctacggaggtctccagttcccctactcccgccgaggggacaagcatgcccatcagtacctacagcgagggcagcacgcccttgacaggagttccagttagcaccaccccagttacaagttctgcaatctccaccctgtctaccacgcccgtggacacgtccacgcccgtgacaacgtccacagaggcgcactcctcccctactacctctgagggcacctctatgccaaccagtacaccaagtgagggcagcacaccgctgacctatatgcctgttagtactatgttggtggtgagcagcgaggattctacgctgagcgccacccccgtggacactagcactcctgttactacctccactgaggcaaccagctccaccaccgcagaagggacaagcatccctacatcaaccccaagtgagggcatgacccccttgactagtgtcccagtgagtaatactcctgtagctagctcggaagcttcgatactaagtactacacctgttgactctaacaccccacttaccacgtcaactgaggccagttccagcccgccaaccgcggagggcacctcgatgcctacttccacccccagcgaaggtagcacacctttgaccagtatgcccgtgagtacaaccacggtggcttcttccgaaacctctacgctgtccacgacacctgcagatacctctacccccgttactacctacagccaggcttcctctagcccacccatcgccgatggcacctcaatgcctacgtcaacgtatagcgagggcagcaccccactaacaaatatgagcttctccacaacccctgtggtttcttcagaggcaagtactctgtccaccactcctgtggacacctcaacccctgtcacaacgagtaccgaggcgtccctgagtcctacaacggccgagggcaccagcataccaacaagcagtccttccgaagggacaaccccgctggccagtatgcctgtctctaccaccccagtggtgtcttctgaagttaacacactgtccactacccctgtggactctaataccctggttactacctccaccgaggcatcctcaagtccaaccatcgcggaggggacctccctgcctacatccaccacttccgagggcagcacgcctctcagcattatgcccctttcaacaacacccgtggccagctccgaggcgtcaacactaagcactacacccgtggacacaagcacaccagttaccacctcatcccccaccaattcaagtcccaccaccgccgaagttacatccatgccaacttcgacggcaggtgagggaagcaccccactcaccaatatgcctgtgtccaccacaccggtggcctcatcggaggccagtacacttagtacaacccccgtggatagcaacactttcgtaacttctagcagccaagcttcttcatcccctgcaacactgcaggtgaccactatgagaatgtcaaccccatctgagggctccagctctctcactacgatgttgcttagcagtacttacgtgacttccagtgaagcctccacaccttctaccccctcagtggatagaagtacacccgtgaccacatcgacacaatcaaactccacaccaactccacctgaggtcattaccctgcccatgtcgaccccatcagaggtgtcaacgccactgacaatcatgccagttagtaccacgtcagtgacaatatctgaagctggtaccgcttccactctgccagtcgatacatctacacctgtcatcacatcaacacaagtatcttcgagccctgttactcccgaaggcactactatgcccatctggaccccctcagaaggtagtactcctctgacaaccatgcccgtgtccacgactcgagtgaccagctcggaggggagtactctcagtaccccttccgtggtaaccagtacaccagtcactacgtctacagaagctatctccagcagcgcaacgctcgactccactaccatgagcgttagtatgccaatggaaatttctaccctaggaacaacaatcctcgtctccactacccccgtgaccagattccccgaatcttcgacaccgagtatcccctcggtatatacttccatgtctatgactacagcctcagagggcagtagttcacctactacactggagggtaccactaccatgccaatgtcgaccacatccgaaagatccacacttctcactactgtactgatttcccccatatctgtgatgagcccgtctgaggccagtacattgtccacgccacctggggatactagtacccccctcctgacttccacgaaggccgggtcattctcaatccctgctgaggtaaccactattcgaatatctattacgtctgaaaggtccacccctctcaccactctgctggtgtcgactacactcccgacttcttttcctggagcttcaatagcctcaaccccccccttggatacctctaccactttcaccccatccaccgacaccgcctcgacccccaccataccggtggcaaccactatctcagtatcagttattaccgaagggtccacccccggaaccaccatatttatcccatctacacctgtcacttcatctactgcagatgtatttcctgccacgacaggtgctgtgagcacccctgttattacctcaaccgagttgaacacccctagtactagttcatcatctactacgaccagctttagcacgactaaggagttcacgacgccggcaatgaccaccgccgcccctttaacatacgttaccatgtcaaccgcgccctcaacccctagaaccacctctaggggatgtactacaagcgcttcaacactttcagcaacctctaccccacacacgagtacatccgtaactacacgcccagtcacccccagctccgaaagttccagaccgtctacaataacgagtcatactattccgcccacattccctccagcacactcaagcaccccaccaacaacttctgcaagctcgaccactgtgaaccctgaagcagtgactactatgacaactcgaaccaagccgtctacgcgaacgacaagtttcccgacagtgactacgaccgctgtccccacaaacacaactatcaagagcaaccccactagtacgcctaccgtccccagaactaccacatgtttcggagatggatgtcagaacacggccagtcgctgtaaaaacgggggcacgtgggatggtctaaagtgccagtgtcctaatctgtactatggggaactgtgtgaggaagtcgtttcttcaatcgacataggacctccagagacaattagcgcccagatggagctgaccgtgaccgtaacctcagtgaagttcacagaggaactgaaaaatcactcatctcaggaatttcaggagttcaaacaaacttttacagaacaaatgaacatagtgtattcgggcattcctgaatatgtgggcgttaacattactaaactgcgactgggaagtgtggtcgtggagcacgacgtgttgctgaggactaagtacacgcccgagtacaagaccgtgcttgacaacgctaccgaagtcgttaaggagaagattactaaagtcactacacagcagattatgataaacgacatttgttctgatatgatgtgtttcaacactactggcactcaggtccaaaatatcacagtgacacagtacgaccccgaggaagactgccgaaagatggccaaagaatacggcgattacttcgtcgttgaataccgtgaccagaaaccctactgtattagcccgtgtgaaccagggttctccgttagtaagaactgcaatctgggcaagtgccagatgagcctgtccggcccgcaatgtctctgtgttactactgagacccattggtacagtggtgaaacgtgtaaccaaggtacacagaagagcctcgtgtatggtctggttggcgctggcgtcgtcttaatgttaattatcttggtggcactgttgatgttagtctttcgctccaaaagggaagtgaaacggcaaaagtataggctgtcgcagctgtacaagtggcaggaggaagatagtggaccagcaccaggaaccttccaaaacatcgggtttgacatctgccaggatgatgactcaatccacctggagtctatttactcaaatttccagccgtccctacggcatatcgatcccgaaacaaagatcaggatacagcgaccccaggtgatgacaactagtttctag

SEQ ID NO: 32584 - DNA, 183 bp, Artificial Sequence
  derived and/or modified sequence
taaagacgtaggagtcgatctcgtgataggagacgccgacgaagtcgcagcacttcccgagaaaggaggaagctgtcacgcagtagatccagggatcgtcatcgtaggcaccgttcgagaagcagaagtcactctaggggacacaggcgagcatcacgagaccgatctgctaaatacaaatag

SEQ ID NO: 32585 - DNA, 13482 bp, Artificial Sequence
  derived and/or modified sequence
atgccccgacctgggaccatggcactttgcctactgacccttgttctttcattacttccacctcaggccgctgctgaacaggatctcagcgtgaatcgagctgtttgggatggtggaggctgtatctcacagggggatgtgctgaaccggcaatgtcaacaactgagccaacatgtccgcactggatctgctgcaaacaccgccaccgggaccacatcaactaacgttgtggaaccccgaatgtatttgtcttgtagtacaaacccagaaatgactagcatcgagtcttcggtaacttctgacaccccaggcgtttcgtccacccgtatgactccaacggagtctagaacaacatctgagtcaacgtcagatagtaccaccctgtttccctcctccacagaagatacttcatcccctaccacacccgaaggcaccgacgttccaatgtctactccctcggaagaaagtataagctctacgatggcatttgtaagtaccgcccctttaccgagctttgaggcgtacaccagcctcacttataaagtggacatgtccacccccctcacgacaagtacccaggcctctagctctccaaccactcccgagagcacgaccattcctaaatccaccaactccgagggatctacacccctgacgtccatgccagcatctacaatgaaggtcgcttctagtgaagccatcactctgctgactactcctgtggaaatctctacacctgtaacaatatccgctcaggcaagcagctcaccgactaccgccgagggccctagtctgtccaacagtgctccgtctgggggatcgacccctttgacacgaatgcccttgtcagttatgctcgtcgtttctagcgaagccagcaccctgagtacaactccagccgcaactaatattccagtgatcacctccaccgaggcttccagctcccccaccacagccgaaggcacgagcattcccacctccacctacaccgaaggttctactcctctcacctccacccctgcaagcaccatgcccgtggcaacgtcagagatgagcacccttagtattactcctgtggacacatcaacacttgtcaccacatccacagaaccaagttctttacctactacagcagaagcaaccagcatgttaacgagcaccttgagcgagggtagcacacccctcaccaatatgcccgtctcgaccatcttagtcgcctcctccgaggcatccacaacctcaacaatcccagtcgactccaaaactttcgtgactactgcatcagaggcctccagttctcccaccaccgccgaagatacaagcatcgccacaagtaccccttctgaagggtcaacccctctgaccagcatgcctgtgtctaccacaccggtcgccagtagcgaggctagtaatttatcaaccactcctgtcgattctaagactcaggtaacaactagtacagaagcctccagttcgcctcccactgctgaggtgaatagtatgcccacctctacgcccagcgagggcagcaccccacttacttctatgtctgtctcgactatgccagtcgccagctccgaagcctccactctgtccactactccggtcgatacatcaactcctgtaacaacctcgagcgaagcatcatcttcttcgaccacccccgaggggacaagtatccccacgagtactccgtctgagggatcaaccccactgaccaatatgcccgtgtccactcgcctggtcgtctcttctgaggcctcaacaactagcactacccctgctgattcaaacacgttcgttacaacatccagtgaggcctcatcaagctccactacagccgaaggcacctcaatgccaaccagcacatacagtgagcggggaaccactattacttccatgtctgtgagcactacgctggtagcctccagcgaggcatcaactctttccacaacacccgtcgactccaacacacctgtcactactagcacagaagccacctcaagctcaactaccgctgaggggacgagcatgcccacgagtacatacactgagggttctacacccttgacgagtatgcctgtaaatactacactcgttgcatcatccgaagcctcaaccctgtctaccactcctgtggatacttcaaccccagtgactacatccaccgaggccagctccagtcctacgacagctgatggtgcatccatgcccacttcaactccttcagagggctccacaccactgacttcaatgcctgtgtccaagaccctgcttacctcatccgaagcttcaacgctgtctacgactccactcgatacctctacccacatcacgacttctaccgaagcatcttgttccccaacaacaacagaagggacctccatgccgatatctacgccttccgaaggcagtcctttgcttacaagcatcccggtgtctattacgccggtcaccagcccggaggcgtctaccttaagtacaacaccggtggactccaactcacctgtcacgacatccaccgaggtgagtagcagtcctacgcctgccgagggtacatctatgccaacaagcacatacagcgaggggaggacacctctgacttccatgccagttagtaccaccctcgtggctacgtccgcaatttccacattgagcacgactcccgtggatacgtccaccccagtgactaacagcaccgaggctaggtcgagcccaaccactagtgaagggacttccatgcctacatccacgcccggagaaggatccacccctttgactagcatgccagacagtacgactccggtggtatcgagcgaggccagaaccctctccgcaacgcctgtcgatacatcgactcctgtaacaacctctacagaggcgacctccagtcccacaaccgctgaaggaacttccatccctacttctacgccgtctgaagggacaacacctttaacttctactcctgtgtcccataccctcgtggcgaattctgaggcttccaccctgagcaccactcccgtggactcaaacacaccgctcacaacaagtactgaagcttcctccccacctcctactgcggagggcacatccatgcccacatccacacccagcgaaggtagcactcccctgacccggatgcccgtcagtaccactatggtggcaagcagcgaaaccagtaccttaagtaccaccccagccgatacctcgacacccgtgaccacttacagtcaagcctcttcttctagcacaactgccgatggtactagcatgccgactagcacctactctgaaggctccactcctctgacatccgtccctgtgagcacaaggctggtcgtctcctctgaagcgagcaccctgagcacaacccccgtggatacatctatccccgtgactacaagtaccgaggccagttcttctccaacgacggctgaaggcacttcgatccccaccagtcccccttctgaggggaccacacccttggcttctatgccagtgagcacgactctcgtcgtcagttccgaggccaacacactctccactacacccgtggactccaaaacccaggtcgccacttccactgaggcttcctccccccctcctactgcagaggtgacaagcatgcctacttctactccaggcgagcgctcaactccattgaccagtatgcccgttaggcatactccagtagctagctccgaggcatctaccctgagcacatctcctgtggatacgtccactcctgtgaccactagcgcagagacttcgtcctctccaactactgccgaagggacgagcctgcctacttctactacctccgagggaagcacactcctgaccagcatccctgtctccacaactctcgtgacgagccccgaggcatccacccttttaactacaccggtggacaccaaaggaccagtggtgaccagcaatgaggtgtcttcttcacctacccccgctgagggcacctcaatgcccacctcgacttattccgagggaagaacccctctaacctcaatacccgtaaacaccaccctggtcgcctctagcgctatttcaatcctatctaccacacctgtggataacagcacgccagtgaccacttcaactgaagcttgttcttcgcccacaaccagcgaaggcaccagtatgccaaactccaatccttcagagggtactacccctctgacttcaatacccgtgagcaccacgcccgtggtgtcaagcgaggcctccactctgtccgccacccccgtggacaccagcactccaggcacgaccagcgccgaagcaacatcctcaccgactaccgcagagggaatttccattccaacttcaaccccaagcgagggtaaaaccccactgaagtctatacccgtgagcaacacccccgtcgcgaactctgaagcatcaacattgtcaaccactcctgttgattctaatagccctgttgtaaccagcactgcggtgtcctcaagtcccaccccagcggagggaacctcgatcgccattagcacaccgtctgaaggctctactgctctcacttctatccctgtctccactaccaccgtggcctcttccgagataaactcattgtcaaccactcccgcagtcacaagcactccggtgactacttattcccaagcttcatctagtccaaccaccgctgatggtaccagcatgcagacctcaacctacagtgaagggagtacccccctgacctcactccctgtgtcgactatgcttgtagtgagttccgaagctaacacgctgtccaccacaccaatcgactcaaaaacgcaggtcacggcgtcgaccgaagctagttccagtactactgccgaggggagctcaatgaccatcagcactccatcggaaggctccccattactgaccagcattcccgtgagtacaactcctgtcgccagccctgaagcgagtacacttagtacaacgcccgtggattcaaatagccctgtcataaccagcacagaggtaagctcgtctccaacacccgcagaaggcactagtatgcccacttctacctacacagaaggcagaacgcctctaacctctatcacagtccggacgacgcccgtggcctccagcgccattagcacgttatccaccactcccgttgataactccactcccgtaaccacatccaccgaagcacgatcctcacctacaacatcagaaggcacctctatgcccaatagcacacctagcgagggaactacccccttaacatcgatcccggtgtccactacgccagtgttgtcctccgaagcctcaaccttgagcgcgactcctatcgatacatctaccccggtgaccacttctaccgaggccacaagcagtcctactacagccgaaggaactagtatacctacttccacactatcagaagggatgactccgctgacatccacaccggtctcccacaccttggtagccaactctgaagcctctacgttgagtacaactcccgttgattcaaattcgccagtggtgacctccacagccgtgtcgagcagcccaacgccagcggaaggcacatccatagcgacatcaactccaagcgagggtagtacagcgcttacttcaattcctgtgagcaccacaaccgttgcatccagtgaaacgaacactttgagtaccacccctgcagttacatcaacgcccgtgacaacctacgcccaagtttcttcgagtcccactactgctgacggatcatccatgccaacatctacccccagggaagggaggccccctcttacctcgattcctgtgtccactaccactgtggctagctccgagatcaacacactctccaccactctggccgacacacggaccccggtgaccacgtacagccaggcaagctcttcgcctactacagccgatggcactagcatgccaactccagcatacagtgaaggcagtacaccactgacctcaatgccactgtctactaccctggtggtgagttcggaggcctccactctctcaactacccccgtggatactagtacaccagcgacgacgtcaacagaggggtccagctcaccgacgacagcaggtggtaccagcattcagacgtccacaccttccgaacgcactacacctttggccggtatgcctgtgtctacaacactggtggtatcttccgagggcaataccctgagtactacccctgtagacagtaaaactcaggtcactaatagtactgaggctagcagcagcgccactgccgagggatcaagtatgactatctctgccccatccgagggctcacccctgttaacatctatccccttgtctaccactcccgtggcaagtcccgaggccagcaccctctccacaacacctgtcgacagcaattcccccgtgataacatccactgaagtttccagttcccctatcccgactgaaggcacctcgatgcagaccagcacatatagcgatcgcagaacaccgctcacatctatgcctgtcagcacaaccgtggtggcctcatccgctatctctactctgtctactaccccagtggatacctctactccggtgaccaattctactgaggccagatccagccctaccacctcagagggcacatctatgccaacgtcaacccccagtgagggatccactcctttcacttctatgcctgtgtctacaatgccagtcgtcacatccgaagcctctaccctcagtgcaacccccgtcgatacaagcacccctgtcacaacttccaccgaggccacaagtagcccaacaacagccgaggggacttcgatccccaccagcacactgtctgaaggaacaacaccgctgacctccatccctgtgagccataccctggtcgctaacagcgaggtatctaccctcagcactacacccgtggactccaatacaccatttacgacatccacagaggcatcatctcccccaccaacagctgaagggacctctatgcccacgtcaacttcctccgagggtaacaccccattaactagaatgcctgtttccaccaccatggtagcttcctttgagacgagcaccctgtccactacacccgcagacactagtacaccagtcactacttactcacaagccggttcctcacccaccactgcagacgacacaagcatgccaacatccacatactccgagggttcgactcctctgacctcagtaccagtgtccacgatgcctgtcgtgagcagcgaagcgtcgacacatagcaccacgccggtagatacttcaacaccagtgacaactagcacagaagcaagcagctccccaaccaccgccgaaggaacttctatccctacaagccccccttcagagggtactacgccgctggcgtccatgcctgtgtcgaccactcccgtcgtctcttccgaggccggaacactgagcacaacaccagtggatacatcaacccccatgacaacatcaacggaagcatcgagcagccccactactgctgaggacatcgtggtgccaatcagtacagcgtcagaaggcagtactctccttacttcaatcccagtgtcaacaaccccagtcgcttcacccgaggctagtacactgtccaccacgcctgtggactcaaatagtccagtagtcacctctactgagattagttccagcgccaccagtgcggaaggaacatcaatgcccacctctacttatagcgaaggcagcaccccgctgaggtcaatgccagtaagcacaaagccacttgcttcttccgaggcatctacactgagtactaccccggtcgatacatcaatcccagtgacaacaagcaccgaaacatcctcatcccctactaccgctaaagatacttctatgccaatctccacgccctctgaagtctctacttctctgacctctatcctggtgtcaacaatgcctgtagcctcgtccgaggcctcaaccctgagcacaacgccagtcgatactcgcacccttgtgacaacctcgactggaacttcgtcatcacctacaactgccgaagggagcagcatgccgacaagcacccctggtgaaaggagcacgccactgactaatatactcgtgtccaccacactgctggccaacagtgaggcttcgactctgagcacaacgccggttgatacctccacccctgtgaccactagcgctgaggcttcttccagccccacgacagccgaaggtacaagcatgaggatcagcacaccctcagatggatctacaccactaaccagcatcttggttagcactctgccagttgcatctagcgaggcttctaccgtcagcacaactgcagtcgacactagtattcccgtgactacatcaacggaggcctcttcatctccgaccacggcagaggtgaccagtatgccgacttccacaccgagtgaaacctccacccctctcacaagcatgcctgtgaaccacacacccgtggcctcctccgaggccggaacactgtcaaccactcctgtcgatacatcaaccccagtcaccacttctaccaaggctagctcttcccctaccaccgctgagggcatcgtcgtccctatatccaccgcttcagagggatctactcttctcacatccattcctgtgagtactacacccgttgcctcaagcgaggcgtccacattgagtaccactccagtggataccagcattcctgtcactaccagcactgagggatcttcgtcccctacgacggctgaggggaccagcatgcccatcagcaccccctccgaggtgagcaccccgctgacctcaatcctggtctcgaccgtgcccgtggcaggttctgaggcgtcgacgctgtcaaccacccctgtggatacgaggactcccgtgacaacatctgcggaggcatcttcttcccctacaacagcggaggggacctcgatgccaatcagtacacctggcgaacggagaacaccccttacttcaatgtctgtgagtacaatgcctgtggctagttctgaagcaagcactctgtcaagaacacctgcagacacgagcacccctgtgactacctccacggaagcatctagctcaccgactactgccgaaggcacggggattcccatctctaccccatctgagggttccaccccgctgacttccattcccgtgtccacgacccctgtggcaatcccagaagcatccaccctgtccactactcccgttgattccaattcacctgtcgtcactagcacagaagtgtcatctagtcccacgcccgctgaaggcacatctatgccaatctctacatacagcgaagggtccacgcccttgaccggtgtgcctgtctcaacgaccccagtgacctctagtgccatcagcacgctaagcaccacccctgtcgacacctcgacccccgtcaccacctctaccgaagcgcactcctcccccacgacaagcgagggtacttccatgcctacttcgacaccgtccgaaggcagcactcccctgacatacatgcctgtcagcactatgctggtcgtaagctccgaggactccacattgtcggcaactccagtggacaccagcacgcccgttaccacaagcacagaggccactagctcaaccacggccgagggaacttctattcctacaagcacgccatccgaaggcatgactccgctcacgagtgtaccggtatccaataccccggttgctagctcagaggcgtccatcctaagcacgacgcccgttgacagcaacacccctctgaccacgagtactgaggctagctcatctccccctactgctgagggcaccagcatgccaaccagcacccctagcgaaggttccacacctttaacaagcatgccggtttctactactaccgtggcatcttccgaaactagcactttgagcaccacccctgccgacacctcaacacccgtcacaacgtactctcaagcttccagcagcccacccattgccgatgggacctcaatgcccactagcacatacagcgagggctcgactccactgacaaacatgagttttagtacaacacccgtcgtttcgagcgaggcatcaaccctgtcaactacaccagtggacacaagcacccccgttactacatctaccgaggcatcattgagccccaccacagctgagggaacgagtataccaacgagctcaccctctgaaggcacaacacctcttgctagcatgccagtatctacaacgcccgtcgtctccagtgaggttaatacccttagcacaactccagtggattcgaacacactggtgactacctctacggaggccagctctagccccacgattgctgagggcacatcgttgcccaccagcaccacttccgagggatccactcctctgtctatcatgccactttcgactacacctgtggcttcatcagaggcctccacactcagcacgactcctgtagacaccagcaccccagttaccacgtcaagccccacaaatagcagccctaccacagcagaggtcacgtctatgccgacaagtacagccggagaaggctctaccccactcaccaatatgcccgtgagcactactccggtcgcttcgtcggaggctagcacactctcaactacaccagtcgattctaatacattcgttacaagctcctctcaagccagctcatctccggcaaccctacaggttaccactatgcgcatgtcaacacctagcgaagggagtagctcattgacaacgatgctcctgtcttctacctacgtgacgtcctctgaagcatcaactccttccaccccctcggtggacaggtcaacgcctgtcaccacttccacccagtccaacagcacccctaccccacctgaagtgatcactctgccgatgtcaacaccctctgaagtctccaccccacttacaattatgcccgtgtctacaacttcggtgaccatttccgaggcgggaaccgcttccactctcccggtcgatacctccacacctgtcattacgagcacccaggtttctagtagccccgttacccctgagggcaccactatgccaatctggaccccaagtgaagggtccactcctctgaccacaatgcccgtgagcactacgcgtgtgactagctctgaaggcagcaccctatcaacaccatctgtggttacttcaaccccagttacgacctctacggaggcgatctcatcttctgccactctagactcaacaacaatgagcgtaagcatgccgatggagattagtactctggggacaacaattctggtttccaccactccagtcaccagatttcctgagagctccacgccctccataccatcagtgtacacctcaatgtctatgaccacagcttccgagggtagctcatcgcccactacactggaggggactactacaatgcccatgtctaccacatccgagcggtccactcttctcactacggtgctaatatcaccaatctctgtaatgtctccatctgaagcgagcacattgagtacacctccgggagacacctctactccgctgcttacaagcactaaggcaggaagttttagtatccctgccgaggtgacaaccattagaataagcataacgtctgagcggtcaacacccttgacaaccctgctagtctcaacgacgctcccaacgagttttcctggcgcatccatcgcatcgaccccccctctggatacctcaaccactttcactccctccactgatactgcgagtacccccactattccggtggcaacaaccattagtgtaagcgtcatcaccgaaggatctaccccaggaacaactatctttattcccagcactccagtaaccagcagcaccgccgacgtgttccccgcaaccacgggcgctgtgtcaacacccgtcatcaccagcacagagttgaacactcccagtactagttcaagtagtactaccacctccttcagcaccaccaaggaatttactacgcccgcaatgacaaccgccgcacccttaacatacgtaaccatgagtaccgccccatccaccccaaggacaacatctagaggctgcaccaccagcgcctccacactctccgccaccagcacaccgcatacctcaacttcggtgacaacacgccctgttacacctagttcggagtcaagtcgaccttccactatcacatcccataccattcccccaacctttcccccagcacatagttctactcctccaacaaccagcgcttccagtacaaccgttaatcccgaagctgtgacaacgatgacaacaaggactaagccttcaacccgcaccacaagcttcccaactgtcacaacgactgcggtaccaacaaacaccacaatcaagtctaatcccacgtctactcccacagtgcctaggaccactacgtgtttcggcgatgggtgtcagaataccgcgagccgctgcaaaaatggaggcacatgggatgggctgaagtgccagtgtcctaatttgtactacggcgaactgtgtgaagaagtcgtgagcagcatagacattggtcctccagaaactatctcggctcagatggagttaacggtgacagtgacctcagtgaaatttaccgaagaactcaagaatcactcaagtcaggagtttcaggagtttaaacagactttcacagaacagatgaatatcgtgtattctgggattcccgaatacgtaggggtcaacatcaccaaattacgcttgggctccgttgtggtcgagcatgacgttcttttgcgtacaaaatatacacctgaatataagactgttctcgataacgcaacggaggtggtgaaggagaaaatcactaaggttacaacacagcagataatgataaacgacatttgctcagatatgatgtgctttaacacaacggggacacaggtccagaacattaccgtaacacagtatgaccctgaagaggattgcaggaagatggcgaaagaatacggagactacttcgtggtagagtaccgcgaccaaaaaccttactgcatttcaccctgcgagcctggcttttctgtgagcaaaaactgcaacttgggcaaatgccagatgagtctgtctgggcctcaatgtttatgcgttaccactgaaacccactggtattctggggaaacctgcaatcagggcactcagaagtctctagtatacggcttggtgggcgcaggcgtggtgctgatgcttatcatcctggttgccctcctgatgctggtgttccgcagcaaaagagaggttaagcgccagaagtaccgcctgtctcagctttataagtggcaagaggaagatagtggtccagcccctggcacattccagaatataggattcgatatctgccaggacgatgacagtattcatcttgagtctatctacagcaactttcagcctagtctgcggcacatcgaccctgagaccaagattagaatccaacggccacaggttatgacgacgtctttctaa

SEQ ID NO: 32586 - DNA, 324 bp, Artificial Sequence
  derived and/or modified sequence
gcaccgatctgctttggagaacctgatcctgagactccagcaggatgtcttatcaacagcagcagtgcaagcagccctgccagccacctcctgtgtgccccacgccaaagtgcccagagccatgtccacccccgaagtgccctgagccctgcccaccaccaaagtgtccacagccctgcccacctcagcagtgccagcagaaatatcctcctgtgacaccttccccaccctgccagccaaagtatccaccgaagagcaagtaacagcttcaggattcatcaggagcatgagaggataaggataattggctcacctcgttccaca

SEQ ID NO: 32587 - DNA, 13482 bp, Artificial Sequence
  derived and/or modified sequence
atgcccagacccggcaccatggccctgtgcctgctgaccctggtgctgagcctgctgcccccccaggccgccgccgagcaggacctgagcgtgaacagagccgtgtgggacggcggcggctgcatcagccagggcgacgtgctgaacagacagtgccagcagctgagccagcacgtgagaaccggcagcgccgccaacaccgccaccggcaccaccagcaccaacgtggtggagcccagaatgtacctgagctgcagcaccaaccccgagatgaccagcatcgagagcagcgtgaccagcgacacccccggcgtgagcagcaccagaatgacccccaccgagagcagaaccaccagcgagagcaccagcgacagcaccaccctgttccccagcagcaccgaggacaccagcagccccaccacccccgagggcaccgacgtgcccatgagcacccccagcgaggagagcatcagcagcaccatggccttcgtgagcaccgcccccctgcccagcttcgaggcctacaccagcctgacctacaaggtggacatgagcacccccctgaccaccagcacccaggccagcagcagccccaccacccccgagagcaccaccatccccaagagcaccaacagcgagggcagcacccccctgaccagcatgcccgccagcaccatgaaggtggccagcagcgaggccatcaccctgctgaccacccccgtggagatcagcacccccgtgaccatcagcgcccaggccagcagcagccccaccaccgccgagggccccagcctgagcaacagcgcccccagcggcggcagcacccccctgaccagaatgcccctgagcgtgatgctggtggtgagcagcgaggccagcaccctgagcaccacccccgccgccaccaacatccccgtgatcaccagcaccgaggccagcagcagccccaccaccgccgagggcaccagcatccccaccagcacctacaccgagggcagcacccccctgaccagcacccccgccagcaccatgcccgtggccaccagcgagatgagcaccctgagcatcacccccgtggacaccagcaccctggtgaccaccagcaccgagcccagcagcctgcccaccaccgccgaggccaccagcatgctgaccagcaccctgagcgagggcagcacccccctgaccaacatgcccgtgagcaccatcctggtggccagcagcgaggccagcaccaccagcaccatccccgtggacagcaagaccttcgtgaccaccgccagcgaggccagcagcagccccaccaccgccgaggacaccagcatcgccaccagcacccccagcgagggcagcacccccctgaccagcatgcccgtgagcaccacccccgtggccagcagcgaggccagcaacctgagcaccacccccgtggacagcaagacccaggtgaccaccagcaccgaggccagcagcagcccccccaccgccgaggtgaacagcatgcccaccagcacccccagcgagggcagcacccccctgaccagcatgagcgtgagcaccatgcccgtggccagcagcgaggccagcaccctgagcaccacccccgtggacaccagcacccccgtgaccaccagcagcgaggccagcagcagcagcaccacccccgagggcaccagcatccccaccagcacccccagcgagggcagcacccccctgaccaacatgcccgtgagcaccagactggtggtgagcagcgaggccagcaccaccagcaccacccccgccgacagcaacaccttcgtgaccaccagcagcgaggccagcagcagcagcaccaccgccgagggcaccagcatgcccaccagcacctacagcgagagaggcaccaccatcaccagcatgagcgtgagcaccaccctggtggccagcagcgaggccagcaccctgagcaccacccccgtggacagcaacacccccgtgaccaccagcaccgaggccaccagcagcagcaccaccgccgagggcaccagcatgcccaccagcacctacaccgagggcagcacccccctgaccagcatgcccgtgaacaccaccctggtggccagcagcgaggccagcaccctgagcaccacccccgtggacaccagcacccccgtgaccaccagcaccgaggccagcagcagccccaccaccgccgacggcgccagcatgcccaccagcacccccagcgagggcagcacccccctgaccagcatgcccgtgagcaagaccctgctgaccagcagcgaggccagcaccctgagcaccacccccctggacaccagcacccacatcaccaccagcaccgaggccagctgcagccccaccaccaccgagggcaccagcatgcccatcagcacccccagcgagggcagccccctgctgaccagcatccccgtgagcatcacccccgtgaccagccccgaggccagcaccctgagcaccacccccgtggacagcaacagccccgtgaccaccagcaccgaggtgagcagcagccccacccccgccgagggcaccagcatgcccaccagcacctacagcgagggcagaacccccctgaccagcatgcccgtgagcaccaccctggtggccaccagcgccatcagcaccctgagcaccacccccgtggacaccagcacccccgtgaccaacagcaccgaggccagaagcagccccaccaccagcgagggcaccagcatgcccaccagcacccccggcgagggcagcacccccctgaccagcatgcccgacagcaccacccccgtggtgagcagcgaggccagaaccctgagcgccacccccgtggacaccagcacccccgtgaccaccagcaccgaggccaccagcagccccaccaccgccgagggcaccagcatccccaccagcacccccagcgagggcaccacccccctgaccagcacccccgtgagccacaccctggtggccaacagcgaggccagcaccctgagcaccacccccgtggacagcaacacccccctgaccaccagcaccgaggccagcagccccccccccaccgccgagggcaccagcatgcccaccagcacccccagcgagggcagcacccccctgaccagaatgcccgtgagcaccaccatggtggccagcagcgagaccagcaccctgagcaccacccccgccgacaccagcacccccgtgaccacctacagccaggccagcagcagcagcaccaccgccgacggcaccagcatgcccaccagcacctacagcgagggcagcacccccctgaccagcgtgcccgtgagcaccagactggtggtgagcagcgaggccagcaccctgagcaccacccccgtggacaccagcatccccgtgaccaccagcaccgaggccagcagcagccccaccaccgccgagggcaccagcatccccaccagcccccccagcgagggcaccacccccctggccagcatgcccgtgagcaccaccctggtggtgagcagcgaggccaacaccctgagcaccacccccgtggacagcaagacccaggtggccaccagcaccgaggccagcagccccccccccaccgccgaggtgaccagcatgcccaccagcacccccggcgagagaagcacccccctgaccagcatgcccgtgagacacacccccgtggccagcagcgaggccagcaccctgagcaccagccccgtggacaccagcacccccgtgaccaccagcgccgagaccagcagcagccccaccaccgccgagggcaccagcctgcccaccagcaccaccagcgagggcagcaccctgctgaccagcatccccgtgagcaccaccctggtgaccagccccgaggccagcaccctgctgaccacccccgtggacaccaagggccccgtggtgaccagcaacgaggtgagcagcagccccacccccgccgagggcaccagcatgcccaccagcacctacagcgagggcagaacccccctgaccagcatccccgtgaacaccaccctggtggccagcagcgccatcagcatcctgagcaccacccccgtggacaacagcacccccgtgaccaccagcaccgaggcctgcagcagccccaccaccagcgagggcaccagcatgcccaacagcaaccccagcgagggcaccacccccctgaccagcatccccgtgagcaccacccccgtggtgagcagcgaggccagcaccctgagcgccacccccgtggacaccagcacccccggcaccaccagcgccgaggccaccagcagccccaccaccgccgagggcatcagcatccccaccagcacccccagcgagggcaagacccccctgaagagcatccccgtgagcaacacccccgtggccaacagcgaggccagcaccctgagcaccacccccgtggacagcaacagccccgtggtgaccagcaccgccgtgagcagcagccccacccccgccgagggcaccagcatcgccatcagcacccccagcgagggcagcaccgccctgaccagcatccccgtgagcaccaccaccgtggccagcagcgagatcaacagcctgagcaccacccccgccgtgaccagcacccccgtgaccacctacagccaggccagcagcagccccaccaccgccgacggcaccagcatgcagaccagcacctacagcgagggcagcacccccctgaccagcctgcccgtgagcaccatgctggtggtgagcagcgaggccaacaccctgagcaccacccccatcgacagcaagacccaggtgaccgccagcaccgaggccagcagcagcaccaccgccgagggcagcagcatgaccatcagcacccccagcgagggcagccccctgctgaccagcatccccgtgagcaccacccccgtggccagccccgaggccagcaccctgagcaccacccccgtggacagcaacagccccgtgatcaccagcaccgaggtgagcagcagccccacccccgccgagggcaccagcatgcccaccagcacctacaccgagggcagaacccccctgaccagcatcaccgtgagaaccacccccgtggccagcagcgccatcagcaccctgagcaccacccccgtggacaacagcacccccgtgaccaccagcaccgaggccagaagcagccccaccaccagcgagggcaccagcatgcccaacagcacccccagcgagggcaccacccccctgaccagcatccccgtgagcaccacccccgtgctgagcagcgaggccagcaccctgagcgccacccccatcgacaccagcacccccgtgaccaccagcaccgaggccaccagcagccccaccaccgccgagggcaccagcatccccaccagcaccctgagcgagggcatgacccccctgaccagcacccccgtgagccacaccctggtggccaacagcgaggccagcaccctgagcaccacccccgtggacagcaacagccccgtggtgaccagcaccgccgtgagcagcagccccacccccgccgagggcaccagcatcgccaccagcacccccagcgagggcagcaccgccctgaccagcatccccgtgagcaccaccaccgtggccagcagcgagaccaacaccctgagcaccacccccgccgtgaccagcacccccgtgaccacctacgcccaggtgagcagcagccccaccaccgccgacggcagcagcatgcccaccagcacccccagagagggcagaccccccctgaccagcatccccgtgagcaccaccaccgtggccagcagcgagatcaacaccctgagcaccaccctggccgacaccagaacccccgtgaccacctacagccaggccagcagcagccccaccaccgccgacggcaccagcatgcccacccccgcctacagcgagggcagcacccccctgaccagcatgcccctgagcaccaccctggtggtgagcagcgaggccagcaccctgagcaccacccccgtggacaccagcacccccgccaccaccagcaccgagggcagcagcagccccaccaccgccggcggcaccagcatccagaccagcacccccagcgagagaaccacccccctggccggcatgcccgtgagcaccaccctggtggtgagcagcgagggcaacaccctgagcaccacccccgtggacagcaagacccaggtgaccaacagcaccgaggccagcagcagcgccaccgccgagggcagcagcatgaccatcagcgcccccagcgagggcagccccctgctgaccagcatccccctgagcaccacccccgtggccagccccgaggccagcaccctgagcaccacccccgtggacagcaacagccccgtgatcaccagcaccgaggtgagcagcagccccatccccaccgagggcaccagcatgcagaccagcacctacagcgacagaagaacccccctgaccagcatgcccgtgagcaccaccgtggtggccagcagcgccatcagcaccctgagcaccacccccgtggacaccagcacccccgtgaccaacagcaccgaggccagaagcagccccaccaccagcgagggcaccagcatgcccaccagcacccccagcgagggcagcacccccttcaccagcatgcccgtgagcaccatgcccgtggtgaccagcgaggccagcaccctgagcgccacccccgtggacaccagcacccccgtgaccaccagcaccgaggccaccagcagccccaccaccgccgagggcaccagcatccccaccagcaccctgagcgagggcaccacccccctgaccagcatccccgtgagccacaccctggtggccaacagcgaggtgagcaccctgagcaccacccccgtggacagcaacacccccttcaccaccagcaccgaggccagcagccccccccccaccgccgagggcaccagcatgcccaccagcaccagcagcgagggcaacacccccctgaccagaatgcccgtgagcaccaccatggtggccagcttcgagaccagcaccctgagcaccacccccgccgacaccagcacccccgtgaccacctacagccaggccggcagcagccccaccaccgccgacgacaccagcatgcccaccagcacctacagcgagggcagcacccccctgaccagcgtgcccgtgagcaccatgcccgtggtgagcagcgaggccagcacccacagcaccacccccgtggacaccagcacccccgtgaccaccagcaccgaggccagcagcagccccaccaccgccgagggcaccagcatccccaccagcccccccagcgagggcaccacccccctggccagcatgcccgtgagcaccacccccgtggtgagcagcgaggccggcaccctgagcaccacccccgtggacaccagcacccccatgaccaccagcaccgaggccagcagcagccccaccaccgccgaggacatcgtggtgcccatcagcaccgccagcgagggcagcaccctgctgaccagcatccccgtgagcaccacccccgtggccagccccgaggccagcaccctgagcaccacccccgtggacagcaacagccccgtggtgaccagcaccgagatcagcagcagcgccaccagcgccgagggcaccagcatgcccaccagcacctacagcgagggcagcacccccctgagaagcatgcccgtgagcaccaagcccctggccagcagcgaggccagcaccctgagcaccacccccgtggacaccagcatccccgtgaccaccagcaccgagaccagcagcagccccaccaccgccaaggacaccagcatgcccatcagcacccccagcgaggtgagcaccagcctgaccagcatcctggtgagcaccatgcccgtggccagcagcgaggccagcaccctgagcaccacccccgtggacaccagaaccctggtgaccaccagcaccggcaccagcagcagccccaccaccgccgagggcagcagcatgcccaccagcacccccggcgagagaagcacccccctgaccaacatcctggtgagcaccaccctgctggccaacagcgaggccagcaccctgagcaccacccccgtggacaccagcacccccgtgaccaccagcgccgaggccagcagcagccccaccaccgccgagggcaccagcatgagaatcagcacccccagcgacggcagcacccccctgaccagcatcctggtgagcaccctgcccgtggccagcagcgaggccagcaccgtgagcaccaccgccgtggacaccagcatccccgtgaccaccagcaccgaggccagcagcagccccaccaccgccgaggtgaccagcatgcccaccagcacccccagcgagaccagcacccccctgaccagcatgcccgtgaaccacacccccgtggccagcagcgaggccggcaccctgagcaccacccccgtggacaccagcacccccgtgaccaccagcaccaaggccagcagcagccccaccaccgccgagggcatcgtggtgcccatcagcaccgccagcgagggcagcaccctgctgaccagcatccccgtgagcaccacccccgtggccagcagcgaggccagcaccctgagcaccacccccgtggacaccagcatccccgtgaccaccagcaccgagggcagcagcagccccaccaccgccgagggcaccagcatgcccatcagcacccccagcgaggtgagcacccccctgaccagcatcctggtgagcaccgtgcccgtggccggcagcgaggccagcaccctgagcaccacccccgtggacaccagaacccccgtgaccaccagcgccgaggccagcagcagccccaccaccgccgagggcaccagcatgcccatcagcacccccggcgagagaagaacccccctgaccagcatgagcgtgagcaccatgcccgtggccagcagcgaggccagcaccctgagcagaacccccgccgacaccagcacccccgtgaccaccagcaccgaggccagcagcagccccaccaccgccgagggcaccggcatccccatcagcacccccagcgagggcagcacccccctgaccagcatccccgtgagcaccacccccgtggccatccccgaggccagcaccctgagcaccacccccgtggacagcaacagccccgtggtgaccagcaccgaggtgagcagcagccccacccccgccgagggcaccagcatgcccatcagcacctacagcgagggcagcacccccctgaccggcgtgcccgtgagcaccacccccgtgaccagcagcgccatcagcaccctgagcaccacccccgtggacaccagcacccccgtgaccaccagcaccgaggcccacagcagccccaccaccagcgagggcaccagcatgcccaccagcacccccagcgagggcagcacccccctgacctacatgcccgtgagcaccatgctggtggtgagcagcgaggacagcaccctgagcgccacccccgtggacaccagcacccccgtgaccaccagcaccgaggccaccagcagcaccaccgccgagggcaccagcatccccaccagcacccccagcgagggcatgacccccctgaccagcgtgcccgtgagcaacacccccgtggccagcagcgaggccagcatcctgagcaccacccccgtggacagcaacacccccctgaccaccagcaccgaggccagcagcagcccccccaccgccgagggcaccagcatgcccaccagcacccccagcgagggcagcacccccctgaccagcatgcccgtgagcaccaccaccgtggccagcagcgagaccagcaccctgagcaccacccccgccgacaccagcacccccgtgaccacctacagccaggccagcagcagcccccccatcgccgacggcaccagcatgcccaccagcacctacagcgagggcagcacccccctgaccaacatgagcttcagcaccacccccgtggtgagcagcgaggccagcaccctgagcaccacccccgtggacaccagcacccccgtgaccaccagcaccgaggccagcctgagccccaccaccgccgagggcaccagcatccccaccagcagccccagcgagggcaccacccccctggccagcatgcccgtgagcaccacccccgtggtgagcagcgaggtgaacaccctgagcaccacccccgtggacagcaacaccctggtgaccaccagcaccgaggccagcagcagccccaccatcgccgagggcaccagcctgcccaccagcaccaccagcgagggcagcacccccctgagcatcatgcccctgagcaccacccccgtggccagcagcgaggccagcaccctgagcaccacccccgtggacaccagcacccccgtgaccaccagcagccccaccaacagcagccccaccaccgccgaggtgaccagcatgcccaccagcaccgccggcgagggcagcacccccctgaccaacatgcccgtgagcaccacccccgtggccagcagcgaggccagcaccctgagcaccacccccgtggacagcaacaccttcgtgaccagcagcagccaggccagcagcagccccgccaccctgcaggtgaccaccatgagaatgagcacccccagcgagggcagcagcagcctgaccaccatgctgctgagcagcacctacgtgaccagcagcgaggccagcacccccagcacccccagcgtggacagaagcacccccgtgaccaccagcacccagagcaacagcacccccaccccccccgaggtgatcaccctgcccatgagcacccccagcgaggtgagcacccccctgaccatcatgcccgtgagcaccaccagcgtgaccatcagcgaggccggcaccgccagcaccctgcccgtggacaccagcacccccgtgatcaccagcacccaggtgagcagcagccccgtgacccccgagggcaccaccatgcccatctggacccccagcgagggcagcacccccctgaccaccatgcccgtgagcaccaccagagtgaccagcagcgagggcagcaccctgagcacccccagcgtggtgaccagcacccccgtgaccaccagcaccgaggccatcagcagcagcgccaccctggacagcaccaccatgagcgtgagcatgcccatggagatcagcaccctgggcaccaccatcctggtgagcaccacccccgtgaccagattccccgagagcagcacccccagcatccccagcgtgtacaccagcatgagcatgaccaccgccagcgagggcagcagcagccccaccaccctggagggcaccaccaccatgcccatgagcaccaccagcgagagaagcaccctgctgaccaccgtgctgatcagccccatcagcgtgatgagccccagcgaggccagcaccctgagcaccccccccggcgacaccagcacccccctgctgaccagcaccaaggccggcagcttcagcatccccgccgaggtgaccaccatcagaatcagcatcaccagcgagagaagcacccccctgaccaccctgctggtgagcaccaccctgcccaccagcttccccggcgccagcatcgccagcaccccccccctggacaccagcaccaccttcacccccagcaccgacaccgccagcacccccaccatccccgtggccaccaccatcagcgtgagcgtgatcaccgagggcagcacccccggcaccaccatcttcatccccagcacccccgtgaccagcagcaccgccgacgtgttccccgccaccaccggcgccgtgagcacccccgtgatcaccagcaccgagctgaacacccccagcaccagcagcagcagcaccaccaccagcttcagcaccaccaaggagttcaccacccccgccatgaccaccgccgcccccctgacctacgtgaccatgagcaccgcccccagcacccccagaaccaccagcagaggctgcaccaccagcgccagcaccctgagcgccaccagcaccccccacaccagcaccagcgtgaccaccagacccgtgacccccagcagcgagagcagcagacccagcaccatcaccagccacaccatcccccccaccttcccccccgcccacagcagcaccccccccaccaccagcgccagcagcaccaccgtgaaccccgaggccgtgaccaccatgaccaccagaaccaagcccagcaccagaaccaccagcttccccaccgtgaccaccaccgccgtgcccaccaacaccaccatcaagagcaaccccaccagcacccccaccgtgcccagaaccaccacctgcttcggcgacggctgccagaacaccgccagcagatgcaagaacggcggcacctgggacggcctgaagtgccagtgccccaacctgtactacggcgagctgtgcgaggaggtggtgagcagcatcgacatcggcccccccgagaccatcagcgcccagatggagctgaccgtgaccgtgaccagcgtgaagttcaccgaggagctgaagaaccacagcagccaggagttccaggagttcaagcagaccttcaccgagcagatgaacatcgtgtacagcggcatccccgagtacgtgggcgtgaacatcaccaagctgagactgggcagcgtggtggtggagcacgacgtgctgctgagaaccaagtacacccccgagtacaagaccgtgctggacaacgccaccgaggtggtgaaggagaagatcaccaaggtgaccacccagcagatcatgatcaacgacatctgcagcgacatgatgtgcttcaacaccaccggcacccaggtgcagaacatcaccgtgacccagtacgaccccgaggaggactgcagaaagatggccaaggagtacggcgactacttcgtggtggagtacagagaccagaagccctactgcatcagcccctgcgagcccggcttcagcgtgagcaagaactgcaacctgggcaagtgccagatgagcctgagcggcccccagtgcctgtgcgtgaccaccgagacccactggtacagcggcgagacctgcaaccagggcacccagaagagcctggtgtacggcctggtgggcgccggcgtggtgctgatgctgatcatcctggtggccctgctgatgctggtgttcagaagcaagagagaggtgaagagacagaagtacagactgagccagctgtacaagtggcaggaggaggacagcggccccgcccccggcaccttccagaacatcggcttcgacatctgccaggacgacgacagcatccacctggagagcatctacagcaacttccagcccagcctgagacacatcgaccccgagaccaagatcagaatccagagaccccaggtgatgaccaccagcttctag

SEQ ID NO: 32588 - RNA, 1573 nt, Artificial Sequence
  derived and/or modified sequence
gggaaauaagagagaaaagaagaguaagaagaaauauaagagccaccaugguauccaagggggaggaggacaacauggcgaucaucaaggaguucaugcgauucaaggugcacauggaagguucggucaacggacacgaauuugaaaucgaaggagagggugaaggaaggcccuaugaagggacacagaccgcgaaacucaaggucacgaaagggggaccacuuccuuucgccugggacauucuuucgccccaguuuauguacggguccaaagcauaugugaagcaucccgccgauauuccugacuaucugaaacucagcuuucccgagggauucaagugggagcgggucaugaacuuugaggacggggguguagucaccguaacccaagacucaagccuccaagacggcgaguucaucuacaaggucaaacugcgggggacuaacuuuccgucggaugggccggugaugcagaagaaaacgaugggaugggaagcgucaucggagaggauguacccagaagauggugcauugaagggggagaucaagcagagacugaaguugaaagaugggggacauuaugaugccgaggugaaaacgacauacaaagcgaaaaagccggugcagcuucccggagcguauaaugugaauaucaaguuggauauuacuucacacaaugaggacuacacaauugucgaacaguacgaacgcgcugaggguagacacucgacgggaggcauggacgaguuguacaaaggaagcggagcuacuaacuucagccugcugaagcaggcuggagacguggaggagaacccuggaccuaugguguccaagggugaggaauuguuuaccgggguggugccuauucucgucgaacuugacggggaugugaauggacacaaguuuucgguauccggagaaggagagggugacgccacauacggaaagcuuacacucaaauucaucuguacgacggggaaacugcccguacccuggccuacgcucguaaccacgcugacuuauggagugcagugcuuuagcagauaccccgaccauaugaagcagcacgacuucuucaagucggcgaugcccgagggguacgugcaagagaggaccauuuucuucaaagacgauggcaauuacaaaacacgcgcagaagucaaguuugagggcgauacucuggucaaucggaucgaauugaagggaaucgauuucaaagaagauggaaacauccuuggccauaagcucgaguacaacuauaacucgcauaaugucuauaucauggcugacaagcagaaaaacgguaucaaagucaacuuuaagauccgacacaauauugaggacgguucggugcagcuugcggaccacuaucaacagaauacgccgauuggggaugguccgguccuuuugccggauaaccauuaucucucaacccagucagcccugagcaaagauccaaacgagaagagggaccacauggucuugcucgaauucgugacagcggcagggaucacucugggaauggacgaguuguacaagugauaauggucuuugaauaaagccugaguaggaag

SEQ ID NO: 32589 - protein, 114 aa, Artificial Sequence
  derived and/or modified sequence
MVSRKAVAALLVVHVAAMLASQTEAFVPIFTYGELQRMQEKERNKGQKKSLSVWQRSGEEGPVDPAEPIREEENEMIKLTAPLEIGMRMNSRQLEKYPATLEGLLSEMLPQHAK

SEQ ID NO: 32590 - DNA, 345 bp, Artificial Sequence
  derived and/or modified sequence
atggtttcccgcaaagccgtcgcggcacttcttgtcgtgcatgtagcagctatgctggcttcccagacagaagcctttgttcctatattcacctacggagaattgcagcggatgcaggagaaagagagaaataagggccagaagaagtctctgtccgtgtggcaaagatccggcgaggaaggccctgtcgacccggctgagcccatcagggaggaggagaatgaaatgatcaagctgacagccccactggagatagggatgaggatgaattcaaggcagctggaaaaataccccgcaacactagagggtcttctatctgaaatgctgccacagcacgccaagtag

SEQ ID NO: 32591 - DNA, 345 bp, Artificial Sequence
  derived and/or modified sequence
atggtgtccaggaaggctgtggccgccctgctggtggtgcacgtggccgccatgctggccagccagacagaggcctttgtgcccatcttcacctacggggagctgcagaggatgcaggagaaggagagaaataaaggccagaagaagagcctgtctgtgtggcagaggtctggagaggagggccctgtggaccctgctgagcccatccgggaggaggagaatgagatgatcaagctgacagcccccctggagatcggcatgaggatgaacagccggcagctggagaagtacccagccaccctggagggcctgctgtctgagatgctgccccagcacgccaagtag

SEQ ID NO: 32592 - DNA, 527 bp, Artificial Sequence
  derived and/or modified sequence
gaagacaagcagagagactcctccagacccactcagaccacgtgcacgccctccaagatggtatcccgtaaggctgtggctgctctgctggtggtgcatgtagctgccatgctggcctcccagacggaagccttcgtccccatcttcacctatggcgaactccagaggatgcaggaaaaggaacggaataaagggcaaaagaaatccctgagtgtatggcagaggtctggggaggaaggtcctgtagaccctgcggagcccatcagggaagaagaaaacgaaatgatcaagctgactgctcctctggaaattggaatgaggatgaactccagacagctggaaaagtacccggccaccctggaagggctgctgagtgagatgcttccccagcatgccaagtgatggccacgctggggagaaggtggacagatttgggaggcccctcctgcccaagtgaggccctgggaatttacagagcctgccagctgggcttggaaggaaaacaccctttccaaagcaaattcccc

SEQ ID NO: 32593 - DNA, 345 bp, Artificial Sequence
  derived and/or modified sequence
atggtgagccggaaggccgtggccgccctgctggtggtgcacgtggccgccatgctcgccagtcagacggaggcattcgtgcccatttttacctatggagaactgcagaggatgcaggagaaggagagaaacaagggtcaaaaaaagtctctgagcgtgtggcaacggagtggcgaggagggccctgtggatcctgccgaacctattagggaggaggagaacgaaatgatcaagctgaccgcacccctagagattggtatgcgcatgaattctcgccagctggaaaagtatccagctacactggaggggctgctctccgagatgttaccccaacatgcgaagtag

SEQ ID NO: 32594 - DNA, 345 bp, Artificial Sequence
  derived and/or modified sequence
atggtctctcggaaggctgttgccgctctactggtagtgcacgtcgccgctatgctggcctcccagaccgaagcatttgtgccaatcttcacatatggtgagctgcagagaatgcaagaaaaggagagaaataaggggcagaagaaatctctgtctgtttggcagaggagtggtgaggaaggcccagtcgaccctgctgagcctatacgtgaggaagaaaacgagatgatcaagctcacggcacccttagagattggcatgagaatgaattcacggcaacttgagaaataccccgctacgttggaagggctattgtccgaaatgctgccacagcatgccaaatag

SEQ ID NO: 32595 - DNA, 345 bp, Artificial Sequence
  derived and/or modified sequence
atggtctcgaggaaggccgtggccgcgcttctggttgtacacgtcgcagccatgctggcatcacagaccgaagcatttgtaccaatatttacatatggggaactgcagcggatgcaagagaaggagagaaacaagggacagaagaagtctctatcagtctggcagcgatcaggcgaagaaggccccgtcgaccctgcagaaccaatcagagaagaagagaatgagatgatcaaactgacggctcctcttgaaataggcatgcgcatgaacagccggcaactcgaaaaataccccgccaccctcgagggactgttgtctgagatgctgccacaacacgcaaagtag

SEQ ID NO: 32596 - DNA, 345 bp, Artificial Sequence
  derived and/or modified sequence
atggtctcgaggaaggccgtggccgcgcttctggttgtacacgtcgcagccatgctggcatcacagaccgaagcatttgtaccaatatttacatatggggaactgcagcggatgcaagagaaggagagaaacaagggacagaagaagtctctatcagtctggcagcgatcaggcgaagaaggccccgtcgaccctgcagaaccaatcagagaagaagagaatgagatgatcaaactgacggctcctcttgaaataggcatgcgcatgaacagccggcaactcgaaaaataccccgccaccttggaaggcctattatccgaaatgttacctcagcacgcaaagtag

SEQ ID NO: 32597 - DNA, 345 bp, Artificial Sequence
  derived and/or modified sequence
atggtgagcagaaaggccgtggccgccctgctggtggtgcacgtggccgccatgctggccagccagaccgaggccttcgtgcccatcttcacctacggcgagctgcagagaatgcaggagaaggagagaaacaagggccagaagaagagcctgagcgtgtggcagagaagcggcgaggagggccccgtggaccccgccgagcccatcagagaggaggagaacgagatgatcaagctgaccgcccccctggagatcggcatgagaatgaacagcagacagctggagaagtaccccgccaccctggagggcctgctgagcgagatgctgccccagcacgccaagtag

SEQ ID NO: 32598 - protein, 2029 aa, Artificial Sequence
  derived and/or modified sequence
MAQKGQLSDDEKFLFVDKNFINSPVAQADWAAKRLVWVPSEKQGFEAASIKEEKGDEVVVELVENGKKVTVGKDDIQKMNPPKFSKVEDMAELTCLNEASVLHNLRERYFSGLIYTYSGLFCVVVNPYKHLPIYSEKIVDMYKGKKRHEMPPHIYAIADTAYRSMLQDREDQSILCTGESGAGKTENTKKVIQYLAVVASSHKGKKDTSITEGPSFWRGELEKQLLQANPILEAFGNAKTVKNDNSSRFGKFIRINFDVTGYIVGANIETYLLEKSRAIRQARDERTFHIFYYMIAGAKEKMRSDLLLEGFNNYTFLSNGFVPIPAAQDDEMFQETVEAMAIMGFSEEEQLSILKVVSSVLQLGNIVFKKERNTDQASMPDNTAAQKVCHLMGINVTDFTRSILTPRIKVGRDVVQKAQTKEQADFAVEALAKATYERLFRWILTRVNKALDKTHRQGASFLGILDIAGFEIFEVNSFEQLCINYTNEKLQQLFNHTMFILEQEEYQREGIEWNFIDFGLDLQPCIELIERPNNPPGVLALLDEECWFPKATDKSFVEKLCTEQGSHPKFQKPKQLKDKTEFSIIHYAGKVDYNASAWLTKNMDPLNDNVTSLLNASSDKFVADLWKDVDRIVGLDQMAKMTESSLPSASKTKKGMFRTVGQLYKEQLGKLMTTLRNTTPNFVRCIIPNHEKRSGKLDAFLVLEQLRCNGVLEGIRICRQGFPNRIVFQEFRQRYEILAANAIPKGFMDGKQACILMIKALELDPNLYRIGQSKIFFRTGVLAHLEEERDLKITDVIMAFQAMCRGYLARKAFAKRQQQLTAMKVIQRNCAAYLKLRNWQWWRLFTKVKPLLQVTRQEEEMQAKEDELQKTKERQQKAENELKELEQKHSQLTEEKNLLQEQLQAETELYAEAEEMRVRLAAKKQELEEILHEMEARLEEEEDRGQQLQAERKKMAQQMLDLEEQLEEEEAARQKLQLEKVTAEAKIKKLEDEILVMDDQNNKLSKERKLLEERISDLTTNLAEEEEKAKNLTKLKNKHESMISELEVRLKKEEKSRQELEKLKRKLEGDASDFHEQIADLQAQIAELKMQLAKKEEELQAALARLDDEIAQKNNALKKIRELEGHISDLQEDLDSERAARNKAEKQKRDLGEELEALKTELEDTLDSTATQQELRAKREQEVTVLKKALDEETRSHEAQVQEMRQKHAQAVEELTEQLEQFKRAKANLDKNKQTLEKENADLAGELRVLGQAKQEVEHKKKKLEAQVQELQSKCSDGERARAELNDKVHKLQNEVESVTGMLNEAEGKAIKLAKDVASLSSQLQDTQELLQEETRQKLNVSTKLRQLEEERNSLQDQLDEEMEAKQNLERHISTLNIQLSDSKKKLQDFASTVEALEEGKKRFQKEIENLTQQYEEKAAAYDKLEKTKNRLQQELDDLVVDLDNQRQLVSNLEKKQRKFDQLLAEEKNISSKYADERDRAEAEAREKETKALSLARALEEALEAKEELERTNKMLKAEMEDLVSSKDDVGKNVHELEKSKRALETQMEEMKTQLEELEDELQATEDAKLRLEVNMQALKGQFERDLQARDEQNEEKRRQLQRQLHEYETELEDERKQRALAAAAKKKLEGDLKDLELQADSAIKGREEAIKQLRKLQAQMKDFQRELEDARASRDEIFATAKENEKKAKSLEADLMQLQEDLAAAERARKQADLEKEELAEELASSLSGRNALQDEKRRLEARIAQLEEELEEEQGNMEAMSDRVRKATQQAEQLSNELATERSTAQKNESARQQLERQNKELRSKLHEMEGAVKSKFKSTIAALEAKIAQLEEQVEQEAREKQAATKSLKQKDKKLKEILLQVEDERKMAEQYKEQAEKGNARVKQLKRQLEEAEEESQRINANRRKLQRELDEATESNEAMGREVNALKSKLRGPPHRKLRSDAPGEETRPLSFLLEGLEDVELLKMQMVLRRKRTLETQTSMEPRPVNKQLSTVLHHGKKTKNQNKQTKKTQQQPRTKQNPADCT

SEQ ID NO: 32599 - protein, 1945 aa, Artificial Sequence
  derived and/or modified sequence
MAQKGQLSDDEKFLFVDKNFINSPVAQADWAAKRLVWVPSEKQGFEAASIKEEKGDEVVVELVENGKKVTVGKDDIQKMNPPKFSKVEDMAELTCLNEASVLHNLRERYFSGLIYTYSGLFCVVVNPYKHLPIYSEKIVDMYKGKKRHEMPPHIYAIADTAYRSMLQDREDQSILCTGESGAGKTENTKKVIQYLAVVASSHKGKKDTSITQGPSFAYGELEKQLLQANPILEAFGNAKTVKNDNSSRFGKFIRINFDVTGYIVGANIETYLLEKSRAIRQARDERTFHIFYYMIAGAKEKMRSDLLLEGFNNYTFLSNGFVPIPAAQDDEMFQETVEAMAIMGFSEEEQLSILKVVSSVLQLGNIVFKKERNTDQASMPDNTAAQKVCHLMGINVTDFTRSILTPRIKVGRDVVQKAQTKEQADFAVEALAKATYERLFRWILTRVNKALDKTHRQGASFLGILDIAGFEIFEVNSFEQLCINYTNEKLQQLFNHTMFILEQEEYQREGIEWNFIDFGLDLQPCIELIERPNNPPGVLALLDEECWFPKATDKSFVEKLCTEQGSHPKFQKPKQLKDKTEFSIIHYAGKVDYNASAWLTKNMDPLNDNVTSLLNASSDKFVADLWKDVDRIVGLDQMAKMTESSLPSASKTKKGMFRTVGQLYKEQLGKLMTTLRNTTPNFVRCIIPNHEKRSGKLDAFLVLEQLRCNGVLEGIRICRQGFPNRIVFQEFRQRYEILAANAIPKGFMDGKQACILMIKALELDPNLYRIGQSKIFFRTGVLAHLEEERDLKITDVIMAFQAMCRGYLARKAFAKRQQQLTAMKVIQRNCAAYLKLRNWQWWRLFTKVKPLLQVTRQEEEMQAKEDELQKTKERQQKAENELKELEQKHSQLTEEKNLLQEQLQAETELYAEAEEMRVRLAAKKQELEEILHEMEARLEEEEDRGQQLQAERKKMAQQMLDLEEQLEEEEAARQKLQLEKVTAEAKIKKLEDEILVMDDQNNKLSKERKLLEERISDLTTNLAEEEEKAKNLTKLKNKHESMISELEVRLKKEEKSRQELEKLKRKLEGDASDFHEQIADLQAQIAELKMQLAKKEEELQAALARLDDEIAQKNNALKKIRELEGHISDLQEDLDSERAARNKAEKQKRDLGEELEALKTELEDTLDSTATQQELRAKREQEVTVLKKALDEETRSHEAQVQEMRQKHAQAVEELTEQLEQFKRAKANLDKNKQTLEKENADLAGELRVLGQAKQEVEHKKKKLEAQVQELQSKCSDGERARAELNDKVHKLQNEVESVTGMLNEAEGKAIKLAKDVASLSSQLQDTQELLQEETRQKLNVSTKLRQLEEERNSLQDQLDEEMEAKQNLERHISTLNIQLSDSKKKLQDFASTVEALEEGKKRFQKEIENLTQQYEEKAAAYDKLEKTKNRLQQELDDLVVDLDNQRQLVSNLEKKQRKFDQLLAEEKNISSKYADERDRAEAEAREKETKALSLARALEEALEAKEELERTNKMLKAEMEDLVSSKDDVGKNVHELEKSKRALETQMEEMKTQLEELEDELQATEDAKLRLEVNMQALKGQFERDLQARDEQNEEKRRQLQRQLHEYETELEDERKQRALAAAAKKKLEGDLKDLELQADSAIKGREEAIKQLRKLQAQMKDFQRELEDARASRDEIFATAKENEKKAKSLEADLMQLQEDLAAAERARKQADLEKEELAEELASSLSGRNALQDEKRRLEARIAQLEEELEEEQGNMEAMSDRVRKATQQAEQLSNELATERSTAQKNESARQQLERQNKELRSKLHEMEGAVKSKFKSTIAALEAKIAQLEEQVEQEAREKQAATKSLKQKDKKLKEILLQVEDERKMAEQYKEQAEKGNARVKQLKRQLEEAEEESQRINANRRKLQRELDEATESNEAMGREVNALKSKLRGPPPQETSQ

SEQ ID NO: 32600 - DNA, 6090 bp, Artificial Sequence
  derived and/or modified sequence
atggcgcagaaaggccagctcagcgatgacgagaagtttctattcgtagacaaaaactttatcaactccccagtggctcaggctgactgggcagccaaacgcttggtctgggtgcctagtgaaaagcaaggatttgaagccgcaagcattaaagaggagaagggcgatgaggtggtcgtggagctagttgagaacggcaagaaggtgaccgttggcaaagatgacatacagaagatgaatccacctaagttctccaaagtggaagatatggctgaacttacatgcttaaatgaagcgagcgtgctgcataacctgcgtgaacgctatttctcaggcctcatttatacatactctggcttattttgtgtggtggtcaacccctataagcacctgcctatatattccgagaaaatcgtggacatgtataagggcaagaaacgccacgagatgccgccccacatttacgccatcgcagatacagcctatcgatctatgttgcaggatcgcgaggatcaatcgattctgtgtactggtgaatcaggagcgggcaagacagagaatacgaagaaggtcatccagtacctggccgtggtcgccagctcacacaaaggtaagaaggatacttccataactgagggcccgagcttctggcgaggggagctcgagaagcagctgctgcaggcaaatccaatactcgaagcattcggaaacgctaaaaccgtgaagaatgacaattcctctcgctttggcaaattcattcgtatcaacttcgacgtcacagggtatatcgtcggcgctaacatcgaaacatacttgctggagaagagccgggctatccggcaagcccgggatgaacggacgttccatatcttttattatatgatcgcaggcgccaaggagaagatgaggagcgatttgctgttggaaggtttcaataactatacattcctgtcaaatggctttgtgcctatcccggctgctcaggacgatgagatgttccaggagaccgtggaagcgatggccatcatgggcttttcggaagaagagcagctctctatattgaaagtggtttccagcgtactccagctgggcaacatcgtgttcaaaaaggaaagaaataccgaccaggcctccatgcccgacaacacagccgcgcagaaggtgtgtcacctcatgggcatcaatgtgactgatttcactagatcgattctgactccccgcatcaaagtgggtcgcgacgttgtgcagaaggctcagaccaaggaacaagccgattttgctgtagaagccctcgccaaagcaacctacgagagattgtttcgctggattctgacccgggtaaacaaggccctggacaagactcacaggcagggtgcttcctttttaggcattttggacatcgccggctttgagatctttgaagtgaattcgttcgagcaactgtgcatcaattataccaacgagaagctccagcagttgttcaatcatactatgttcatcctggaacaggaagagtatcagcgggagggcatagagtggaatttcatcgactttgggcttgacctgcagccttgcatcgagctgattgaacgtcccaacaatccaccaggggtgttggctcttctagacgaggaatgctggttcccaaaagctaccgataagtcattcgttgagaagctttgcactgagcaggggtcacatccaaagtttcagaaaccgaagcagctaaaggacaaaaccgagttctccataatccattatgccggcaaggtcgactataacgcatccgcctggctgaccaagaatatggatccactcaatgacaacgttacttccctcctgaatgcaagttcagacaaatttgttgctgacctgtggaaggacgtggatagaattgtgggtctggaccagatggcgaagatgacagagtcctctctccccagcgcaagtaagaccaagaaagggatgtttcggactgttggacagctgtacaaggagcagcttggaaaacttatgaccacccttcgcaatactacgcctaacttcgttagatgtatcattccaaaccacgaaaaacggtctggtaaacttgatgcctttcttgtgctggagcagcttaggtgcaacggggttctggaaggcattcgtatctgccgccagggctttcccaatcggatagtgtttcaggagtttaggcaacgctatgaaatactggctgccaacgctatcccaaagggattcatggatggcaaacaggcatgcattctgatgatcaaagctctcgaattggaccccaatctgtatcggataggccaaagcaagatattctttaggacaggagtattggcccacctggaggaggagcgcgatctcaagattacggacgtgattatggccttccaggctatgtgcaggggctatctggcgaggaaagcgttcgccaaacgacagcagcagctgacagccatgaaggtaatccaaagaaactgcgcagcctatctgaagctgcgcaactggcagtggtggaggctcttcacaaaggtgaaacccttgctgcaggtgaccagacaggaggaagagatgcaggcgaaagaggacgaattacagaaaactaaagagcggcagcagaaagccgagaacgagctgaaggaactcgaacagaagcattctcagctgacggaagaaaaaaatctgttgcaggagcagctccaggcagagaccgagctctatgccgaggcggaagagatgagagtgcgattggcagcaaagaagcaggagctcgaagaaatcctgcacgaaatggaagcccgcctcgaagaggaagaagataggggccagcagctgcaagcagaacgcaagaagatggcccagcaaatgcttgacctggaagagcagctagaggaggaagaagcggctcggcagaaactgcaattagagaaggttaccgcagaagctaagattaaaaaactcgaggacgaaattctggtgatggacgatcagaataacaaattaagtaaggagagaaaactgctggaggagaggatctctgatctcaccaccaacctcgctgaagaggaggaaaaagctaaaaacttgactaaacttaaaaataagcacgagtctatgatcagcgagctcgaggtccgactaaaaaaggaggaaaaaagccgccaggagcttgaaaagctgaaaagaaagctcgaaggggatgcgagtgactttcacgagcagattgccgacttgcaggcccagatcgcagaattaaagatgcagctagccaaaaaggaggaggagctgcaggcagccctggcccggcttgatgacgagatcgcacaaaagaacaacgcgctgaaaaagataagggagctggaaggacacatatccgacctccaggaagatctggattcagaacgagcggccaggaacaaggcagaaaagcaaaagcgggacctgggggaagaactggaggctctcaagacagagctggaagatacgctggactcaacagccactcagcaagagctgagagctaaaagagagcaggaggtgacagtgctcaagaaggcccttgacgaggagacacgaagtcatgaagcccaggttcaagagatgcggcagaaacacgcacaggccgtagaggagctgacagagcagcttgagcagttcaaacgggccaaggcgaatctggacaagaacaagcagacgctcgaaaaggaaaacgcagatttagccggcgagttaagggtgctcggtcaagcaaagcaagaggtggagcataaaaagaaaaaactggaagcgcaagtgcaggaacttcaaagtaagtgttccgatggtgagagagcacgagccgagttgaacgacaaggtgcacaagctgcaaaatgaagtcgagagcgtgaccgggatgcttaacgaggccgaagggaaggccataaaactggctaaggacgtcgcctcactcagttcacagttgcaggatacgcaagagctgctccaagaggagactcgtcaaaagttaaatgtttctaccaaactaagacagctggaggaagagcgaaatagcctgcaagaccagttggacgaggagatggaagccaaacagaacctggagagacatatcagtactctcaatatccagctctcggacagtaaaaaaaagctgcaagactttgctagtaccgtggaagccctcgaggagggcaaaaaaaggtttcagaaggaaattgaaaacctgacgcagcagtatgaagagaaagcagctgcctacgacaaactggaaaagacaaaaaatcgtctgcagcaagaactagacgatctagtggtggatctggacaatcagcggcagctcgtgagcaaccttgagaaaaaacagcgcaagttcgatcagctgctggccgaagagaaaaatataagtagcaagtatgccgacgagcgcgaccgggctgaagctgaagctagggagaaggaaaccaaagcactgtctttagcccgcgccctggaagaggcactggaggcgaaggaggagcttgagcgtactaacaaaatgcttaaggcagagatggaagacttggtctcttcaaaggatgatgtcggtaagaatgtgcatgaactcgagaagtctaaacgtgcccttgagacacagatggaagagatgaaaactcaactcgaggagctcgaagatgaactgcaggccacagaggacgcgaaactccgcctggaggtcaacatgcaggccctcaaagggcaattcgagcgggacttgcaggcccgggacgaacagaacgaggagaagagacgtcagttacaacgacaactccatgaatatgagacagagctggaagacgaacgaaagcagcgcgccctagccgctgccgccaagaagaaactggagggggatctcaaggaccttgaactccaggctgacagcgctattaaaggcagggaagaggctatcaagcagctccgaaagttgcaggcccagatgaaagactttcaacgagagctggaagatgctagagccagtagagacgagatcttcgctacagccaaggagaacgaaaagaaggcgaagagcttggaggcagatttaatgcaactccaggaggatctcgccgccgccgagagagccaggaagcaggctgacctggagaaagaggaactggccgaggaactcgcctcatctctttctggacgcaacgccttgcaggacgagaaaaggcggctcgaagcacgtatcgcccagctggaggaggagttggaggaagagcaaggcaacatggaagcgatgagcgaccgcgtgcggaaggccacccagcaggccgagcagctctccaacgaactggccaccgaacgaagcacagcacaaaagaatgagagcgctcggcagcaactcgagagacaaaacaaagaactgcggagcaagctgcatgaaatggagggggccgtcaaatccaagtttaagtctacgattgccgccctggaagcaaagatcgcccagctggaggagcaggtggagcaggaagcaagggaaaagcaggcagctacaaagtccttgaagcaaaaggacaagaagctgaaagaaatcctgctgcaagtggaggacgagcggaaaatggcagagcagtacaaggaacaggccgagaagggcaatgcccgagtaaagcagctcaagagacaactcgaggaagcggaagaggagagccaaagaatcaatgccaaccgccgaaaacttcaacgagagctggacgaagccaccgaatcaaatgaagcaatggggcgggaggtcaacgctctgaaatcgaagctgagaggaccaccccacagaaagctgcgctcagacgcccccggcgaagagactcgtcccctgagcttcctcctggaggggctggaagacgtggaactgctaaaaatgcagatggttctgaggcggaagcgaaccttggaaactcagacaagcatggagccccggcctgttaacaaacaactctcaacggtgctccaccatggaaaaaagaccaaaaatcagaacaagcagactaagaagacacagcaacagccacggacaaaacaaaaccccgcggattgtacctag

SEQ ID NO: 32601 - DNA, 5838 bp, Artificial Sequence
  derived and/or modified sequence
atggcacagaaaggccagcttagcgatgacgagaaattcttgttcgtagataaaaatttcatcaacagccctgtcgcacaggccgattgggccgctaaaagattagtgtgggttccaagtgagaagcaggggttcgaggcggcgtcaatcaaggaggagaaaggagacgaagtggtggtcgagcttgttgagaatggcaagaaagtgacagttggtaaggatgacatacagaaaatgaaccccccaaagttctctaaagtggaggatatggccgagttaacctgtctgaacgaagcatcagttttacacaatttgagagagagatacttttccggcctcatctatacgtattctgggcttttttgcgtggttgtgaacccatacaaacacctgcctatttacagcgaaaagattgtcgacatgtataaagggaaaaagaggcacgagatgcctccacatatttacgccattgctgacactgcatatcgaagcatgctgcaggaccgcgaagaccagagcattctgtgtaccggcgaatcaggggccggaaaaacagagaatacaaagaaggttattcagtacttggctgtggttgcctcaagccataagggtaaaaaggacacgagcatcactcaggggccatctttcgcttatggtgaattggagaagcaattgctgcaggctaatccaattctagaggctttcggcaacgctaagaccgtaaagaatgacaattcttcccggtttggaaagtttatcagaataaatttcgacgtgacagggtacattgtgggggcgaacatcgagacatacctgttggagaaatcgagggctatcaggcaagcccgcgacgagaggactttccatattttttattatatgatcgccggggccaaagaaaagatgagatccgatctcttgcttgagggattcaataattacacttttcttagcaacggctttgtccctattcccgctgcacaagacgatgagatgttccaagaaaccgtggaagccatggccatcatgggattttctgaagaagagcagctctcaatcctcaaagtggtaagctcagtgctacagctcggcaatatcgtattcaaaaaggagaggaataccgaccaggcatcaatgcccgacaataccgccgcccaaaaagtctgccacctcatggggataaatgtcacagacttcactcggtctattttaacacctaggatcaaagtgggccgtgacgtcgtgcagaaagcacagacaaaggaacaagccgattttgcagtggaggctttagccaaggcaacttatgaacggctttttagatggattctgaccagagtgaataaagctctcgacaagacccacagacaaggtgcaagtttcctcggcatcttggacatagccggcttcgagatatttgaggttaactcctttgagcaactgtgtatcaattatactaacgaaaagctgcagcagctgtttaatcataccatgtttattctggaacaggaagaatatcagagggaaggcatcgagtggaatttcatcgactttggccttgaccttcagccatgtattgagctgattgagcgccctaacaatccccctggggttctggccctcctggacgaggaatgctggtttcccaaggccactgataagagtttcgtcgagaaactgtgtactgaacaaggatcacaccccaagtttcaaaagcccaaacagttaaaggacaagaccgagtttagcatcattcattacgccggcaaagtggattacaatgcatccgcttggctcactaagaatatggatccactgaatgataatgtgaccagtctgctgaatgctagtagcgacaaattcgtcgccgacctttggaaggatgtggataggatcgtaggcctagaccagatggcaaagatgacggagtcctctctgccaagcgcttctaagaccaagaaggggatgttcagaaccgtaggacaactctataaggagcagcttggcaaactaatgaccactcttcgcaacactactccgaatttcgttcgttgcattattcctaaccacgagaagaggtcaggtaaattagatgcctttctcgttctggagcaactgcgatgcaatggagttttggagggtatcagaatttgcaggcaggggttccccaatcggatcgtgtttcaggaattccgacagcgctatgagatcctggcggctaacgctatccctaaaggcttcatggatgggaagcaggcatgtattttgatgatcaaagcacttgaattggaccctaacctttatcgcatagggcaatccaaaatttttttccgtacgggagtgctggcgcatcttgaagaggagcgggacttgaagatcaccgacgttataatggcctttcaggccatgtgtagggggtacctcgctcgcaaagcatttgccaagcgccagcaacagctgacagccatgaaggtaatccagcgaaactgcgcagcttatctgaagctgcgtaactggcaatggtggagactgtttaccaaggtgaagccgttactccaagtgacccgacaggaggaggagatgcaagctaaggaagacgagctgcagaaaaccaaagagagacaacagaaagcggagaacgaactgaaggagctggaacagaaacactcccagctgacagaagaaaaaaatcttcttcaggaacaattacaggcagagactgagctgtacgccgaggctgaggagatgcgcgtgcgcctggccgccaagaaacaggagctggaggaaatcttgcacgagatggaagcccggttggaagaggaagaggatcgcggccagcagttacaagcagaacgcaaaaagatggctcagcaaatgctcgacctggaagaacagttggaagaagaggaggcggcccgacagaagctgcaactggaaaaggtcactgccgaggcaaagatcaaaaagcttgaggatgaaattttggtgatggacgaccagaataataagttgagcaaagagcggaaattattggaggagcgaatctcagacctgactacaaatcttgccgaggaggaggagaaagcaaaaaatttgaccaaactgaaaaataagcacgagtctatgatctccgagcttgaggtgcggttgaagaaggaagagaagagtcgacaggagctcgaaaaactgaagagaaaactcgagggggacgcatcagattttcatgaacagattgcagatctgcaggctcagattgccgagcttaaaatgcaacttgctaagaaagaggaggagctgcaagccgcacttgcccgactggatgacgagattgctcagaaaaacaacgcattgaagaaaatcagagagctggaaggacacataagcgacctacaggaggacctcgattccgagcgcgccgcccgcaacaaagcagaaaagcaaaaacgagatctgggtgaagaactagaagctcttaagaccgaacttgaggatacacttgactccacagccacacagcaggagttgagggctaagagagagcaggaggtcacggtacttaaaaaggctctggacgaggaaacaagatcccacgaggcgcaggtgcaggaaatgcggcagaaacatgcccaggccgtggaagagctgacagagcagttggaacaattcaagagagctaaagccaatctagataaaaataagcagactctggaaaaggaaaatgcagatctggccggcgagttgagagttttagggcaggctaaacaggaagtcgagcacaagaagaaaaaactcgaagcccaggtccaggagctgcaatccaaatgctccgatggcgaaagggcgagagcggagctcaatgataaggtgcacaaactgcagaatgaggtggaatccgtgaccggcatgctcaatgaagccgaaggaaaggctatcaaactggccaaggacgtggcctccctctcctctcagcttcaggacacccaggaactgctacaggaggaaacccggcaaaaactcaatgtgagtactaagttgcgacagctggaggaggagagaaattctttgcaggaccagctagatgaggaaatggaagcaaagcaaaacctggaacgccacatttcaaccctgaacatacagctgagtgactctaagaaaaagctgcaggacttcgcctccactgttgaagccttggaagaaggaaaaaaacgattccagaaggagatcgaaaatctgacccaacagtacgaggagaaggccgcagcttacgataagctggaaaaaactaaaaatcgcctgcagcaggagctggatgaccttgtggtggaccttgataaccagagacagttggtgtccaatcttgagaaaaagcaaaggaagtttgaccagctcctggccgaagaaaagaacatctctagcaaatacgctgacgagcgggatcgagcagaagcagaggccagagagaaggaaaccaaagccctgtccttggctcgggctctggaagaagcccttgaggcgaaggaggaactggaaagaaccaataaaatgttgaaggccgaaatggaggatctagtgagttccaaggacgacgtggggaaaaatgtgcatgagttggaaaagtctaaacgcgctctggaaacacaaatggaggagatgaagacgcagctggaagagttggaggatgagctacaggccactgaagacgctaagttacggctcgaagtgaacatgcaggcccttaaagggcagtttgagcgagacctgcaggctcgagatgagcagaatgaggagaagagaagacagcttcagcgtcagctccatgaatatgagaccgagttggaggacgaacggaagcagagagcattagcggccgccgccaagaagaagctggaaggcgatctcaaggaccttgaactgcaggccgacagcgcaattaagggaagagaggaggcgattaagcaactgcggaagttgcaggcccagatgaaggacttccagcgcgaactggaggatgccagggccagccgcgatgaaatcttcgctaccgcaaaagagaatgagaagaaggccaagtctctggaagccgatctgatgcaactgcaggaggacctggccgctgcggaaagggcccgcaaacaggctgatctggaaaaagaagagctggcagaggaattggcatcctcgctttccggacgtaatgccctccaggacgagaagcgaaggttagaggctcgaatcgcccaacttgaggaggagctggaagaggaacagggcaacatggaggcaatgtccgacagagtcaggaaagccacacaacaggctgagcaactgtccaatgaactggctacggagcgctcaaccgcgcagaaaaacgagagtgcacgacagcaacttgagagacagaataaggagttgcgctctaaactacacgagatggagggtgccgtgaagtccaaattcaagtccacaatcgctgccctggaagccaagatcgcacagctggaggaacaggtcgaacaagaggcccgggaaaaacaggccgccaccaagagcctgaaacaaaaggacaaaaagctaaaggagatcctgctgcaggtggaagatgagagaaagatggccgaacagtataaggaacaagccgaaaagggaaatgcccgggtgaagcaacttaagcgccagttggaggaggcggaagaggaatcccaacgcattaacgctaacaggcggaaattgcagcgtgagctcgatgaggcaacggaaagtaatgaggctatgggcagggaggtcaatgctctcaaaagcaagcttcggggcccaccaccccaggagacatcacagtag

SEQ ID NO: 32602 - DNA, 6090 bp, Artificial Sequence
  derived and/or modified sequence
atggcccagaagggccagctgagtgatgatgagaagttcctgtttgtggacaagaacttcatcaacagccctgtggcccaggccgactgggccgccaagaggctggtgtgggtgcccagcgagaagcagggctttgaagctgccagcatcaaggaggagaagggagatgaggtggtggtggagctggtggagaatggcaagaaggtgacagtgggcaaggatgacatccagaagatgaacccccccaagttcagcaaggtggaggacatggccgagctgacctgcctgaatgaggcctctgtgctgcacaacctgcgggagcgctacttcagcggcctcatctacacctacagcggcctcttctgtgtggtggtgaacccctacaagcacctgcccatctacagcgagaagatcgtggacatgtacaagggcaagaagagacatgagatgccaccccacatctatgccatcgctgacacagcctaccgctccatgctgcaggaccgggaggaccagagcatcctgtgcacaggagagagcggggccggcaagacagagaacaccaagaaggtgatccagtacctggccgtggtggccagcagccacaagggcaagaaggacaccagcatcacagagggccccagcttctggagaggagagctggagaagcagctgctgcaggccaaccccatcctggaggcctttggaaatgccaagacagtgaagaatgacaacagcagcagatttgggaagttcatccgcatcaactttgatgtgacaggctacatcgtgggcgccaacatcgagacctacctgctggagaagagccgggccatccggcaggccagagatgagaggaccttccacatcttctactacatgattgctggggccaaggagaagatgagaagtgacctgctgctggagggcttcaacaactacaccttcctgagcaatggatttgtgcccatcccagctgcccaggatgatgagatgttccaggagaccgtggaggccatggccatcatgggcttcagcgaggaggagcagctgagcatcctgaaggtggtgtcctctgtgctgcagctgggcaacatcgtgttcaagaaggagaggaacacagaccaggcctccatgccagacaacacagctgcccagaaggtgtgccacctgatgggcatcaacgtgacagacttcaccaggagcatcctgaccccccgcatcaaggtgggcagagatgtggtgcagaaggcccagaccaaggagcaggccgactttgctgtggaggccctggccaaggccacctatgaaagactcttccgctggatcctgaccagggtgaacaaggccctggacaagacccaccggcagggcgccagcttcctgggcatcctggacattgctggctttgagatctttgaggtgaacagctttgagcagctgtgcatcaactacaccaatgagaagctgcagcagctgttcaaccacaccatgttcatcctggagcaggaggagtaccagcgggagggcatcgagtggaacttcatcgactttggcctggacctgcagccctgcatcgagctgattgagcggcccaacaaccccccaggagtgctggccctgctggatgaggagtgctggttccccaaggccacagacaagagctttgtggagaagctgtgcacagagcagggcagccaccccaagttccagaagcccaagcagctgaaggacaagacagagttcagcatcatccactacgccggcaaggtggactacaatgccagcgcctggctgaccaagaacatggaccccctgaatgacaacgtgaccagcctgctgaatgccagcagtgacaagtttgtggccgacctgtggaaggatgtggaccgcatcgtgggcctggaccagatggccaagatgacagagagcagcctgcccagcgccagcaagaccaagaagggcatgttcagaacagtgggccagctgtacaaggagcagctgggcaagctgatgaccaccctgaggaacaccacccccaactttgtgcgctgcatcatccccaaccacgagaagaggtctgggaagctggatgccttcctggtgctggagcagctgcgctgcaatggagtgctggagggcatccgcatctgccggcagggcttccccaaccgcatcgtgttccaggagttccggcagagatatgagatcctggccgccaatgccatccccaagggcttcatggatggcaagcaggcctgcatcctgatgatcaaggccctggagctggaccccaacctgtaccgcatcggccagagcaagatcttcttcagaactggagtgctggcccacctggaggaggagcgggacctgaagatcacagatgtgatcatggccttccaggccatgtgccggggctacctggccaggaaggcctttgccaagaggcagcagcagctgacagccatgaaggtgatccagaggaactgtgccgcctacctgaagctgaggaactggcagtggtggaggctcttcaccaaggtgaagcccctgctgcaggtgacccggcaggaggaggagatgcaggccaaggaggatgagctgcagaagaccaaggagcggcagcagaaggcagaaaatgagctgaaggagctggagcagaagcacagccagctgacagaggagaagaacctgctgcaggagcagctgcaggccgagacagagctgtatgcagaggccgaggagatgagggtgcggctggccgccaagaagcaggagctggaggagatcctgcacgagatggaggcccggctggaggaggaggaggaccggggccagcagctgcaggccgagaggaagaagatggcccagcagatgctggacctggaggagcagctggaggaggaggaggccgcccggcagaagctgcagctggagaaggtgacagctgaggccaagatcaagaagctggaggatgagatcctggtgatggatgaccagaacaacaagctgagcaaggagaggaagctgctggaggagcgcatcagtgacctgaccaccaacctggccgaggaggaggagaaggccaagaacctgaccaagctgaagaacaagcatgagagcatgatcagcgagctggaggtgcggctgaagaaggaggagaagagccggcaggagctggagaagctgaagaggaagctggagggagatgccagtgacttccacgagcagattgctgacctgcaggcccagattgctgagctgaagatgcagctggccaagaaggaggaggagctgcaggccgccctggcccggctggatgatgagatcgcccagaagaacaatgccctgaagaagatccgggagctggagggccacatcagtgacctgcaggaggacctggacagcgagagagctgccaggaacaaggccgagaagcagaagagggacctgggggaggagctggaggccctgaagacagagctggaggacaccctggacagcacagccacccagcaggagctgcgggccaagcgggagcaggaggtgacagtgctgaagaaggccctggatgaggagaccaggagccatgaggcccaggtgcaggagatgaggcagaagcacgcccaggccgtggaggagctgacagagcagctggagcagttcaagagggccaaggccaacctggacaagaacaagcagaccctggagaaggaaaatgctgacctggccggggagctgcgggtgctgggccaggccaagcaggaggtggagcacaagaagaagaagctggaggcccaggtgcaggagctgcagagcaagtgcagtgatggagagcgggcccgggcagagctgaatgacaaggtgcacaagctgcagaatgaggtggagagcgtgacaggcatgctgaatgaggccgagggcaaggccatcaagctggccaaggatgtggccagcctgagcagccagctgcaggacacccaggagctgctgcaggaggagacccggcagaagctgaatgtgtccaccaagctgcggcagctggaggaggagaggaacagcctgcaggaccagctggatgaggagatggaggccaagcagaacctggagcggcacatcagcaccctgaacatccagctgagtgacagcaagaagaagctgcaggactttgccagcacagtggaggccctggaggagggcaagaagcgcttccagaaggagattgagaacctgacccagcagtatgaggagaaggccgccgcctatgacaagctggagaagaccaagaaccggctgcagcaggagctggatgacctggtggtggacctggacaaccagaggcagctggtgagcaacctggagaagaagcagaggaagtttgaccagctgctggccgaggagaagaacatcagcagcaaatatgcagatgagcgggacagagctgaggccgaggcccgggagaaggagaccaaggccctgagcctggcccgggccctggaggaggccctggaggccaaggaggagctggagaggaccaacaagatgctgaaggccgagatggaggacctggtgagcagcaaggatgatgtgggcaagaatgtgcatgagctggagaagagcaagagggccctggagacccagatggaggagatgaagacccagctggaggagctggaggatgagctgcaggccacagaagatgccaagctgcggctggaggtgaacatgcaggccctgaagggccagtttgagcgggacctgcaggccagagatgagcagaatgaggagaagaggcggcagctgcagaggcagctgcacgagtatgaaacagagctggaggatgagaggaagcagagggccctggccgccgccgccaagaagaagctggagggggacctgaaggacctggagctgcaggccgacagcgccatcaagggccgggaggaggccatcaagcagctgaggaagctgcaggcccagatgaaggacttccagcgggagctggaggatgcccgggccagcagagatgagatctttgccacagccaaggaaaatgagaagaaggccaagagcctggaggccgacctgatgcagctgcaggaggacctggccgctgctgagcgggccaggaagcaggccgacctggagaaggaggagctggccgaggagctggccagcagcctgtctggaagaaatgccctgcaggatgagaagaggcggctggaggccagaattgcccagctggaggaggagctggaggaggagcagggcaacatggaggccatgtctgacagagtgaggaaggccacccagcaggccgagcagctgagcaatgagctggccacagagaggagcacagcccagaagaatgaaagtgcccggcagcagctggagcggcagaacaaggagctgcggagcaagctgcacgagatggagggcgctgtgaagagcaagttcaagagcaccatcgccgccctggaggccaagatcgcccagctggaggagcaggtggagcaggaggcccgggagaagcaggccgccaccaagagcctgaagcagaaggacaagaagctgaaggagatcctgctgcaggtggaggatgagaggaagatggccgagcagtacaaggagcaggccgagaagggaaatgcccgggtgaagcagctgaagaggcagctggaggaggccgaggaggagagccagaggatcaatgccaacagaaggaagctgcagcgggagctggatgaggccacagagagcaatgaggccatgggccgggaggtgaatgccctgaagagcaagctgcggggccccccccacaggaagctgcggagtgatgcccctggagaggagacccggcccctgtccttcctgctggagggcctggaggatgtggagctgctgaagatgcagatggtgctgcggaggaagaggaccctggagacccagacctccatggagcccaggcctgtgaacaagcagctgagcacagtgctgcaccacggcaagaagaccaagaaccagaacaagcagaccaagaagacccagcagcagcccaggaccaagcagaacccagctgactgcacctag

SEQ ID NO: 32603 - DNA, 5838 bp, Artificial Sequence
  derived and/or modified sequence
atggcccagaagggccagctgagtgatgatgagaagttcctgtttgtggacaagaacttcatcaacagccctgtggcccaggccgactgggccgccaagaggctggtgtgggtgcccagcgagaagcagggctttgaagctgccagcatcaaggaggagaagggagatgaggtggtggtggagctggtggagaatggcaagaaggtgacagtgggcaaggatgacatccagaagatgaacccccccaagttcagcaaggtggaggacatggccgagctgacctgcctgaatgaggcctctgtgctgcacaacctgcgggagcgctacttcagcggcctcatctacacctacagcggcctcttctgtgtggtggtgaacccctacaagcacctgcccatctacagcgagaagatcgtggacatgtacaagggcaagaagagacatgagatgccaccccacatctatgccatcgctgacacagcctaccgctccatgctgcaggaccgggaggaccagagcatcctgtgcacaggagagagcggggccggcaagacagagaacaccaagaaggtgatccagtacctggccgtggtggccagcagccacaagggcaagaaggacaccagcatcacccagggccccagctttgcctacggggagctggagaagcagctgctgcaggccaaccccatcctggaggcctttggaaatgccaagacagtgaagaatgacaacagcagcagatttgggaagttcatccgcatcaactttgatgtgacaggctacatcgtgggcgccaacatcgagacctacctgctggagaagagccgggccatccggcaggccagagatgagaggaccttccacatcttctactacatgattgctggggccaaggagaagatgagaagtgacctgctgctggagggcttcaacaactacaccttcctgagcaatggatttgtgcccatcccagctgcccaggatgatgagatgttccaggagaccgtggaggccatggccatcatgggcttcagcgaggaggagcagctgagcatcctgaaggtggtgtcctctgtgctgcagctgggcaacatcgtgttcaagaaggagaggaacacagaccaggcctccatgccagacaacacagctgcccagaaggtgtgccacctgatgggcatcaacgtgacagacttcaccaggagcatcctgaccccccgcatcaaggtgggcagagatgtggtgcagaaggcccagaccaaggagcaggccgactttgctgtggaggccctggccaaggccacctatgaaagactcttccgctggatcctgaccagggtgaacaaggccctggacaagacccaccggcagggcgccagcttcctgggcatcctggacattgctggctttgagatctttgaggtgaacagctttgagcagctgtgcatcaactacaccaatgagaagctgcagcagctgttcaaccacaccatgttcatcctggagcaggaggagtaccagcgggagggcatcgagtggaacttcatcgactttggcctggacctgcagccctgcatcgagctgattgagcggcccaacaaccccccaggagtgctggccctgctggatgaggagtgctggttccccaaggccacagacaagagctttgtggagaagctgtgcacagagcagggcagccaccccaagttccagaagcccaagcagctgaaggacaagacagagttcagcatcatccactacgccggcaaggtggactacaatgccagcgcctggctgaccaagaacatggaccccctgaatgacaacgtgaccagcctgctgaatgccagcagtgacaagtttgtggccgacctgtggaaggatgtggaccgcatcgtgggcctggaccagatggccaagatgacagagagcagcctgcccagcgccagcaagaccaagaagggcatgttcagaacagtgggccagctgtacaaggagcagctgggcaagctgatgaccaccctgaggaacaccacccccaactttgtgcgctgcatcatccccaaccacgagaagaggtctgggaagctggatgccttcctggtgctggagcagctgcgctgcaatggagtgctggagggcatccgcatctgccggcagggcttccccaaccgcatcgtgttccaggagttccggcagagatatgagatcctggccgccaatgccatccccaagggcttcatggatggcaagcaggcctgcatcctgatgatcaaggccctggagctggaccccaacctgtaccgcatcggccagagcaagatcttcttcagaactggagtgctggcccacctggaggaggagcgggacctgaagatcacagatgtgatcatggccttccaggccatgtgccggggctacctggccaggaaggcctttgccaagaggcagcagcagctgacagccatgaaggtgatccagaggaactgtgccgcctacctgaagctgaggaactggcagtggtggaggctcttcaccaaggtgaagcccctgctgcaggtgacccggcaggaggaggagatgcaggccaaggaggatgagctgcagaagaccaaggagcggcagcagaaggcagaaaatgagctgaaggagctggagcagaagcacagccagctgacagaggagaagaacctgctgcaggagcagctgcaggccgagacagagctgtatgcagaggccgaggagatgagggtgcggctggccgccaagaagcaggagctggaggagatcctgcacgagatggaggcccggctggaggaggaggaggaccggggccagcagctgcaggccgagaggaagaagatggcccagcagatgctggacctggaggagcagctggaggaggaggaggccgcccggcagaagctgcagctggagaaggtgacagctgaggccaagatcaagaagctggaggatgagatcctggtgatggatgaccagaacaacaagctgagcaaggagaggaagctgctggaggagcgcatcagtgacctgaccaccaacctggccgaggaggaggagaaggccaagaacctgaccaagctgaagaacaagcatgagagcatgatcagcgagctggaggtgcggctgaagaaggaggagaagagccggcaggagctggagaagctgaagaggaagctggagggagatgccagtgacttccacgagcagattgctgacctgcaggcccagattgctgagctgaagatgcagctggccaagaaggaggaggagctgcaggccgccctggcccggctggatgatgagatcgcccagaagaacaatgccctgaagaagatccgggagctggagggccacatcagtgacctgcaggaggacctggacagcgagagagctgccaggaacaaggccgagaagcagaagagggacctgggggaggagctggaggccctgaagacagagctggaggacaccctggacagcacagccacccagcaggagctgcgggccaagcgggagcaggaggtgacagtgctgaagaaggccctggatgaggagaccaggagccatgaggcccaggtgcaggagatgaggcagaagcacgcccaggccgtggaggagctgacagagcagctggagcagttcaagagggccaaggccaacctggacaagaacaagcagaccctggagaaggaaaatgctgacctggccggggagctgcgggtgctgggccaggccaagcaggaggtggagcacaagaagaagaagctggaggcccaggtgcaggagctgcagagcaagtgcagtgatggagagcgggcccgggcagagctgaatgacaaggtgcacaagctgcagaatgaggtggagagcgtgacaggcatgctgaatgaggccgagggcaaggccatcaagctggccaaggatgtggccagcctgagcagccagctgcaggacacccaggagctgctgcaggaggagacccggcagaagctgaatgtgtccaccaagctgcggcagctggaggaggagaggaacagcctgcaggaccagctggatgaggagatggaggccaagcagaacctggagcggcacatcagcaccctgaacatccagctgagtgacagcaagaagaagctgcaggactttgccagcacagtggaggccctggaggagggcaagaagcgcttccagaaggagattgagaacctgacccagcagtatgaggagaaggccgccgcctatgacaagctggagaagaccaagaaccggctgcagcaggagctggatgacctggtggtggacctggacaaccagaggcagctggtgagcaacctggagaagaagcagaggaagtttgaccagctgctggccgaggagaagaacatcagcagcaaatatgcagatgagcgggacagagctgaggccgaggcccgggagaaggagaccaaggccctgagcctggcccgggccctggaggaggccctggaggccaaggaggagctggagaggaccaacaagatgctgaaggccgagatggaggacctggtgagcagcaaggatgatgtgggcaagaatgtgcatgagctggagaagagcaagagggccctggagacccagatggaggagatgaagacccagctggaggagctggaggatgagctgcaggccacagaagatgccaagctgcggctggaggtgaacatgcaggccctgaagggccagtttgagcgggacctgcaggccagagatgagcagaatgaggagaagaggcggcagctgcagaggcagctgcacgagtatgaaacagagctggaggatgagaggaagcagagggccctggccgccgccgccaagaagaagctggagggggacctgaaggacctggagctgcaggccgacagcgccatcaagggccgggaggaggccatcaagcagctgaggaagctgcaggcccagatgaaggacttccagcgggagctggaggatgcccgggccagcagagatgagatctttgccacagccaaggaaaatgagaagaaggccaagagcctggaggccgacctgatgcagctgcaggaggacctggccgctgctgagcgggccaggaagcaggccgacctggagaaggaggagctggccgaggagctggccagcagcctgtctggaagaaatgccctgcaggatgagaagaggcggctggaggccagaattgcccagctggaggaggagctggaggaggagcagggcaacatggaggccatgtctgacagagtgaggaaggccacccagcaggccgagcagctgagcaatgagctggccacagagaggagcacagcccagaagaatgaaagtgcccggcagcagctggagcggcagaacaaggagctgcggagcaagctgcacgagatggagggcgctgtgaagagcaagttcaagagcaccatcgccgccctggaggccaagatcgcccagctggaggagcaggtggagcaggaggcccgggagaagcaggccgccaccaagagcctgaagcagaaggacaagaagctgaaggagatcctgctgcaggtggaggatgagaggaagatggccgagcagtacaaggagcaggccgagaagggaaatgcccgggtgaagcagctgaagaggcagctggaggaggccgaggaggagagccagaggatcaatgccaacagaaggaagctgcagcgggagctggatgaggccacagagagcaatgaggccatgggccgggaggtgaatgccctgaagagcaagctgcggggccccccaccccaggagaccagccagtag

SEQ ID NO: 32604 - DNA, 6941 bp, Artificial Sequence
  derived and/or modified sequence
gggagatttggacgctccggcctgggaggtgcgtcagatccgagctcgccatccagtttcctctccactagtccccccagttggagatctgggaccaacaaggcaccatggcgcagaagggccaactcagtgacgatgagaagttcctctttgtggacaaaaacttcatcaacagcccagtggcccaggctgactgggccgccaagagactcgtctgggtcccctcggagaagcagggcttcgaggcagccagcattaaggaggagaagggggatgaggtggttgtggagctggtggagaatggcaagaaggtcacggttgggaaagatgacatccagaagatgaacccacccaagttctccaaggtggaggacatggcggagctgacgtgcctcaacgaagcctccgtgctacacaacctgagggagcggtacttctcagggctaatatatacgtactctggcctcttctgcgtggtggtcaacccctataaacacctgcccatctactcggagaagatcgtcgacatgtacaagggcaagaagaggcacgagatgccgcctcacatctacgccatcgcagacacggcctaccggagcatgcttcaagatcgggaggaccagtccattctatgcacaggcgagtctggagccgggaaaaccgaaaacaccaagaaggtcattcagtacctggccgtggtggcctcctcccacaagggcaagaaagacacaagtatcacggagggaccgtctttttggcgaggagagctggaaaagcagcttctacaagcaaacccgattctggaggctttcggcaacgccaaaacagtgaagaacgacaactcctcacgattcggcaaattcatccgcatcaacttcgacgtcacgggttacatcgtgggagccaacattgagacctatctgctagaaaaatcacgggcaattcgccaagccagagacgagaggacattccacatcttttactacatgattgctggagccaaggagaagatgagaagtgacttgcttttggagggcttcaacaactacaccttcctctccaatggctttgtgcccatcccagcagcccaggatgatgagatgttccaggaaaccgtggaggccatggcaatcatgggtttcagcgaggaggagcagctatccatattgaaggtggtatcatcggtcctgcagcttggaaatatcgtcttcaagaaggaaagaaacacagaccaggcgtccatgccagataacacagctgctcagaaagtttgccacctcatgggaattaatgtgacagatttcaccagatccatcctcactcctcgtatcaaggttgggcgagatgtggtacagaaagctcagacaaaagaacaggctgactttgctgtagaggctttggccaaggcaacatatgagcgccttttccgctggatactcacccgcgtgaacaaagccctggacaagacccatcggcaaggggcttccttcctggggatcctggatatagctggatttgagatctttgaggtgaactccttcgagcagctgtgcatcaactacaccaacgagaagctgcagcagctcttcaaccacaccatgttcatcctggagcaggaggagtaccagcgcgagggcatcgagtggaacttcatcgactttgggctggacctacagccctgcatcgagctcatcgagcgaccgaacaaccctccaggtgtgctggccctgctggacgaggaatgctggttccccaaagccacggacaagtctttcgtggagaagctgtgcacggagcagggcagccaccccaagttccagaagcccaagcagctcaaggacaagactgagttctccatcatccattatgctgggaaggtggactataatgcgagtgcctggctgaccaagaatatggacccgctgaatgacaacgtgacttccctgctcaatgcctcctccgacaagtttgtggccgacctgtggaaggacgtggaccgcatcgtgggcctggaccagatggccaagatgacggagagctcgctgcccagcgcctccaagaccaagaagggcatgttccgcacagtggggcagctgtacaaggagcagctgggcaagctgatgaccacgctacgcaacaccacgcccaacttcgtgcgctgcatcatccccaaccacgagaagaggtccggcaagctggatgcgttcctggtgctggagcagctgcggtgcaatggggtgctggaaggcattcgcatctgccggcagggcttccccaaccggatcgtcttccaggagttccgccaacgctacgagatcctggcggcgaatgccatccccaaaggcttcatggacgggaagcaggcctgcattctcatgatcaaagccctggaacttgaccccaacttatacaggatagggcagagcaaaatcttcttccgaactggcgtcctggcccacctagaggaggagcgagatttgaagatcaccgatgtcatcatggccttccaggcgatgtgtcgtggctacttggccagaaaggcttttgccaagaggcagcagcagctgaccgccatgaaggtgattcagaggaactgcgccgcctacctcaagctgcggaactggcagtggtggaggcttttcaccaaagtgaagccactgctgcaggtgacacggcaggaggaggagatgcaggccaaggaggatgaactgcagaagaccaaggagcggcagcagaaggcagagaatgagcttaaggagctggaacagaagcactcgcagctgaccgaggagaagaacctgctacaggaacagctgcaggcagagacagagctgtatgcagaggctgaggagatgcgggtgcggctggcggccaagaagcaggagctggaggagatactgcatgagatggaggcccgcctggaggaggaggaagacaggggccagcagctacaggctgaaaggaagaagatggcccagcagatgctggaccttgaagaacagctggaggaggaggaagctgccaggcagaagctgcaacttgagaaggtcacggctgaggccaagatcaagaaactggaggatgagatcctggtcatggatgatcagaacaataaactatcaaaagaacgaaaactccttgaggagaggattagtgacttaacgacaaatcttgcagaagaggaagaaaaggccaagaatcttaccaagctgaaaaacaagcatgaatctatgatttcagaactggaagtgcggctaaagaaggaagagaagagccgacaggagctggagaagctgaaacggaagctggagggtgatgccagcgacttccacgagcagatcgctgacctccaggcgcagatcgcagagctcaagatgcagctggccaagaaggaggaggagctgcaggcggccctggccaggcttgacgatgaaatcgctcagaagaacaatgccctgaagaagatccgggagctggagggccacatctcagacctccaggaggacctggactcagagcgggccgccaggaacaaggctgaaaagcagaagcgagacctcggcgaggagctggaggccctaaagacagagctggaagacacactggacagcacagccactcagcaggagctcagggccaagagggagcaggaggtgacggtgctgaagaaggccctggatgaagagacgcggtcccatgaggctcaggtccaggagatgaggcagaaacacgcacaggcggtggaggagctcacagagcagcttgagcagttcaagagggccaaggcgaacctagacaagaataagcagacgctggagaaagagaacgcagacctggccggggagctgcgggtcctgggccaggccaagcaggaggtggaacataagaagaagaagctggaggcgcaggtgcaggagctgcagtccaagtgcagcgatggggagcgggcccgggcggagctcaatgacaaagtccacaagctgcagaatgaagttgagagcgtcacagggatgcttaacgaggccgaggggaaggccattaagctggccaaggacgtggcgtccctcagttcccagctccaggacacccaggagctgcttcaagaagaaacccggcagaagctcaacgtgtctacgaagctgcgccagctggaggaggagcggaacagcctgcaagaccagctggacgaggagatggaggccaagcagaacctggagcgccacatctccactctcaacatccagctctccgactcgaagaagaagctgcaggactttgccagcaccgtggaagctctggaagaggggaagaagaggttccagaaggagatcgagaacctcacccagcagtacgaggagaaggcggccgcttatgataaactggaaaagaccaagaacaggcttcagcaggagctggacgacctggttgttgatttggacaaccagcggcaactcgtgtccaacctggaaaagaagcagaggaaatttgatcagttgttagccgaggagaaaaacatctcttccaaatacgcggatgagagggacagagctgaggcagaagccagggagaaggaaaccaaggccctgtccctggctcgggcccttgaagaggccttggaagccaaagaggaactcgagcggaccaacaaaatgctcaaagccgaaatggaagacctggtcagctccaaggatgacgtgggcaagaacgtccatgagctggagaagtccaagcgggccctggagacccagatggaggagatgaagacgcagctggaagagctggaggacgagctgcaagccacggaggacgccaaactgcggctggaagtcaacatgcaggcgctcaagggccagttcgaaagggatctccaagcccgggacgagcagaatgaggagaagaggaggcaactgcagagacagcttcacgagtatgagacggaactggaagacgagcgaaagcaacgtgccctggcagctgcagcaaagaagaagctggaaggggacctgaaagacctggagcttcaggccgactctgccatcaaggggagggaggaagccatcaagcagctacgcaaactgcaggctcagatgaaggactttcaaagagagctggaagatgcccgtgcctccagagatgagatctttgccacagccaaagagaatgagaagaaagccaagagcttggaagcagacctcatgcagctacaagaggacctcgccgccgctgagagggctcgcaaacaagcggacctcgagaaggaggaactggcagaggagctggccagtagcctgtcgggaaggaacgcactccaggacgagaagcgccgcctggaggcccggatcgcccagctggaggaggagctggaggaggagcagggcaacatggaggccatgagcgaccgggtccgcaaagccacacagcaggccgagcagctcagcaacgagctggccacagagcgcagcacggcccagaagaatgagagtgcccggcagcagctcgagcggcagaacaaggagctccggagcaagctccacgagatggagggggccgtcaagtccaagttcaagtccaccatcgcggcgctggaggccaagattgcacagctggaggagcaggtcgagcaggaggccagagagaaacaggcggccaccaagtcgctgaagcagaaagacaagaagctgaaggaaatcttgctgcaggtggaggacgagcgcaagatggccgagcagtacaaggagcaggcagagaaaggcaatgccagggtcaagcagctcaagaggcagctggaggaggcagaggaggagtcccagcgcatcaacgccaaccgcaggaagctgcagcgggagctggatgaggccacggagagcaacgaggccatgggccgcgaggtgaacgcactcaagagcaagctcagagggcccccccacaggaaacttcgcagtgatgcaccaggcgaggaaacgagacctctttcgttccttctagaaggtctggaggacgtagagttattgaaaatgcagatggttctgaggaggaaacggacactcgagacgcagacttcaatggaaccaaggccagtgaataagcaactttctacagttttgcaccacggcaagaaaaccaaaaaccaaaacaaacaaacaaaaaaaacccaacaacaacccagaacaaagcaaaacccagcagactgtacttagcattgtctaaatccattctcaaattccaaatatcacagacacccctcacacaaggaatataaaaaccaccaccctccagcctgggcaacgtagtaaaacctcatctatacaagaatttaaaaataagctgggcgtggtggtacacacctgtggtcccagctactagggaggctgagccaggaagaacgctccagcccaggacttcgaggctgcaatgagctataattgcatcattgcactccagcctgggcaacagagaccctgtctcaaccaccaccaccaccaccacccctactacccctgtattcaaggtaaaaattgaagtttgtatgatgtaagagatgagaaaaacccaacaggaaacacagacacatcctccagttctatcaatggattgtgcagacactgagtttttagaaaaacatatccacggtaaccggtccctggcaattctgtttacatgaaatggggagaaagtcaccgaaatgggtgccgccggcccccactcccaattcattccctaacctgcaaacctttccaacttctcacgtcaggcctttgagaattctttccccctctcctggtttccacacctcagacacgcacagttcaccaagtgccttctgtagtcacatgaattgaaaaggagacgctgctcccacggaggggagcaggaatgctgcactgtttacaccctgactgtgcttaaaaacactttcactaataaatggttataaatcacaa

SEQ ID NO: 32605 - DNA, 6090 bp, Artificial Sequence
  derived and/or modified sequence
atggcccagaagggccagctgagcgacgacgagaagttcctgttcgttgacaagaattttataaacagcccggtggctcaggctgactgggccgcaaagcgtctcgtatgggttcccagtgagaaacaagggttcgaagctgcctctattaaggaggaaaagggggacgaagtcgtggtggaactggtagaaaacggcaagaaagtgacagtaggtaaggacgatatccagaagatgaatcctcctaagttctcaaaagtagaggacatggcggagttaacttgtctgaacgaagctagcgtactgcataatctccgcgagaggtacttctccggactcatctacacctacagtggcctgttttgcgtcgtagtgaacccgtacaaacacctgccaatttactcagagaaaatagtagacatgtataagggcaagaagaggcacgagatgcctcctcacatttatgctatagccgataccgcgtaccgctctatgctgcaggatcgcgaggatcagtcgatactgtgtacaggggaaagcggggccggaaaaactgaaaacactaaaaaggttatccagtatctcgcagtcgttgcctcatctcacaagggtaagaaagacacctccattactgagggtcctagcttctggcggggcgaattggaaaagcagctcctgcaagcaaatcccattctggaggcattcggaaatgcgaagacggtgaagaacgacaactcaagccgatttgggaaattcatcagaattaatttcgatgtcaccggctacattgtaggcgccaacattgagacgtacctgcttgaaaagtccagggcgataaggcaggctcgggatgagaggacattccatatcttttactacatgatagcaggcgcaaaggagaagatgaggtcagatttattactggaaggctttaacaactatacttttctgtctaacgggttcgtgccgattcccgccgcccaggatgacgaaatgttccaggaaactgtcgaagccatggcaatcatgggtttctcagaagaagaacaattgagcatcctgaaggtcgtttcctctgtgttgcaactggggaacatagtgtttaaaaaggaacggaacacagatcaggctagcatgccagacaataccgccgcgcagaaggtctgtcatctgatgggaattaacgtgacagactttactagatctattcttactccgcggattaaagtgggaagggacgtggtgcagaaggcccagacaaaggagcaggcagacttcgccgttgaggccctggctaaggccacgtatgagagactttttcggtggatcctcacccgtgtgaacaaagcactggataagacccatagacaaggcgcctccttcttggggattctcgatatcgctgggttcgagatctttgaggtaaactcctttgagcagctatgtattaattatacaaacgagaagttgcagcagttgttcaaccacacgatgtttatcctagagcaagaggagtaccagagagaggggattgagtggaacttcatcgatttcggcttggacctgcagccatgcattgaactgatcgagagaccaaataacccacctggtgtgctcgccctgctggatgaggaatgctggttccccaaggctacagataaatcattcgtggagaagctgtgtacggagcagggctctcaccccaaatttcagaaacccaagcaacttaaggataagacagagttctctatcattcactacgccggcaaggtggattacaacgctagcgcatggctcacgaaaaatatggatcccttaaacgacaatgtgacctccctgttgaacgctagcagcgacaaatttgtagccgacctgtggaaggacgtagatcggattgtgggtcttgatcagatggctaagatgaccgaaagcagcctgcctagcgcctcaaagaccaagaaaggcatgtttcgaactgttggccaactttacaaagaacaactcggcaagctaatgacaacacttcgtaacactaccccaaattttgttagatgtattatcccgaatcacgaaaaacgatctgggaagctagacgctttcttggtattagagcagcttaggtgcaacggagtcctcgagggaatccgcatctgcaggcaagggttccctaatcgcattgtatttcaggaatttaggcagcggtatgagatactggcagctaatgccattcctaaggggttcatggacggcaagcaggcttgcatcctaatgattaaggccctggagcttgacccgaacctctatagaataggacagagtaagatatttttccggaccggtgtgctggctcacctcgaggaagagcgagacctcaaaattaccgatgtgatcatggcttttcaagctatgtgcagggggtacctggctcgcaaggcctttgcaaagcgccaacagcaactgaccgctatgaaagttattcaacgcaattgcgccgcctacttgaagctgaggaattggcaatggtggaggctctttacgaaggtaaaacccctgctccaagtcactagacaagaagaagagatgcaggctaaggaagatgaacttcagaaaacaaaagaaaggcaacagaaggccgaaaacgagctgaaggagctggagcagaaacatagccagctgactgaagaaaagaacttgctgcaagaacaactgcaggctgaaacagaactgtatgctgaggctgaagagatgcgggtgcgcctagcagccaaaaaacaagagctcgaggaaatactgcatgagatggaggcccgcctcgaagaggaagaagaccgtggacagcagttgcaagccgaacggaagaagatggctcagcagatgcttgatctagaagaacagctggaggaagaggaggccgctcgccaaaagttacagctggagaaggtcacggccgaggccaaaatcaagaaactggaggacgagatcctcgttatggacgaccagaacaataagctgtccaaagaaaggaaactgttggaggagcgcatcagcgatctgaccaccaacctggccgaggaggaagagaaagctaaaaacctcacaaaactgaaaaataagcacgagagcatgatcagcgaactggaagtaaggctgaagaaggaagaaaagagtaggcaggaattagaaaaactcaaaagaaagctggaaggtgacgcctcagactttcatgagcagattgctgacttacaagctcagatcgctgagctgaagatgcaactggccaagaaggaggaggagcttcaggccgctctagcccggctggacgacgaaatagcacaaaagaataatgctttgaagaaaattcgcgaactggagggccacattagcgatcttcaggaggacctcgattctgaacgggccgcaaggaacaaagccgagaagcaaaaaagagatctgggcgaggagctcgaagcccttaagaccgagctggaggacaccctcgactccacagctactcagcaggagctccgggcaaagagagagcaggaggttacagtactgaaaaaggcactggacgaggagaccaggtctcatgaggcacaggtgcaagagatgcgccagaagcatgcacaagcagtcgaggaactgacagagcagttggaacagtttaaacgcgccaaggctaacttagacaagaacaagcagactctcgagaaggaaaatgcagaccttgccggcgaacttagggtgttggggcaggccaaacaggaagtagaacacaagaaaaagaagcttgaggctcaagtgcaggagctccagagcaagtgctccgacggtgaaagggctcgcgccgagcttaatgataaggtgcataagctccagaacgaggtagagtctgtgactggaatgttgaacgaggctgaaggaaaggcaatcaagctcgcaaaggatgtggcaagcttaagcagtcagttgcaggatacccaggagctgttgcaggaggagacgcggcagaagctgaacgtgtccactaagctgaggcagctggaggaggaaagaaattccttgcaagatcagctggacgaagaaatggaagccaagcagaatttagaacgccacatctccacccttaatatccagctgtctgattccaaaaagaaactgcaggactttgcctccacagtggaagccttggaggaagggaaaaaaagatttcagaaggagattgaaaacctcacgcagcaatatgaagaaaaggctgccgcgtatgacaaactggagaaaaccaagaaccggctgcagcaggaactcgatgacctggtagtcgatttagataaccagcggcagttggtttcaaaccttgaaaaaaagcagcgtaagttcgatcaactgctcgcggaagagaaaaatatctcctctaagtacgctgatgagcgggaccgagccgaggcggaggcgagggagaaagagaccaaggctctgtcgttggctcgggcgcttgaggaggcgttggaagccaaagaggagctagaacgcactaacaaaatgctaaaggctgaaatggaggacctggttagctctaaggacgacgtgggcaagaacgtgcacgaactcgagaaatcaaaaagggcattagaaacacaaatggaagaaatgaagactcaattggaggagctcgaagacgagctccaggctacggaggacgccaaattacggctggaggtcaacatgcaagccctaaagggacagttcgaaagggacctccaagcacgagatgaacagaatgaagagaagagaagacagttacaaagacagctgcatgagtacgaaactgagttggaagatgaacgaaagcaacgggcgcttgcagctgcagcaaaaaaaaagctggagggggacctgaaagatctggagttgcaggctgacagcgcaataaagggacgggaggaggccattaagcagcttcgaaagcttcaggcccagatgaaagatttccagcgggaattggaagatgcccgggcgtcacgcgatgaaatctttgccaccgctaaggagaatgagaagaaggcgaagagtttggaagccgacctgatgcagttgcaagaggacctggccgctgccgagagagcgcgcaagcaggcggacctggagaaggaagagctggcagaagagctggctagtagcctgagcggtagaaacgctctacaggacgagaagaggagactagaagcccgaatcgcacaactcgaagaagaactggaagaggagcaaggaaatatggaagcgatgtccgaccgggtaaggaaagctacacagcaggccgagcagttgtccaatgagctcgcaaccgagcggtccacggcacagaaaaacgaaagcgcaagacagcaactcgagagacagaacaaggagctcagatctaagctgcatgaaatggaaggtgccgtaaagtctaaattcaagagcacaatcgctgcactggaagccaaaattgcccagctagaggagcaagttgaacaggaagcgcgggaaaagcaggctgcaacaaaaagcttgaagcagaaggataagaaacttaaagaaatcttgctccaggtggaggatgagcgcaaaatggccgaacagtacaaggaacaggctgaaaagggcaacgcgagagtgaaacagttgaaacgccagctagaggaggcagaagaagagtcacaaaggatcaatgcaaatcgcaggaagctccagagagagctcgacgaagccacagaaagtaacgaagccatggggcgcgaagtcaacgctctgaagtcaaagttaagagggcctcctcatcggaagctccggagcgatgctccaggggaagagactcggcctctgagttttctgctcgagggactagaggacgtggagcttctgaaaatgcaaatggtgctgcggcgcaaaagaaccctggaaacacaaaccagtatggagccccgaccagtcaataagcagctgagcacagtgctgcaccatgggaagaagacaaagaatcagaacaagcagaccaaaaaaactcagcagcagccacggactaagcagaacccggctgactgtacttag

SEQ ID NO: 32606 - DNA, 5838 bp, Artificial Sequence
  derived and/or modified sequence
atggcccagaagggccagctgagcgacgacgagaagttcctgttcgtggacaaaaactttattaattctcccgtcgcccaagccgactgggccgcgaaaagactggtgtgggtgccatcagaaaagcaaggttttgaagccgcttctataaaagaggagaagggagacgaagtggtggtcgaacttgttgaaaacgggaaaaaagttaccgtgggtaaggacgatatccagaagatgaatcccccgaagttttccaaggtggaggatatggccgaattaacttgtctcaatgaggcatcagttctccataatctgagagagcggtacttctctggtctgatttatacctatagcggactgttctgcgttgtcgtcaatccctataagcatctcccaatatactccgaaaagatcgtggacatgtataagggcaaaaagaggcacgagatgcctccccacatttacgccatcgcagacacagcatatcgaagcatgcttcaagatcgcgaggaccagagcattctatgtactggtgagtcaggcgcaggcaaaacggagaatacgaaaaaggtgattcaatacctcgctgtagttgcatcatcccacaagggcaaaaaggataccagcatcactcaagggccctcctttgcatacggcgagctggaaaagcagctgctccaggctaaccccatcctggaagcatttgggaacgctaaaactgtcaaaaatgataactcttctcgctttgggaaattcattcggatcaatttcgacgttactggctacatcgtaggagccaacatcgaaacttatctcctggaaaaatcaagggccatccgtcaggctagggatgagaggacctttcatatattctactatatgatcgctggagcaaaagaaaagatgcgtagcgaccttctgctcgaaggtttcaacaattacactttcttaagtaacggctttgtgcccatcccagctgcgcaggacgatgagatgtttcaagagaccgtcgaggctatggctatcatgggatttagcgaagaggaacaactgtccattctgaaagtggtgtcttcggtcctccagctgggaaatatcgtgttcaaaaaagagcgcaatacagatcaggcatcaatgccagacaacacagcagcacagaaggtgtgccacttaatgggtatcaatgtcaccgactttactcggagtatactcactcctagaatcaaggtgggccgggacgtagtccagaaagctcagaccaaggagcaggcagattttgcagttgaagcgctagcaaaagccacgtacgagcgcctgttccgctggattctaacccgggtgaataaagccctagacaagacacatcggcaaggagcatcttttttgggtatcttagacatagcaggcttcgaaatcttcgaggtgaactccttcgagcagctctgcatcaactacaccaacgagaaactgcaacagttatttaaccatacaatgttcatcttagagcaggaagagtaccagagagagggcattgaatggaacttcattgacttcggtctggatctgcaaccctgcatagaactgattgaacgacctaacaacccgcctggcgtgttagccctgctcgatgaagagtgctggttcccaaaggccacggataagagcttcgtggaaaagctgtgcacagaacaaggctcgcatcctaagtttcaaaaacctaagcagctgaaggataagaccgaattttctatcatccactacgctggtaaggtcgattacaacgcctcagcttggttgaccaaaaatatggatccattaaacgacaatgtgaccagtttattgaacgcctcctctgataagtttgtggccgacctgtggaaggatgtggatcggattgtcggcttggatcagatggcaaaaatgacagagtcatccctcccatccgcatctaagacgaagaaggggatgttcagaacggtaggccagctgtacaaggaacagcttggtaagctgatgactacgctgaggaacaccactcctaacttcgtgaggtgcattatccctaatcatgaaaaaagatccggcaagttggacgccttcctggtgctcgaacaattgcggtgtaacggggtgctcgaaggaataagaatttgtcgacagggtttccccaatagaatcgtttttcaggagttcaggcagagatatgaaatcctcgctgcaaatgccatccctaaaggatttatggatgggaagcaggcctgcatactcatgatcaaagcgctcgagctggaccccaacctgtatagaataggtcaatccaagatattctttagaaccggagtgctggcgcatctggaagaggagcgggatctaaagatcacggatgtgattatggctttccaggccatgtgtcgaggatacctcgccagaaaagccttcgcaaagagacagcagcagcttaccgccatgaaggtgatccagcggaactgcgctgcttatctaaaactgcgaaattggcaatggtggcgcttgttcaccaaagtgaagcctctcttgcaggtaacccgtcaggaggaggagatgcaggctaaggaggacgagctccagaagaccaaggaaagacagcagaaggcagaaaacgagcttaaggagctagaacagaaacacagccagctgactgaggaaaaaaacctcctccaggagcagttgcaggccgagacagaactctatgccgaagccgaagaaatgagagtaaggctggctgctaaaaaacaggaattggaagagatacttcacgagatggaagcccggctggaggaagaagaagaccggggacaacaactgcaggctgagcgcaaaaagatggctcagcaaatgttagacttggaggaacagttggaagaagaggaggctgctcgacagaagcttcaattggagaaggtgactgcagaggccaagattaagaaactcgaagacgagattctcgtcatggacgatcaaaacaataagctgtccaaagaaaggaagctgcttgaggaacgcatctctgatctgacaacaaatctggccgaagaagaagaaaaggccaagaatctaacaaagctgaaaaacaagcacgagtccatgatctctgagttagaggttcgcctgaagaaggaggaaaagtcaaggcaggagctcgaaaagctgaagcggaaactggagggagacgcgtctgattttcacgaacagatagccgacctgcaagcccaaatcgctgagctcaagatgcagttggccaagaaggaggaagagctgcaggctgcattggcacgtcttgacgacgaaattgctcagaagaacaacgccctgaaaaagattcgagaactggagggacacatatccgatctgcaggaggaccttgattcagagcgggccgcccgtaataaagccgagaagcagaaacgcgacctgggcgaggaactggaggctctgaagacagaattagaagacactctggatagcacggctacccagcaggaactgcgggccaagagagaacaggaagtgacggtgcttaaaaaagctctggatgaggagactaggtcccatgaggctcaggtgcaggagatgcgccaaaagcacgcccaggcagtagaggagctgactgagcagcttgagcagtttaaacgagccaaggccaacttggacaagaacaagcagaccctggaaaaggaaaatgcagatctcgcgggcgagctgagagtgcttggtcaagccaagcaagaggtcgaacataagaagaagaaattggaagcccaggtgcaagaactccagagtaaatgctcagatggagagcgcgcacgggctgaactaaatgataaggtacataaactgcagaatgaggtagaaagtgtcaccgggatgctcaacgaggctgagggtaaggccataaagcttgcaaaggatgtggcctctctcagctcccaattacaggatacacaggagcttctgcaagaagagacccgacagaagctgaatgtcagcaccaaactacgacaattagaggaagagcgaaactcgctacaggaccagctggacgaggaaatggaagccaagcaaaatctggaaagacatatatccacactgaatattcaactgtcagactcaaaaaaaaagctgcaagatttcgcttctaccgtcgaagctctagaggaagggaagaagcgctttcagaaagaaattgagaacttgacccaacagtatgaagaaaaggctgctgcatacgacaagctcgaaaaaactaaaaaccggctacagcaggagctggatgatctcgttgttgatctggacaaccagcggcagctggtctcaaacctggagaaaaagcagcgtaagttcgaccagctcctggcagaagagaaaaatatctcttccaaatacgccgacgaaagggaccgagccgaggccgaggcgcgcgaaaaagagactaaggctctgtcactagcccgcgcccttgaagaggccctggaggctaaagaggagctcgaacgaacaaataagatgctgaaagcggagatggaggatctggtttctagtaaagatgacgtcggcaaaaacgtgcacgagttggagaagtctaagcgcgcgctcgagactcagatggaagaaatgaagacacagctcgaagagttggaggacgagttgcaggctacagaggacgccaaactccgactggaagtaaatatgcaggctcttaaggggcagttcgagagggatctgcaagcaagagacgagcagaacgaagagaagcgcagacagttgcagcgacaactccatgaatacgagaccgaactggaggatgaaaggaagcaaagagctctcgccgcagcagctaagaaaaaactcgaaggagaccttaaagacctggagttgcaggctgattccgccataaaaggcagggaagaggcgatcaagcagctgaggaaactccaggctcaaatgaaagatttccagcgggaactggaagacgcaagggcctcacgggatgaaatctttgctactgctaaagaaaacgaaaagaaggcaaaaagtttagaggccgatcttatgcagctacaggaagaccttgcagccgcggagcgggcgaggaaacaggcagacctcgagaaggaagaacttgctgaagagctagcgtcttcactcagcgggagaaacgcacttcaggatgaaaaacgtagactggaagcccgcatcgcacaactggaagaagagttggaggaggaacagggcaacatggaagccatgtcggacagggttcggaaggccacacagcaagctgaacagctcagcaacgagttggccacagagaggagcactgcacaaaaaaatgagtctgccaggcagcagctggaaagacagaacaaggagttgcgcagtaaactccacgagatggaaggcgcagtcaagtccaagtttaagagcaccattgccgcgctcgaggcaaaaatagctcagcttgaagagcaggtggagcaggaagctcgggagaagcaagcggctactaaatcactgaaacagaaggacaaaaagttgaaagaaattttgctccaggtcgaggatgagagaaagatggcagaacagtacaaagagcaggccgaaaagggtaacgccagagtcaagcagctaaagcgacagctcgaggaggccgaagaggagtcacaacggataaacgcgaacagacgcaagttgcaaagagagcttgatgaggctactgagtccaatgaggcgatggggagagaagtgaatgctctcaagagcaaattgcggggtcctccaccacaggagacgtcacagtag

SEQ ID NO: 32607 - DNA, 6089 bp, Artificial Sequence
  derived and/or modified sequence
atggcccaaaagggtcaactcagcgacgacgagaagttcctctttgtcgacaaaaattttatcaattcaccagtggcccaggccgactgggccgctaagcgcctggtttgggtaccgagtgaaaagcaaggattcgaagccgcttccatcaaggaggaaaagggggacgaagtggtcgtggagttagttgaaaatggtaaaaaggtcaccgtgggtaaagatgatatccagaagatgaaccctcccaaattcagtaaggtcgaggacatggctgaactcacctgtctgaatgaagcgtcagttctgcataacctgcgggaaaggtacttcagtgggctcatctatacctattcaggactgttctgcgtagttgttaatccatacaagcacctgcccatctattctgagaaaatcgttgatatgtataagggcaaaaagcgacacgagatgcctcctcatatctacgcaattgcagatacagcatataggagcatgctgcaggatcgggaagaccagagcattctctgtaccggagaaagcggagcgggtaagaccgaaaacacgaaaaaggtaatccagtacttggcagtggtcgcctctagtcacaagggaaaaaaggacacatctatcactgagggcccttcgttctggaggggtgagctggagaagcagctccttcaggctaacccaattttggaggcattcggcaatgccaagacggtgaaaaacgacaattcatcccggtttggcaaattcattcggattaatttcgacgtgacaggttacatcgtgggtgccaacattgagacctacctgcttgagaaatctcgggcaattcgacaggctcgtgacgagcgcacttttcacatcttctactacatgatcgcaggcgctaaagaaaagatgagaagcgacctgctcttagagggatttaataattacacctttctgtccaatggctttgtccccatacctgctgcacaggatgatgagatgttccaagaaacagtggaggcaatggcaattatgggattttctgaagaggaacaactgtcaattctcaaggtcgtgagtagtgtccttcagctaggcaatatagtctttaagaaagaaaggaacaccgatcaggccagcatgcccgacaacacagccgctcaaaaagtctgtcatctgatgggaattaacgtgaccgactttaccaggtccatccttactcctagaatcaaagtgggccgagacgtggtccagaaagcccaaactaaagaacaagccgatttcgcagttgaagccttagccaaagcaacctacgaaaggctgtttagatggatactgactagggttaacaaagctctcgataaaacgcaccggcagggggcttccttccttggcatattagacattgcgggattcgagatattcgaggtgaactccttcgaacaactctgtatcaactacacgaacgagaagctacagcagctgtttaatcatacgatgttcatcctggagcaggaggagtatcagcgagaggggattgagtggaacttcatagattttgggcttgacctacagccatgtattgagttaatcgagaggcctaataatcctcccggtgtccttgccctgttggatgaggaatgctggttcccgaaagctaccgacaagtcattcgttgagaagctttgtactgaacaagggtcacacccaaaatttcagaaacccaagcagcttaaagacaagacagagttcagcattatacattatgcaggcaaagtcgattacaatgcctccgcctggctgaccaagaatatggatcccctgaatgataatgtgaccagcctactgaacgcaagttcagataagttcgtcgccgacctgtggaaagacgtcgacagaattgtcggattagaccagatggccaaaatgaccgagtccagcctcccctctgcttcaaagaccaaaaaaggcatgttccgcaccgttggccaactgtacaaagagcaactgggcaaactcatgaccacgcttcgtaacaccacacctaacttcgttcggtgcatcatccccaaccacgaaaagaggtcaggcaaactggatgcctttcttgtactggaacagctcaggtgcaacggggttctggaaggcatccggatttgtaggcaaggatttcctaatcgcatcgttttccaagagttcagacagcgctatgagatccttgccgcaaatgccattcccaagggctttatggatggaaagcaggcttgtattcttatgattaaagcgctggaacttgacccaaatctatatcgaatcgggcaaagtaaaatcttcttccggacaggagtcttggcacatctggaagaagaacgggatctgaagattacggatgtcatcatggcctttcaagctatgtgcagaggatatctggcaaggaaggcattcgcaaagcgacaacagcagctgacagctatgaaggtgattcaaaggaattgcgccgcatacctcaagcttaggaactggcagtggtggcggctgtttaccaaagtgaagccactgcttcaagtgaccagacaggaggaagagatgcaggccaaagaggatgagctgcagaaaactaaggagaggcaacagaaggctgaaaatgagctaaaggagttagagcagaaacatagccaacttacggaagaaaaaaatctgttacaagagcaactgcaagcagagacggaactgtacgccgaagcagaagagatgagagtgagattggctgccaagaagcaggagctcgaagagattctgcacgaaatggaggcacgcctggaggaggaggaggataggggccagcagctgcaagccgagcgaaagaagatggctcagcagatgttagacctcgaagagcaactagaagaggaggaggcagcacgccagaaattgcagctcgagaaagtgaccgcagaagcaaagatcaaaaagctagaggacgagatacttgttatggacgatcaaaataacaagcttagcaaagagaggaagcttctggaagagcggataagtgacctaacgactaacctcgctgaggaggaggagaaggctaagaaccttacaaaactaaagaataaacatgagtctatgatctccgagctcgaggttcggctgaagaaagaagaaaaaagcaggcaggaactggaaaaactcaaaagaaaactcgagggagatgccagtgacttccacgagcaaatcgccgatcttcaggcacagattgcagaactaaagatgcagctagctaaaaaagaggaagaactccaagcagctctcgcgagattggatgatgaaatcgcgcagaaaaataatgcacttaaaaaaatcagggagctggaaggccatataagtgacttgcaagaggacttggactccgaaagggctgccaggaacaaggcagaaaaacagaagcgagatctcggagaagagctcgaggctctgaaaactgagctagaagatacactggactccaccgccactcagcaggagcttcgagcaaaaagagaacaggaggtcacggtcctaaaaaaagctctggacgaggaaactcgtagccacgaggcgcaggtgcaggaaatgcggcagaagcacgctcaagcagtggaggaactgaccgagcagctggagcagtttaagcgggcaaaggcaaatctcgataaaaataagcagaccttagagaaggaaaacgctgacttagctggagagctgagagtgctgggacaggccaaacaggaggtggaacataagaagaaaaagttggaggcgcaggtacaagaacttcagtctaaatgtagcgacggcgaacgggctagagcagaactcaacgacaaggtgcataagttacagaacgaggtggaatccgtcacgggtatgctgaatgaggccgagggcaaagccataaaactagctaaagacgttgccagcctctcttcccaactgcaagacacacaggaactcttgcaagaggagacccgccagaaactgaacgtttctacaaaactgcgacaattagaggaagaaagaaacagtttgcaggatcagctggacgaagaaatggaggctaagcagaatttagagcgccacatatccactctaaatatacagctgagtgactctaaaaaaaagctgcaggactttgcaagtactgtcgaggcgctcgaagaagggaagaagcggtttcaaaaagagatagagaatcttactcagcaatacgaagagaaggccgcagcctacgataagctggagaagacaaagaatcgactccagcaagaactcgatgacctcgtcgtcgatctggataaccaaagacagctagtgtcgaacttagagaaaaagcagcgtaagtttgatcaactactggccgaggagaagaacatctctagcaaatacgctgacgaacgagatagagctgaggcagaggcacgcgagaaggaaactaaagccttgagtctggcccgtgctctggaggaggcacttgaagccaaagaagagttggagagaacgaataaaatgcttaaggcggaaatggaggacctcgtgtccagtaaggatgacgtggggaaaaacgtccatgagttggaaaaatctaagagggcgttggagactcagatggaagagatgaaaacccagctggaggaactcgaggatgagctccaggcaacagaggacgctaaactgcgcctcgaggtgaatatgcaggcactgaagggtcagttcgagcgcgatctccaggcaagggacgagcagaacgaagagaagcgtcgacagctacagcggcagctgcatgagtacgagacggaattggaagatgagaggaaacagagagccttggctgccgcagcaaagaaaaagctggagggcgacctgaaggatctggagttgcaggccgactctgcaataaaaggtcgggaagaggcaattaagcagctccggaagctgcaggcacaaatgaaggacttccagcgtgagttagaggacgcacgcgcatctcgggacgaaatttttgccacagctaaggagaacgaaaagaaggccaaaagcctggaggccgaccttatgcagctgcaggaggatcttgctgctgctgagagggcacgcaaacaggcggatcttgaaaaggaggaactggccgaagagttggcatcttcactcagcggtcggaatgcgttgcaggacgagaagcgcaggctcgaggctcggatagcacagctcgaagaagagctggaggaggaacaggggaacatggaggcaatgtctgatcgtgtgcgcaaggccacacaacaagcagaacaactgagcaatgagttagccacggagaggtcaaccgcacagaaaaatgaaagcgcccgtcaacagttggaaagacaaaacaaggaattaagaagcaagctccatgaaatggagggcgcagtgaaatctaaatttaagagcacgattgccgcactggaggccaagattgcccaactcgaagaacaagtcgagcaggaagcaagggagaagcaagccgctaccaaaagccttaaacagaaggataagaaattgaaagagattctcctgcaggttgaggacgagcggaaaatggccgaacaatacaaggagcaggccgagaagggcaatgctagagttaaacagttgaaacgccagttagaggaggcagaagaagagtctcagagaatcaacgctaaccggcgaaaactgcagcgggagctcgatgaagcaaccgagagcaatgaggccatgggccgagaagttaacgcgctgaaatcgaaacttcgcggacctccacatcggaagctgcgctccgatgcacctggagaggaaacccggcctttgtcgttcctcctagagggactggaggatgtcgaactgttaaagatgcagatggttctgcggagaaaacggacgttggagacgcagacttccatggagccaaggccggtaaataagcagctgtctaccgtgctccatcatggtaagaaaactaagaaccaaaataagcaaaccaagaaaacccagcagcaacccagaacgaaacagaatcccgctgattgtacata

SEQ ID NO: 32608 - DNA, 5837 bp, Artificial Sequence
  derived and/or modified sequence
atggcccagaaggggcagcttagcgacgatgagaaatttttatttgtggacaaaaacttcatcaacagccctgtggcccaggccgactgggccgcaaagcggttagtgtgggtcccatctgagaagcagggcttcgaagccgcatcaatcaaagaggaaaagggtgacgaggtggtcgttgaactggtggagaatggcaagaaagtcactgttggtaaggacgatatccagaaaatgaacccacctaagttcagtaaagtcgaggatatggcggaactcacatgcttaaacgaagcatccgttctgcacaatctgagagaacggtatttctcgggactgatttatacgtactccgggctcttctgcgtcgtcgtgaatccctacaagcatctgccaatctactctgaaaaaatcgtggatatgtacaaaggtaagaagcggcacgagatgccaccccatatctacgcaatagccgacactgcttaccgctctatgctacaggacagggaggatcagagtatactgtgtaccggtgagagcggcgctggaaagactgagaatacaaaaaaagtcatccagtacctggcggtcgtggcatctagccacaagggcaagaaagatacatctattacgcagggtccaagcttcgcttacggtgaactagagaagcagttgctgcaggctaaccccattctcgaggccttcggaaatgccaaaacagtgaagaatgacaattcatccagatttgggaagtttatccgcatcaatttcgatgtcacaggatatatcgtgggcgctaatatcgaaacttatctccttgaaaagtcaagggcaatccgacaggccagagatgaaaggacctttcatattttctactacatgattgctggcgcaaaggagaagatgaggtccgatctgctgctagaggggtttaataattatacatttttatccaacggcttcgtccccatcccagcagcccaggatgacgaaatgttccaagagaccgtcgaggctatggctatcatgggtttctctgaggaggaacagctgagtatattaaaggtcgtctctagcgtgctgcaattaggcaacatagtgttcaaaaaagagcgcaataccgaccaagccagcatgcctgataacacggccgctcagaaggtctgccacctcatgggaatcaacgtgacagatttcacacgatccattttgacaccacgcatcaaggttggccgagatgtggtgcagaaggcccagactaaagagcaggccgactttgctgtcgaggcactggccaaggctacctacgaacggctgttccgatggatcctgactcgtgtcaataaggctctggacaaaacacaccgtcagggggctagtttcctggggatcctcgacattgcaggttttgagatcttcgaggtgaatagtttcgagcagctctgtataaactacactaacgagaagctgcagcagttgttcaaccacacaatgtttatactggaacaggaggaatatcaacgggaaggcatcgagtggaactttattgattttggccttgatctccagccctgcattgagctaatcgaacgccctaataatcctcccggtgttctggccctcttggacgaagagtgctggttccccaaggccactgataagtccttcgtggagaagttgtgcacggaacagggatcccaccccaaattccaaaaacctaaacagctcaaagacaagacagagttctctataattcattacgcaggaaaggtggactataacgcctccgcctggctaaccaagaatatggatcccctgaatgataatgtgacatcccttctgaacgcctccagtgacaagtttgtggcagatctctggaaagatgtcgacaggatagttggcctggatcagatggccaagatgaccgagtcgagcctgcctagcgcaagtaagacaaaaaagggcatgtttcgcacagtgggccagctgtacaaagaacaattaggaaaactaatgacaactctccgcaacactacccccaatttcgtcaggtgtattattcctaaccacgaaaagagaagcgggaaacttgacgctttcctcgtgttggaacagctgcgctgcaatggggtcctggaaggcatccgcatttgtagacaagggtttcctaatcgtattgtcttccaggagtttagacaaaggtatgaaatactggccgctaatgctatccccaaaggattcatggatggtaagcaagcatgcattctcatgatcaaggccctggagttggatcctaatctgtatcgaatcggacaaagcaagatcttcttccgtaccggcgtactggcacatctcgaggaagagcgggaccttaagatcacggacgtaattatggctttccaagcgatgtgccgtggttacttagccaggaaagcttttgccaaacgccagcagcagttaacagccatgaaagtgatccagcgcaattgcgccgcttatctgaagctgaggaactggcaatggtggcgcttattcaccaaggtaaagcccttactgcaggtgacaaggcaggaagaagagatgcaagcaaaagaagatgaactccagaagaccaaggaaaggcaacagaaggccgaaaatgaactgaaggagttggaacagaaacactcccaattaacagaagaaaaaaacctgctgcaggagcagctacaggccgagactgagttatatgcagaggccgaggaaatgagggtacggctggccgcaaagaagcaggagctagaggagatcctgcacgaaatggaggcccgtctggaggaagaggaggatcgaggacagcaactgcaggctgagagaaagaagatggcccagcaaatgcttgacttggaggagcagctagaggaagaggaggcagccaggcagaaactccaactcgagaaggtaaccgcagaggccaagatcaagaagcttgaggacgagatcctggttatggatgaccagaacaataagctgtctaaggagcgcaagctgctcgaggagagaatctcagatctgaccaccaacctggccgaggaagaggagaaggcaaagaatctgacgaagctcaaaaacaagcatgagtctatgatcagcgagctagaggtacggctgaaaaaagaagaaaaaagccgccaggaactcgagaaacttaagagaaaacttgagggagacgcatcagacttccacgagcagatcgcagacctgcaggcccagatagccgaactgaagatgcagctggccaaaaaggaagaggaactgcaggctgctcttgcacgccttgatgacgaaatcgcgcagaaaaataatgccctaaagaagattcgcgaactagaaggacacatctcggaccttcaggaagatctggacagcgaacgcgctgcccgaaacaaggcggagaaacaaaagcgcgaccttggcgaggagctcgaggctttgaagactgaactcgaggataccctggattccacagccacccagcaggagctcagggctaaacgtgagcaagaggtaacggtcctaaagaaagcacttgatgaagaaactcggtctcatgaggctcaagtgcaggagatgcggcagaaacacgcccaggcagtggaggagctcaccgagcagctcgagcaattcaagagagctaaagctaacctggacaagaacaagcagactctagagaaagaaaacgcggatttggccggagaactacgcgtgctgggacaagctaagcaggaagttgagcacaagaagaaaaaattagaggcccaggtgcaggagcttcagtcgaagtgttccgacggtgagagagcccgtgccgagctgaacgataaggtgcacaaacttcagaacgaggtggaaagcgttacgggcatgctgaatgaggcagagggaaaagctattaaactcgctaaggatgtagcaagtctgagttctcagctgcaggatacccaagagttgctgcaggaggagactagacagaagctcaatgtctcaacgaagctgcgccaactagaggaagagcggaacagtttacaggatcagctggatgaagagatggaggccaagcagaacttggagcggcacatctcaaccctcaacatacagctgtcagatagcaagaagaaactgcaggatttcgcctctactgtggaagccctcgaggagggaaagaagcggttccagaaagagatagaaaatctcacccagcaatacgaagaaaaggcagctgcatacgacaaactggagaagactaaaaacagacttcagcaggagctagatgatctagtagtcgacttagataatcaacggcagctggttagcaatctcgaaaaaaagcaaagaaagttcgaccagctgttggcagaagagaaaaatatatcctcaaaatacgccgacgagcgggaccgtgccgaggccgaggcgcgtgaaaaggagaccaaagccttgagtttagctcgtgccctagaggaggctcttgaagccaaggaggagctggaaaggacaaacaagatgctgaaggccgaaatggaagacctggtttccagcaaagacgacgttggcaagaatgtgcacgagctggaaaagtcaaaaagggccttggagactcagatggaagaaatgaagacccagctggaagaactcgaggacgagcttcaggcaaccgaggatgcaaagctgcggttagaagtgaatatgcaggccctcaagggccagttcgagcgggatctccaagcccgtgatgaacagaatgaggaaaaacgcagacagctccagcgccagctgcatgagtacgagacagagctggaggatgaaagaaaacagcgggctctcgccgctgctgcaaagaaaaaactcgaaggggatcttaaagacttggagcttcaggccgactccgccattaaaggacgcgaagaagccattaaacaactgaggaaactccaggcccagatgaaggatttccagcgcgaactcgaggacgctcgtgcctcaagagacgaaatttttgccacagcaaaagagaacgagaagaaggcgaaatctctggaagctgatctgatgcagctccaggaagacctcgctgctgcagagagagctaggaaacaagccgacttagaaaaggaggagttggccgaagagctggcctcctcactttcagggaggaacgccttacaggacgagaaaagacgactagaagcacgaattgcccagctggaggaggagttagaagaggagcaagggaacatggaggccatgtcagaccgggtccgaaaggccacacagcaggcagagcagctttctaatgaacttgccactgaacgtagcacagcccagaaaaatgagtcagcccgtcagcagcttgagaggcaaaacaaggagctccgaagcaaactacatgaaatggaaggggctgtgaaatccaagtttaagtccacaatcgccgcactcgaggccaaaatcgcccagctggaggagcaggttgagcaagaggcaagagagaaacaagccgctaccaagtctctcaaacaaaaggacaaaaagctcaaggagatcttgctgcaggtggaagacgaaaggaaaatggctgagcaatacaaagaacaggccgaaaaaggaaacgcacgggtaaaacaactgaaacgccagctcgaggaggccgaagaggaatcacagcgaattaatgcaaatcggcgtaagttgcagcgagagctagatgaagctaccgagtcgaatgaggccatgggcagagaggtgaacgcgctgaagagcaagctgagaggccctccaccacaggagaccagtcagta

SEQ ID NO: 32609 - DNA, 6090 bp, Artificial Sequence
  derived and/or modified sequence
atggcccagaagggccagctgagcgacgacgagaagttcctgttcgtggacaagaacttcatcaacagccccgtggcccaggccgactgggccgccaagagactggtgtgggtgcccagcgagaagcagggcttcgaggccgccagcatcaaggaggagaagggcgacgaggtggtggtggagctggtggagaacggcaagaaggtgaccgtgggcaaggacgacatccagaagatgaacccccccaagttcagcaaggtggaggacatggccgagctgacctgcctgaacgaggccagcgtgctgcacaacctgagagagagatacttcagcggcctgatctacacctacagcggcctgttctgcgtggtggtgaacccctacaagcacctgcccatctacagcgagaagatcgtggacatgtacaagggcaagaagagacacgagatgcccccccacatctacgccatcgccgacaccgcctacagaagcatgctgcaggacagagaggaccagagcatcctgtgcaccggcgagagcggcgccggcaagaccgagaacaccaagaaggtgatccagtacctggccgtggtggccagcagccacaagggcaagaaggacaccagcatcaccgagggccccagcttctggagaggcgagctggagaagcagctgctgcaggccaaccccatcctggaggccttcggcaacgccaagaccgtgaagaacgacaacagcagcagattcggcaagttcatcagaatcaacttcgacgtgaccggctacatcgtgggcgccaacatcgagacctacctgctggagaagagcagagccatcagacaggccagagacgagagaaccttccacatcttctactacatgatcgccggcgccaaggagaagatgagaagcgacctgctgctggagggcttcaacaactacaccttcctgagcaacggcttcgtgcccatccccgccgcccaggacgacgagatgttccaggagaccgtggaggccatggccatcatgggcttcagcgaggaggagcagctgagcatcctgaaggtggtgagcagcgtgctgcagctgggcaacatcgtgttcaagaaggagagaaacaccgaccaggccagcatgcccgacaacaccgccgcccagaaggtgtgccacctgatgggcatcaacgtgaccgacttcaccagaagcatcctgacccccagaatcaaggtgggcagagacgtggtgcagaaggcccagaccaaggagcaggccgacttcgccgtggaggccctggccaaggccacctacgagagactgttcagatggatcctgaccagagtgaacaaggccctggacaagacccacagacagggcgccagcttcctgggcatcctggacatcgccggcttcgagatcttcgaggtgaacagcttcgagcagctgtgcatcaactacaccaacgagaagctgcagcagctgttcaaccacaccatgttcatcctggagcaggaggagtaccagagagagggcatcgagtggaacttcatcgacttcggcctggacctgcagccctgcatcgagctgatcgagagacccaacaacccccccggcgtgctggccctgctggacgaggagtgctggttccccaaggccaccgacaagagcttcgtggagaagctgtgcaccgagcagggcagccaccccaagttccagaagcccaagcagctgaaggacaagaccgagttcagcatcatccactacgccggcaaggtggactacaacgccagcgcctggctgaccaagaacatggaccccctgaacgacaacgtgaccagcctgctgaacgccagcagcgacaagttcgtggccgacctgtggaaggacgtggacagaatcgtgggcctggaccagatggccaagatgaccgagagcagcctgcccagcgccagcaagaccaagaagggcatgttcagaaccgtgggccagctgtacaaggagcagctgggcaagctgatgaccaccctgagaaacaccacccccaacttcgtgagatgcatcatccccaaccacgagaagagaagcggcaagctggacgccttcctggtgctggagcagctgagatgcaacggcgtgctggagggcatcagaatctgcagacagggcttccccaacagaatcgtgttccaggagttcagacagagatacgagatcctggccgccaacgccatccccaagggcttcatggacggcaagcaggcctgcatcctgatgatcaaggccctggagctggaccccaacctgtacagaatcggccagagcaagatcttcttcagaaccggcgtgctggcccacctggaggaggagagagacctgaagatcaccgacgtgatcatggccttccaggccatgtgcagaggctacctggccagaaaggccttcgccaagagacagcagcagctgaccgccatgaaggtgatccagagaaactgcgccgcctacctgaagctgagaaactggcagtggtggagactgttcaccaaggtgaagcccctgctgcaggtgaccagacaggaggaggagatgcaggccaaggaggacgagctgcagaagaccaaggagagacagcagaaggccgagaacgagctgaaggagctggagcagaagcacagccagctgaccgaggagaagaacctgctgcaggagcagctgcaggccgagaccgagctgtacgccgaggccgaggagatgagagtgagactggccgccaagaagcaggagctggaggagatcctgcacgagatggaggccagactggaggaggaggaggacagaggccagcagctgcaggccgagagaaagaagatggcccagcagatgctggacctggaggagcagctggaggaggaggaggccgccagacagaagctgcagctggagaaggtgaccgccgaggccaagatcaagaagctggaggacgagatcctggtgatggacgaccagaacaacaagctgagcaaggagagaaagctgctggaggagagaatcagcgacctgaccaccaacctggccgaggaggaggagaaggccaagaacctgaccaagctgaagaacaagcacgagagcatgatcagcgagctggaggtgagactgaagaaggaggagaagagcagacaggagctggagaagctgaagagaaagctggagggcgacgccagcgacttccacgagcagatcgccgacctgcaggcccagatcgccgagctgaagatgcagctggccaagaaggaggaggagctgcaggccgccctggccagactggacgacgagatcgcccagaagaacaacgccctgaagaagatcagagagctggagggccacatcagcgacctgcaggaggacctggacagcgagagagccgccagaaacaaggccgagaagcagaagagagacctgggcgaggagctggaggccctgaagaccgagctggaggacaccctggacagcaccgccacccagcaggagctgagagccaagagagagcaggaggtgaccgtgctgaagaaggccctggacgaggagaccagaagccacgaggcccaggtgcaggagatgagacagaagcacgcccaggccgtggaggagctgaccgagcagctggagcagttcaagagagccaaggccaacctggacaagaacaagcagaccctggagaaggagaacgccgacctggccggcgagctgagagtgctgggccaggccaagcaggaggtggagcacaagaagaagaagctggaggcccaggtgcaggagctgcagagcaagtgcagcgacggcgagagagccagagccgagctgaacgacaaggtgcacaagctgcagaacgaggtggagagcgtgaccggcatgctgaacgaggccgagggcaaggccatcaagctggccaaggacgtggccagcctgagcagccagctgcaggacacccaggagctgctgcaggaggagaccagacagaagctgaacgtgagcaccaagctgagacagctggaggaggagagaaacagcctgcaggaccagctggacgaggagatggaggccaagcagaacctggagagacacatcagcaccctgaacatccagctgagcgacagcaagaagaagctgcaggacttcgccagcaccgtggaggccctggaggagggcaagaagagattccagaaggagatcgagaacctgacccagcagtacgaggagaaggccgccgcctacgacaagctggagaagaccaagaacagactgcagcaggagctggacgacctggtggtggacctggacaaccagagacagctggtgagcaacctggagaagaagcagagaaagttcgaccagctgctggccgaggagaagaacatcagcagcaagtacgccgacgagagagacagagccgaggccgaggccagagagaaggagaccaaggccctgagcctggccagagccctggaggaggccctggaggccaaggaggagctggagagaaccaacaagatgctgaaggccgagatggaggacctggtgagcagcaaggacgacgtgggcaagaacgtgcacgagctggagaagagcaagagagccctggagacccagatggaggagatgaagacccagctggaggagctggaggacgagctgcaggccaccgaggacgccaagctgagactggaggtgaacatgcaggccctgaagggccagttcgagagagacctgcaggccagagacgagcagaacgaggagaagagaagacagctgcagagacagctgcacgagtacgagaccgagctggaggacgagagaaagcagagagccctggccgccgccgccaagaagaagctggagggcgacctgaaggacctggagctgcaggccgacagcgccatcaagggcagagaggaggccatcaagcagctgagaaagctgcaggcccagatgaaggacttccagagagagctggaggacgccagagccagcagagacgagatcttcgccaccgccaaggagaacgagaagaaggccaagagcctggaggccgacctgatgcagctgcaggaggacctggccgccgccgagagagccagaaagcaggccgacctggagaaggaggagctggccgaggagctggccagcagcctgagcggcagaaacgccctgcaggacgagaagagaagactggaggccagaatcgcccagctggaggaggagctggaggaggagcagggcaacatggaggccatgagcgacagagtgagaaaggccacccagcaggccgagcagctgagcaacgagctggccaccgagagaagcaccgcccagaagaacgagagcgccagacagcagctggagagacagaacaaggagctgagaagcaagctgcacgagatggagggcgccgtgaagagcaagttcaagagcaccatcgccgccctggaggccaagatcgcccagctggaggagcaggtggagcaggaggccagagagaagcaggccgccaccaagagcctgaagcagaaggacaagaagctgaaggagatcctgctgcaggtggaggacgagagaaagatggccgagcagtacaaggagcaggccgagaagggcaacgccagagtgaagcagctgaagagacagctggaggaggccgaggaggagagccagagaatcaacgccaacagaagaaagctgcagagagagctggacgaggccaccgagagcaacgaggccatgggcagagaggtgaacgccctgaagagcaagctgagaggccccccccacagaaagctgagaagcgacgcccccggcgaggagaccagacccctgagcttcctgctggagggcctggaggacgtggagctgctgaagatgcagatggtgctgagaagaaagagaaccctggagacccagaccagcatggagcccagacccgtgaacaagcagctgagcaccgtgctgcaccacggcaagaagaccaagaaccagaacaagcagaccaagaagacccagcagcagcccagaaccaagcagaaccccgccgactgcacctag

SEQ ID NO: 32610 - DNA, 5838 bp, Artificial Sequence
  derived and/or modified sequence
atggcccagaagggccagctgagcgacgacgagaagttcctgttcgtggacaagaacttcatcaacagccccgtggcccaggccgactgggccgccaagagactggtgtgggtgcccagcgagaagcagggcttcgaggccgccagcatcaaggaggagaagggcgacgaggtggtggtggagctggtggagaacggcaagaaggtgaccgtgggcaaggacgacatccagaagatgaacccccccaagttcagcaaggtggaggacatggccgagctgacctgcctgaacgaggccagcgtgctgcacaacctgagagagagatacttcagcggcctgatctacacctacagcggcctgttctgcgtggtggtgaacccctacaagcacctgcccatctacagcgagaagatcgtggacatgtacaagggcaagaagagacacgagatgcccccccacatctacgccatcgccgacaccgcctacagaagcatgctgcaggacagagaggaccagagcatcctgtgcaccggcgagagcggcgccggcaagaccgagaacaccaagaaggtgatccagtacctggccgtggtggccagcagccacaagggcaagaaggacaccagcatcacccagggccccagcttcgcctacggcgagctggagaagcagctgctgcaggccaaccccatcctggaggccttcggcaacgccaagaccgtgaagaacgacaacagcagcagattcggcaagttcatcagaatcaacttcgacgtgaccggctacatcgtgggcgccaacatcgagacctacctgctggagaagagcagagccatcagacaggccagagacgagagaaccttccacatcttctactacatgatcgccggcgccaaggagaagatgagaagcgacctgctgctggagggcttcaacaactacaccttcctgagcaacggcttcgtgcccatccccgccgcccaggacgacgagatgttccaggagaccgtggaggccatggccatcatgggcttcagcgaggaggagcagctgagcatcctgaaggtggtgagcagcgtgctgcagctgggcaacatcgtgttcaagaaggagagaaacaccgaccaggccagcatgcccgacaacaccgccgcccagaaggtgtgccacctgatgggcatcaacgtgaccgacttcaccagaagcatcctgacccccagaatcaaggtgggcagagacgtggtgcagaaggcccagaccaaggagcaggccgacttcgccgtggaggccctggccaaggccacctacgagagactgttcagatggatcctgaccagagtgaacaaggccctggacaagacccacagacagggcgccagcttcctgggcatcctggacatcgccggcttcgagatcttcgaggtgaacagcttcgagcagctgtgcatcaactacaccaacgagaagctgcagcagctgttcaaccacaccatgttcatcctggagcaggaggagtaccagagagagggcatcgagtggaacttcatcgacttcggcctggacctgcagccctgcatcgagctgatcgagagacccaacaacccccccggcgtgctggccctgctggacgaggagtgctggttccccaaggccaccgacaagagcttcgtggagaagctgtgcaccgagcagggcagccaccccaagttccagaagcccaagcagctgaaggacaagaccgagttcagcatcatccactacgccggcaaggtggactacaacgccagcgcctggctgaccaagaacatggaccccctgaacgacaacgtgaccagcctgctgaacgccagcagcgacaagttcgtggccgacctgtggaaggacgtggacagaatcgtgggcctggaccagatggccaagatgaccgagagcagcctgcccagcgccagcaagaccaagaagggcatgttcagaaccgtgggccagctgtacaaggagcagctgggcaagctgatgaccaccctgagaaacaccacccccaacttcgtgagatgcatcatccccaaccacgagaagagaagcggcaagctggacgccttcctggtgctggagcagctgagatgcaacggcgtgctggagggcatcagaatctgcagacagggcttccccaacagaatcgtgttccaggagttcagacagagatacgagatcctggccgccaacgccatccccaagggcttcatggacggcaagcaggcctgcatcctgatgatcaaggccctggagctggaccccaacctgtacagaatcggccagagcaagatcttcttcagaaccggcgtgctggcccacctggaggaggagagagacctgaagatcaccgacgtgatcatggccttccaggccatgtgcagaggctacctggccagaaaggccttcgccaagagacagcagcagctgaccgccatgaaggtgatccagagaaactgcgccgcctacctgaagctgagaaactggcagtggtggagactgttcaccaaggtgaagcccctgctgcaggtgaccagacaggaggaggagatgcaggccaaggaggacgagctgcagaagaccaaggagagacagcagaaggccgagaacgagctgaaggagctggagcagaagcacagccagctgaccgaggagaagaacctgctgcaggagcagctgcaggccgagaccgagctgtacgccgaggccgaggagatgagagtgagactggccgccaagaagcaggagctggaggagatcctgcacgagatggaggccagactggaggaggaggaggacagaggccagcagctgcaggccgagagaaagaagatggcccagcagatgctggacctggaggagcagctggaggaggaggaggccgccagacagaagctgcagctggagaaggtgaccgccgaggccaagatcaagaagctggaggacgagatcctggtgatggacgaccagaacaacaagctgagcaaggagagaaagctgctggaggagagaatcagcgacctgaccaccaacctggccgaggaggaggagaaggccaagaacctgaccaagctgaagaacaagcacgagagcatgatcagcgagctggaggtgagactgaagaaggaggagaagagcagacaggagctggagaagctgaagagaaagctggagggcgacgccagcgacttccacgagcagatcgccgacctgcaggcccagatcgccgagctgaagatgcagctggccaagaaggaggaggagctgcaggccgccctggccagactggacgacgagatcgcccagaagaacaacgccctgaagaagatcagagagctggagggccacatcagcgacctgcaggaggacctggacagcgagagagccgccagaaacaaggccgagaagcagaagagagacctgggcgaggagctggaggccctgaagaccgagctggaggacaccctggacagcaccgccacccagcaggagctgagagccaagagagagcaggaggtgaccgtgctgaagaaggccctggacgaggagaccagaagccacgaggcccaggtgcaggagatgagacagaagcacgcccaggccgtggaggagctgaccgagcagctggagcagttcaagagagccaaggccaacctggacaagaacaagcagaccctggagaaggagaacgccgacctggccggcgagctgagagtgctgggccaggccaagcaggaggtggagcacaagaagaagaagctggaggcccaggtgcaggagctgcagagcaagtgcagcgacggcgagagagccagagccgagctgaacgacaaggtgcacaagctgcagaacgaggtggagagcgtgaccggcatgctgaacgaggccgagggcaaggccatcaagctggccaaggacgtggccagcctgagcagccagctgcaggacacccaggagctgctgcaggaggagaccagacagaagctgaacgtgagcaccaagctgagacagctggaggaggagagaaacagcctgcaggaccagctggacgaggagatggaggccaagcagaacctggagagacacatcagcaccctgaacatccagctgagcgacagcaagaagaagctgcaggacttcgccagcaccgtggaggccctggaggagggcaagaagagattccagaaggagatcgagaacctgacccagcagtacgaggagaaggccgccgcctacgacaagctggagaagaccaagaacagactgcagcaggagctggacgacctggtggtggacctggacaaccagagacagctggtgagcaacctggagaagaagcagagaaagttcgaccagctgctggccgaggagaagaacatcagcagcaagtacgccgacgagagagacagagccgaggccgaggccagagagaaggagaccaaggccctgagcctggccagagccctggaggaggccctggaggccaaggaggagctggagagaaccaacaagatgctgaaggccgagatggaggacctggtgagcagcaaggacgacgtgggcaagaacgtgcacgagctggagaagagcaagagagccctggagacccagatggaggagatgaagacccagctggaggagctggaggacgagctgcaggccaccgaggacgccaagctgagactggaggtgaacatgcaggccctgaagggccagttcgagagagacctgcaggccagagacgagcagaacgaggagaagagaagacagctgcagagacagctgcacgagtacgagaccgagctggaggacgagagaaagcagagagccctggccgccgccgccaagaagaagctggagggcgacctgaaggacctggagctgcaggccgacagcgccatcaagggcagagaggaggccatcaagcagctgagaaagctgcaggcccagatgaaggacttccagagagagctggaggacgccagagccagcagagacgagatcttcgccaccgccaaggagaacgagaagaaggccaagagcctggaggccgacctgatgcagctgcaggaggacctggccgccgccgagagagccagaaagcaggccgacctggagaaggaggagctggccgaggagctggccagcagcctgagcggcagaaacgccctgcaggacgagaagagaagactggaggccagaatcgcccagctggaggaggagctggaggaggagcagggcaacatggaggccatgagcgacagagtgagaaaggccacccagcaggccgagcagctgagcaacgagctggccaccgagagaagcaccgcccagaagaacgagagcgccagacagcagctggagagacagaacaaggagctgagaagcaagctgcacgagatggagggcgccgtgaagagcaagttcaagagcaccatcgccgccctggaggccaagatcgcccagctggaggagcaggtggagcaggaggccagagagaagcaggccgccaccaagagcctgaagcagaaggacaagaagctgaaggagatcctgctgcaggtggaggacgagagaaagatggccgagcagtacaaggagcaggccgagaagggcaacgccagagtgaagcagctgaagagacagctggaggaggccgaggaggagagccagagaatcaacgccaacagaagaaagctgcagagagagctggacgaggccaccgagagcaacgaggccatgggcagagaggtgaacgccctgaagagcaagctgagaggcccccccccccaggagaccagccagtag

SEQ ID NO: 32611 - protein, 1979 aa, Artificial Sequence
  derived and/or modified sequence
MAQKGQLSDDEKFLFVDKNFINSPVAQADWAAKRLVWVPSEKQGFEAASIKEEKGDEVVVELVENGKKVTVGKDDIQKMNPPKFSKVEDMAELTCLNEASVLHNLRERYFSGLIYTYSGLFCVVVNPYKHLPIYSEKIVDMYKGKKRHEMPPHIYAIADTAYRSMLQDREDQSILCTGESGAGKTENTKKVIQYLAVVASSHKGKKDTSITQGPSFAYGELEKQLLQANPILEAFGNAKTVKNDNSSRFGKFIRINFDVTGYIVGANIETYLLEKSRAIRQARDERTFHIFYYMIAGAKEKMRSDLLLEGFNNYTFLSNGFVPIPAAQDDEMFQETVEAMAIMGFSEEEQLSILKVVSSVLQLGNIVFKKERNTDQASMPDNTAAQKVCHLMGINVTDFTRSILTPRIKVGRDVVQKAQTKEQADFAVEALAKATYERLFRWILTRVNKALDKTHRQGASFLGILDIAGFEIFEVNSFEQLCINYTNEKLQQLFNHTMFILEQEEYQREGIEWNFIDFGLDLQPCIELIERPNNPPGVLALLDEECWFPKATDKSFVEKLCTEQGSHPKFQKPKQLKDKTEFSIIHYAGKVDYNASAWLTKNMDPLNDNVTSLLNASSDKFVADLWKDVDRIVGLDQMAKMTESSLPSASKTKKGMFRTVGQLYKEQLGKLMTTLRNTTPNFVRCIIPNHEKRSGKLDAFLVLEQLRCNGVLEGIRICRQGFPNRIVFQEFRQRYEILAANAIPKGFMDGKQACILMIKALELDPNLYRIGQSKIFFRTGVLAHLEEERDLKITDVIMAFQAMCRGYLARKAFAKRQQQLTAMKVIQRNCAAYLKLRNWQWWRLFTKVKPLLQVTRQEEEMQAKEDELQKTKERQQKAENELKELEQKHSQLTEEKNLLQEQLQAETELYAEAEEMRVRLAAKKQELEEILHEMEARLEEEEDRGQQLQAERKKMAQQMLDLEEQLEEEEAARQKLQLEKVTAEAKIKKLEDEILVMDDQNNKLSKERKLLEERISDLTTNLAEEEEKAKNLTKLKNKHESMISELEVRLKKEEKSRQELEKLKRKLEGDASDFHEQIADLQAQIAELKMQLAKKEEELQAALARLDDEIAQKNNALKKIRELEGHISDLQEDLDSERAARNKAEKQKRDLGEELEALKTELEDTLDSTATQQELRAKREQEVTVLKKALDEETRSHEAQVQEMRQKHAQAVEELTEQLEQFKRAKANLDKNKQTLEKENADLAGELRVLGQAKQEVEHKKKKLEAQVQELQSKCSDGERARAELNDKVHKLQNEVESVTGMLNEAEGKAIKLAKDVASLSSQLQDTQELLQEETRQKLNVSTKLRQLEEERNSLQDQLDEEMEAKQNLERHISTLNIQLSDSKKKLQDFASTVEALEEGKKRFQKEIENLTQQYEEKAAAYDKLEKTKNRLQQELDDLVVDLDNQRQLVSNLEKKQRKFDQLLAEEKNISSKYADERDRAEAEAREKETKALSLARALEEALEAKEELERTNKMLKAEMEDLVSSKDDVGKNVHELEKSKRALETQMEEMKTQLEELEDELQATEDAKLRLEVNMQALKGQFERDLQARDEQNEEKRRQLQRQLHEYETELEDERKQRALAAAAKKKLEGDLKDLELQADSAIKGREEAIKQLRKLQAQMKDFQRELEDARASRDEIFATAKENEKKAKSLEADLMQLQEDLAAAERARKQADLEKEELAEELASSLSGRNALQDEKRRLEARIAQLEEELEEEQGNMEAMSDRVRKATQQAEQLSNELATERSTAQKNESARQQLERQNKELRSKLHEMEGAVKSKFKSTIAALEAKIAQLEEQVEQEAREKQAATKSLKQKDKKLKEILLQVEDERKMAEQYKEQAEKGNARVKQLKRQLEEAEEESQRINANRRKLQRELDEATESNEAMGREVNALKSKLRRGNETSFVPSRRSGGRRVIENADGSEEETDTRDADFNGTKASE

SEQ ID NO: 32612 - DNA, 5940 bp, Artificial Sequence
  derived and/or modified sequence
atggctcagaagggacaattgtccgacgatgagaaattcctgttcgtggacaagaactttattaattcaccagtcgcacaggccgactgggcggcaaagcgactggtttgggtgccgtcagagaaacaaggcttcgaagcggccagcataaaagaggagaagggggatgaagtggtagtcgagctggtggagaacggcaagaaggttaccgtggggaaggatgatatccaaaagatgaacccccctaagttcagcaaggtggaggatatggcagaactgacctgccttaacgaagctagtgtcctgcacaatctccgtgagagatatttttccggcctgatatacacctattccggcttgttctgcgtggttgtgaacccctataagcacctccctatttattctgaaaagatcgtggacatgtataagggaaaaaagaggcacgagatgcctcctcacatctatgcaatagctgatacagcatataggtctatgcttcaagacagagaggaccagtcaatcttatgtaccggagaatcgggagcaggtaagactgagaataccaaaaaggtgattcagtacctggctgtcgttgcctcttcacacaaaggtaagaaagacacaagcatcacacaagggccatccttcgcttacggagaactggaaaaacagcttttgcaggccaatcctattctagaagccttcgggaacgcaaaaaccgtcaagaacgacaactcgtcacggtttggtaaatttatcagaattaacttcgacgtaaccgggtatatcgtcggagcaaacatcgagacctatctgctagaaaagtccagggcaattcggcaagcgagagacgagcgaacctttcatatattttactacatgatcgccggggctaaggaaaagatgcgttccgacctgctgctggagggcttcaataattatacatttttaagcaacgggttcgtgccaattccagcggcccaggacgatgaaatgtttcaggagacagtggaagcaatggctattatgggtttctctgaagaagaacagctgagcattctcaaagtggtgtcctctgtattgcaactcgggaatatagtttttaaaaaggaaaggaacactgaccaagcttcaatgcccgataatactgcggcacaaaaggtgtgtcacctgatggggatcaacgtcacagacttcacacgaagcattctgactccaagaatcaaggtgggccgggatgtggtccagaaggcacagaccaaagagcaggctgattttgccgtcgaggcgctggcgaaagccacttatgagaggctcttcaggtggatcctgaccagggtgaataaagcgctcgataagacacacagacagggagctagctttctgggaatactagacattgccggattcgagattttcgaagtcaattcgttcgagcaactttgtattaactacaccaacgaaaagctgcagcaactgtttaatcacactatgttcatcctggagcaggaggaataccagcgggaaggcatcgagtggaactttattgacttcggtctggacttacaaccctgtatcgagctgatcgagcgaccgaacaatccaccgggggtgctggccctgttggatgaggagtgctggtttcctaaggctactgacaagagcttcgtcgagaaactgtgcaccgaacaaggctcccatccaaagtttcagaaacccaaacagctcaaggacaaaaccgaatttagtattatccactacgcaggtaaagtggactataacgcgtcagcatggttgaccaaaaatatggaccctctgaacgacaacgttacttcgctgctaaatgcctctagcgataaattcgtagccgatttgtggaaggacgttgaccggatcgttggcctcgaccagatggctaagatgacggaatcaagtctaccctccgcctctaagaccaagaagggcatgtttaggacggtggggcaattgtataaagaacagctcgggaagttgatgacaaccctgcgtaataccaccccgaattttgtcaggtgcatcattcctaatcatgaaaagaggtcagggaaactggacgctttcctggtactggaacagttacgatgtaatggagtcctcgagggaataagaatttgtcgccagggatttcccaaccggatagtgttccaagagtttcgacagagatacgaaatactcgcagccaatgctattcctaaagggttcatggatggaaagcaggcatgcattcttatgatcaaagcgttggagctggatccaaatttgtacagaatcgggcagtcaaagattttcttcagaaccggtgtgctggcgcacttggaggaggaaagagatctgaaaattacagacgtgatcatggcatttcaggccatgtgcagggggtacctcgcacgcaaggcctttgccaagaggcaacagcaactgaccgccatgaaagtgattcagcgaaattgcgcagcttacttaaaacttcgcaattggcaatggtggagactgttcacaaaggttaagcctctgctccaggtgacacgccaagaagaggagatgcaggccaaggaggatgagctgcaaaaaactaaggagaggcagcaaaaggcagagaacgagctgaaagagctagaacaaaaacactcacagctgactgaagagaagaatctgctacaggaacagttgcaggctgaaacagagttgtacgccgaagctgaggaaatgagggttaggttggccgctaaaaagcaggagctagaagagatcctccacgagatggaagcccgcctcgaggaggaggaagacagggggcagcagttacaggccgagaggaaaaagatggcccaacagatgctcgatctggaagaacagctggaagaggaagaggccgctcggcaaaaactgcaactcgaaaaagtaaccgccgaggccaaaattaagaaactcgaagacgaaattctggtaatggatgaccagaacaacaagctgtccaaggagaggaagcttcttgaagagcgcataagcgatctcacaaccaatttggccgaggaagaagagaaggctaaaaatttaactaaactgaaaaacaagcacgaaagtatgatctcagagctcgaggttcggcttaagaaggaagagaagtcaaggcaggagttggaaaaactgaagaggaagcttgagggtgatgcttccgacttccatgagcaaatcgcagacctgcaggctcaaatagcagagctgaagatgcagctcgccaagaaagaggaagagctccaagccgctcttgctcgcctggacgacgaaatagcgcaaaagaataatgcactgaagaaaatacgcgagctggaaggtcacattagtgatctgcaggaagatctggactcagagcgcgccgcccgaaacaaagctgaaaagcaaaagagggaccttggggaggagcttgaggcgctcaagacagagctggaggatacattagactctacagctactcagcaggagctgcgcgccaaacgggagcaggaggtgaccgtgcttaaaaaagctctggacgaagagactcggtctcatgaagcccaagtgcaagagatgcgccagaagcacgctcaggctgtcgaggaactgacagagcagttggagcagttcaagcgggctaaggccaacctggacaaaaacaaacagactctggagaaagaaaatgccgatttggccggagagttgagggtgctcggccaggccaagcaggaggttgaacacaaaaaaaagaagctagaagcccaggtccaggaattacagtcgaaatgcagcgacggcgagcgggcccgtgctgagctgaacgacaaggtgcataaactgcaaaatgaggttgagagcgtgaccggcatgctgaacgaggctgaaggcaaggctattaagttggcgaaagacgttgcttctctgtcatcccagcttcaggatacgcaggaactcctccaggaggaaaccagacaaaagctgaatgtttccaccaagctccggcaattagaagaggaaaggaactccttacaggaccagctcgatgaggagatggaagccaagcagaatttggaaaggcacatctccacattgaacatacagctgagcgattccaagaagaagctgcaggacttcgcaagtactgtggaggcactggaggagggaaagaaaagattccaaaaggaaattgaaaacctgacgcagcaatatgaggaaaaggccgccgcgtacgataagttggagaagactaagaacagactccaacaggagctggatgacctggttgtggatctggacaaccagcgtcagctagtcagtaacctggagaaaaaacaaaggaagtttgaccagttgcttgccgaagagaaaaatatttctagcaagtacgccgacgagcgggaccgggctgaggccgaggcgcgagagaaagaaacgaaggctctcagcctggccagagctctggaagaggctttggaagctaaagaagaactagagaggaccaataaaatgttaaaggcagaaatggaagatctggtcagttcaaaggatgacgtgggcaaaaatgtgcatgaacttgaaaagagcaaacgcgcacttgagacgcaaatggaggaaatgaaaacacagttggaagagctggaggacgaactgcaggcaaccgaggacgccaaacttagactggaagtgaacatgcaggcgttgaaggggcagttcgagcgggaccttcaagctcgcgatgagcagaacgaggaaaaacggagacagctccagcggcagctgcacgaatacgaaactgaactcgaggatgagagaaaacagcgggcattagctgcggctgccaagaagaagctggaaggagacttgaaagacctggagctacaggccgattctgctataaagggccgggaggaagcaattaaacagctgcgtaagcttcaggcgcagatgaaggactttcagcgagaactcgaagatgcccgggctagtcgtgacgaaatttttgccaccgctaaagaaaatgagaagaaagctaagtccttagaagcggaccttatgcagctgcaggaagacctcgctgcagccgagagagcccgaaagcaggccgaccttgaaaaagaggagctcgctgaagagctggcctcctcactgtcagggcgcaatgcactacaggacgaaaaacggcgcctggaagcccgcatcgctcagctggaagaagaacttgaagaggagcagggcaacatggaggctatgagcgatagggttcgcaaggctacacagcaggcagaacagctgtcaaacgagcttgccactgagcggagcaccgctcagaaaaacgagtccgccagacagcagcttgagcggcaaaacaaggaactgcgatcgaaattgcatgagatggaaggagctgtgaaatcgaagttcaaatcaaccatcgcagcccttgaggccaaaattgcccaattagaagagcaggtcgagcaggaggcccgcgagaagcaggcggccaccaaatctctcaaacagaaagacaaaaagctaaaggagatactgttgcaggtcgaggatgaacgaaaaatggcggagcagtataaggaacaggctgagaaggggaatgctcgcgtcaaacaactcaagcggcagttagaggaggcggaggaggaatctcagagaatcaatgccaatcgaagaaagctgcagcgcgaactcgacgaggccaccgagagtaatgaggccatggggcgcgaggtgaatgctctaaaatccaaattgcggcgagggaatgaaacctcctttgttccttcacgacgaagtggcggccgccgagtgattgagaatgctgacgggagcgaggaggaaacagataccagggatgcagactttaatgggacaaaagcctcagagtag

SEQ ID NO: 32613 - DNA, 5940 bp, Artificial Sequence
  derived and/or modified sequence
atggcccagaagggccagctgagtgatgatgagaagttcctgtttgtggacaagaacttcatcaacagccctgtggcccaggccgactgggccgccaagaggctggtgtgggtgcccagcgagaagcagggctttgaagctgccagcatcaaggaggagaagggagatgaggtggtggtggagctggtggagaatggcaagaaggtgacagtgggcaaggatgacatccagaagatgaacccccccaagttcagcaaggtggaggacatggccgagctgacctgcctgaatgaggcctctgtgctgcacaacctgcgggagcgctacttcagcggcctcatctacacctacagcggcctcttctgtgtggtggtgaacccctacaagcacctgcccatctacagcgagaagatcgtggacatgtacaagggcaagaagagacatgagatgccaccccacatctatgccatcgctgacacagcctaccgctccatgctgcaggaccgggaggaccagagcatcctgtgcacaggagagagcggggccggcaagacagagaacaccaagaaggtgatccagtacctggccgtggtggccagcagccacaagggcaagaaggacaccagcatcacccagggccccagctttgcctacggggagctggagaagcagctgctgcaggccaaccccatcctggaggcctttggaaatgccaagacagtgaagaatgacaacagcagcagatttgggaagttcatccgcatcaactttgatgtgacaggctacatcgtgggcgccaacatcgagacctacctgctggagaagagccgggccatccggcaggccagagatgagaggaccttccacatcttctactacatgattgctggggccaaggagaagatgagaagtgacctgctgctggagggcttcaacaactacaccttcctgagcaatggatttgtgcccatcccagctgcccaggatgatgagatgttccaggagaccgtggaggccatggccatcatgggcttcagcgaggaggagcagctgagcatcctgaaggtggtgtcctctgtgctgcagctgggcaacatcgtgttcaagaaggagaggaacacagaccaggcctccatgccagacaacacagctgcccagaaggtgtgccacctgatgggcatcaacgtgacagacttcaccaggagcatcctgaccccccgcatcaaggtgggcagagatgtggtgcagaaggcccagaccaaggagcaggccgactttgctgtggaggccctggccaaggccacctatgaaagactcttccgctggatcctgaccagggtgaacaaggccctggacaagacccaccggcagggcgccagcttcctgggcatcctggacattgctggctttgagatctttgaggtgaacagctttgagcagctgtgcatcaactacaccaatgagaagctgcagcagctgttcaaccacaccatgttcatcctggagcaggaggagtaccagcgggagggcatcgagtggaacttcatcgactttggcctggacctgcagccctgcatcgagctgattgagcggcccaacaaccccccaggagtgctggccctgctggatgaggagtgctggttccccaaggccacagacaagagctttgtggagaagctgtgcacagagcagggcagccaccccaagttccagaagcccaagcagctgaaggacaagacagagttcagcatcatccactacgccggcaaggtggactacaatgccagcgcctggctgaccaagaacatggaccccctgaatgacaacgtgaccagcctgctgaatgccagcagtgacaagtttgtggccgacctgtggaaggatgtggaccgcatcgtgggcctggaccagatggccaagatgacagagagcagcctgcccagcgccagcaagaccaagaagggcatgttcagaacagtgggccagctgtacaaggagcagctgggcaagctgatgaccaccctgaggaacaccacccccaactttgtgcgctgcatcatccccaaccacgagaagaggtctgggaagctggatgccttcctggtgctggagcagctgcgctgcaatggagtgctggagggcatccgcatctgccggcagggcttccccaaccgcatcgtgttccaggagttccggcagagatatgagatcctggccgccaatgccatccccaagggcttcatggatggcaagcaggcctgcatcctgatgatcaaggccctggagctggaccccaacctgtaccgcatcggccagagcaagatcttcttcagaactggagtgctggcccacctggaggaggagcgggacctgaagatcacagatgtgatcatggccttccaggccatgtgccggggctacctggccaggaaggcctttgccaagaggcagcagcagctgacagccatgaaggtgatccagaggaactgtgccgcctacctgaagctgaggaactggcagtggtggaggctcttcaccaaggtgaagcccctgctgcaggtgacccggcaggaggaggagatgcaggccaaggaggatgagctgcagaagaccaaggagcggcagcagaaggcagaaaatgagctgaaggagctggagcagaagcacagccagctgacagaggagaagaacctgctgcaggagcagctgcaggccgagacagagctgtatgcagaggccgaggagatgagggtgcggctggccgccaagaagcaggagctggaggagatcctgcacgagatggaggcccggctggaggaggaggaggaccggggccagcagctgcaggccgagaggaagaagatggcccagcagatgctggacctggaggagcagctggaggaggaggaggccgcccggcagaagctgcagctggagaaggtgacagctgaggccaagatcaagaagctggaggatgagatcctggtgatggatgaccagaacaacaagctgagcaaggagaggaagctgctggaggagcgcatcagtgacctgaccaccaacctggccgaggaggaggagaaggccaagaacctgaccaagctgaagaacaagcatgagagcatgatcagcgagctggaggtgcggctgaagaaggaggagaagagccggcaggagctggagaagctgaagaggaagctggagggagatgccagtgacttccacgagcagattgctgacctgcaggcccagattgctgagctgaagatgcagctggccaagaaggaggaggagctgcaggccgccctggcccggctggatgatgagatcgcccagaagaacaatgccctgaagaagatccgggagctggagggccacatcagtgacctgcaggaggacctggacagcgagagagctgccaggaacaaggccgagaagcagaagagggacctgggggaggagctggaggccctgaagacagagctggaggacaccctggacagcacagccacccagcaggagctgcgggccaagcgggagcaggaggtgacagtgctgaagaaggccctggatgaggagaccaggagccatgaggcccaggtgcaggagatgaggcagaagcacgcccaggccgtggaggagctgacagagcagctggagcagttcaagagggccaaggccaacctggacaagaacaagcagaccctggagaaggaaaatgctgacctggccggggagctgcgggtgctgggccaggccaagcaggaggtggagcacaagaagaagaagctggaggcccaggtgcaggagctgcagagcaagtgcagtgatggagagcgggcccgggcagagctgaatgacaaggtgcacaagctgcagaatgaggtggagagcgtgacaggcatgctgaatgaggccgagggcaaggccatcaagctggccaaggatgtggccagcctgagcagccagctgcaggacacccaggagctgctgcaggaggagacccggcagaagctgaatgtgtccaccaagctgcggcagctggaggaggagaggaacagcctgcaggaccagctggatgaggagatggaggccaagcagaacctggagcggcacatcagcaccctgaacatccagctgagtgacagcaagaagaagctgcaggactttgccagcacagtggaggccctggaggagggcaagaagcgcttccagaaggagattgagaacctgacccagcagtatgaggagaaggccgccgcctatgacaagctggagaagaccaagaaccggctgcagcaggagctggatgacctggtggtggacctggacaaccagaggcagctggtgagcaacctggagaagaagcagaggaagtttgaccagctgctggccgaggagaagaacatcagcagcaaatatgcagatgagcgggacagagctgaggccgaggcccgggagaaggagaccaaggccctgagcctggcccgggccctggaggaggccctggaggccaaggaggagctggagaggaccaacaagatgctgaaggccgagatggaggacctggtgagcagcaaggatgatgtgggcaagaatgtgcatgagctggagaagagcaagagggccctggagacccagatggaggagatgaagacccagctggaggagctggaggatgagctgcaggccacagaagatgccaagctgcggctggaggtgaacatgcaggccctgaagggccagtttgagcgggacctgcaggccagagatgagcagaatgaggagaagaggcggcagctgcagaggcagctgcacgagtatgaaacagagctggaggatgagaggaagcagagggccctggccgccgccgccaagaagaagctggagggggacctgaaggacctggagctgcaggccgacagcgccatcaagggccgggaggaggccatcaagcagctgaggaagctgcaggcccagatgaaggacttccagcgggagctggaggatgcccgggccagcagagatgagatctttgccacagccaaggaaaatgagaagaaggccaagagcctggaggccgacctgatgcagctgcaggaggacctggccgctgctgagcgggccaggaagcaggccgacctggagaaggaggagctggccgaggagctggccagcagcctgtctggaagaaatgccctgcaggatgagaagaggcggctggaggccagaattgcccagctggaggaggagctggaggaggagcagggcaacatggaggccatgtctgacagagtgaggaaggccacccagcaggccgagcagctgagcaatgagctggccacagagaggagcacagcccagaagaatgaaagtgcccggcagcagctggagcggcagaacaaggagctgcggagcaagctgcacgagatggagggcgctgtgaagagcaagttcaagagcaccatcgccgccctggaggccaagatcgcccagctggaggagcaggtggagcaggaggcccgggagaagcaggccgccaccaagagcctgaagcagaaggacaagaagctgaaggagatcctgctgcaggtggaggatgagaggaagatggccgagcagtacaaggagcaggccgagaagggaaatgcccgggtgaagcagctgaagaggcagctggaggaggccgaggaggagagccagaggatcaatgccaacagaaggaagctgcagcgggagctggatgaggccacagagagcaatgaggccatgggccgggaggtgaatgccctgaagagcaagctgcggagaggaaatgagaccagctttgtgcccagcagaagaagtggcggccggcgggtgattgaaaatgctgatggcagcgaggaggagacagacaccagagatgctgacttcaacggcaccaaggccagcgagtag

SEQ ID NO: 32614 - DNA, 6903 bp, Artificial Sequence
  derived and/or modified sequence
gggagatttggacgctccggcctgggaggtgcgtcagatccgagctcgccatccagtttcctctccactagtccccccagttggagatctgggaccaacaaggcaccatggcgcagaagggccaactcagtgacgatgagaagttcctctttgtggacaaaaacttcatcaacagcccagtggcccaggctgactgggccgccaagagactcgtctgggtcccctcggagaagcagggcttcgaggcagccagcattaaggaggagaagggggatgaggtggttgtggagctggtggagaatggcaagaaggtcacggttgggaaagatgacatccagaagatgaacccacccaagttctccaaggtggaggacatggcggagctgacgtgcctcaacgaagcctccgtgctacacaacctgagggagcggtacttctcagggctaatatatacgtactctggcctcttctgcgtggtggtcaacccctataaacacctgcccatctactcggagaagatcgtcgacatgtacaagggcaagaagaggcacgagatgccgcctcacatctacgccatcgcagacacggcctaccggagcatgcttcaagatcgggaggaccagtccattctatgcacaggcgagtctggagccgggaaaaccgaaaacaccaagaaggtcattcagtacctggccgtggtggcctcctcccacaagggcaagaaagacacaagtatcacgcaaggcccatcttttgcctacggagagctggaaaagcagcttctacaagcaaacccgattctggaggctttcggcaacgccaaaacagtgaagaacgacaactcctcacgattcggcaaattcatccgcatcaacttcgacgtcacgggttacatcgtgggagccaacattgagacctatctgctagaaaaatcacgggcaattcgccaagccagagacgagaggacattccacatcttttactacatgattgctggagccaaggagaagatgagaagtgacttgcttttggagggcttcaacaactacaccttcctctccaatggctttgtgcccatcccagcagcccaggatgatgagatgttccaggaaaccgtggaggccatggcaatcatgggtttcagcgaggaggagcagctatccatattgaaggtggtatcatcggtcctgcagcttggaaatatcgtcttcaagaaggaaagaaacacagaccaggcgtccatgccagataacacagctgctcagaaagtttgccacctcatgggaattaatgtgacagatttcaccagatccatcctcactcctcgtatcaaggttgggcgagatgtggtacagaaagctcagacaaaagaacaggctgactttgctgtagaggctttggccaaggcaacatatgagcgccttttccgctggatactcacccgcgtgaacaaagccctggacaagacccatcggcaaggggcttccttcctggggatcctggatatagctggatttgagatctttgaggtgaactccttcgagcagctgtgcatcaactacaccaacgagaagctgcagcagctcttcaaccacaccatgttcatcctggagcaggaggagtaccagcgcgagggcatcgagtggaacttcatcgactttgggctggacctacagccctgcatcgagctcatcgagcgaccgaacaaccctccaggtgtgctggccctgctggacgaggaatgctggttccccaaagccacggacaagtctttcgtggagaagctgtgcacggagcagggcagccaccccaagttccagaagcccaagcagctcaaggacaagactgagttctccatcatccattatgctgggaaggtggactataatgcgagtgcctggctgaccaagaatatggacccgctgaatgacaacgtgacttccctgctcaatgcctcctccgacaagtttgtggccgacctgtggaaggacgtggaccgcatcgtgggcctggaccagatggccaagatgacggagagctcgctgcccagcgcctccaagaccaagaagggcatgttccgcacagtggggcagctgtacaaggagcagctgggcaagctgatgaccacgctacgcaacaccacgcccaacttcgtgcgctgcatcatccccaaccacgagaagaggtccggcaagctggatgcgttcctggtgctggagcagctgcggtgcaatggggtgctggaaggcattcgcatctgccggcagggcttccccaaccggatcgtcttccaggagttccgccaacgctacgagatcctggcggcgaatgccatccccaaaggcttcatggacgggaagcaggcctgcattctcatgatcaaagccctggaacttgaccccaacttatacaggatagggcagagcaaaatcttcttccgaactggcgtcctggcccacctagaggaggagcgagatttgaagatcaccgatgtcatcatggccttccaggcgatgtgtcgtggctacttggccagaaaggcttttgccaagaggcagcagcagctgaccgccatgaaggtgattcagaggaactgcgccgcctacctcaagctgcggaactggcagtggtggaggcttttcaccaaagtgaagccactgctgcaggtgacacggcaggaggaggagatgcaggccaaggaggatgaactgcagaagaccaaggagcggcagcagaaggcagagaatgagcttaaggagctggaacagaagcactcgcagctgaccgaggagaagaacctgctacaggaacagctgcaggcagagacagagctgtatgcagaggctgaggagatgcgggtgcggctggcggccaagaagcaggagctggaggagatactgcatgagatggaggcccgcctggaggaggaggaagacaggggccagcagctacaggctgaaaggaagaagatggcccagcagatgctggaccttgaagaacagctggaggaggaggaagctgccaggcagaagctgcaacttgagaaggtcacggctgaggccaagatcaagaaactggaggatgagatcctggtcatggatgatcagaacaataaactatcaaaagaacgaaaactccttgaggagaggattagtgacttaacgacaaatcttgcagaagaggaagaaaaggccaagaatcttaccaagctgaaaaacaagcatgaatctatgatttcagaactggaagtgcggctaaagaaggaagagaagagccgacaggagctggagaagctgaaacggaagctggagggtgatgccagcgacttccacgagcagatcgctgacctccaggcgcagatcgcagagctcaagatgcagctggccaagaaggaggaggagctgcaggcggccctggccaggcttgacgatgaaatcgctcagaagaacaatgccctgaagaagatccgggagctggagggccacatctcagacctccaggaggacctggactcagagcgggccgccaggaacaaggctgaaaagcagaagcgagacctcggcgaggagctggaggccctaaagacagagctggaagacacactggacagcacagccactcagcaggagctcagggccaagagggagcaggaggtgacggtgctgaagaaggccctggatgaagagacgcggtcccatgaggctcaggtccaggagatgaggcagaaacacgcacaggcggtggaggagctcacagagcagcttgagcagttcaagagggccaaggcgaacctagacaagaataagcagacgctggagaaagagaacgcagacctggccggggagctgcgggtcctgggccaggccaagcaggaggtggaacataagaagaagaagctggaggcgcaggtgcaggagctgcagtccaagtgcagcgatggggagcgggcccgggcggagctcaatgacaaagtccacaagctgcagaatgaagttgagagcgtcacagggatgcttaacgaggccgaggggaaggccattaagctggccaaggacgtggcgtccctcagttcccagctccaggacacccaggagctgcttcaagaagaaacccggcagaagctcaacgtgtctacgaagctgcgccagctggaggaggagcggaacagcctgcaagaccagctggacgaggagatggaggccaagcagaacctggagcgccacatctccactctcaacatccagctctccgactcgaagaagaagctgcaggactttgccagcaccgtggaagctctggaagaggggaagaagaggttccagaaggagatcgagaacctcacccagcagtacgaggagaaggcggccgcttatgataaactggaaaagaccaagaacaggcttcagcaggagctggacgacctggttgttgatttggacaaccagcggcaactcgtgtccaacctggaaaagaagcagaggaaatttgatcagttgttagccgaggagaaaaacatctcttccaaatacgcggatgagagggacagagctgaggcagaagccagggagaaggaaaccaaggccctgtccctggctcgggcccttgaagaggccttggaagccaaagaggaactcgagcggaccaacaaaatgctcaaagccgaaatggaagacctggtcagctccaaggatgacgtgggcaagaacgtccatgagctggagaagtccaagcgggccctggagacccagatggaggagatgaagacgcagctggaagagctggaggacgagctgcaagccacggaggacgccaaactgcggctggaagtcaacatgcaggcgctcaagggccagttcgaaagggatctccaagcccgggacgagcagaatgaggagaagaggaggcaactgcagagacagcttcacgagtatgagacggaactggaagacgagcgaaagcaacgtgccctggcagctgcagcaaagaagaagctggaaggggacctgaaagacctggagcttcaggccgactctgccatcaaggggagggaggaagccatcaagcagctacgcaaactgcaggctcagatgaaggactttcaaagagagctggaagatgcccgtgcctccagagatgagatctttgccacagccaaagagaatgagaagaaagccaagagcttggaagcagacctcatgcagctacaagaggacctcgccgccgctgagagggctcgcaaacaagcggacctcgagaaggaggaactggcagaggagctggccagtagcctgtcgggaaggaacgcactccaggacgagaagcgccgcctggaggcccggatcgcccagctggaggaggagctggaggaggagcagggcaacatggaggccatgagcgaccgggtccgcaaagccacacagcaggccgagcagctcagcaacgagctggccacagagcgcagcacggcccagaagaatgagagtgcccggcagcagctcgagcggcagaacaaggagctccggagcaagctccacgagatggagggggccgtcaagtccaagttcaagtccaccatcgcggcgctggaggccaagattgcacagctggaggagcaggtcgagcaggaggccagagagaaacaggcggccaccaagtcgctgaagcagaaagacaagaagctgaaggaaatcttgctgcaggtggaggacgagcgcaagatggccgagcagtacaaggagcaggcagagaaaggcaatgccagggtcaagcagctcaagaggcagctggaggaggcagaggaggagtcccagcgcatcaacgccaaccgcaggaagctgcagcgggagctggatgaggccacggagagcaacgaggccatgggccgcgaggtgaacgcactcaagagcaagctcaggcgaggaaacgagacctctttcgttccttctagaaggtctggaggacgtagagttattgaaaatgcagatggttctgaggaggaaacggacactcgagacgcagacttcaatggaaccaaggccagtgaataagcaactttctacagttttgcaccacggcaagaaaaccaaaaaccaaaacaaacaaacaaaaaaaacccaacaacaacccagaacaaagcaaaacccagcagactgtacttagcattgtctaaatccattctcaaattccaaatatcacagacacccctcacacaaggaatataaaaaccaccaccctccagcctgggcaacgtagtaaaacctcatctatacaagaatttaaaaataagctgggcgtggtggtacacacctgtggtcccagctactagggaggctgagccaggaagaacgctccagcccaggacttcgaggctgcaatgagctataattgcatcattgcactccagcctgggcaacagagaccctgtctcaaccaccaccaccaccaccacccctactacccctgtattcaaggtaaaaattgaagtttgtatgatgtaagagatgagaaaaacccaacaggaaacacagacacatcctccagttctatcaatggattgtgcagacactgagtttttagaaaaacatatccacggtaaccggtccctggcaattctgtttacatgaaatggggagaaagtcaccgaaatgggtgccgccggcccccactcccaattcattccctaacctgcaaacctttccaacttctcacgtcaggcctttgagaattctttccccctctcctggtttccacacctcagacacgcacagttcaccaagtgccttctgtagtcacatgaattgaaaaggagacgctgctcccacggaggggagcaggaatgctgcactgtttacaccctgactgtgcttaaaaacactttcactaataaatggttataaatcacaa

SEQ ID NO: 32615 - DNA, 6942 bp, Artificial Sequence
  derived and/or modified sequence
gggagatttggacgctccggcctgggaggtgcgtcagatccgagctcgccatccagtttcctctccactagtccccccagttggagatctgggaccaacaaggcaccatggcgcagaagggccaactcagtgacgatgagaagttcctctttgtggacaaaaacttcatcaacagcccagtggcccaggctgactgggccgccaagagactcgtctgggtcccctcggagaagcagggcttcgaggcagccagcattaaggaggagaagggggatgaggtggttgtggagctggtggagaatggcaagaaggtcacggttgggaaagatgacatccagaagatgaacccacccaagttctccaaggtggaggacatggcggagctgacgtgcctcaacgaagcctccgtgctacacaacctgagggagcggtacttctcagggctaatatatacgtactctggcctcttctgcgtggtggtcaacccctataaacacctgcccatctactcggagaagatcgtcgacatgtacaagggcaagaagaggcacgagatgccgcctcacatctacgccatcgcagacacggcctaccggagcatgcttcaagatcgggaggaccagtccattctatgcacaggcgagtctggagccgggaaaaccgaaaacaccaagaaggtcattcagtacctggccgtggtggcctcctcccacaagggcaagaaagacacaagtatcacgcaaggcccatcttttgcctacggagagctggaaaagcagcttctacaagcaaacccgattctggaggctttcggcaacgccaaaacagtgaagaacgacaactcctcacgattcggcaaattcatccgcatcaacttcgacgtcacgggttacatcgtgggagccaacattgagacctatctgctagaaaaatcacgggcaattcgccaagccagagacgagaggacattccacatcttttactacatgattgctggagccaaggagaagatgagaagtgacttgcttttggagggcttcaacaactacaccttcctctccaatggctttgtgcccatcccagcagcccaggatgatgagatgttccaggaaaccgtggaggccatggcaatcatgggtttcagcgaggaggagcagctatccatattgaaggtggtatcatcggtcctgcagcttggaaatatcgtcttcaagaaggaaagaaacacagaccaggcgtccatgccagataacacagctgctcagaaagtttgccacctcatgggaattaatgtgacagatttcaccagatccatcctcactcctcgtatcaaggttgggcgagatgtggtacagaaagctcagacaaaagaacaggctgactttgctgtagaggctttggccaaggcaacatatgagcgccttttccgctggatactcacccgcgtgaacaaagccctggacaagacccatcggcaaggggcttccttcctggggatcctggatatagctggatttgagatctttgaggtgaactccttcgagcagctgtgcatcaactacaccaacgagaagctgcagcagctcttcaaccacaccatgttcatcctggagcaggaggagtaccagcgcgagggcatcgagtggaacttcatcgactttgggctggacctacagccctgcatcgagctcatcgagcgaccgaacaaccctccaggtgtgctggccctgctggacgaggaatgctggttccccaaagccacggacaagtctttcgtggagaagctgtgcacggagcagggcagccaccccaagttccagaagcccaagcagctcaaggacaagactgagttctccatcatccattatgctgggaaggtggactataatgcgagtgcctggctgaccaagaatatggacccgctgaatgacaacgtgacttccctgctcaatgcctcctccgacaagtttgtggccgacctgtggaaggacgtggaccgcatcgtgggcctggaccagatggccaagatgacggagagctcgctgcccagcgcctccaagaccaagaagggcatgttccgcacagtggggcagctgtacaaggagcagctgggcaagctgatgaccacgctacgcaacaccacgcccaacttcgtgcgctgcatcatccccaaccacgagaagaggtccggcaagctggatgcgttcctggtgctggagcagctgcggtgcaatggggtgctggaaggcattcgcatctgccggcagggcttccccaaccggatcgtcttccaggagttccgccaacgctacgagatcctggcggcgaatgccatccccaaaggcttcatggacgggaagcaggcctgcattctcatgatcaaagccctggaacttgaccccaacttatacaggatagggcagagcaaaatcttcttccgaactggcgtcctggcccacctagaggaggagcgagatttgaagatcaccgatgtcatcatggccttccaggcgatgtgtcgtggctacttggccagaaaggcttttgccaagaggcagcagcagctgaccgccatgaaggtgattcagaggaactgcgccgcctacctcaagctgcggaactggcagtggtggaggcttttcaccaaagtgaagccactgctgcaggtgacacggcaggaggaggagatgcaggccaaggaggatgaactgcagaagaccaaggagcggcagcagaaggcagagaatgagcttaaggagctggaacagaagcactcgcagctgaccgaggagaagaacctgctacaggaacagctgcaggcagagacagagctgtatgcagaggctgaggagatgcgggtgcggctggcggccaagaagcaggagctggaggagatactgcatgagatggaggcccgcctggaggaggaggaagacaggggccagcagctacaggctgaaaggaagaagatggcccagcagatgctggaccttgaagaacagctggaggaggaggaagctgccaggcagaagctgcaacttgagaaggtcacggctgaggccaagatcaagaaactggaggatgagatcctggtcatggatgatcagaacaataaactatcaaaagaacgaaaactccttgaggagaggattagtgacttaacgacaaatcttgcagaagaggaagaaaaggccaagaatcttaccaagctgaaaaacaagcatgaatctatgatttcagaactggaagtgcggctaaagaaggaagagaagagccgacaggagctggagaagctgaaacggaagctggagggtgatgccagcgacttccacgagcagatcgctgacctccaggcgcagatcgcagagctcaagatgcagctggccaagaaggaggaggagctgcaggcggccctggccaggcttgacgatgaaatcgctcagaagaacaatgccctgaagaagatccgggagctggagggccacatctcagacctccaggaggacctggactcagagcgggccgccaggaacaaggctgaaaagcagaagcgagacctcggcgaggagctggaggccctaaagacagagctggaagacacactggacagcacagccactcagcaggagctcagggccaagagggagcaggaggtgacggtgctgaagaaggccctggatgaagagacgcggtcccatgaggctcaggtccaggagatgaggcagaaacacgcacaggcggtggaggagctcacagagcagcttgagcagttcaagagggccaaggcgaacctagacaagaataagcagacgctggagaaagagaacgcagacctggccggggagctgcgggtcctgggccaggccaagcaggaggtggaacataagaagaagaagctggaggcgcaggtgcaggagctgcagtccaagtgcagcgatggggagcgggcccgggcggagctcaatgacaaagtccacaagctgcagaatgaagttgagagcgtcacagggatgcttaacgaggccgaggggaaggccattaagctggccaaggacgtggcgtccctcagttcccagctccaggacacccaggagctgcttcaagaagaaacccggcagaagctcaacgtgtctacgaagctgcgccagctggaggaggagcggaacagcctgcaagaccagctggacgaggagatggaggccaagcagaacctggagcgccacatctccactctcaacatccagctctccgactcgaagaagaagctgcaggactttgccagcaccgtggaagctctggaagaggggaagaagaggttccagaaggagatcgagaacctcacccagcagtacgaggagaaggcggccgcttatgataaactggaaaagaccaagaacaggcttcagcaggagctggacgacctggttgttgatttggacaaccagcggcaactcgtgtccaacctggaaaagaagcagaggaaatttgatcagttgttagccgaggagaaaaacatctcttccaaatacgcggatgagagggacagagctgaggcagaagccagggagaaggaaaccaaggccctgtccctggctcgggcccttgaagaggccttggaagccaaagaggaactcgagcggaccaacaaaatgctcaaagccgaaatggaagacctggtcagctccaaggatgacgtgggcaagaacgtccatgagctggagaagtccaagcgggccctggagacccagatggaggagatgaagacgcagctggaagagctggaggacgagctgcaagccacggaggacgccaaactgcggctggaagtcaacatgcaggcgctcaagggccagttcgaaagggatctccaagcccgggacgagcagaatgaggagaagaggaggcaactgcagagacagcttcacgagtatgagacggaactggaagacgagcgaaagcaacgtgccctggcagctgcagcaaagaagaagctggaaggggacctgaaagacctggagcttcaggccgactctgccatcaaggggagggaggaagccatcaagcagctacgcaaactgcaggctcagatgaaggactttcaaagagagctggaagatgcccgtgcctccagagatgagatctttgccacagccaaagagaatgagaagaaagccaagagcttggaagcagacctcatgcagctacaagaggacctcgccgccgctgagagggctcgcaaacaagcggacctcgagaaggaggaactggcagaggagctggccagtagcctgtcgggaaggaacgcactccaggacgagaagcgccgcctggaggcccggatcgcccagctggaggaggagctggaggaggagcagggcaacatggaggccatgagcgaccgggtccgcaaagccacacagcaggccgagcagctcagcaacgagctggccacagagcgcagcacggcccagaagaatgagagtgcccggcagcagctcgagcggcagaacaaggagctccggagcaagctccacgagatggagggggccgtcaagtccaagttcaagtccaccatcgcggcgctggaggccaagattgcacagctggaggagcaggtcgagcaggaggccagagagaaacaggcggccaccaagtcgctgaagcagaaagacaagaagctgaaggaaatcttgctgcaggtggaggacgagcgcaagatggccgagcagtacaaggagcaggcagagaaaggcaatgccagggtcaagcagctcaagaggcagctggaggaggcagaggaggagtcccagcgcatcaacgccaaccgcaggaagctgcagcgggagctggatgaggccacggagagcaacgaggccatgggccgcgaggtgaacgcactcaagagcaagctcagagggccccccccacaggaaacttcgcagtgatgcaccaggcgaggaaacgagacctctttcgttccttctagaaggtctggaggacgtagagttattgaaaatgcagatggttctgaggaggaaacggacactcgagacgcagacttcaatggaaccaaggccagtgaataagcaactttctacagttttgcaccacggcaagaaaaccaaaaaccaaaacaaacaaacaaaaaaaacccaacaacaacccagaacaaagcaaaacccagcagactgtacttagcattgtctaaatccattctcaaattccaaatatcacagacacccctcacacaaggaatataaaaaccaccaccctccagcctgggcaacgtagtaaaacctcatctatacaagaatttaaaaataagctgggcgtggtggtacacacctgtggtcccagctactagggaggctgagccaggaagaacgctccagcccaggacttcgaggctgcaatgagctataattgcatcattgcactccagcctgggcaacagagaccctgtctcaaccaccaccaccaccaccacccctactacccctgtattcaaggtaaaaattgaagtttgtatgatgtaagagatgagaaaaacccaacaggaaacacagacacatcctccagttctatcaatggattgtgcagacactgagtttttagaaaaacatatccacggtaaccggtccctggcaattctgtttacatgaaatggggagaaagtcaccgaaatgggtgccgccggcccccactcccaattcattccctaacctgcaaacctttccaacttctcacgtcaggcctttgagaattctttccccctctcctggtttccacacctcagacacgcacagttcaccaagtgccttctgtagtcacatgaattgaaaaggagacgctgctcccacggaggggagcaggaatgctgcactgtttacaccctgactgtgcttaaaaacactttcactaataaatggttataaatcacaa

SEQ ID NO: 32616 - DNA, 5940 bp, Artificial Sequence
  derived and/or modified sequence
atggcccagaagggccagctgagcgacgacgagaagttcctgttcgtagataagaatttcatcaacagcccagtggcacaggccgactgggcagccaagcggctcgtctgggttcctagcgagaagcagggctttgaagcagctagtatcaaggaggagaagggtgacgaggtggtggttgagctggtggaaaatgggaaaaaggtgactgtagggaaagatgacattcaaaaaatgaaccccccgaagttcagcaaagtggaagatatggcagaattgacctgtctcaatgaggccagcgtgctgcacaacctgagagagcggtatttcagcggactaatctacacttattcgggcctgttttgtgtagtcgtgaatccctacaaacacctgccaatctacagcgaaaagatcgtagacatgtataaaggaaagaagcgccacgagatgccaccccatatctacgccatcgccgacaccgcctataggagcatgcttcaagatcgtgaggaccagagtatcctttgtactggcgaaagcggcgccggaaagaccgagaacactaagaaggtcatacagtacctggccgttgtcgcctcttctcacaagggcaaaaaagacacgagtatcacacagggccccagcttcgcatacggagaactagagaaacagctcctccaggcaaaccctatcctggaagcgttcggtaacgctaaaaccgtcaagaatgacaattccagtaggtttgggaagttcattaggatcaacttcgatgtgacgggctacattgtcggtgcaaacatcgaaacttatttgctagagaaaagccgggcaatccggcaggctcgcgacgagcggacattccatattttttactatatgatcgcaggagccaaagaaaagatgagatccgacctgctgctcgaaggttttaataattacacgttcctgtctaatggattcgtcccaataccggcagcccaggatgacgagatgttccaagagacagtggaagcaatggcaatcatggggttctccgaggaggagcaactatctatactcaaagtggtatcttccgttcttcagctcggcaatatcgtgtttaaaaaagagcgaaatacggaccaggcgtctatgcccgataataccgccgcccagaaagtgtgtcacctgatgggtatcaacgttacggattttacccgtagtatcctgaccccaagaattaaggtgggtcgggacgtagtgcagaaagcccagacgaaagaacaggctgactttgccgtggaagctttggccaaagctacatacgaacggctgttccggtggatcctcacccgtgttaataaagccctggataaaacgcaccgacagggggcctcttttttgggtatcctggatatagctggcttcgaaattttcgaagtgaactcattcgaacagctttgtatcaactacaccaatgagaaactgcagcagttattcaatcataccatgtttatacttgaacaagaggagtatcagagggaaggaatagagtggaactttatagacttcggattagacctccagccctgtatcgagctgattgaaaggcctaataatccccccggcgtgctggccctcctggacgaggagtgctggtttcccaaggccaccgacaaatcatttgtggaaaaactttgtaccgaacagggaagccatcctaaattccagaagccaaagcagctgaaggataagacagagttttccataattcattatgccggcaaagttgactacaatgcttcggcatggttaaccaagaacatggatccattaaacgataacgtaacaagccttcttaacgccagttctgacaagttcgtggctgacctgtggaaggatgtagatcgcattgtggggctcgatcagatggcgaagatgactgagtcctccctgccatccgcaagcaagacgaaaaaagggatgtttcggacagttggtcagctgtataaagagcaattgggcaaattgatgactacattgaggaatacaacacctaatttcgtgaggtgcatcatcccgaaccatgaaaaacggtcgggcaaactagacgcgttcctcgttcttgaacagctgcgatgcaacggcgtgctcgaagggattcgcatttgtcggcagggctttcctaatcgtatagtttttcaggaatttcggcagcgatacgaaatcctggccgctaacgcaatcccaaaaggtttcatggacggaaagcaggcctgtatcctcatgatcaaagctttggagctagaccccaatctctacagaatcggtcaatccaaaatcttcttccgaacgggcgtgctggcccatcttgaagaggagcgagatctgaagatcaccgacgtcattatggcatttcaagccatgtgccgagggtacctagctcgcaaagccttcgcaaagaggcaacagcaactgaccgccatgaaagtgatccaacgcaactgcgctgcctacctcaaactccgaaactggcagtggtggagactgttcactaaagtgaagcccttgctccaggtgactaggcaggaagaggagatgcaggctaaagaggacgaactgcaaaagacaaaagaacggcagcaaaaagccgagaatgagctgaaggaactcgaacagaagcactctcagcttaccgaggagaagaacctgcttcaggagcaactacaggccgagaccgagttgtatgcagaggcggaggaaatgcgggtgcggttagccgccaaaaagcaggaactcgaggaaatcctccatgagatggaggctaggctcgaggaggaggaggaccggggacagcagttacaggccgagaggaagaaaatggctcaacagatgctggacctggaggagcagttggaggaggaagaggctgcgcgccagaaactccaactagagaaggtgacggcagaagctaaaatcaaaaagctggaggacgagattctagtgatggacgaccagaacaacaagctcagcaaggaaaggaagctgctagaagaacgcatctctgacctgaccaccaacctagccgaggaggaggaaaaagctaagaaccttaccaagctgaaaaacaaacacgagagcatgatttcagaactggaggtgcgcctgaaaaaagaggagaaatcccgccaggagctggagaaactcaagcggaagctggagggggacgcgtccgattttcatgagcagattgccgatctgcaggcccagatagccgaactgaaaatgcagctcgcgaagaaagaagaagaactccaggccgcgcttgcccgactggacgacgagatagctcagaagaataatgctctgaagaagattcgcgaacttgaggggcatatctctgatcttcaagaggacctggacagtgagcgtgccgctcgaaataaagccgagaagcaaaagagagatctgggcgaagagctcgaggcccttaaaactgagctggaagacacactcgacagtaccgcaacccagcaagagctgcgagctaagcgggaacaggaagtgacagtcctcaaaaaggctctggatgaggagacccgctcccacgaagctcaggtacaggagatgcgtcagaaacatgctcaggccgtggaagaactgactgagcaactcgagcagttcaagcgcgccaaggccaacctggataagaataaacagacacttgagaaagagaatgcggacctcgctggagaactgcgggtgcttgggcaggcgaaacaggaggtagaacataaaaagaaaaagttggaggcacaggtccaggagctccaaagtaaatgcagcgatggcgagagagccagggccgagttgaatgacaaagtacacaaacttcagaacgaagtcgaatccgtcaccggaatgctgaatgaggctgagggcaaagctatcaaactggctaaggacgtggcctcactgagttcccagctgcaggatactcaggagctgctgcaggaggaaactaggcagaaacttaatgttagcacaaagctcagacagttagaagaggagagaaatagcctgcaagaccagcttgacgaggaaatggaggcaaaacagaacctagaacggcatatctccacacttaatatccaacttagcgacagcaagaagaagctgcaggattttgcatccacggtggaagccttggaagagggaaagaagcgcttccagaaggaaatcgagaatctgactcagcaatacgaggaaaaagctgcggcttacgataagcttgagaagacgaagaatcgccttcaacaggagctggacgatctggtggtggacctcgataatcaacgccaactggtgagcaacctcgagaaaaaacagagaaaatttgaccagcttctggccgaggaaaaaaatattagttctaagtacgctgacgaaagagatagagccgaagctgaggccagagagaaagaaaccaaagctctgtccctggcgcgcgcactggaggaagccctggaggctaaagaggaactggaaaggacgaacaagatgctaaaagctgagatggaggatctagtgtcttccaaggacgatgtggggaagaacgttcatgagctcgagaagtctaagagagcactagagacccagatggaggagatgaaaacacaactggaggaattggaggatgagctgcaggcaactgaagatgccaaacttaggctggaagtgaatatgcaggcccttaaggggcagttcgaacgcgaccttcaagctcgggacgagcagaatgaggagaaaaggcggcagctgcaaagacagttgcacgaatacgaaacagagctggaggacgagcgtaaacaaagagcccttgcagcggcggccaagaagaagcttgagggcgatttaaaagatctggagctccaagcagatagcgccatcaagggtcgggaggaggccatcaaacaactccggaagctacaggctcaaatgaaggactttcagcgcgaattagaggatgcccgggccagcagagacgagatcttcgctacggcaaaggagaatgaaaagaaggccaagtcccttgaagccgacctaatgcagctgcaagaagatctcgctgcagccgaaagggcccgcaaacaagccgacctcgagaaggaggagctggccgaagaactcgcatcatctttgagtggcagaaatgctctgcaggatgagaaaagacgcctagaggcccgcatcgctcagctggaggaggaacttgaggaagaacaggggaacatggaagccatgagcgacagagtaagaaaggcaactcagcaggccgagcagctgtcgaacgagcttgcaaccgaacggtcaactgcacagaaaaacgagagtgcgagacaacagctagagcggcagaataaggagctccgcagtaagttgcacgaaatggagggggcagtcaagtcgaagttcaaaagcaccattgccgcattggaagcaaagattgcacagctcgaggagcaggtcgagcaggaagcccgcgagaagcaagcagcaactaagtccttaaagcagaaggataaaaaactcaaggagatcttactccaggtcgaagacgagcgaaagatggccgaacagtacaaagagcaagccgagaaaggtaatgcacgagttaaacagctgaaaaggcagctggaggaggcggaggaggaatctcaacgaatcaacgcaaatcgtagaaaactgcagagggaattggacgaagccactgaatccaacgaagcaatgggacgcgaagtcaatgcgcttaagagtaagctgcgcaggggaaacgagacttccttcgtaccttcccgtagaagtggagggcgaagggtgatagagaatgcagatggctctgaggaagaaactgatacccgcgatgccgatttcaatggaaccaaggcgagcgaatag

SEQ ID NO: 32617 - DNA, 5939 bp, Artificial Sequence
  derived and/or modified sequence
atggcccagaaagggcagctctccgacgatgagaagttcctgttcgtggacaaaaacttcataaacagtccagttgcccaggctgactgggctgctaaacgcctggtttgggtcccctccgagaaacagggcttcgaggctgccagcataaaagaggagaaaggtgatgaagtggtcgtggaactagttgaaaatggcaagaaagtcaccgtcgggaaggatgatattcagaagatgaatcctcctaaattctcaaaagtcgaagatatggcggaattgacatgcctgaatgaggcttctgtgctgcacaacctgagggagagatatttttctggcctgatttacacctactccggtttgttctgtgtggtagtgaacccatacaagcacctcccgatctacagcgagaagatcgttgacatgtacaaggggaagaaacgccatgagatgcctccacacatctatgctatagccgataccgcctaccgcagcatgctccaggatcgcgaggatcagagcatactgtgtacaggcgagtcaggcgctggcaaaactgagaatactaagaaggtgattcagtacttggccgttgttgcatcctcacataaaggaaaaaaggacacaagtatcactcagggcccttccttcgcatatggagagctcgagaaacagctgcttcaggcaaacccgattctggaggcgtttggaaatgcgaaaacagttaagaacgacaactcaagcaggtttggcaaattcatacgcattaattttgatgtcactggttacatagtaggggctaatatcgagacctatctgctcgagaagagtagggcaatacgccaagcacgggacgagcggacattccatatcttctactatatgattgcaggagcgaaagaaaagatgcgatccgacctattactcgaagggttcaacaattatactttcctgtctaacgggttcgtccccattcctgctgcacaggatgatgagatgttccaggagaccgtcgaagccatggccattatgggattcagcgaggaggaacaactgtcgatccttaaggtggtgtcttcagtgcttcaactgggcaacattgtctttaagaaggagcggaatacagaccaggcaagcatgccagacaatacggctgcacagaaagtatgtcacctgatggggattaatgttacagattttacgcgttccatcctgacccccagaatcaaagtcggtagagacgtggttcaaaaagctcaaaccaaagagcaggccgactttgccgtagaggccctcgcaaaagctacctacgaacgcctgttcagatggattctgacacgtgtgaacaaggcactcgacaagacccacaggcagggagcttcatttctagggatactggatattgccggtttcgagatcttcgaagttaactcctttgagcagctctgcatcaattacactaatgagaagctccagcagctattcaatcacacaatgtttatcctggaacaagaagagtaccaaagagagggcatcgagtggaattttatcgattttgggcttgacctgcagccttgcattgaactgattgagcgaccaaacaatccgcctggcgtgctagctcttcttgacgaagagtgctggtttcccaaagctactgacaagagttttgttgagaagttgtgcactgaacaggggagtcaccccaagtttcagaagccaaagcagctgaaggataagaccgaattcagcataattcattacgccggtaaggtagattataatgcgtccgcctggctcactaagaatatggatccattgaatgacaacgtgaccagtctcttaaacgcctcctctgataaattcgtcgccgacctctggaaagacgttgacagaatagtcggtcttgaccaaatggcaaagatgaccgaaagctctctgcctagtgcgagtaaaaccaaaaaaggaatgtttagaaccgtgggacaattgtacaaggaacagctgggcaagctcatgaccacactcaggaatacgacccctaacttcgttcgatgcattattccaaatcacgagaaaagatctggcaaattagacgctttccttgttctcgagcagttgcgctgtaacggggtccttgaagggattagaatctgtaggcagggctttccgaatagaattgtgttccaggagtttaggcaacgctacgagatcttagcagccaacgccattcccaagggcttcatggacgggaagcaggcctgtattttaatgataaaagcattggaactggacccaaacttgtatcggattgggcagtctaagatcttctttcgaacaggagtgctcgctcatctggaggaggagagagatctgaaaattactgacgtcatcatggcttttcaagccatgtgtagaggctatctagccaggaaagccttcgctaaaaggcaacagcagctaacagccatgaaagtgatccagcgaaattgcgcggcatacctgaagctgcggaactggcaatggtggcgactgttcacaaaggtgaaaccccttctgcaggtgacgaggcaagaggaggaaatgcaggcaaaggaggacgagttgcagaagactaaggagaggcagcagaaagccgaaaacgagctgaaagagctggagcaaaaacatagccagctgaccgaggagaagaaccttttgcaggagcagttgcaggctgaaactgagttatatgccgaagcagaagagatgcgggtccgcctcgccgctaagaaacaggagctggaagaaattctgcatgagatggaggccagacttgaggaagaggaagatagaggccagcagctgcaggcagagcgtaagaagatggcgcagcagatgctcgatttggaggagcagttggaggaagaggaagccgcaagacagaaactccagctggagaaggtgacagcagaggctaagatcaaaaagttggaggacgaaatcctcgtaatggacgatcagaataataaactgagcaaagagcggaagctcctggaagagcgtatttctgacttgacaaccaatctcgcagaggaggaagagaaggcaaagaacctgaccaagctgaaaaataagcacgagtctatgatctctgaattggaggtgcgcctgaaaaaagaggaaaagtcaagacaggagttggagaaactgaaacgtaaactggagggagatgcaagcgatttccatgagcaaatcgctgacctgcaagcccagattgcagaattgaagatgcagcttgctaaaaaggaagaagaattgcaagctgctttggcccgacttgacgacgagattgcccagaagaataacgcgctgaagaaaatccgggaattggaggggcacatcagcgaccttcaagaggatttagactctgaacgagcagcccgaaataaagcagagaagcagaaacgcgatctgggagaagaactggaggctttgaaaacggaactggaggacacgctggatagcacagctacccagcaggaactgagagccaagcgggaacaagaggttaccgtgctcaagaaggctttagatgaggaaacccgctcccacgaggcccaggtgcaggaaatgagacagaagcatgcccaggctgtcgaagaactaacggaacaattggagcagttcaaaagagccaaagcgaacctggacaagaataagcagacattggagaaggagaatgcagatttggctggcgaattaagagtgctggggcaggccaagcaggaagtggagcataagaagaagaaactcgaagcccaggtgcaggagctgcagagcaagtgcagtgatggagagcgagccagggcggaactgaatgataaagtacacaaattgcagaatgaggtggaaagcgtgacaggcatgcttaatgaagcagaaggcaaggcaattaaacttgccaaagacgtcgctagcctgagtagtcagttacaggatacccaggaattactgcaggaagaaaccaggcagaagctgaacgttagtaccaagctgcgccagctcgaggaggagaggaattccctccaagatcagctggatgaagagatggaggccaaacagaaccttgagcggcacatctccacccttaatatacagttaagcgactccaaaaagaaactgcaggatttcgcgagtaccgttgaggcgttggaggagggaaaaaagcggtttcagaaggagatcgaaaacttgacccagcagtacgaagaaaaggctgcagcttatgacaagctggaaaagaccaaaaaccgactccagcaggaacttgacgacttagtggttgacttggataaccagagacaacttgtgtctaacctggagaaaaagcagcgaaaatttgaccagttactggcagaggaaaagaatatttcaagtaaatatgcagacgagcgcgaccgcgctgaggccgaagcaagggaaaaagagacaaaggctctctcgctggccagagcactggaagaagcactcgaggccaaagaggaactggagcggaccaataagatgctcaaagcagagatggaggatctggtcagcagtaaagatgatgtgggtaagaatgtgcacgagctggagaagtccaagcgggcactggaaacccagatggaagagatgaaaacgcagctcgaggagttagaagacgaacttcaggctactgaagacgctaagctgcgacttgaagtaaatatgcaggctctcaaaggccagttcgagagagatttgcaggccagagatgagcaaaatgaggagaagaggcgccaactgcagcgccagcttcacgaatatgagacagagctggaagatgagagaaagcagagagcactggccgcagccgctaagaaaaagctggagggcgacctcaaggatttggagcttcaggccgatagcgcgatcaaaggtcgggaggaggcaataaagcagttgagaaaattacaagctcagatgaaggacttccagagagaactggaagatgcaagggcctcccgggatgagatctttgcgaccgcaaaggagaacgagaagaaagccaaaagcctggaggccgacctgatgcagctccaggaagacctcgccgcagccgagagggccaggaagcaggccgatctcgagaaagaggagctggctgaagagctcgctagcagtttgagcggtcgcaacgccctgcaggacgaaaaacgcaggctggaagctcggatcgcacaactggaggaagagttggaagaggagcaggggaacatggaagctatgagtgatcgcgttaggaaggcaactcagcaggccgagcagctctctaatgagctagccaccgaacggagcacggctcagaaaaacgaaagcgctagacaacagctggaacgccagaataaggaactccggtcgaaacttcatgagatggaaggagccgtcaagagtaagtttaaatcgacgatagccgcactcgaggccaagatcgctcagcttgaggagcaggtggaacaggaagccagggagaagcaggcagcaaccaaaagtctcaagcagaaagacaaaaagcttaaggaaatattattgcaggtggaagatgagaggaaaatggcggagcagtacaaggagcaggctgagaaaggcaatgcgcgtgtgaaacaactcaaacggcaactggaagaagccgaagaggagagccagcgtatcaatgctaatcgtaggaaactgcagagggagctggatgaagcaaccgagagcaacgaggccatggggagggaggtcaatgctctcaagtcaaaattgagaagggggaatgagactagtttcgtcccatctcggagatccggtggacggcgagttattgagaatgcagatggaagtgaggaggaaacagacacacgagacgctgactttaacggaaccaaggcctccgagta

SEQ ID NO: 32618 - DNA, 5940 bp, Artificial Sequence
  derived and/or modified sequence
atggcccagaagggccagctgagcgacgacgagaagttcctgttcgtggacaagaacttcatcaacagccccgtggcccaggccgactgggccgccaagagactggtgtgggtgcccagcgagaagcagggcttcgaggccgccagcatcaaggaggagaagggcgacgaggtggtggtggagctggtggagaacggcaagaaggtgaccgtgggcaaggacgacatccagaagatgaacccccccaagttcagcaaggtggaggacatggccgagctgacctgcctgaacgaggccagcgtgctgcacaacctgagagagagatacttcagcggcctgatctacacctacagcggcctgttctgcgtggtggtgaacccctacaagcacctgcccatctacagcgagaagatcgtggacatgtacaagggcaagaagagacacgagatgcccccccacatctacgccatcgccgacaccgcctacagaagcatgctgcaggacagagaggaccagagcatcctgtgcaccggcgagagcggcgccggcaagaccgagaacaccaagaaggtgatccagtacctggccgtggtggccagcagccacaagggcaagaaggacaccagcatcacccagggccccagcttcgcctacggcgagctggagaagcagctgctgcaggccaaccccatcctggaggccttcggcaacgccaagaccgtgaagaacgacaacagcagcagattcggcaagttcatcagaatcaacttcgacgtgaccggctacatcgtgggcgccaacatcgagacctacctgctggagaagagcagagccatcagacaggccagagacgagagaaccttccacatcttctactacatgatcgccggcgccaaggagaagatgagaagcgacctgctgctggagggcttcaacaactacaccttcctgagcaacggcttcgtgcccatccccgccgcccaggacgacgagatgttccaggagaccgtggaggccatggccatcatgggcttcagcgaggaggagcagctgagcatcctgaaggtggtgagcagcgtgctgcagctgggcaacatcgtgttcaagaaggagagaaacaccgaccaggccagcatgcccgacaacaccgccgcccagaaggtgtgccacctgatgggcatcaacgtgaccgacttcaccagaagcatcctgacccccagaatcaaggtgggcagagacgtggtgcagaaggcccagaccaaggagcaggccgacttcgccgtggaggccctggccaaggccacctacgagagactgttcagatggatcctgaccagagtgaacaaggccctggacaagacccacagacagggcgccagcttcctgggcatcctggacatcgccggcttcgagatcttcgaggtgaacagcttcgagcagctgtgcatcaactacaccaacgagaagctgcagcagctgttcaaccacaccatgttcatcctggagcaggaggagtaccagagagagggcatcgagtggaacttcatcgacttcggcctggacctgcagccctgcatcgagctgatcgagagacccaacaacccccccggcgtgctggccctgctggacgaggagtgctggttccccaaggccaccgacaagagcttcgtggagaagctgtgcaccgagcagggcagccaccccaagttccagaagcccaagcagctgaaggacaagaccgagttcagcatcatccactacgccggcaaggtggactacaacgccagcgcctggctgaccaagaacatggaccccctgaacgacaacgtgaccagcctgctgaacgccagcagcgacaagttcgtggccgacctgtggaaggacgtggacagaatcgtgggcctggaccagatggccaagatgaccgagagcagcctgcccagcgccagcaagaccaagaagggcatgttcagaaccgtgggccagctgtacaaggagcagctgggcaagctgatgaccaccctgagaaacaccacccccaacttcgtgagatgcatcatccccaaccacgagaagagaagcggcaagctggacgccttcctggtgctggagcagctgagatgcaacggcgtgctggagggcatcagaatctgcagacagggcttccccaacagaatcgtgttccaggagttcagacagagatacgagatcctggccgccaacgccatccccaagggcttcatggacggcaagcaggcctgcatcctgatgatcaaggccctggagctggaccccaacctgtacagaatcggccagagcaagatcttcttcagaaccggcgtgctggcccacctggaggaggagagagacctgaagatcaccgacgtgatcatggccttccaggccatgtgcagaggctacctggccagaaaggccttcgccaagagacagcagcagctgaccgccatgaaggtgatccagagaaactgcgccgcctacctgaagctgagaaactggcagtggtggagactgttcaccaaggtgaagcccctgctgcaggtgaccagacaggaggaggagatgcaggccaaggaggacgagctgcagaagaccaaggagagacagcagaaggccgagaacgagctgaaggagctggagcagaagcacagccagctgaccgaggagaagaacctgctgcaggagcagctgcaggccgagaccgagctgtacgccgaggccgaggagatgagagtgagactggccgccaagaagcaggagctggaggagatcctgcacgagatggaggccagactggaggaggaggaggacagaggccagcagctgcaggccgagagaaagaagatggcccagcagatgctggacctggaggagcagctggaggaggaggaggccgccagacagaagctgcagctggagaaggtgaccgccgaggccaagatcaagaagctggaggacgagatcctggtgatggacgaccagaacaacaagctgagcaaggagagaaagctgctggaggagagaatcagcgacctgaccaccaacctggccgaggaggaggagaaggccaagaacctgaccaagctgaagaacaagcacgagagcatgatcagcgagctggaggtgagactgaagaaggaggagaagagcagacaggagctggagaagctgaagagaaagctggagggcgacgccagcgacttccacgagcagatcgccgacctgcaggcccagatcgccgagctgaagatgcagctggccaagaaggaggaggagctgcaggccgccctggccagactggacgacgagatcgcccagaagaacaacgccctgaagaagatcagagagctggagggccacatcagcgacctgcaggaggacctggacagcgagagagccgccagaaacaaggccgagaagcagaagagagacctgggcgaggagctggaggccctgaagaccgagctggaggacaccctggacagcaccgccacccagcaggagctgagagccaagagagagcaggaggtgaccgtgctgaagaaggccctggacgaggagaccagaagccacgaggcccaggtgcaggagatgagacagaagcacgcccaggccgtggaggagctgaccgagcagctggagcagttcaagagagccaaggccaacctggacaagaacaagcagaccctggagaaggagaacgccgacctggccggcgagctgagagtgctgggccaggccaagcaggaggtggagcacaagaagaagaagctggaggcccaggtgcaggagctgcagagcaagtgcagcgacggcgagagagccagagccgagctgaacgacaaggtgcacaagctgcagaacgaggtggagagcgtgaccggcatgctgaacgaggccgagggcaaggccatcaagctggccaaggacgtggccagcctgagcagccagctgcaggacacccaggagctgctgcaggaggagaccagacagaagctgaacgtgagcaccaagctgagacagctggaggaggagagaaacagcctgcaggaccagctggacgaggagatggaggccaagcagaacctggagagacacatcagcaccctgaacatccagctgagcgacagcaagaagaagctgcaggacttcgccagcaccgtggaggccctggaggagggcaagaagagattccagaaggagatcgagaacctgacccagcagtacgaggagaaggccgccgcctacgacaagctggagaagaccaagaacagactgcagcaggagctggacgacctggtggtggacctggacaaccagagacagctggtgagcaacctggagaagaagcagagaaagttcgaccagctgctggccgaggagaagaacatcagcagcaagtacgccgacgagagagacagagccgaggccgaggccagagagaaggagaccaaggccctgagcctggccagagccctggaggaggccctggaggccaaggaggagctggagagaaccaacaagatgctgaaggccgagatggaggacctggtgagcagcaaggacgacgtgggcaagaacgtgcacgagctggagaagagcaagagagccctggagacccagatggaggagatgaagacccagctggaggagctggaggacgagctgcaggccaccgaggacgccaagctgagactggaggtgaacatgcaggccctgaagggccagttcgagagagacctgcaggccagagacgagcagaacgaggagaagagaagacagctgcagagacagctgcacgagtacgagaccgagctggaggacgagagaaagcagagagccctggccgccgccgccaagaagaagctggagggcgacctgaaggacctggagctgcaggccgacagcgccatcaagggcagagaggaggccatcaagcagctgagaaagctgcaggcccagatgaaggacttccagagagagctggaggacgccagagccagcagagacgagatcttcgccaccgccaaggagaacgagaagaaggccaagagcctggaggccgacctgatgcagctgcaggaggacctggccgccgccgagagagccagaaagcaggccgacctggagaaggaggagctggccgaggagctggccagcagcctgagcggcagaaacgccctgcaggacgagaagagaagactggaggccagaatcgcccagctggaggaggagctggaggaggagcagggcaacatggaggccatgagcgacagagtgagaaaggccacccagcaggccgagcagctgagcaacgagctggccaccgagagaagcaccgcccagaagaacgagagcgccagacagcagctggagagacagaacaaggagctgagaagcaagctgcacgagatggagggcgccgtgaagagcaagttcaagagcaccatcgccgccctggaggccaagatcgcccagctggaggagcaggtggagcaggaggccagagagaagcaggccgccaccaagagcctgaagcagaaggacaagaagctgaaggagatcctgctgcaggtggaggacgagagaaagatggccgagcagtacaaggagcaggccgagaagggcaacgccagagtgaagcagctgaagagacagctggaggaggccgaggaggagagccagagaatcaacgccaacagaagaaagctgcagagagagctggacgaggccaccgagagcaacgaggccatgggcagagaggtgaacgccctgaagagcaagctgagaagaggcaacgagaccagcttcgtgcccagcagaagaagcggcggcagaagagtgatcgagaacgccgacggcagcgaggaggagaccgacaccagagacgccgacttcaacggcaccaaggccagcgagtag

SEQ ID NO: 32619 - protein, 1439 aa, Artificial Sequence
  derived and/or modified sequence
MAEAGDAALSVAEWLRALHLEQYTGLFEQHGLVWATECQGLSDTRLMDMGMLLPGHRRRILAGLLRAHTSPAPAPRPTPRPVPMKRHIFRSPPVPATPPEPLPTTTEDEGLPAAPPIPPRRSCLPPTCFTTPSTAAPDPVLPPLPAKRHLAELSVPPVPPRTGPPRLLVSLPTKEEESLLPSLSSPPQPQSEEPLSTLPQGPPQPPSPPPCPPEIPPKPVRLFPEFDDSDYDEVPEEGPGAPARVMTKKEEPPPSRVPRAVRVASLLSEGEELSGDDQGDEEEDDHAYEGVPNGGWHTSSLSLSLPSTIAAPHPMDGPPGGSTPVTPVIKAGWLDKNPPQGSYIYQKRWVRLDTDHLRYFDSNKDAYSKRFISVACISHVAAIGDQKFEVITNNRTFAFRAESDVERKEWMQALQQAMAEQRARARLSSAYLLGVPGSEQPDRAGSLELRGFKNKLYVAVVGDKVQLYKNLEEYHLGIGITFIDMSVGNVKEVDRRSFDLTTPYRIFSFSADSELEKEQWLEAMQGAIAEALSTSEVAERIWAAAPNRFCADCGAPQPDWASINLCVVICKRCAGEHRGLGAGVSKVRSLKMDRKVWTETLIELFLQLGNGAGNRFWAANVPPSEALQPSSSPSTRRCHLEAKYREGKYRRYHPLFGNQEELDKALCAAVTTTDLAETQALLGCGAGINCFSGDPEAPTPLALAEQAGQTLQMEFLRNNRTTEVPRLDSMKPLEKHYSVVLPTVSHSGFLYKTASAGKLLQDRRAREEFSRRWCVLGDGVLSYFENERAVTPNGEIRASEIVCLAVPPPDTHGFEHTFEVYTEGERLYLFGLESAEQAHEWVKCIAKAFVPPLAEDLLARDFERLGRLPYKAGLSLQRAQEGWFSLSGSELRAVFPEGPCEEPLQLRKLQELSIQGDSENQVLVLVERRRTLYIQGERRLDFMGWLGAIQKAAASMGDTLSEQQLGDSDIPVIVYRCVDYITQCGLTSEGIYRKCGQTSKTQRLLESLRQDARSVHLKEGEQHVDDVSSALKRFLRDLPDGLFTRAQRLTWLEASEIEDEEEKVSRYRELLVRLPPVNRATVKALISHLYCVQCFSDTNQMNVHNLAIVFGPTLFQTDGQDYKAGRVVEDLINHYVVVFSVDEEELRKQREEITAIVKMRVAGTASGTQHAGDFICTVYLEEKKAETEQHIKVPASMTAEELTLEILDRRNVGIREKDYWTCFEVNEREEAERPLHFAEKVLPILHGLGTDSHLVVKKHQAMEAMLLYLASRVGDTKHGMMKFREDRSLLGLGLPSGGFHDRYFILNSSCLRLYKEVRSHRPEKEWPIKSLKVYLGVKKKLRPPTCWGFTVVHETEKHEKQQWYLCCDTQMELREWFATFLFVQHDGLVWPSEPSRVSRAVPEVRLGSVSLIPLRGSENEMRRSVAAFTADPLSLLRNV

SEQ ID NO: 32620 - protein, 1450 aa, Artificial Sequence
  derived and/or modified sequence
MAEAGDAALSVAEWLRALHLEQYTGLFEQHGLVWATECQGLSDTRLMDMGMLLPGHRRRILAGLLRAHTSPAPAPRPTPRPVPMKRHIFRSPPVPATPPEPLPTTTEDEGLPAAPPIPPRRSCLPPTCFTTPSTAAPDPVLPPLPAKRHLAELSVPPVPPRTGPPRLLVSLPTKEEESLLPSLSSPPQPQSEEPLSTLPQGPPQPPSPPPCPPEIPPKPVRLFPEFDDSDYDEVPEEGPGAPARVMTKKEEPPPSRVPRAVRVASLLSEGEELSGDDQGDEEEDDHAYEGVPNGGWHTSSLSLSLPSTIAAPHPMDGPPGGSTPVTPVIKAGWLDKNPPQGSYIYQKRWVRLDTDHLRYFDSNKDAYSKRFISVACISHVAAIGDQKFEVITNNRTFAFRAESDVERKEWMQALQQAMAEQRARARLSSAYLLGVPGSEQPDRAGSLELRGFKNKLYVAVVGDKVQLYKNLEEYHLGIGITFIDMSVGNVKEVDRRSFDLTTPYRIFSFSADSELEKEQWLEAMQGAIAEALSTSEVAERIWAAAPNRFCADCGAPQPDWASINLCVVICKRCAGEHRGLGAGVSKVRSLKMDRKVWTETLIELFLQLGNGAGNRFWAANVPPSEALQPSSSPSTRRCHLEAKYREGKYRRYHPLFGNQEELDKALCAAVTTTDLAETQALLGCGAGINCFSGDPEAPTPLALAEQAGQTLQMEFLRNNRTTEVPRLDSMKPLEKHYSVVLPTVSHSGFLYKTASAGKLLQDRRAREEFSRRWCVLGDGVLSYFENERAVTPNGEIRASEIVCLAVPPPDTHGFEHTFEVYTEGERLYLFGLESAEQAHEWVKCIAKAFVPPLAEDLLARDFERLGRLPYKAGLSLQRAQEGWFSLSGSELRAVFPEGPCEEPLQLRKLQELSIQGDSENQVLVLVERRRTLYIQGERRLDFMGWLGAIQKAAASMGDTLSEQQLGDSDIPVIVYRCVDYITQCGLTSEGIYRKCGQTSKTQRLLESLRQDARSVHLKEGEQHVDDVSSALKRFLRDLPDGLFTRAQRLTWLEASEIEDEEEKVSRYRELLVRLPPVNRATVKALISHLYCVQCFSDTNQMNVHNLAIVFGPTLFQTDGQDYKAGRVVEDLINHYVVVFSVDEEELRKQREEITAIVKMRVAGTASGTQHAGDFICTVYLEEKKAETEQHIKVPASMTAEELTLEILDRRNVGIREKDYWTCFEVNEREEAERPLHFAEKVLPILHGLGTDSHLVVKKHQAMEAMLLYLASRVGDTKHGMMKFREDRSLLGLGLPSGGFHDRYFILNSSCLRLYKEVRSQRPWSGAPETSHRPEKEWPIKSLKVYLGVKKKLRPPTCWGFTVVHETEKHEKQQWYLCCDTQMELREWFATFLFVQHDGLVWPSEPSRVSRAVPEVRLGSVSLIPLRGSENEMRRSVAAFTADPLSLLRNV

SEQ ID NO: 32621 - DNA, 4320 bp, Artificial Sequence
  derived and/or modified sequence
atggccgaggccggcgacgctgctttgagcgtggcggagtggttgagagcgcttcaccttgaacagtatactggcctctttgaacagcacggactcgtgtgggctactgaatgtcagggcctatccgacacccggctcatggacatgggcatgttgctgcccgggcatagacggcggatcctggcaggactgcttagagcccatacctcacctgcgcccgcccccagacccactccacgccccgtccctatgaagagacacatttttcggtcacctcccgtaccggcgacccctcctgaacccttgccaacaactacagaagatgagggacttccagctgctcctccaataccccctagacgctcatgcttacccccaacttgcttcactacgcccagtacggccgcacctgatccagtgcttccacccctgcctgctaagagacacctcgccgaactaagcgtcccccctgtgcctccaagaactgggcctccacgcctcctggtctccttacctacaaaggaagaggagagtctcctcccctctctgtctagccctccacaaccccagagtgaagaacctcttagtactttgccccaaggtcccccacaacctccttctccacccccctgtccgcctgaaatcccgccaaagcctgtccgcctctttccggagttcgatgacagcgactatgatgaagtgcccgaggagggtccaggtgctcctgctcgcgtgatgaccaaaaaggaagagcctcctccaagccgtgttcctcgggccgtgcgtgtagcgtcacttctttctgaaggtgaggagctgagtggcgatgatcagggcgatgaagaggaggatgaccatgcatacgagggagttcccaacggaggctggcatacgagtagcctgtcacttagcctgcccagcacaatagcagcaccacaccctatggacgggccaccaggcggcagcactcccgtgacaccggtgatcaaggcgggctggctggacaaaaacccgcctcaaggatcttatatttatcagaagcgatgggtaagattggatactgaccacctgcgctactttgattcaaataaggacgcctacagcaaaaggttcattagcgtggcctgtatctctcatgtggccgctatcggagatcagaagtttgaggtgatcacgaacaacaggacctttgcgtttcgcgccgagagcgacgttgagcgcaaggagtggatgcaggcactccagcaggccatggcagaacagcgggcgcgcgcgaggcttagtagtgcttacttactcggggtcccaggatccgagcagcccgatagggcagggagcttggaactgcgaggattcaagaataaactttacgtagccgtggtgggggataaagtacagttgtataagaatctggaggaatatcacctcggcatcggtattacattcatcgacatgtccgttggcaacgttaaggaggttgacagacgctccttcgaccttaccaccccctatcggatcttctccttctccgcggattcggagctagagaaggagcagtggttggaggcaatgcagggggcgattgctgaggccttgtccacgtccgaagtcgcggagaggatctgggccgcagcccctaatcgattttgcgccgattgtggcgccccccagcctgactgggcctccataaacctatgcgttgtcatctgcaagcgttgcgccggagaacaccgaggacttggggctggtgtgagcaaagtcagaagtctgaagatggaccgaaaagtttggaccgagacattgatcgaactttttctgcagcttggaaacggggctggcaatagattctgggccgcaaatgtgccgccttccgaggcattgcagccatcttcatcaccgagcacgcgtaggtgccatctggaagcaaaataccgcgaggggaaatacagaagataccatccattgtttggcaaccaagaggagctggataaggccctatgcgccgccgtgaccacgacagacctcgccgagactcaggcactgctaggatgcggggcagggattaattgcttttctggggatcccgaggccccaacccctttggcactcgcagagcaggccggacaaaccctccagatggagttcctgcgaaacaatcgaactacggaggttccccgtctagattcaatgaagcccttggaaaaacattattccgtggtgttacccaccgtttcgcactctggctttttgtacaaaacagcctccgctggaaagttactccaggaccgccgggcccgggaagagtttagcaggcgctggtgcgtgcttggtgacggggtgcttagctactttgaaaatgagcgggcggttacacctaatggcgaaattcgggctagtgaaatcgtgtgcttggcggtccccccacccgatacccatggttttgaacacaccttcgaagtgtacacagaaggcgagcgcctctatctatttggcctggagtcggccgagcaggctcacgaatgggtcaagtgtatcgcaaaggcttttgtgcctcccttggccgaggaccttctcgcaagggatttcgagcggctcgggcgattgccatataaagccggcttgagcttgcagagggctcaggaggggtggttcagcctgtcaggtagtgagttacgagccgtcttcccggaaggtccttgtgaggagcccctccaattacgtaaacttcaggagctctctatacagggggatagtgaaaatcaggtcctggtgcttgtggaaaggaggcggaccttgtacattcagggcgagagacggctggattttatgggttggctgggagcaatccagaaggccgccgcttccatgggggataccctgagcgagcagcaactcggcgatagcgatatccctgtaatagtgtacagatgtgtcgactatatcactcagtgtggccttacatctgaaggcatctatcgcaagtgtgggcagacatcaaagacccagagactgctggagtcattgagacaagatgcaaggtcagtgcatctcaaagaaggcgaacagcacgtggatgacgtgagttcagccctcaagcggtttttgcgggacctgccggacgggttgttcactcgcgcacagcggcttacctggctcgaggcctctgaaatcgaagatgaagaggagaaagtatcccgttaccgggagcttctggtgcggcttcctcccgtgaaccgagccactgtgaaagctctgatatcccacctgtattgtgtacaatgttttagcgacaccaaccagatgaatgtccacaacctggccatcgttttcggtcctactctgtttcagacagacggccaagattacaaggcaggacgggtcgtcgaggatttaatcaatcattacgtagttgtattttccgtggacgaagaagaacttagaaaacagagggaggagattaccgccattgtgaagatgagagtggccggtacagctagcggcactcagcacgccggcgactttatctgcaccgtgtaccttgaagagaagaaggccgaaactgaacaacacatcaaggtacccgcctcaatgactgctgaggagcttacactggagatcctggaccgcaggaacgtgggaattagagagaaagactactggacatgcttcgaggttaacgagcgagaggaggctgaacggcctctccactttgccgagaaagtactcccaatcttgcacggcctgggcacagacagccaccttgttgtcaagaaacaccaagccatggaggctatgctactgtatttagcttcgagagtcggagacacgaaacacgggatgatgaaattccgcgaggatagaagtctgcttggcctgggactacccagcggtggctttcacgaccgatatttcatcttgaattcctcatgtctgcggctgtacaaggaagtccggtcacaccgaccggaaaaagagtggcctattaaatcactgaaggtctacctgggcgtgaagaagaaactccgtcctcccacctgctggggcttcactgtggtgcacgagacagagaagcacgagaagcagcagtggtatctgtgctgcgacacccagatggaactcagagaatggtttgccacctttctcttcgtgcaacacgacgggttggtgtggcctagtgagccttcgagggttagcagagcagtgccagaagtgcgacttggtagtgtatctctgattccgctgagggggagcgagaatgaaatgagaagatctgtggccgcgttcaccgctgacccgctgagcttgctccgcaatgtatag

SEQ ID NO: 32622 - DNA, 4353 bp, Artificial Sequence
  derived and/or modified sequence
atggccgaagcgggcgatgctgctctgtccgttgccgagtggctgcgggctctgcatctggagcagtacacgggcctgtttgaacaacacggcttagtgtgggcgacggaatgtcaaggactgtccgacacacggcttatggatatgggcatgctcttaccagggcatcggcgtcggatacttgctgggctgctaagggcccatacctctccggcccccgctcccaggccaacaccaagacctgttccaatgaagaggcatatcttcagatcaccgccagtgcctgcaacaccccccgagcccctgcccacaacgactgaggacgagggcttgccagctgcaccacctatccccccacgtcgaagttgtttgccccccacatgcttcactacgcctagcacagcagcccctgaccccgtactccctccactgcccgcaaagcgccaccttgctgaactttcagtgccaccagttcccccccggacgggccccccccgactgctggtgagtttacccactaaggaggaggaaagtttgctcccgtcactgtccagtcccccccagccccagagtgaggaacccctctccactttgccccagggacctccccagccccccagtccgcccccatgcccccccgagataccacccaagcccgtgaggctgttccccgaattcgacgatagtgattacgacgaggtcccagaagagggcccaggcgcccccgcacgagtgatgaccaaaaaggaggagccacctcccagtcgagtgcccagggccgttagagtcgctagcttattaagcgagggagaagagttgtcaggggatgaccagggagatgaggaggaagatgatcatgcttatgaaggggttcccaatggcgggtggcatacttcgagtctatctttgtctcttccatctactatagcagcaccacatccaatggacgggccacccggaggctccaccccagtgacaccggtgattaaagccgggtggttagataagaatccccctcaggggagctacatttaccaaaaacgatgggttaggctcgacactgatcacttacgatatttcgatagcaacaaagacgcctatagtaagaggttcatctccgttgcttgtatctcccacgtcgccgcaatcggtgaccagaaatttgaagttattactaacaatcggactttcgcatttagagcagagagtgacgtagagagaaaagagtggatgcaggctctgcagcaagctatggctgagcaaagggcccgagccagactgtctagcgcctacttgctgggtgtcccaggctctgagcagcccgatagggcgggctcactagaactgaggggatttaaaaataagctttacgttgcagtcgtgggagacaaggtgcagctgtataaaaacctggaggagtatcacttagggattggcataacgttcatcgatatgtctgttgggaacgtaaaagaggtagatcgcaggagcttcgacttaacaacaccctacaggatctttagcttcagtgcggattccgagctcgagaaggagcagtggctggaggcaatgcagggagccattgcagaggctctgtccacttcagaggtggctgaaagaatttgggctgctgcacctaataggttctgtgctgattgtggggctccgcagccagactgggcctccatcaatctgtgtgtggtaatttgtaaaaggtgcgccggtgagcatcggggtctgggagctggtgtgtccaaggtccgttctttgaaaatggatcgcaaggtgtggacagaaacattaatcgaattgtttctacaattggggaatggcgctggaaatagattctgggctgccaatgtgccacctagcgaagcgctacagccctcttctagcccaagtacgaggcgctgtcatcttgaggctaaataccgggagggcaaatacaggagataccaccctttatttgggaaccaggaagagctcgataaagccctatgcgctgcagtcaccactaccgatctcgccgagacacaggctctattgggctgtggcgccggcattaattgtttttccggtgatccagaagcgccgacccccctcgccttagcagaacaggcaggccagacccttcaaatggagttcttacggaataatagaaccacggaagtacccaggctggacagcatgaaaccactggagaaacattacagtgtggtacttccaacggtttcccactccggcttcctctacaaaaccgcttccgccgggaaattgctccaggatagaagggccagggaagaattcagtcggcgctggtgtgtgctaggtgatggggtcttgtcctactttgagaatgagagagccgtcactcccaatggcgagattagagctagtgagattgtgtgtctggctgttcctccgcccgatacccacgggtttgaacatacctttgaggtgtatacagagggagagaggctgtacctgttcggactagaatcagcagagcaggcgcacgagtgggtgaaatgcattgccaaagccttcgtgcctcctctggccgaggacctgctggctcgtgacttcgaacggctcggaaggcttccctataaagctggtctgtccttgcagcgggcccaggagggctggttttccttgtcaggatcagagttaagagcagtctttcctgagggaccctgtgaggaacctctccagctacgcaaactgcaggagctgtccattcagggagactcagaaaaccaagtactggtgctggtcgagcgtcgccggacactgtatattcagggcgaaagacggctcgattttatgggttggctaggagcgatccagaaggcggcagccagcatgggggacactctgagtgagcagcagctgggggactccgatattccagtaatcgtgtataggtgcgtagattatatcacgcagtgcggactcacctccgagggaatttacaggaagtgcggtcagaccagcaaaacccagcgattgctggaatcactcaggcaggatgcacgaagtgttcacctcaaagaaggcgagcagcatgtggatgacgtgagcagtgctctgaagcgatttcttagagatctccctgatggtctgtttaccagggctcagaggttaacctggctcgaggccagtgaaatcgaggatgaggaggaaaaagtctcccgatatcgggaactgctggtcagactccctccagtgaaccgtgccacagtgaaggctctgataagccacttgtattgtgtccagtgctttagcgacactaatcaaatgaacgtccacaatttggccattgtatttggccccaccctgtttcaaactgacggccaggactataaggccggaagggtagttgaagatctgatcaatcattatgtggtggttttctctgtggacgaggaggaactcagaaagcagcgagaggaaatcaccgcaatcgtgaaaatgcgcgtggccggcactgctagcgggacccaacatgccggcgactttatctgtacagtttatttggaagaaaaaaaagcggaaaccgagcagcatataaaggttcctgcctcaatgactgcagaggagttaaccctggaaatcctggaccggcgcaacgtcggcatccgggagaaagactactggacatgcttcgaggtgaacgaacgggaagaagccgagagaccactgcactttgctgagaaggtgttgccgattctccatgggctgggcacagacagccatctggttgtcaagaaacaccaagcaatggaagcaatgctcctttacctcgctagccgtgtaggcgacaccaaacacggcatgatgaaatttcgtgaagacaggagcctgttgggccttggacttccctccggaggtttccacgaccgatacttcatactcaattcctcgtgcctcagactgtataaagaagtccggtctcagaggccgtggtccggcgcccctgaaactagccatcggccagagaaagagtggccaattaagagcttaaaggtgtacctgggagtcaaaaaaaagctgcgacctccaacctgttgggggttcaccgtggtgcatgaaacagaaaagcatgaaaaacagcagtggtacctgtgctgtgacacccagatggagctgagggaatggtttgcaacatttttgtttgttcagcacgatggcctggtctggcctagcgagccgagtagggtgtctagagccgtccctgaggtacggctcgggagcgtgagtcttatcccgctccgaggctcagagaacgaaatgagaagaagtgtggcagcttttacagcggatccactgtccctgctccgaaatgtttag

SEQ ID NO: 32623 - DNA, 4320 bp, Artificial Sequence
  derived and/or modified sequence
atggctgaagctggcgacgcagcactgtccgtcgcagaatggctgcgtgctctgcaccttgagcagtacacaggattgtttgagcaacatgggttagtgtgggctactgagtgccaggggttgtccgacacacgcttgatggatatgggaatgctgctgcccgggcatagacgccgcatcctggccggcctgctgcgcgctcatacttctccagccccagcacctcgccctacacctcggcccgtacctatgaagaggcacatcttcaggtctccccctgtgcctgccactcctcccgagccactgccaacaactaccgaggacgaaggccttcctgcagcccctcctattcctcctcggagaagttgtctccccccaacttgctttaccacacctagcacagctgccccggacccagtgctccctcccctgcctgctaaaaggcacctggctgagctatctgtgcctccagtccctccccgcacggggcctccgcgcctcctggtcagcctgccaacaaaggaggaagagtcgctcctgccgagtctctctagcccaccgcagccccagtcagaggagccactgtctactctgccccagggcccaccccaaccgcctagcccaccgccatgtccaccggaaatcccccctaagcccgtacgcctcttcccagagtttgatgatagtgattacgacgaagtccctgaggaggggccaggcgcccctgccagagtgatgacgaaaaaagaagagccgccaccgagtcgcgtaccccgtgctgtgagggtggcctctctgttgtccgagggcgaggaactctccggtgatgatcagggagacgaagaagaggacgatcatgcgtatgagggggtcccaaatggcggttggcacacgagctccctttccctgtccctcccatccaccatcgccgcgccccatccaatggacggaccccccgggggatcgacaccagtgactccagtgattaaagcaggatggctagacaagaatcccccccagggatcttacatctatcagaaaaggtgggtcagattagatacagaccatttgcgctacttcgattccaacaaggatgcatattcaaagagattcatctccgtcgcctgcatcagccacgtggccgctatcggtgaccaaaaatttgaagtcatcacaaataatcgcacctttgcattccgcgccgagagcgatgtggaaaggaaagaatggatgcaggctctccaacaggctatggcagagcagcgagctagggccaggctgtcttcagcctatctactaggcgtccccgggtctgagcaacccgatagagccgggagtctcgaactgcgtggcttcaagaacaagttgtacgtcgcggtagtgggcgacaaagtgcaactttacaagaatctcgaggaataccacctgggaattggaatcacgttcatcgatatgagtgtgggcaacgtgaaggaggtggatagacgctcttttgatctgaccaccccttatcggatcttttcatttagcgctgatagcgaactggagaaggaacagtggctggaagccatgcagggcgctatcgctgaggcacttagtacaagcgaggtcgccgaacgaatctgggccgccgctcctaaccggttttgtgctgactgtggcgctccacagcccgactgggccagtatcaacctgtgcgttgtgatctgcaagaggtgcgcgggggagcacagaggattaggggcgggtgttagtaaagttcgctcactgaaaatggatcggaaggtttggacagaaaccctgatcgagcttttcctccagttgggcaatggggcggggaaccgtttctgggcagctaatgtgcctccctccgaggcgctgcaaccctcgtccagcccgtccacccggcgctgtcatctcgaggctaagtaccgggaggggaagtacagaaggtaccatcctctgttcggcaatcaagaggaattagacaaggcactgtgcgctgcagtgacaacaacagacctcgcggagacccaggccttactgggctgcggcgccggaatcaattgtttcagtggggacccagaggcccccactcccctcgccctggccgagcaggccggacaaactttgcagatggaattcctgcggaacaaccgaactacagaagttcctcgtctcgactccatgaaacctctcgagaaacactactccgtggtgctgcctacagtttctcactctggattcctgtataagaccgctagcgccggaaagttactgcaggacaggcgggcgcgcgaagaattcagccggcgttggtgcgtgcttggagatggagtactctcttatttcgaaaacgaaagggccgtgactcctaacggagaaatccgggcgagtgaaattgtgtgtcttgccgtgccacccccagacacacacgggttcgagcacactttcgaagtctatacagaaggggagagactgtaccttttcggactggagtcggccgagcaggcacatgaatgggtaaagtgcatcgcaaaagccttcgtgccacctctggcagaagatttactagcccgcgacttcgagaggctcggtaggctcccttataaagccgggctgtcgctccaacgagctcaggaggggtggttctccctgtctggatctgagcttcgggctgtgttccctgagggcccttgcgaagagccgctgcaattacgcaagttgcaagaactgagtatccagggagattcggagaaccaggtgctggtcctagttgaacggcgcaggacgctgtacattcaaggggagaggcgcctggatttcatgggctggctgggggctatccagaaggcagcagcctccatgggagatacattatcagagcagcagctgggcgactcggatatacctgtgattgtctatagatgcgtcgattatataacccagtgcggcttgacatcagaagggatctaccgcaaatgcggccagaccagcaagactcagagactgctggagtccctcagacaggacgcccggagcgtgcacctcaaagaaggagagcagcatgtcgacgacgtcagttccgcactcaagaggttcctcagagatttacctgatggtttgttcacccgcgctcagcggctgacttggttagaggccagcgaaatagaagatgaagaagaaaaggtttcacggtatagggaactgttggttcggttgcctcccgtaaatagggccaccgtgaaggccttgatctctcacctatactgtgtgcagtgcttcagcgatacaaatcaaatgaacgtgcacaatctggccattgtattcggccccactcttttccagactgacggccaggattacaaagccggcagggtcgtcgaggatctgatcaaccattacgtggttgtgttctctgtggatgaggaggaacttaggaaacaaagagaagagataaccgcaatcgttaaaatgcgagttgctggaacagctagcggaacccagcacgcaggcgactttatctgcacagtgtatcttgaggaaaagaaggccgagacagagcagcatatcaaggttcccgcttccatgaccgccgaagaacttaccctcgagatcttggacagacgcaacgttgggattagagaaaaagactattggacatgctttgaggtgaacgagcgggaggaggcggagcggcctcttcattttgccgaaaaggtcttgcctatcttgcatggattaggcactgacagtcacctggtagttaaaaagcatcaagctatggaagccatgctgctatatctcgcctccagggtgggcgacacaaagcacggtatgatgaaatttagggaggacagaagcctgctggggttgggactgcccagtggcggattccatgacaggtacttcattcttaacagctcgtgcttgaggctgtataaggaggtcagatcacaccgccctgaaaaggaatggcctattaaatccctgaaggtgtatctgggggtcaaaaagaagctgcgccccccaacatgttggggttttacagtggtccacgaaaccgaaaaacacgaaaaacagcagtggtacctgtgctgtgacacacaaatggaattgcgggagtggtttgcaacttttctgttcgtccaacacgacgggcttgtgtggccaagtgagcctagccgagtctctcgcgctgtgcctgaagtgcggctgggctccgtgtcccttatccccttacggggttccgagaacgagatgcgccgatccgttgccgcctttaccgccgaccctctgtctcttctcagaaatgtgtag

SEQ ID NO: 32624 - DNA, 4320 bp, Artificial Sequence
  derived and/or modified sequence
atggccgaggccggagatgctgccctgtctgtggccgagtggctgcgggccctgcacctggagcagtacacaggcctgtttgagcagcacggcctggtgtgggccacagagtgccagggcctgagtgacacccggctgatggacatgggcatgctgctgcccggccacagaagacgcatcctggccggcctgctgcgggcccacaccagccctgccccagccccccggcccacccccaggcctgtgcccatgaagaggcacatcttccgcagcccccctgtgcctgccaccccacctgagcccctgcccaccaccacagaagatgagggcctgcctgctgccccacccatccccccccggcgcagctgcctgccccccacctgcttcaccacccccagcacagctgccccagaccctgtgctgccccccctgcctgccaagaggcacctggccgagctgtctgtgccccctgtgccccccaggacaggccccccccggctgctggtgtccctgcccaccaaggaggaggagagcctgctgcccagcctgagcagccccccccagccccagagcgaggagcccctgagcaccctgccccagggccccccccagccccccagccccccaccctgccccccagagatcccccccaagcctgtgcggctcttccctgagtttgatgacagcgactatgatgaggtgcctgaggagggccctggggccccagcccgggtgatgaccaagaaggaggagcccccacccagccgggtgcccagggctgtgcgggtggccagcctgctgtctgagggggaggagctgtctggagatgaccagggagatgaggaggaggatgaccacgcctatgagggcgtgcccaatggaggctggcacaccagcagcctgagcctgagcctgcccagcaccatcgccgccccccaccccatggatggccccccaggcggcagcacccctgtgacccctgtgatcaaggccggctggctggacaagaaccccccccagggcagctacatctaccagaagcgctgggtgcggctggacacagaccacctgcgctactttgacagcaacaaggatgcctacagcaagcgcttcatctctgtggcctgcatcagccacgtggccgccatcggggaccagaagtttgaggtgatcaccaacaacagaacatttgccttccgggcagagagtgatgtggagaggaaggagtggatgcaggccctgcagcaggccatggccgagcagagggcccgggcccggctgagcagcgcctacctgctgggcgtgcccggcagcgagcagcctgaccgggccggcagcctggagctgcggggcttcaagaacaagctgtatgtggccgtggtgggggacaaggtgcagctgtacaagaacctggaggagtaccacctgggcatcggcatcaccttcatcgacatgtctgtgggcaatgtgaaggaggtggacagaagaagctttgacctgaccaccccctaccgcatcttctccttctctgctgacagcgagctggagaaggagcagtggctggaggccatgcagggcgccatcgccgaggccctgagcaccagcgaggtggccgagcgcatctgggccgccgcccccaaccgcttctgtgccgactgtggggccccccagcctgactgggccagcatcaacctgtgtgtggtgatctgcaagagatgtgccggggagcaccggggcctgggcgctggggtgtccaaggtgcgcagcctgaagatggacaggaaggtgtggacagagaccctcatcgagctgttcctgcagctgggcaatggagctggcaaccgcttctgggccgccaacgtgccccccagcgaggccctgcagcccagcagcagccccagcacccggcgctgccacctggaggccaagtaccgggagggcaagtaccgccgctaccaccccctgtttggaaaccaggaggagctggacaaggccctgtgtgccgctgtgaccaccacagacctggccgagacccaggccctgctgggctgtggggccggcatcaactgcttcagcggggaccctgaggcccccacccccctggccctggccgagcaggccggccagaccctgcagatggagttcctgaggaacaacagaaccacagaggtgccccggctggacagcatgaagcccctggagaagcactacagcgtggtgctgcccaccgtgagccacagcggcttcctgtacaagacagccagcgctgggaagctgctgcaggacagaagagcccgggaggagttcagccgccgctggtgtgtgctgggagatggagtgctgagctactttgaaaatgaaagagctgtgaccccaaatggagagatccgggccagcgagatcgtgtgcctggccgtgcccccaccagacacccacggctttgagcacacctttgaggtgtacacagaaggagagcggctgtacctgtttggcctggagagcgctgagcaggcccacgagtgggtgaagtgcatcgccaaggcctttgtgccccccctggccgaggacctgctggcccgggactttgagcggctgggccgcctgccctacaaggccggcctgagcctgcagagggcccaggagggctggttcagcctgagcggcagcgagctgcgggctgtgtttcctgagggcccctgtgaggagcccctgcagctgaggaagctgcaggagctgagcatccagggcgacagcgagaaccaggtgctggtgctggtggagaggaggaggaccctgtacatccagggcgagcggcggctggacttcatgggctggctgggcgccatccagaaggctgctgcctccatgggagacaccctgtctgagcagcagctgggggacagcgacatccctgtgattgtgtaccgctgtgtggactacatcacccagtgtggcctgaccagcgagggcatctacagaaaatgtggccagaccagcaagacccagaggctgctggagagcctgcggcaggatgcccggtctgtgcacctgaaggagggggagcagcacgtggatgatgtgtcctctgccctgaagcgcttcctgcgggacctgcctgatggcctcttcacccgggcccagaggctgacctggctggaggccagcgagattgaagatgaggaggagaaggtgagccgctaccgggagctgctggtgcggctgccccctgtgaacagagccaccgtgaaggccctgatcagccacctgtactgtgtgcagtgcttcagtgacaccaaccagatgaatgtgcacaacctggccatcgtgtttggccccaccctcttccagacagatggccaggactacaaggccggccgggtggtggaggacctgatcaaccactacgtggtggtgttttctgtggatgaggaggagctgaggaagcagcgggaggagatcacagccatcgtgaagatgagggtggccggcacagccagcggcacccagcacgccggggacttcatctgcaccgtgtacctggaggagaagaaggccgagacagagcagcacatcaaggtgcctgcctccatgacagctgaggagctgaccctggagatcctggacagaagaaatgtgggcatccgggagaaggactactggacctgctttgaggtgaatgaaagagaggaggccgagcggcccctgcactttgctgagaaggtgctgcccatcctgcacggcctgggcacagacagccacctggtggtgaagaagcaccaggccatggaggccatgctgctgtacctggccagccgggtgggggacaccaagcacggcatgatgaagttcagagaagatagaagcctgctgggcctgggcctgcccagcggcggcttccatgaccgctacttcatcctgaacagcagctgcctgcggctgtacaaggaggtgcgcagccacaggcctgagaaggagtggcccatcaagagcctgaaggtgtacctgggcgtgaagaagaagctgcggccccccacctgctggggcttcaccgtggtgcatgaaacagagaagcatgagaagcagcagtggtacctgtgctgtgacacccagatggagctgcgggagtggtttgccaccttcctgtttgtgcagcatgatggcctggtgtggcccagcgagcccagccgggtgtccagagctgtgcctgaggtgcggctgggctctgtgtccctcatccccctgcggggctctgaaaatgagatgagaagatctgtggccgccttcaccgctgaccccctgagcctgctgagaaatgtgtag

SEQ ID NO: 32625 - DNA, 4353 bp, Artificial Sequence
  derived and/or modified sequence
atggccgaggccggagatgctgccctgtctgtggccgagtggctgcgggccctgcacctggagcagtacacaggcctgtttgagcagcacggcctggtgtgggccacagagtgccagggcctgagtgacacccggctgatggacatgggcatgctgctgcccggccacagaagacgcatcctggccggcctgctgcgggcccacaccagccctgccccagccccccggcccacccccaggcctgtgcccatgaagaggcacatcttccgcagcccccctgtgcctgccaccccacctgagcccctgcccaccaccacagaagatgagggcctgcctgctgccccacccatccccccccggcgcagctgcctgccccccacctgcttcaccacccccagcacagctgccccagaccctgtgctgccccccctgcctgccaagaggcacctggccgagctgtctgtgccccctgtgccccccaggacaggccccccccggctgctggtgtccctgcccaccaaggaggaggagagcctgctgcccagcctgagcagccccccccagccccagagcgaggagcccctgagcaccctgccccagggccccccccagccccccagccccccaccctgccccccagagatcccccccaagcctgtgcggctcttccctgagtttgatgacagcgactatgatgaggtgcctgaggagggccctggggccccagcccgggtgatgaccaagaaggaggagcccccacccagccgggtgcccagggctgtgcgggtggccagcctgctgtctgagggggaggagctgtctggagatgaccagggagatgaggaggaggatgaccacgcctatgagggcgtgcccaatggaggctggcacaccagcagcctgagcctgagcctgcccagcaccatcgccgccccccaccccatggatggccccccaggcggcagcacccctgtgacccctgtgatcaaggccggctggctggacaagaaccccccccagggcagctacatctaccagaagcgctgggtgcggctggacacagaccacctgcgctactttgacagcaacaaggatgcctacagcaagcgcttcatctctgtggcctgcatcagccacgtggccgccatcggggaccagaagtttgaggtgatcaccaacaacagaacatttgccttccgggcagagagtgatgtggagaggaaggagtggatgcaggccctgcagcaggccatggccgagcagagggcccgggcccggctgagcagcgcctacctgctgggcgtgcccggcagcgagcagcctgaccgggccggcagcctggagctgcggggcttcaagaacaagctgtatgtggccgtggtgggggacaaggtgcagctgtacaagaacctggaggagtaccacctgggcatcggcatcaccttcatcgacatgtctgtgggcaatgtgaaggaggtggacagaagaagctttgacctgaccaccccctaccgcatcttctccttctctgctgacagcgagctggagaaggagcagtggctggaggccatgcagggcgccatcgccgaggccctgagcaccagcgaggtggccgagcgcatctgggccgccgcccccaaccgcttctgtgccgactgtggggccccccagcctgactgggccagcatcaacctgtgtgtggtgatctgcaagagatgtgccggggagcaccggggcctgggcgctggggtgtccaaggtgcgcagcctgaagatggacaggaaggtgtggacagagaccctcatcgagctgttcctgcagctgggcaatggagctggcaaccgcttctgggccgccaacgtgccccccagcgaggccctgcagcccagcagcagccccagcacccggcgctgccacctggaggccaagtaccgggagggcaagtaccgccgctaccaccccctgtttggaaaccaggaggagctggacaaggccctgtgtgccgctgtgaccaccacagacctggccgagacccaggccctgctgggctgtggggccggcatcaactgcttcagcggggaccctgaggcccccacccccctggccctggccgagcaggccggccagaccctgcagatggagttcctgaggaacaacagaaccacagaggtgccccggctggacagcatgaagcccctggagaagcactacagcgtggtgctgcccaccgtgagccacagcggcttcctgtacaagacagccagcgctgggaagctgctgcaggacagaagagcccgggaggagttcagccgccgctggtgtgtgctgggagatggagtgctgagctactttgaaaatgaaagagctgtgaccccaaatggagagatccgggccagcgagatcgtgtgcctggccgtgcccccaccagacacccacggctttgagcacacctttgaggtgtacacagaaggagagcggctgtacctgtttggcctggagagcgctgagcaggcccacgagtgggtgaagtgcatcgccaaggcctttgtgccccccctggccgaggacctgctggcccgggactttgagcggctgggccgcctgccctacaaggccggcctgagcctgcagagggcccaggagggctggttcagcctgagcggcagcgagctgcgggctgtgtttcctgagggcccctgtgaggagcccctgcagctgaggaagctgcaggagctgagcatccagggcgacagcgagaaccaggtgctggtgctggtggagaggaggaggaccctgtacatccagggcgagcggcggctggacttcatgggctggctgggcgccatccagaaggctgctgcctccatgggagacaccctgtctgagcagcagctgggggacagcgacatccctgtgattgtgtaccgctgtgtggactacatcacccagtgtggcctgaccagcgagggcatctacagaaaatgtggccagaccagcaagacccagaggctgctggagagcctgcggcaggatgcccggtctgtgcacctgaaggagggggagcagcacgtggatgatgtgtcctctgccctgaagcgcttcctgcgggacctgcctgatggcctcttcacccgggcccagaggctgacctggctggaggccagcgagattgaagatgaggaggagaaggtgagccgctaccgggagctgctggtgcggctgccccctgtgaacagagccaccgtgaaggccctgatcagccacctgtactgtgtgcagtgcttcagtgacaccaaccagatgaatgtgcacaacctggccatcgtgtttggccccaccctcttccagacagatggccaggactacaaggccggccgggtggtggaggacctgatcaaccactacgtggtggtgttttctgtggatgaggaggagctgaggaagcagcgggaggagatcacagccatcgtgaagatgagggtggccggcacagccagcggcacccagcacgccggggacttcatctgcaccgtgtacctggaggagaagaaggccgagacagagcagcacatcaaggtgcctgcctccatgacagctgaggagctgaccctggagatcctggacagaagaaatgtgggcatccgggagaaggactactggacctgctttgaggtgaatgaaagagaggaggccgagcggcccctgcactttgctgagaaggtgctgcccatcctgcacggcctgggcacagacagccacctggtggtgaagaagcaccaggccatggaggccatgctgctgtacctggccagccgggtgggggacaccaagcacggcatgatgaagttcagagaagatagaagcctgctgggcctgggcctgcccagcggcggcttccatgaccgctacttcatcctgaacagcagctgcctgcggctgtacaaggaggtgcgcagccagaggccctggagcggggcccctgagaccagccacaggcctgagaaggagtggcccatcaagagcctgaaggtgtacctgggcgtgaagaagaagctgcggccccccacctgctggggcttcaccgtggtgcatgaaacagagaagcatgagaagcagcagtggtacctgtgctgtgacacccagatggagctgcgggagtggtttgccaccttcctgtttgtgcagcatgatggcctggtgtggcccagcgagcccagccgggtgtccagagctgtgcctgaggtgcggctgggctctgtgtccctcatccccctgcggggctctgaaaatgagatgagaagatctgtggccgccttcaccgctgaccccctgagcctgctgagaaatgtgtag

SEQ ID NO: 32626 - DNA, 4320 bp, Artificial Sequence
  derived and/or modified sequence
atggccgaggccggcgacgccgccctgagcgtggccgagtggctgcgagcccttcacctagaacagtacaccggattgtttgagcagcacggactggtctgggccactgagtgccaaggtctgagcgacacacgcctgatggatatgggaatgctcctcccagggcatagaagacgtatcttggcgggactgctgagggcccacacctctcccgccccagcccccaggcctacccccaggcccgttcctatgaagcgacatatttttcggtcccctcctgtgcctgcgaccccccccgagccattgcccactaccactgaggacgagggcttgcccgccgctcctcccattccaccaaggagaagttgtctgccgcccacctgctttaccacaccgtctaccgccgctcccgaccctgtgctgccccccctaccagccaagaggcatctcgccgagctgtcagtcccacctgtgccacctaggactggtcccccccggctgctggtttccctgcccaccaaagaagaggagagcctgctccccagcttgtcttccccacctcagcctcagtcagaggagccactgagcactttgccacagggcccaccacagccccccagccctcccccctgcccacccgaaataccacctaaacccgtgcggctatttcccgagtttgacgatagtgactacgatgaagtgcccgaagaggggccaggggcgccggcccgggtaatgaccaagaaggaagagccgcctccctcccgtgtccctcgggctgtgcgggtggcatctctgttatccgagggggaggaactgagtggcgatgatcagggagatgaggaggaggacgaccatgcgtacgaaggagttcctaatggcggatggcacacaagctctctttcgttgtctttgccatccacgatagccgcccctcaccctatggatggtccacctgggggctcaacacccgtcacgccagtaattaaagcggggtggttagacaaaaacccccctcaggggtcttatatttatcagaaacggtgggttcgattagatactgatcacttgcgttatttcgactcaaacaaggatgcgtattcaaagcgattcatttcagtcgcctgcataagccacgtggctgcaatcggggaccagaaattcgaagtaatcaccaataaccgaactttcgcctttagggctgaatcggacgtggaacgtaaagaatggatgcaagccctgcaacaggctatggccgagcagcgagctcgggctaggctcagctccgcttatctgctcggagtccccgggagtgaacagccagacagagccggcagtctggagctgcggggtttcaaaaacaagctttacgtggcagtggtaggggacaaagtgcagctgtataagaacctcgaggagtaccatctgggcataggcattacctttattgacatgtctgtgggtaatgtcaaagaagttgaccggcgcagtttcgacttaaccaccccatacaggatattttccttctcagccgacagcgagctggaaaaagagcagtggctcgaggctatgcaaggcgcaatcgctgaagccttgagcacaagcgaagtcgctgaaagaatatgggctgcagctcctaataggttctgcgccgattgtggtgctcctcagccggattgggcgagtattaatctttgtgtagtgatttgcaagcgctgtgcaggtgaacatcggggactgggagcgggagtgtcaaaagtccgaagcctgaagatggatagaaaggtgtggacagagacacttatcgaattatttctgcagctcggaaatggagccggtaatcgcttctgggctgccaacgtaccaccctcggaagccctgcagccgtcaagcagtccctctaccagacgctgccacttggaagccaagtatagagaagggaaatacagacgctaccaccccttattcgggaatcaggaggagctcgataaggccctgtgcgccgcagtcaccactacagatttggccgaaacccaggcactactcggttgcggagccggtatcaactgtttctccggggaccctgaggcacccactccactagccctggcagagcaggccggacaaacactgcagatggagtttctgagaaacaatcgcactaccgaggtccccagactggactccatgaagcctttggagaaacattactcagtcgtgttgcctaccgtgtcacactctggtttcctctacaaaactgcctcagccgggaagctgcttcaggaccgccgcgcaagggaggaattcagccgtcgctggtgcgtgctgggcgacggtgtgcttagttattttgaaaatgagcgtgcggtaactcccaatggtgagatccgggcatcagaaattgtatgtcttgccgtccctccccctgacacacacggattcgagcacacgttcgaggtctatactgagggggagcgattgtacctgtttggcctggagagcgcagaacaggcccatgaatgggttaaatgcatagccaaggctttcgtgcctccccttgctgaggacctcttagcgcgagacttcgaaaggctggggaggctcccatacaaggcgggtctctctctgcagcgggctcaggaaggatggttctccctttctggaagtgaactcagggccgtcttccccgagggcccatgtgaggagccattgcagctcagaaagctgcaagagctgtccatacagggtgactcagaaaaccaggtgttggtgctcgtggagcggaggaggactctgtacatacagggggagagaaggctggattttatggggtggctaggcgcgatacaaaaagcggcagcctctatgggagacacacttagtgaacaacagctcggagatagcgacatacctgtcattgtgtaccggtgcgtcgactacatcacccagtgcggtcttacttcggaggggatctataggaagtgcggacagaccagtaagacacagagactcctcgagagtctccgacaggacgcacgcagcgtgcatctcaaggaaggcgaacaacacgtagacgacgtttcctccgccctgaagagattccttcgcgatctacccgacggtctgtttactagagcgcaacggttgacctggctagaggcctcagagatagaagatgaagaggagaaagtcagcaggtacagagaactgctggtacgcttgccccccgtgaatagggccacagtaaaggccttaataagccatctgtattgcgtgcagtgtttttcagacactaaccagatgaatgtgcacaacctagccatcgtcttcgggccaacccttttccagacagacggccaggactataaggctggccgtgtcgtggaggaccttatcaaccactatgtggtggtgtttagtgtggatgaagaggagttgcgaaaacagagagaagagatcaccgccattgtaaagatgagggtcgccggcacagccagtgggacccaacatgccggcgattttatttgcacagtttatcttgaggagaaaaaggcagagacagaacagcatatcaaagtcccggctagcatgacagcagaggagttgactctggagatactggatcgccggaacgtgggcattagagagaaagactactggacttgcttcgaggtcaatgagcgggaggaggctgagcgcccactgcatttcgctgagaaggtgcttcccatcctgcatgggctagggaccgactcccacctggttgtgaagaaacaccaggctatggaggcaatgcttctgtacttagcctcaagagtcggggacaccaagcacggtatgatgaaattccgtgaagatcggtctctgcttggccttggactcccctccgggggcttccacgatcggtatttcatcttaaacagctcatgtctcaggttgtataaggaggttaggtcccatcgcccagaaaaggaatggcccatcaagtctcttaaggtctacctcggagtgaagaaaaaactgcgcccccctacatgctggggatttaccgtggttcacgagaccgaaaagcacgaaaagcagcagtggtatctctgttgtgacactcagatggagctgcgggaatggttcgccacctttttgttcgttcagcatgatggactcgtttggccctctgagccctccagagtgagccgcgcagtgccagaagtccggttgggatcagtgagcctgatcccacttcgcggcagcgagaacgagatgcgacgaagcgtagctgccttcaccgccgatcccttaagtttactgcgcaatgtgtag

SEQ ID NO: 32627 - DNA, 4353 bp, Artificial Sequence
  derived and/or modified sequence
atggccgaggccggcgacgccgccctgagcgtggccgagtggctgcgagcactacatctggagcagtatacagggctgtttgagcaacatggtctagtgtgggccacagaatgccaggggttaagtgatactcgtttgatggacatggggatgctgttgccagggcacaggaggagaattctggcaggactcctccgagctcatacaagtcccgcccctgcccccaggcctacgccccggcctgttcccatgaagcggcatatctttaggtcgcctcctgtacccgcaaccccccctgagccactgcccaccactacggaggacgagggtctgccagcggctcctcccattccaccaagacgttcttgtctcccccccacatgtttcacaactcctagcacagccgccccagatcctgtgttacccccgctgccggctaagcggcacctcgcagaactgtcagtccctccggtgcctcctcgaacaggtccaccccgcctgttggtgtcccttccaactaaggaggaggaatctcttctgccaagcctttctagcccgccccagcctcagtctgaagaaccactaagcaccctgccccagggccccccacagccgccttccccacccccttgccctcctgagatccctcccaaaccagtcaggctttttcctgagtttgatgatagtgactacgacgaagtcccagaagaaggccccggcgcgcccgcacgcgttatgaccaaaaaggaggagcctccccctagccgggtgcccagagctgtccgggtggccagtttgctgagcgagggagaagagctgtccggagacgatcagggcgacgaagaggaggatgaccacgcctatgagggggtccctaatggagggtggcacacctcgtcactcagcctatcattaccatccaccatcgccgccccccaccctatggacggcccgcctggaggctccaccccggttactcctgttattaaggcgggctggcttgataaaaatcctccccaggggtcatacatttaccagaagaggtgggtccggctggataccgatcaccttaggtattttgacagtaacaaggacgcttatagcaaacgctttattagtgtggcgtgcatcagtcacgtggctgctatcggagaccagaaattcgaagttataaccaacaatcggaccttcgcttttagggcggagagcgacgttgagcgaaaagagtggatgcaggccttgcagcaagctatggcagaacaacgagcccgtgcccgccttagcagcgcctatttgctgggggtgccgggctccgaacaaccggatcgggccgggtccctcgagctgagaggttttaagaacaagctgtacgtggcagtcgtcggagacaaggtgcagttgtacaagaatcttgaggagtaccacctgggcatagggatcacattcatagacatgtctgtcggcaacgtcaaggaggttgatcggagatcatttgacctgaccacaccatataggatattctcattcagcgccgactctgaattagaaaaggagcagtggctggaagcaatgcaaggcgctatcgctgaggccctgtctacctcagaggtggcagagaggatatgggccgcagcccctaacaggttttgcgccgattgcggcgccccgcagccggactgggccagtataaatctttgcgtcgtgatctgcaaacgctgtgccggcgagcaccggggccttggggctggagtgagtaaagttcggtctctaaagatggaccggaaagtgtggacagaaacccttatcgaactatttcttcagcttggcaatggggccgggaataggttttgggccgccaacgtgcctcctagcgaggccttgcagcctagtagcagtccatcaaccagacgatgtcatctggaggctaagtacagagaagggaagtacagaaggtatcatccacttttcggaaatcaagaggaacttgacaaggcgctttgtgctgccgtgactaccacagacctcgctgagacgcaggccctgcttggctgcggagccggaattaactgttttagcggtgaccctgaggccccaacaccactagctctcgccgagcaggctgggcaaacccttcagatggaattcctgaggaataatcgtaccacagaagtgccgcggctcgattcaatgaaaccacttgaaaagcactacagcgtggtactgccaaccgtatcccatagcggattcttgtacaagactgcttcagcggggaaactgcttcaggaccgacgggcccgcgaagaattttcaaggcgttggtgcgtgctcggcgatggcgtgttatcttactttgagaatgaacgtgcggtgacacctaacggcgagatcagagcttccgagatagtgtgccttgccgtcccccctccagatactcatggatttgaacatacgtttgaggtctacaccgaaggcgaacggctctacctgtttggacttgagagcgctgagcaggcccacgagtgggtaaagtgtatagctaaagcgtttgtgcccccactggctgaagatttgcttgcgcgggatttcgaacgcctggggcgcctcccttataaggccgggctgagcctccagcgggctcaggaaggatggttctctttgagtggaagtgagctgagggcggtcttcccagagggcccgtgcgaagagcctctccagttacgtaagctccaggaactgtccattcagggagacagtgagaaccaggtgcttgtccttgttgagcgccgacggacattatacatacaaggcgaacggagactggatttcatgggttggctcggcgctatacagaaggcagcggcctccatgggagatacactgtcggaacaacagctgggggatagcgacattcccgtgatagtctacagatgtgtagactacattacacagtgcggcctgaccagtgaagggatatatcggaagtgcggacagacttccaaaactcagcgcttgctggaatctctgcggcaggatgccagatctgtgcacctgaaagagggcgaacaacacgtggatgatgtgagctctgccctaaagagatttttaagggacctgccagatggcctgttcaccagagcccagcgcctgacctggctggaggccagtgaaatcgaagatgaggaagaaaaggtgtccagatatagggagttactcgttaggttaccacctgtgaaccgagccactgttaaagccctcatcagccacctgtactgcgtccaatgctttagtgacacaaaccagatgaatgttcacaacttggccatagtgttcggccccactctcttccaaaccgatggccaagattataaggctggacgagtggtggaagacctgatcaaccactatgtagtcgtgttctcagtggacgaagaggagctccgcaagcaacgagaggaaattacagcgatcgtgaagatgagggttgccgggacagcctccggaacccagcatgcaggagacttcatttgtaccgtgtacctggaggagaagaaagctgaaacggaacagcacatcaaggtgcctgccagcatgacggctgaagaactgacacttgaaatcctggatcggcggaatgtcggtattagggaaaaggattactggacctgttttgaggtgaacgaaagagaggaggctgagaggccacttcattttgccgagaaagtgctgcccatcctccacggcttgggcactgactctcaccttgtcgtgaaaaagcatcaagctatggaagccatgctgctctacctagcatcaagagtgggagacactaaacacggaatgatgaaattccgcgaggaccgctctctgctaggcctgggactaccgtctgggggatttcatgataggtactttatacttaacagctcctgcctgagactctataaggaggtgcgcagtcaacggccctggagcggcgctccagagaccagtcacagaccagaaaaagagtggccaataaaatcgctgaaggtatacttgggcgtgaaaaaaaaattgcggccccccacctgttggggattcactgtggtgcatgagactgaaaagcacgaaaagcagcaatggtacctgtgctgcgatacgcaaatggagctgagagagtggtttgccaccttcctcttcgtgcagcacgacgggctagtgtggcccagcgaaccctcccgtgtcagcagggccgtgcccgaggtacgattagggtctgttagtttaatcccccttagaggaagtgagaatgagatgagacggagcgtcgccgcctttacggctgacccactctccctgttgagaaacgtgtag

SEQ ID NO: 32628 - DNA, 4320 bp, Artificial Sequence
  derived and/or modified sequence
atggccgaggccggcgacgccgccctgagcgtggccgagtggctgcgggccctgcacctagaacagtacacaggactgtttgaacaacacggtctggtctgggctaccgagtgccagggactgagcgatacacgcctgatggacatgggtatgctgttacccggccacaggagacgcatactggctggcctcctccgagcccatacctccccagctcctgctccacggccgactcctaggcctgtgcctatgaagcgacacatattccgctctccccctgtcccagccacaccgccggagcccctgccaactactacagaagatgaggggctccctgctgcccctccaatcccaccccgtcgttcctgtctaccacccacgtgcttcaccaccccaagcacagcggccccagatccggtgttacccccactgcctgctaagcgccatctggccgagctatctgtgccaccggttcctccacgtactggcccacctcgcctcctggtctccttacccactaaagaggaagaatctctcttaccatctctgagctcacctccccagcctcaatctgaagaaccactgtctactctgccccaggggcctccccaacctccaagtccccccccatgccctccggagatacccccaaagcccgtcaggcttttcccagagtttgatgattctgactatgacgaagtccctgaggagggccctggcgcacctgcgcgcgtgatgactaagaaggaggagcctccaccgagtagggtaccccgcgccgtgcgggtggcctctctcctcagcgagggagaggaacttagcggggacgatcagggagacgaagaggaggatgaccacgcttatgagggagttccgaacgggggatggcataccagttcccttagcttatcactgcctagcacaatcgccgccccacaccctatggatggaccacccggcgggtctacacctgtgacccctgtgattaaggcaggatggctggataagaaccccccacagggtagctatatctatcagaaacgttgggtcagactcgacactgaccatctgcgctatttcgactccaacaaagacgcatactccaagcgatttattagcgtcgcctgtatttcgcacgttgccgcaattggcgaccaaaaatttgaagttataaccaataaccgcacatttgcattcagagcagaatcagacgttgaacgaaaagagtggatgcaagccctccaacaggcaatggccgagcagcgtgccagggccagactctctagcgcttatctcctcggggtcccagggtccgaacaaccagaccgtgcgggatcactggagctgcgaggcttcaaaaataaactctacgtcgccgtcgtcggtgataaagtacaactctataaaaacctggaggaatatcacctgggaattggtatcaccttcatcgacatgtccgtggggaatgtgaaggaagtcgatcggcggtcttttgatctgacaaccccttacagaatctttagcttctcagccgattctgaattagagaaggaacagtggcttgaggcaatgcaaggtgccatcgctgaggccctcagcacctcggaggtggccgagcggatctgggccgctgcaccgaacaggttctgtgctgattgcggggccccacaacccgattgggcatctattaacctgtgtgtagttatctgtaagaggtgcgctggcgagcatagagggttgggagccggggtcagcaaagtccggtcactcaaaatggaccgaaaggtgtggactgaaaccctcatcgagctgtttctacaactcggcaacggagcaggcaatagattttgggctgcgaacgtgcccccgtccgaggcgctgcagccttcctcatctccaagtactcgccgatgtcatttagaagcaaaataccgggagggtaagtatagaagataccacccactatttggaaatcaagaggaactcgataaagccctttgtgccgccgtcacgaccactgaccttgctgaaacacaagctttgttgggttgtggagccgggatcaactgcttctccggcgacccagaggcccccacgcccctcgcgctggccgagcaagccgggcaaaccttgcaaatggagtttctaaggaataaccggacaaccgaggtacctagactggacagcatgaaacctttagagaagcattattcagtggtcctacccaccgtctcacatagcggatttctttataagacagctagcgcaggtaagctcctgcaagataggcgcgctagagaagaatttagtcgaagatggtgcgtgttaggggatggcgttctatcctacttcgaaaacgaaagggcagtgacgcctaacggcgagatcagagcctcagaaatcgtgtgcctggccgtgccacctccggatacgcacggatttgagcatacctttgaggtgtatactgaaggcgaacgactatacttattcggtctggaatccgccgagcaggcccatgagtgggttaagtgcattgcaaaagcgttcgtcccaccccttgctgaggatctcctggcacgcgattttgaacgactgggccgtttgccttataaggcaggcctgtcactccagcgcgcacaggaaggatggttttctctctctgggtccgagctccgtgcagtgtttccggaggggccttgcgaggaaccactgcagctgcgcaaactccaggagctgtcaattcaaggcgacagtgaaaaccaagttttggttctggtggaaaggcgccgcacactttacatccagggagagcgccgccttgactttatgggatggctgggagctatacagaaggcagcagcttcgatgggggacaccctttccgagcagcagttaggcgactccgatatcccggtaatcgtgtacagatgtgtggactacattacccagtgcggcctcactagcgaagggatctatcgtaagtgcggtcaaacatcaaagactcagaggctgctcgaatccctgaggcaggacgcacggtctgtgcacctcaaagagggtgaacaacacgtcgatgacgttagctccgcactcaaacgattcctccgggacttgcctgacggtctttttacgcgtgcccagagactgacttggctggaggcctcagaaattgaggacgaagaggaaaaggtgagtcgttacagagagctgctcgtgcgcctgcctccggtaaatagagccaccgttaaagcccttatttcacatttgtactgtgtgcaatgtttctccgataccaatcagatgaacgttcacaatctagctatcgttttcggacctacactctttcaaaccgacgggcaggattacaaggcaggacgtgtggtcgaggacctcatcaaccactatgtggtcgtgttctccgtggacgaagaggagttaagaaagcaaagagaagagatcaccgcgatagttaagatgagggtcgctgggacggctagcgggacccagcacgccggcgatttcatttgcactgtctatctcgaagaaaagaaagctgagacggagcaacacattaaggtgcccgcgtccatgacagcagaagagctgactctggagatcctcgaccgccgtaacgtgggcattcgggaaaaggattattggacctgctttgaggtgaatgagcgggaggaggccgagcggcccctgcactttgcagagaaggttctgcctatcctccacggacttgggactgactcacacctggtcgtcaaaaaacatcaggccatggaggctatgcttctctatttggcatcacgtgtaggcgacactaagcatggaatgatgaagttcagggaggatagatccttactcgggctcggcctgccaagcggtggcttccacgacaggtactttatccttaactcctcatgcctcaggttatataaggaagtaaggagtcatcggccggagaaagaatggccgatcaaatcactgaaagtttatcttggcgtcaagaaaaagctgagacctcctacatgttggggattcaccgtggtgcatgaaacggagaagcacgagaaacagcagtggtacctgtgttgtgacacacaaatggagcttcgggaatggtttgcaaccttcctgtttgtccaacacgatggccttgtctggccctccgagccgtccagagtgtcgcgggccgtgcctgaggtgcgcctaggttcggtgagcctgatcccactgcgtggaagtgaaaatgagatgcgaaggtcagtcgctgcttttaccgccgatcctctcagcttgcttagaaacgtgtag

SEQ ID NO: 32629 - DNA, 4320 bp, Artificial Sequence
  derived and/or modified sequence
atggcggaagccggagacgctgccctctctgtggctgaatggctgagagccctgcacctggagcagtataccgggctctttgaacagcacgggctcgtatgggcgactgagtgccaggggcttagcgacactcgcctgatggacatgggtatgctgttacccggacacagaaggaggattctggctgggctgctaagggcacatacctcccccgcacccgcaccgaggccgaccccacgacccgtgcctatgaaacggcacatattccgcagtcctcccgtgcccgctacgcctcctgagcctctgcctaccaccactgaggacgaaggactccctgcagctcctcccatcccgccacgccgttcatgcctcccccctacatgtttcactacccctagtacagcggcacccgacccagtgttgccacccctgcccgctaaacgtcacttggctgagttatccgtgccccctgtcccccctcgcaccgggcctccgcgacttctggtctcacttccaaccaaggaagaggagtcccttcttccatcactaagtagtccgccacagcctcagtctgaagagccactgagtactcttccccaaggcccacctcagccaccatcaccacctccctgcccacccgagatacccccaaaacccgtgcgactttttccagagtttgatgattcagactacgacgaagttcctgaggaaggcccaggagccccagccagggtgatgacaaagaaggaggagcctcctccctcccgcgtgcctagggctgtgcgtgtagcttcgctactatctgaaggggaggaacttagcggagacgaccagggcgatgaggaggaggacgatcacgcatatgaaggcgtccctaatggtggctggcatacctcaagtttgtccctgtcactacccagtaccatagctgccccacacccaatggacggcccacctggcggttctactcccgtcactcccgtgatcaaggcgggttggcttgataaaaatcccccacaggggagctatatctatcagaagaggtgggtcagacttgacactgatcacctgagatatttcgactcaaataaggacgcttacagtaaacgctttatcagcgtggcctgcatcagccacgtcgccgctatcggcgaccaaaagttcgaagtcataacaaataatcgtacgtttgcctttagagccgagagcgacgtggagcgcaaggagtggatgcaagccctccagcaggctatggcggagcagcgggctagagccagactgtcgtcggcctatttgttaggcgtacctgggtcggagcagcccgacagagcaggtagtctagaactgagaggtttcaaaaataagttgtatgtggcagtggtgggcgataaggttcagttgtataaaaacctggaagaataccacctcggcataggcattacctttatcgacatgagcgttggaaacgtgaaggaggtggaccgcaggtcctttgatctgacgactccgtaccgaatattttcattttctgcagatagtgagctagaaaaagagcaatggcttgaagcgatgcagggcgctatcgcagaagctctgagcacgtctgaggttgccgaaagaatatgggcagctgcccctaacagattctgcgccgattgtggtgcgcctcagcctgactgggccagcatcaacctgtgtgtcgtcatttgcaagaggtgtgcaggggagcatcgtggattgggggctggtgtctctaaggtgcgcagtttaaagatggaccgcaaggtatggacagaaacattgattgagctctttttacagcttggcaatggtgctggcaacagattttgggccgcaaacgtgccaccttccgaggccctccaaccgtcatcctcaccaagcactcgccgatgccacctggaagcaaaataccgtgagggaaaataccgcagataccatcccctgtttggtaaccaggaggaacttgataaggccctatgcgcagctgtgacaactacagacctcgcagaaactcaggccctgctaggctgtggagccggtattaactgcttttccggggacccagaagcacccactcccctggccttggctgagcaggccggacagactttacagatggagtttctgcgcaacaaccgcactacggaagtcccacgcctggactcaatgaagccacttgagaaacattattcagtagtactgcctaccgtatcacacagtgggtttctgtacaagactgcgtccgcaggtaaactgctccaggacaggagggccagggaggagttttccaggagatggtgtgtgctgggagacggggtgctgagctacttcgagaatgaaagagccgttacacccaacggagagatccgtgcaagtgaaattgtgtgcttagctgtgccccctcctgacactcatgggtttgagcacaccttcgaggtctacactgaaggtgaaaggctctacctgttcggcctagaaagtgccgagcaggcgcacgaatgggtgaaatgtattgccaaggccttcgtgcccccactcgccgaggacctgctagctcgtgactttgaaaggttaggacggctgccctacaaagccggtctgagcctgcagcgtgctcaggagggatggttttctctgagcggctcagagttgcgcgctgtctttcctgaaggtccatgcgaggagcccctccagttacgaaaactgcaggagttgtccatacagggtgatagcgagaatcaagttctcgttcttgtagagcgtcgacgcactctctacatccaaggagagcgcaggctcgatttcatggggtggctcggagctattcagaaagcagcagccagcatgggcgacacactgagtgagcagcaattaggagattctgacataccagtcatcgtctaccgctgcgttgactatataacgcagtgtggcctgacctctgaaggcatttacaggaaatgtggccagacatccaagacccagcgcttgttagagagtttgcgccaagatgctcggagtgtccacctgaaagagggagaacagcatgttgatgacgtctcttcagccctgaagagatttctgcgcgacctgccagacggactgttcactagagctcagagactgacatggctggaggcttcagagattgaagacgaagaagagaaagtgtcgagataccgtgagctgcttgtgcgactgccacccgtcaaccgcgcaactgttaaggcactgatctctcacctctattgtgtccagtgtttttccgataccaaccagatgaacgtacacaatctagctatagtgttcggtccaaccctcttccagacagatggtcaagattataaggcaggcagagtggttgaagaccttataaaccattacgttgtcgtgtttagtgtagatgaggaggaactgcgcaagcaaagggaggaaataacggccatagtgaaaatgcgggttgctggaaccgccagcggcacacagcatgctggagattttatctgcactgtgtatttggaggaaaaaaaggcagagacagagcagcacataaaggtgccagctagcatgaccgcggaggagctaacactggaaattttggataggagaaatgttggcatcagagaaaaagactattggacatgtttcgaagttaacgagagagaagaggcggagcggccattacatttcgccgagaaagtgctgccaatattgcatggactcggcactgacagccacctggtggtcaaaaagcatcaggcaatggaggcaatgctactctacctcgcctcccgggtcggggacactaaacacggaatgatgaagtttcgcgaggatcgctcccttctcggccttggcctgccgtcaggaggctttcacgatagatacttcattctcaactcctcatgcctccgtctctataaagaggtccgctctcacagaccagaaaaagagtggcccattaagtcgctgaaggtgtaccttggagtaaagaaaaagttgcgcccaccaacctgctggggtttcaccgtggttcacgagacagaaaagcacgaaaaacagcaatggtacctgtgttgcgatacgcagatggagctgcgcgaatggtttgctaccttcctttttgtgcaacacgacgggctggtatggccgtccgaaccatctcgtgtgtcgcgcgcagtgcccgaggtgcgcctgggctcggtgagtctcatacccctccgaggcagcgaaaacgaaatgaggcggtctgtggccgcattcacagccgaccccctcagcctgctgaggaacgtgtag

SEQ ID NO: 32630 - DNA, 4353 bp, Artificial Sequence
  derived and/or modified sequence
atggctgaggccggagacgccgctttaagtgtcgcagagtggttgcgcgctctccacctggaacagtataccggactgtttgaacagcacggacttgtctgggccacggaatgtcagggcctgagcgatactcgccttatggacatgggtatgctattgcctggccatcggcgtaggattcttgccggacttctgcgagctcatacctccccagctccagcaccaagacctacgcccagacccgtgccaatgaagcgtcatatattcaggtctccgccagtacccgctactccgcctgaacctctccctacaaccacagaggatgagggcctcccagccgcaccgcctatccctccccgaaggtcctgtttgccaccgacctgcttcactacccctagcactgctgcccctgaccccgtgcttcccccactgcctgccaaacggcacttagcagagctatcagtgcctcccgtaccacccaggaccggcccaccaaggctgctggtctccctcccaactaaggaagaggagtcgctgttgccttcactgtcaagcccgcctcagccccagtcagaggaaccgctgtccacccttccgcaggggcctcctcagccaccaagccctccaccatgccccccagagattcccccaaagcccgtgagactgtttccagagttcgacgattccgattacgacgaggttccggaagagggtcctggggctccggcacgtgttatgactaaaaaggaggaacctcctccatcccgggtgccgagggccgtaagggtggcctctttgctctcagagggagaagagctgtcaggcgacgaccagggtgatgaagaggaagatgaccatgcatacgagggagttccaaatggcggatggcatacctcatcgctgtccctcagccttccctctaccattgcggcaccacaccccatggacggaccaccgggtgggtccactcctgtgacgccggtgatcaaggccggatggttagataagaatcctccacaggggagctacatctaccagaagcgctgggtcagattggataccgatcacctgcggtattttgattcaaataaagatgcctactctaagcggttcatttccgtggcatgtatctctcacgtcgctgcaatcggtgatcagaaatttgaggtgatcactaacaaccgcacattcgcctttcgtgccgagtccgatgtggagcgaaaagagtggatgcaggccctccagcaggccatggcagagcagagagctcgtgccagactgtcctcggcctacctgctgggtgtgcccggttcagagcaacccgatcgggctggtagtctggagttacggggatttaagaacaagctctacgtagccgtggtgggggacaaagtccaactgtacaagaaccttgaagagtatcacctcggaattggtatcactttcattgacatgtccgttggcaacgtgaaggaagtcgatagacggtcattcgacctaacgacaccctataggatcttcagtttcagtgccgactccgagctagaaaaagagcagtggttggaggcgatgcaaggagcaatcgctgaggcactatctacatctgaggttgccgaacgaatatgggcagccgctcctaaccgtttctgtgccgactgtggagccccacagccggactgggctagcattaacctgtgtgtcgtcatctgtaagcgctgtgcgggagagcataggggactgggtgctggagtaagcaaggtccgaagcctgaaaatggacaggaaggtgtggaccgagacactgattgagttgtttctgcagctggggaatggtgccggtaacaggttctgggcagcgaatgttccaccatcagaggctttgcaaccaagttctagcccctctacgcgcaggtgtcatctggaggctaagtacagggaggggaagtatcgaaggtatcaccccctgtttgggaatcaggaagagcttgacaaggctttgtgtgcagcggttactacgaccgatctggcggaaactcaggccttgctgggatgtggggctggcattaattgtttttctggagatccagaggcaccaaccccgttagcactcgcggagcaggcagggcagacgcttcagatggagttcctcaggaacaaccgcacgaccgaggtgcctaggcttgactcaatgaagcctctggagaagcattattctgtagttttgccaaccgtttcccatagcggcttcctctacaagacggcgtcggccggtaaattgctccaggacaggagggcaagggaggagttttctagacgatggtgcgtgctcggagacggggtcctgagttacttcgagaatgagagagccgtcacacccaacggtgaaataagagcctcagagatcgtgtgtttagctgtgcctccacccgacacacacgggtttgagcacacattcgaagtatacaccgaaggggaacgactgtatttatttggtctggaaagcgccgagcaggcccacgagtgggtcaaatgcattgccaaggcttttgtgccacccttagccgaggacctgctcgcaagagactttgagaggctgggcagactgccctataaagcaggcctgtctcttcagcgtgcacaggagggttggttctccttgagcggttcggagttacgtgcagtttttccagaaggcccttgcgaagagcctctgcagttgcgtaaactccaggagctgtctattcagggtgattcagagaatcaagtgctagtcttagtcgagagacggcgaacactgtacatccagggcgagcgacggctggactttatgggctggctgggagcaattcagaaggccgcagcctccatgggcgataccctctccgagcaacagctgggcgattccgatataccagtgatcgtgtatcgctgcgtggactacataacacagtgtggcttaacctccgagggaatctacaggaaatgcggccagacaagtaagacacagcgattgttggagtctctgcggcaggacgcaagaagcgtgcatttgaaagagggcgagcagcatgtggacgacgtgtcttctgctctaaaaagattcctccgggacctccctgacgggctgtttaccagagcccagcgcctgacctggctggaagcgtctgaaatcgaggacgaagaggaaaaggtgagccggtatagggagctgctggtgcggctgccccctgtgaatcgggctaccgtgaaggctctgattagccatctctattgtgtgcagtgcttctccgatacgaatcagatgaatgtgcacaacttggctatcgtgtttggccctacactgtttcaaaccgacggacaggactacaaggcgggtagagtggtggaggacctgatcaaccactatgtagtcgtgttttcagtggacgaagaagaactgcgaaagcagcgcgaggaaatcacggccatcgtaaaaatgcgggtggcaggaacggccagcggcactcagcacgccggtgacttcatatgcaccgtctatttggaggagaaaaaggcggagaccgaacagcatattaaggtgccagccagcatgacagccgaggagctcactcttgagattttagatagacgaaatgtcggtatcagagaaaaagactattggacctgttttgaggtgaatgagcgcgaggaggccgaacgacccctgcacttcgccgagaaagtcttgccgattttgcacggattgggaactgattctcacctggtggttaaaaaacatcaggcaatggaagctatgctgctctacttggcatctcgtgtgggcgatacaaagcacgggatgatgaaattcagagaggataggtcgctgctggggctgggcctgccttcaggcggattccatgacaggtactttatcctgaactcttcctgcctccggctgtacaaagaagtgaggagtcagcggccatggtcaggcgctccagagacatcccaccgacctgaaaaagaatggcccataaagagtctaaaggtgtacctgggtgtaaaaaagaagctccgccctcccacatgttgggggttcactgtcgtccatgaaacagaaaaacatgaaaaacagcagtggtacctttgttgtgatacacaaatggagttgagggaatggttcgccacattcctctttgtacagcacgacgggctcgtctggccatcggaacccagccgtgtgagtcgggcagtgcctgaggttcgcctgggatctgtgtctttaattccccttcggggatccgagaatgagatgagacggtcagtcgccgcattcacggctgaccccctgtccctactgcgaaatgtgtag

SEQ ID NO: 32631 - DNA, 4320 bp, Artificial Sequence
  derived and/or modified sequence
atggcagaggccggtgacgcggcattgtcagtggccgagtggcttagagccctgcacttagagcaatataccggactatttgaacagcatggcctcgtgtgggccactgagtgtcaagggctcagcgataccagactgatggacatggggatgctgctcccaggtcacaggcggcgtatactagccggtctcctgcgagcccatacgtctccggctcccgcaccacgcccaacccctaggcccgtcccaatgaagcgccacattttccgatctccgcctgtgcccgctacaccgccagaaccactgccaaccaccacagaggacgagggattgccagcggcaccaccaattccccctaggcgcagttgcttgcctcctacatgtttcaccactccgtccacggcggcacccgatcctgtgcttcccccactacctgctaagcgccacctggccgagctaagcgtgcctccagtcccgcctcggacaggtcctccaaggttgctcgtgtccctgcctacaaaggaggaagagagtctactgccaagcctgagttcgccgccacagcctcagtccgaagagcctctgagtacgctaccacagggcccaccccaaccgccttccccccctccatgcccgccagaaatcccacccaagcccgtcaggctcttcccggagtttgatgattcagattatgatgaagtgcctgaggaaggcccaggcgcacctgcaagggtcatgactaagaaggaggaacctcctccctctagagttccacgggcagtgcgcgtggcatctttattaagtgagggcgaggaactctcaggggatgaccagggggacgaggaagaggacgatcacgcctacgagggagttcctaacggcggttggcacacttccagcctcagtctctcactgccatcgaccattgccgctccgcaccctatggacggcccaccagggggatccactccagttaccccagtgataaaggcgggatggctggataagaacccacctcaagggtcctacatctaccagaagaggtgggtgcgccttgataccgatcatcttagatatttcgacagtaacaaagacgcctattctaagcgcttcatatcagtggcctgcatcagccacgtggcggctatcggggaccagaaattcgaggtgatcactaacaatagaaccttcgctttccgcgctgagtcggatgtcgagagaaaagagtggatgcaggccctgcagcaggccatggcagagcagcgggcacgagctcggttatcctctgcatatttactgggggtgcctggaagtgagcagcctgatcgtgccggtagcctggaattgagaggattcaagaataaactctacgtagctgtggttggagataaggtgcaactctataaaaatctggaagagtaccatttgggcatcggcatcacttttatcgatatgtcagtgggcaacgtgaaagaggtggatcgacgttcatttgacctcacaaccccctatcgaatcttctcttttagtgctgactcagagctcgagaaagagcagtggctcgaagccatgcagggcgcaatcgctgaagcactgtcgacttccgaggtggctgaacggatttgggccgcagccccaaacagattttgtgctgattgcggggcaccacagcccgattgggcgagtattaacctgtgtgtggttatatgtaagcggtgtgcaggagagcatcgcggattgggtgctggtgtctcaaaagtcagatctttaaaaatggataggaaggtgtggaccgagactctgatcgagctgtttctgcagctgggcaacggagccggaaaccgcttttgggcggctaacgttccaccttcggaggccctccagccatccagctcacccagtacacggaggtgccatctggaggccaaatacagagagggcaagtaccgacgttaccaccctttattcggcaaccaggaggagttggataaggcgctttgtgccgctgtcacaactacggacctggctgaaacccaggcactgctcggctgtggagccggaattaactgcttcagcggcgaccccgaagccccaacaccactcgctctggcagagcaggctggtcaaacactccaaatggagtttctaagaaacaatcgaacgaccgaggtccccagattagacagcatgaagcccctggagaaacactactccgtcgtccttccgaccgtctctcactctggattcctctacaagacagcttcagcgggaaagctgctccaggataggcgcgctcgagaagaattcagcaggcgctggtgcgtgctaggtgacggcgtgcttagttactttgagaatgagcgcgcagttacaccaaatggcgagatccgagctagcgaaatagtctgcttggccgtgccacccccagatacccatggcttcgaacacacctttgaagtctatactgagggggagcggttatatctgtttgggctggagtccgccgaacaggcccacgagtgggtgaagtgcatcgccaaagccttcgtaccccctttagctgaagacctgctggccagggattttgaaaggctcggtcgcctgccatacaaagccggactgtccctgcagcgcgctcaagaggggtggttcagtctaagtggaagcgagctgcgagctgtattcccagaaggcccatgcgaggaaccactgcaactgagaaagctccaggagctctctatccaaggcgactctgaaaaccaggtgctcgtgttggtcgaaagacgcaggaccctctacatacagggggaaaggaggttggatttcatgggttggttgggcgcaattcaaaaagccgctgcctcaatgggagatacactgagcgaacagcagcttggggactctgacatcccggtcatcgtgtatagatgcgtggattacattacccaatgtggcctgacatctgagggcatatataggaagtgtggacagacatcgaaaacacagaggttacttgaaagtctgcgtcaggatgcccgatcggttcacctgaaggagggtgaacagcatgtggatgatgtcagtagtgctcttaagcgctttttgcgagatctgccagatggcctcttcaccagagcccagaggctgacctggcttgaggctagtgagatagaggacgaggaagaaaaagtgtcacgctacagggagttgctcgtgaggttgcctcctgttaatagagcgacagtaaaggcactgattagccacctgtactgcgtgcaatgtttctcagataccaaccagatgaacgtgcataatctggcgatagtcttcgggccaaccctgtttcaaacggacggccaagattataaggccggtagggttgtggaggaccttatcaatcactatgtagtggtcttcagcgtggacgaagaggagctcagaaaacagagagaggagattacagccatcgtgaagatgcgagtcgccggaactgcatccggaacacagcacgctggcgacttcatttgcaccgtctatctggaagagaaaaaagccgaaactgagcagcatatcaaggtgccagcctcgatgaccgcggaagagcttacattagagattctggatcgcagaaatgtggggatcagagaaaaggactattggacatgttttgaggttaatgagcgggaagaagctgaacgccctctccatttcgctgagaaagtgctgccaattcttcacggcctgggcactgacagtcaccttgtcgtgaaaaagcaccaggccatggaggctatgctgctgtacctggcatcacgagtgggcgatacgaagcacgggatgatgaagttccgagaagatcggtccctgctgggcctgggcctcccctctggagggttccacgacagatacttcattctgaactccagttgtttgcgactgtataaagaggtccgctctcatagaccagagaaagagtggcccattaagtcacttaaggtttacttgggcgtcaagaaaaagctgcgccctcctacgtgttggggcttcacggtggtgcatgaaactgaaaagcacgagaaacagcaatggtacttgtgttgtgacactcagatggaacttcgggagtggttcgccacctttttgttcgtccagcacgacggcctggtgtggccatctgagccatctcgcgtgtcccgcgcagtgcccgaagtgcggctggggtctgtgagtctgataccattacgcggtagtgagaatgaaatgcgcagatcagttgccgcatttaccgccgatcctctctctcttctcaggaatgtgtag

SEQ ID NO: 32632 - DNA, 4942 bp, Artificial Sequence
  derived and/or modified sequence
acttttcgctttctcagtgttttcaggaagtgtgtgtgttggccacggctgcaggaggtgggggagacacaaagcaggaagcctccgggagaccagagctgggtgcagacatacacacacacatacacacagacacacagagtcacacacactcacacacactctctctctctctccctctgtctttctctctctctctctctctctgtcctttcctcctggacagatccacagttatacacagaaacaaacacacacgcacgtagagaagtgattcacaaacacttaaagacataaatcacaggtgcaaagccatacctgggctcaaaaacctccaagagaacgcagcctcagacccacccaggggccaggggccaggctgtttgcgagaccagcccaggcgggacccaggcttgcacgggcaggtacacgacattcttgggcatacgcagcccgcctggccggagctgtgggagtcctcagccccaagacccagcaggcgtctgaggcctgcccactaaggaggaggagtcattgctgccatcattatcatcccctccccagccacagtctgaggagcccctgtccaccctcccccaggggcctccccagcctccctctccacctccctgccccccggagatacctccaaagccggtacgcctgttcccagagttcgatgactctgactacgatgaggtcccagaggaggggccgggggccccagccagagtgatgaccaagaaggaggagcccccaccgagccgagtcccacgggccgtgcgcgtggccagtctgctgagcgagggagaggaactgtctggggacgaccaaggggatgaggaagaggatgaccacgcctatgagggcgtccccaatggcggatggcataccagcagcctgagcttgtccttgcccagcacaatagctgcgccacaccccatggacgggccgcctgggggctccacccccgtcacaccagtcatcaaggctggctggctggacaagaacccaccgcagggatcttacatctatcagaaacgatgggtgagactggatactgatcacctgcgatactttgacagtaacaaggacgcttactctaagcgctttatctctgtggcctgcatctcccacgtggctgccatcggggaccagaagtttgaagtgatcacaaacaaccgaacctttgccttccgggcagagagtgatgtggagcggaaggagtggatgcaggccctgcagcaggccatggctgagcagcgtgcccgggcccggctctctagcgcttatctgctgggagttccaggctcagagcagcctgaccgcgctggcagcctggagcttcgtggcttcaagaataagctgtacgtggccgtggtcggggacaaagtgcagctctacaagaatctagaggagtaccacctgggcattggcatcaccttcatcgacatgagcgtgggcaacgtgaaggaagtggaccggcgcagcttcgacctcaccacgccctaccgcatcttcagcttctctgctgactcagagctagagaaggagcagtggttggaggccatgcagggagccatcgctgaggccctgtctacctcggaggtggccgagcgcatctgggctgcagcccccaacaggttctgtgctgactgcggggctcctcagcctgactgggcctccatcaacctctgtgttgttatctgcaagcgctgtgcaggggagcaccgtggcctgggcgctggcgtctccaaggtgcggagcctgaagatggacaggaaggtgtggacagaaacacttatcgagctcttcttacagctggggaatggcgctgggaaccgcttctgggcagccaacgtgccccccagtgaggccctgcagcccagcagcagccccagcacccggcggtgccacctggaggccaagtaccgtgagggcaagtaccgccgctaccacccgctctttggcaaccaggaggagctggacaaggccctgtgtgctgcagtcaccaccacagacctggctgagacccaggcgctcctgggctgtggggctgggatcaactgcttctcgggggaccctgaggcccccacgcccctggctcttgcagagcaggcggggcagacgctgcagatggaattccttcggaacaaccggaccacagaggtgcctcggctggactcgatgaagcccctggaaaagcactactcagttgtcctgccgaccgtgagccacagtggcttcctctacaagactgcctctgccggcaagctgctacaggaccgccgggcccgggaagagttcagccggcgctggtgtgtccttggtgacggggtcctgagctactttgagaatgagcgggcagtgacccccaatggagagattcgggccagcgagattgtgtgcctggcagtgccccctcctgacacccatggctttgagcacacctttgaggtgtacacggagggagaacggctgtacctgtttgggctggagagtgcggagcaggctcatgagtgggtcaagtgtattgctaaggcattcgtgcctcccctagccgaggatctgctggcccgggattttgagcggctgggacgcctaccctacaaagctggcctgagcctacagcgggcccaggagggctggttctctctcagtggctcggagctccgtgctgtcttcccggaggggccctgcgaagagccgctgcaactacggaaactgcaggagctttccatccagggggacagtgagaaccaggtgctggtgctggtggagcgaaggaggacactgtacatacagggcgagcggcggctggacttcatgggttggctgggggccatccagaaagcagccgccagcatgggggacacgctgtcggagcagcagcttggggactcggatatcccggtgatcgtgtaccgctgtgtggactacatcacgcagtgcggcctgacctccgagggcatctaccgcaagtgtgggcagacatcgaagacacagcggctgctggagagcctgcggcaggatgcgcgctctgtgcacctcaaggagggcgagcagcacgtggatgatgtttcctcggcgctcaagcgcttcctgcgcgacctgcctgatgggctcttcactcgcgcccagcgcctaacctggctggaggcctcagagattgaggacgaggaggagaaggtctccaggtaccgagagctgctggtgcggctgccccctgtcaaccgggccacagtgaaggcccttatcagccacctgtactgtgttcagtgcttctcagacacgaaccagatgaacgtgcacaacctggcaattgtgtttgggcccacgctcttccagacagatgggcaggactacaaggctggccgtgtggtggaagacctcattaaccactatgtggtggtgtttagtgtggatgaggaagagctcaggaagcagcgggaggagatcactgccattgtgaagatgcgcgtggctggcactgccagtgggacccagcatgccggtgacttcatctgcacagtgtatctggaagagaagaaggcagagactgagcagcatatcaaggtcccagcatccatgactgctgaggagctcaccctggagatcctggatcgccggaacgtgggcatcagggagaaggactattggacctgctttgaggtcaacgagagggaggaggcagagcgccccctgcactttgcggagaaggtgctgcccatcctgcacgggctgggcacggacagccacctggtggtgaagaagcaccaggccatggaggccatgctgctgtacctggccagccgtgtcggtgacaccaagcatggcatgatgaagttccgtgaggaccgcagcctcctgggcctgggcctgccctcaggtggcttccacgatcgctacttcatcctcaacagcagctgcttgcggctctacaaggaggtccggagccagaggccgtggagcggggcccctgagaccagtcaccggcctgagaaggagtggcctattaagagtctcaaagtctacctgggagtgaagaagaaactcaggccacccacctgctggggcttcacagtggtgcatgagacagagaaacatgagaagcagcagtggtacctctgctgtgacacacagatggagctccgggagtggttcgctacctttctgtttgtgcagcatgacggcctggtgtggccctcagagccctcacgcgtgtcccgggcagtgcctgaggtccggctgggtagtgtgtcactgatcccccttcgaggtagtgaaaatgaaatgcgccggagtgtggctgccttcaccgcggaccctctgtctcttctgcgcaacgtctgagcacaggagcccatccttggctctaggattccgccgctggaagccttctgttcagacaccccttatgctccaaggcctgatgtgagccagcggggggtgcatgggaaactgcaccccacaacccacatcctccatcctgactgcagcatggggttccccggcaggggtgggaggcagcaggggtcagcctgggcaggaacctctcccaactctgtccaggtgttcagacctcttggcccaacctgctcaccccaccgggttcactgtccttgtggggctggagagatgggcataagtcaggaacttgggaggaccaccaccctttcagaggcgtgaggccctggggccctgccggaagggagccccctgctcctcccaacaaactccagaacagcagaaagcgggtgctgtagaggagcactcagctcacggggagggagctcttggctgagcttctacagggctgagagctgcgctttggggacttcagccttccttccagtctgggctgagtggggggtccagactacctgatgccccttccccaatttggggactttttgataatataaatatatctgtatatttt

SEQ ID NO: 32633 - DNA, 5767 bp, Artificial Sequence
  derived and/or modified sequence
gattcacaaggaatgaccctcttcatcgcctctcctaattcagtcctcacaacagtccttttacaaatgggacaacaggttagaggaagtcaggcagatttccagcatcatagagagtaaaggaccagggaaggatcaggattcaaggactgcacccaggctctgcttccagcttgctgtgtgactttgggtaattttgttcccttagggaactgagctttctcatttgtaaatgcaaacaggctgttgggaggatcaaatgagatccaggggtgaaaacagcttagtttactttcaggaatttacccacgcggtatataaaggcaaaatattattatagtcaggtgattgtagattgaggaacccatttcctcattctgcaaattgcaaacctgagggcccaaagagggacaggggcttgccccaggtctcagcaggctgtgagcaagagctaaagcctaatcctcctgcctttgggcctggagcccttccttgtaccccaggggtcagtgtctttgttggatacaggcttagattgactgactgtaccctgagaacctaggggagtccctgttcccaattcttctcctacccccaccttggcctgatggaggaagaccctgctgtgttgagatgagcaccagagccaagaagctgaggaggatctggagaattctggaggaagaggagagtgttgctggagctgtacagaccctgcttctcagctcccgcctcaggccgagatgaggagcccttcagaatagctgctgtctctgggaggacccgggcgtccttggcagcccagctgctctggacaaagccctgccagtcaggcctccgctggcaggaaccatggcagaggctggggatgctgcgctatcggtggccgagtggctgcgggcattgcacctggagcagtacacggggctctttgagcagcatggcctggtgtgggccactgagtgccaaggcctcagcgacacccgcctgatggacatgggcatgctactccctggtcaccgccgccgcatcctggctggcctgctccgtgcccatacctcaccggcccctgcaccccgccccaccccacggcctgtgcccatgaagcgccacatcttccgctcaccacctgtgcctgccactccacccgagccgctgcccaccactacagaggatgaggggctccccgctgccccacccatcccgccccggaggagctgccttccgcccacctgcttcaccaccccatccacagctgccccagaccctgtgctgcccccgctgcctgctaagcggcatttggcagagctgagcgttccacccgtgccgccccgcaccggacccccccgcctgctggtgagcctgcccactaaggaggaggagtcattgctgccatcattatcatcccctccccagccacagtctgaggagcccctgtccaccctcccccaggggcctccccagcctccctctccacctccctgccccccggagatacctccaaagccggtacgcctgttcccagagttcgatgactctgactacgatgaggtcccagaggaggggccgggggccccagccagagtgatgaccaagaaggaggagcccccaccgagccgagtcccacgggccgtgcgcgtggccagtctgctgagcgagggagaggaactgtctggggacgaccaaggggatgaggaagaggatgaccacgcctatgagggcgtccccaatggcggatggcataccagcagcctgagcttgtccttgcccagcacaatagctgcgccacaccccatggacgggccgcctgggggctccacccccgtcacaccagtcatcaaggctggctggctggacaagaacccaccgcagggatcttacatctatcagaaacgatgggtgagactggatactgatcacctgcgatactttgacagtaacaaggacgcttactctaagcgctttatctctgtggcctgcatctcccacgtggctgccatcggggaccagaagtttgaagtgatcacaaacaaccgaacctttgccttccgggcagagagtgatgtggagcggaaggagtggatgcaggccctgcagcaggccatggctgagcagcgtgcccgggcccggctctctagcgcttatctgctgggagttccaggctcagagcagcctgaccgcgctggcagcctggagcttcgtggcttcaagaataagctgtacgtggccgtggtcggggacaaagtgcagctctacaagaatctagaggagtaccacctgggcattggcatcaccttcatcgacatgagcgtgggcaacgtgaaggaagtggaccggcgcagcttcgacctcaccacgccctaccgcatcttcagcttctctgctgactcagagctagagaaggagcagtggttggaggccatgcagggagccatcgctgaggccctgtctacctcggaggtggccgagcgcatctgggctgcagcccccaacaggttctgtgctgactgcggggctcctcagcctgactgggcctccatcaacctctgtgttgttatctgcaagcgctgtgcaggggagcaccgtggcctgggcgctggcgtctccaaggtgcggagcctgaagatggacaggaaggtgtggacagaaacacttatcgagctcttcttacagctggggaatggcgctgggaaccgcttctgggcagccaacgtgccccccagtgaggccctgcagcccagcagcagccccagcacccggcggtgccacctggaggccaagtaccgtgagggcaagtaccgccgctaccacccgctctttggcaaccaggaggagctggacaaggccctgtgtgctgcagtcaccaccacagacctggctgagacccaggcgctcctgggctgtggggctgggatcaactgcttctcgggggaccctgaggcccccacgcccctggctcttgcagagcaggcggggcagacgctgcagatggaattccttcggaacaaccggaccacagaggtgcctcggctggactcgatgaagcccctggaaaagcactactcagttgtcctgccgaccgtgagccacagtggcttcctctacaagactgcctctgccggcaagctgctacaggaccgccgggcccgggaagagttcagccggcgctggtgtgtccttggtgacggggtcctgagctactttgagaatgagcgggcagtgacccccaatggagagattcgggccagcgagattgtgtgcctggcagtgccccctcctgacacccatggctttgagcacacctttgaggtgtacacggagggagaacggctgtacctgtttgggctggagagtgcggagcaggctcatgagtgggtcaagtgtattgctaaggcattcgtgcctcccctagccgaggatctgctggcccgggattttgagcggctgggacgcctaccctacaaagctggcctgagcctacagcgggcccaggagggctggttctctctcagtggctcggagctccgtgctgtcttcccggaggggccctgcgaagagccgctgcaactacggaaactgcaggagctttccatccagggggacagtgagaaccaggtgctggtgctggtggagcgaaggaggacactgtacatacagggcgagcggcggctggacttcatgggttggctgggggccatccagaaagcagccgccagcatgggggacacgctgtcggagcagcagcttggggactcggatatcccggtgatcgtgtaccgctgtgtggactacatcacgcagtgcggcctgacctccgagggcatctaccgcaagtgtgggcagacatcgaagacacagcggctgctggagagcctgcggcaggatgcgcgctctgtgcacctcaaggagggcgagcagcacgtggatgatgtttcctcggcgctcaagcgcttcctgcgcgacctgcctgatgggctcttcactcgcgcccagcgcctaacctggctggaggcctcagagattgaggacgaggaggagaaggtctccaggtaccgagagctgctggtgcggctgccccctgtcaaccgggccacagtgaaggcccttatcagccacctgtactgtgttcagtgcttctcagacacgaaccagatgaacgtgcacaacctggcaattgtgtttgggcccacgctcttccagacagatgggcaggactacaaggctggccgtgtggtggaagacctcattaaccactatgtggtggtgtttagtgtggatgaggaagagctcaggaagcagcgggaggagatcactgccattgtgaagatgcgcgtggctggcactgccagtgggacccagcatgccggtgacttcatctgcacagtgtatctggaagagaagaaggcagagactgagcagcatatcaaggtcccagcatccatgactgctgaggagctcaccctggagatcctggatcgccggaacgtgggcatcagggagaaggactattggacctgctttgaggtcaacgagagggaggaggcagagcgccccctgcactttgcggagaaggtgctgcccatcctgcacgggctgggcacggacagccacctggtggtgaagaagcaccaggccatggaggccatgctgctgtacctggccagccgtgtcggtgacaccaagcatggcatgatgaagttccgtgaggaccgcagcctcctgggcctgggcctgccctcaggtggcttccacgatcgctacttcatcctcaacagcagctgcttgcggctctacaaggaggtccggagtcaccggcctgagaaggagtggcctattaagagtctcaaagtctacctgggagtgaagaagaaactcaggccacccacctgctggggcttcacagtggtgcatgagacagagaaacatgagaagcagcagtggtacctctgctgtgacacacagatggagctccgggagtggttcgctacctttctgtttgtgcagcatgacggcctggtgtggccctcagagccctcacgcgtgtcccgggcagtgcctgaggtccggctgggtagtgtgtcactgatcccccttcgaggtagtgaaaatgaaatgcgccggagtgtggctgccttcaccgcggaccctctgtctcttctgcgcaacgtctgagcacaggagcccatccttggctctaggattccgccgctggaagccttctgttcagacaccccttatgctccaaggcctgatgtgagccagcggggggtgcatgggaaactgcaccccacaacccacatcctccatcctgactgcagcatggggttccccggcaggggtgggaggcagcaggggtcagcctgggcaggaacctctcccaactctgtccaggtgttcagacctcttggcccaacctgctcaccccaccgggttcactgtccttgtggggctggagagatgggcataagtcaggaacttgggaggaccaccaccctttcagaggcgtgaggccctggggccctgccggaagggagccccctgctcctcccaacaaactccagaacagcagaaagcgggtgctgtagaggagcactcagctcacggggagggagctcttggctgagcttctacagggctgagagctgcgctttggggacttcagccttccttccagtctgggctgagtggggggtccagactacctgatgccccttccccaatttggggactttttgataatataaatatatctgtatattttacccta

SEQ ID NO: 32634 - DNA, 5145 bp, Artificial Sequence
  derived and/or modified sequence
aatttggcggtggcggtgtaagtcggtggcggcgccggtacgcctggtccccgcgtggagtctttactcaaaacagctcccgcctcaggccgagatgaggagcccttcagaatagctgctgtctctgggaggacccgggcgtccttggcagcccagctgctctggacaaagccctgccagtcaggcctccgctggcaggaaccatggcagaggctggggatgctgcgctatcggtggccgagtggctgcgggcattgcacctggagcagtacacggggctctttgagcagcatggcctggtgtgggccactgagtgccaaggcctcagcgacacccgcctgatggacatgggcatgctactccctggtcaccgccgccgcatcctggctggcctgctccgtgcccatacctcaccggcccctgcaccccgccccaccccacggcctgtgcccatgaagcgccacatcttccgctcaccacctgtgcctgccactccacccgagccgctgcccaccactacagaggatgaggggctccccgctgccccacccatcccgccccggaggagctgccttccgcccacctgcttcaccaccccatccacagctgccccagaccctgtgctgcccccgctgcctgctaagcggcatttggcagagctgagcgttccacccgtgccgccccgcaccggacccccccgcctgctggtgagcctgcccactaaggaggaggagtcattgctgccatcattatcatcccctccccagccacagtctgaggagcccctgtccaccctcccccaggggcctccccagcctccctctccacctccctgccccccggagatacctccaaagccggtacgcctgttcccagagttcgatgactctgactacgatgaggtcccagaggaggggccgggggccccagccagagtgatgaccaagaaggaggagcccccaccgagccgagtcccacgggccgtgcgcgtggccagtctgctgagcgagggagaggaactgtctggggacgaccaaggggatgaggaagaggatgaccacgcctatgagggcgtccccaatggcggatggcataccagcagcctgagcttgtccttgcccagcacaatagctgcgccacaccccatggacgggccgcctgggggctccacccccgtcacaccagtcatcaaggctggctggctggacaagaacccaccgcagggatcttacatctatcagaaacgatgggtgagactggatactgatcacctgcgatactttgacagtaacaaggacgcttactctaagcgctttatctctgtggcctgcatctcccacgtggctgccatcggggaccagaagtttgaagtgatcacaaacaaccgaacctttgccttccgggcagagagtgatgtggagcggaaggagtggatgcaggccctgcagcaggccatggctgagcagcgtgcccgggcccggctctctagcgcttatctgctgggagttccaggctcagagcagcctgaccgcgctggcagcctggagcttcgtggcttcaagaataagctgtacgtggccgtggtcggggacaaagtgcagctctacaagaatctagaggagtaccacctgggcattggcatcaccttcatcgacatgagcgtgggcaacgtgaaggaagtggaccggcgcagcttcgacctcaccacgccctaccgcatcttcagcttctctgctgactcagagctagagaaggagcagtggttggaggccatgcagggagccatcgctgaggccctgtctacctcggaggtggccgagcgcatctgggctgcagcccccaacaggttctgtgctgactgcggggctcctcagcctgactgggcctccatcaacctctgtgttgttatctgcaagcgctgtgcaggggagcaccgtggcctgggcgctggcgtctccaaggtgcggagcctgaagatggacaggaaggtgtggacagaaacacttatcgagctcttcttacagctggggaatggcgctgggaaccgcttctgggcagccaacgtgccccccagtgaggccctgcagcccagcagcagccccagcacccggcggtgccacctggaggccaagtaccgtgagggcaagtaccgccgctaccacccgctctttggcaaccaggaggagctggacaaggccctgtgtgctgcagtcaccaccacagacctggctgagacccaggcgctcctgggctgtggggctgggatcaactgcttctcgggggaccctgaggcccccacgcccctggctcttgcagagcaggcggggcagacgctgcagatggaattccttcggaacaaccggaccacagaggtgcctcggctggactcgatgaagcccctggaaaagcactactcagttgtcctgccgaccgtgagccacagtggcttcctctacaagactgcctctgccggcaagctgctacaggaccgccgggcccgggaagagttcagccggcgctggtgtgtccttggtgacggggtcctgagctactttgagaatgagcgggcagtgacccccaatggagagattcgggccagcgagattgtgtgcctggcagtgccccctcctgacacccatggctttgagcacacctttgaggtgtacacggagggagaacggctgtacctgtttgggctggagagtgcggagcaggctcatgagtgggtcaagtgtattgctaaggcattcgtgcctcccctagccgaggatctgctggcccgggattttgagcggctgggacgcctaccctacaaagctggcctgagcctacagcgggcccaggagggctggttctctctcagtggctcggagctccgtgctgtcttcccggaggggccctgcgaagagccgctgcaactacggaaactgcaggagctttccatccagggggacagtgagaaccaggtgctggtgctggtggagcgaaggaggacactgtacatacagggcgagcggcggctggacttcatgggttggctgggggccatccagaaagcagccgccagcatgggggacacgctgtcggagcagcagcttggggactcggatatcccggtgatcgtgtaccgctgtgtggactacatcacgcagtgcggcctgacctccgagggcatctaccgcaagtgtgggcagacatcgaagacacagcggctgctggagagcctgcggcaggatgcgcgctctgtgcacctcaaggagggcgagcagcacgtggatgatgtttcctcggcgctcaagcgcttcctgcgcgacctgcctgatgggctcttcactcgcgcccagcgcctaacctggctggaggcctcagagattgaggacgaggaggagaaggtctccaggtaccgagagctgctggtgcggctgccccctgtcaaccgggccacagtgaaggcccttatcagccacctgtactgtgttcagtgcttctcagacacgaaccagatgaacgtgcacaacctggcaattgtgtttgggcccacgctcttccagacagatgggcaggactacaaggctggccgtgtggtggaagacctcattaaccactatgtggtggtgtttagtgtggatgaggaagagctcaggaagcagcgggaggagatcactgccattgtgaagatgcgcgtggctggcactgccagtgggacccagcatgccggtgacttcatctgcacagtgtatctggaagagaagaaggcagagactgagcagcatatcaaggtcccagcatccatgactgctgaggagctcaccctggagatcctggatcgccggaacgtgggcatcagggagaaggactattggacctgctttgaggtcaacgagagggaggaggcagagcgccccctgcactttgcggagaaggtgctgcccatcctgcacgggctgggcacggacagccacctggtggtgaagaagcaccaggccatggaggccatgctgctgtacctggccagccgtgtcggtgacaccaagcatggcatgatgaagttccgtgaggaccgcagcctcctgggcctgggcctgccctcaggtggcttccacgatcgctacttcatcctcaacagcagctgcttgcggctctacaaggaggtccggagccagaggccgtggagcggggcccctgagaccagtcaccggcctgagaaggagtggcctattaagagtctcaaagtctacctgggagtgaagaagaaactcaggccacccacctgctggggcttcacagtggtgcatgagacagagaaacatgagaagcagcagtggtacctctgctgtgacacacagatggagctccgggagtggttcgctacctttctgtttgtgcagcatgacggcctggtgtggccctcagagccctcacgcgtgtcccgggcagtgcctgaggtccggctgggtagtgtgtcactgatcccccttcgaggtagtgaaaatgaaatgcgccggagtgtggctgccttcaccgcggaccctctgtctcttctgcgcaacgtctgagcacaggagcccatccttggctctaggattccgccgctggaagccttctgttcagacaccccttatgctccaaggcctgatgtgagccagcggggggtgcatgggaaactgcaccccacaacccacatcctccatcctgactgcagcatggggttccccggcaggggtgggaggcagcaggggtcagcctgggcaggaacctctcccaactctgtccaggtgttcagacctcttggcccaacctgctcaccccaccgggttcactgtccttgtggggctggagagatgggcataagtcaggaacttgggaggaccaccaccctttcagaggcgtgaggccctggggccctgccggaagggagccccctgctcctcccaacaaactccagaacagcagaaagcgggtgctgtagaggagcactcagctcacggggagggagctcttggctgagcttctacagggctgagagctgcgctttggggacttcagccttccttccagtctgggctgagtggggggtccagactacctgatgccccttccccaatttggggactttttgataatataaatatatctgtatatttt

SEQ ID NO: 32635 - DNA, 4914 bp, Artificial Sequence
  derived and/or modified sequence
atggcagaggctggggatgctgcgctatcggtggccgagtggctgcgggcattgcacctggagcagtacacggggctctttgagcagcatggcctggtgtgggccactgagtgccaaggcctcagcgacacccgcctgatggacatgggcatgctactccctggtcaccgccgccgcatcctggctggcctgctccgtgcccatacctcaccggcccctgcaccccgccccaccccacggcctgtgcccatgaagcgccacatcttccgctcaccacctgtgcctgccactccacccgagccgctgcccaccactacagaggatgaggggctccccgctgccccacccatcccgccccggaggagctgccttccgcccacctgcttcaccaccccatccacagctgccccagaccctgtgctgcccccgctgcctgctaagcggcatttggcagagctgagcgttccacccgtgccgccccgcaccggacccccccgcctgctggtgagcctgcccactaaggaggaggagtcattgctgccatcattatcatcccctccccagccacagtctgaggagcccctgtccaccctcccccaggggcctccccagcctccctctccacctccctgccccccggagatacctccaaagccggtacgcctgttcccagagttcgatgactctgactacgatgaggtcccagaggaggggccgggggccccagccagagtgatgaccaagaaggaggagcccccaccgagccgagtcccacgggccgtgcgcgtggccagtctgctgagcgagggagaggaactgtctggggacgaccaaggggatgaggaagaggatgaccacgcctatgagggcgtccccaatggcggatggcataccagcagcctgagcttgtccttgcccagcacaatagctgcgccacaccccatggacgggccgcctgggggctccacccccgtcacaccagtcatcaaggctggctggctggacaagaacccaccgcagggatcttacatctatcagaaacgatgggtgagactggatactgatcacctgcgatactttgacagtaacaaggacgcttactctaagcgctttatctctgtggcctgcatctcccacgtggctgccatcggggaccagaagtttgaagtgatcacaaacaaccgaacctttgccttccgggcagagagtgatgtggagcggaaggagtggatgcaggccctgcagcaggccatggctgagcagcgtgcccgggcccggctctctagcgcttatctgctgggagttccaggctcagagcagcctgaccgcgctggcagcctggagcttcgtggcttcaagaataagctgtacgtggccgtggtcggggacaaagtgcagctctacaagaatctagaggagtaccacctgggcattggcatcaccttcatcgacatgagcgtgggcaacgtgaaggaagtggaccggcgcagcttcgacctcaccacgccctaccgcatcttcagcttctctgctgactcagagctagagaaggagcagtggttggaggccatgcagggagccatcgctgaggccctgtctacctcggaggtggccgagcgcatctgggctgcagcccccaacaggttctgtgctgactgcggggctcctcagcctgactgggcctccatcaacctctgtgttgttatctgcaagcgctgtgcaggggagcaccgtggcctgggcgctggcgtctccaaggtgcggagcctgaagatggacaggaaggtgtggacagaaacacttatcgagctcttcttacagctggggaatggcgctgggaaccgcttctgggcagccaacgtgccccccagtgaggccctgcagcccagcagcagccccagcacccggcggtgccacctggaggccaagtaccgtgagggcaagtaccgccgctaccacccgctctttggcaaccaggaggagctggacaaggccctgtgtgctgcagtcaccaccacagacctggctgagacccaggcgctcctgggctgtggggctgggatcaactgcttctcgggggaccctgaggcccccacgcccctggctcttgcagagcaggcggggcagacgctgcagatggaattccttcggaacaaccggaccacagaggtgcctcggctggactcgatgaagcccctggaaaagcactactcagttgtcctgccgaccgtgagccacagtggcttcctctacaagactgcctctgccggcaagctgctacaggaccgccgggcccgggaagagttcagccggcgctggtgtgtccttggtgacggggtcctgagctactttgagaatgagcgggcagtgacccccaatggagagattcgggccagcgagattgtgtgcctggcagtgccccctcctgacacccatggctttgagcacacctttgaggtgtacacggagggagaacggctgtacctgtttgggctggagagtgcggagcaggctcatgagtgggtcaagtgtattgctaaggcattcgtgcctcccctagccgaggatctgctggcccgggattttgagcggctgggacgcctaccctacaaagctggcctgagcctacagcgggcccaggagggctggttctctctcagtggctcggagctccgtgctgtcttcccggaggggccctgcgaagagccgctgcaactacggaaactgcaggagctttccatccagggggacagtgagaaccaggtgctggtgctggtggagcgaaggaggacactgtacatacagggcgagcggcggctggacttcatgggttggctgggggccatccagaaagcagccgccagcatgggggacacgctgtcggagcagcagcttggggactcggatatcccggtgatcgtgtaccgctgtgtggactacatcacgcagtgcggcctgacctccgagggcatctaccgcaagtgtgggcagacatcgaagacacagcggctgctggagagcctgcggcaggatgcgcgctctgtgcacctcaaggagggcgagcagcacgtggatgatgtttcctcggcgctcaagcgcttcctgcgcgacctgcctgatgggctcttcactcgcgcccagcgcctaacctggctggaggcctcagagattgaggacgaggaggagaaggtctccaggtaccgagagctgctggtgcggctgccccctgtcaaccgggccacagtgaaggcccttatcagccacctgtactgtgttcagtgcttctcagacacgaaccagatgaacgtgcacaacctggcaattgtgtttgggcccacgctcttccagacagatgggcaggactacaaggctggccgtgtggtggaagacctcattaaccactatgtggtggtgtttagtgtggatgaggaagagctcaggaagcagcgggaggagatcactgccattgtgaagatgcgcgtggctggcactgccagtgggacccagcatgccggtgacttcatctgcacagtgtatctggaagagaagaaggcagagactgagcagcatatcaaggtcccagcatccatgactgctgaggagctcaccctggagatcctggatcgccggaacgtgggcatcagggagaaggactattggacctgctttgaggtcaacgagagggaggaggcagagcgccccctgcactttgcggagaaggtgctgcccatcctgcacgggctgggcacggacagccacctggtggtgaagaagcaccaggccatggaggccatgctgctgtacctggccagccgtgtcggtgacaccaagcatggcatgatgaagttccgtgaggaccgcagcctcctgggcctgggcctgccctcaggtggcttccacgatcgctacttcatcctcaacagcagctgcttgcggctctacaaggaggtccggagtcaccggcctgagaaggagtggcctattaagagtctcaaagtctacctgggagtgaagaagaaactcaggccacccacctgctggggcttcacagtggtgcatgagacagagaaacatgagaagcagcagtggtacctctgctgtgacacacagatggagctccgggagtggttcgctacctttctgtttgtgcagcatgacggcctggtgtggccctcagagccctcacgcgtgtcccgggcagtgcctgaggtccggctgggtagtgtgtcactgatcccccttcgaggtagtgaaaatgaaatgcgccggagtgtggctgccttcaccgcggaccctctgtctcttctgcgcaacgtctgagcacaggagcccatccttggctctaggattccgccgctggaagccttctgttcagacaccccttatgctccaaggcctgatgtgagccagcggggggtgcatgggaaactgcaccccacaacccacatcctccatcctgactgcagcatggggttccccggcaggggtgggaggcagcaggggtcagcctgggcaggaacctctcccaactctgtccaggtgttcagacctcttggcccaacctgctcaccccaccgggttcactgtccttgtggggctggagagatgggcataagtcaggaacttgggaggaccaccaccctttcagaggcgtgaggccctggggccctgccggaagggagccccctgctcctcccaacaaactccagaacagcagaaagcgggtgctgtagaggagcactcagctcacggggagggagctcttggctgagcttctacagggctgagagctgcgctttggggacttcagccttccttccagtctgggctgagtggggggtccagactacctgatgccccttccccaatttggggactttttgataatataaatatatctgtatattttaccct

SEQ ID NO: 32636 - DNA, 4320 bp, Artificial Sequence
  derived and/or modified sequence
atggccgaggccggcgacgccgccctgagcgtggccgagtggctgagagccctgcacctggagcagtacaccggcctgttcgagcagcacggcctggtgtgggccaccgagtgccagggcctgagcgacaccagactgatggacatgggcatgctgctgcccggccacagaagaagaatcctggccggcctgctgagagcccacaccagccccgcccccgcccccagacccacccccagacccgtgcccatgaagagacacatcttcagaagcccccccgtgcccgccaccccccccgagcccctgcccaccaccaccgaggacgagggcctgcccgccgccccccccatcccccccagaagaagctgcctgccccccacctgcttcaccacccccagcaccgccgcccccgaccccgtgctgccccccctgcccgccaagagacacctggccgagctgagcgtgccccccgtgccccccagaaccggcccccccagactgctggtgagcctgcccaccaaggaggaggagagcctgctgcccagcctgagcagccccccccagccccagagcgaggagcccctgagcaccctgccccagggccccccccagccccccagcccccccccctgcccccccgagatcccccccaagcccgtgagactgttccccgagttcgacgacagcgactacgacgaggtgcccgaggagggccccggcgcccccgccagagtgatgaccaagaaggaggagcccccccccagcagagtgcccagagccgtgagagtggccagcctgctgagcgagggcgaggagctgagcggcgacgaccagggcgacgaggaggaggacgaccacgcctacgagggcgtgcccaacggcggctggcacaccagcagcctgagcctgagcctgcccagcaccatcgccgccccccaccccatggacggcccccccggcggcagcacccccgtgacccccgtgatcaaggccggctggctggacaagaaccccccccagggcagctacatctaccagaagagatgggtgagactggacaccgaccacctgagatacttcgacagcaacaaggacgcctacagcaagagattcatcagcgtggcctgcatcagccacgtggccgccatcggcgaccagaagttcgaggtgatcaccaacaacagaaccttcgccttcagagccgagagcgacgtggagagaaaggagtggatgcaggccctgcagcaggccatggccgagcagagagccagagccagactgagcagcgcctacctgctgggcgtgcccggcagcgagcagcccgacagagccggcagcctggagctgagaggcttcaagaacaagctgtacgtggccgtggtgggcgacaaggtgcagctgtacaagaacctggaggagtaccacctgggcatcggcatcaccttcatcgacatgagcgtgggcaacgtgaaggaggtggacagaagaagcttcgacctgaccaccccctacagaatcttcagcttcagcgccgacagcgagctggagaaggagcagtggctggaggccatgcagggcgccatcgccgaggccctgagcaccagcgaggtggccgagagaatctgggccgccgcccccaacagattctgcgccgactgcggcgccccccagcccgactgggccagcatcaacctgtgcgtggtgatctgcaagagatgcgccggcgagcacagaggcctgggcgccggcgtgagcaaggtgagaagcctgaagatggacagaaaggtgtggaccgagaccctgatcgagctgttcctgcagctgggcaacggcgccggcaacagattctgggccgccaacgtgccccccagcgaggccctgcagcccagcagcagccccagcaccagaagatgccacctggaggccaagtacagagagggcaagtacagaagataccaccccctgttcggcaaccaggaggagctggacaaggccctgtgcgccgccgtgaccaccaccgacctggccgagacccaggccctgctgggctgcggcgccggcatcaactgcttcagcggcgaccccgaggcccccacccccctggccctggccgagcaggccggccagaccctgcagatggagttcctgagaaacaacagaaccaccgaggtgcccagactggacagcatgaagcccctggagaagcactacagcgtggtgctgcccaccgtgagccacagcggcttcctgtacaagaccgccagcgccggcaagctgctgcaggacagaagagccagagaggagttcagcagaagatggtgcgtgctgggcgacggcgtgctgagctacttcgagaacgagagagccgtgacccccaacggcgagatcagagccagcgagatcgtgtgcctggccgtgcccccccccgacacccacggcttcgagcacaccttcgaggtgtacaccgagggcgagagactgtacctgttcggcctggagagcgccgagcaggcccacgagtgggtgaagtgcatcgccaaggccttcgtgccccccctggccgaggacctgctggccagagacttcgagagactgggcagactgccctacaaggccggcctgagcctgcagagagcccaggagggctggttcagcctgagcggcagcgagctgagagccgtgttccccgagggcccctgcgaggagcccctgcagctgagaaagctgcaggagctgagcatccagggcgacagcgagaaccaggtgctggtgctggtggagagaagaagaaccctgtacatccagggcgagagaagactggacttcatgggctggctgggcgccatccagaaggccgccgccagcatgggcgacaccctgagcgagcagcagctgggcgacagcgacatccccgtgatcgtgtacagatgcgtggactacatcacccagtgcggcctgaccagcgagggcatctacagaaagtgcggccagaccagcaagacccagagactgctggagagcctgagacaggacgccagaagcgtgcacctgaaggagggcgagcagcacgtggacgacgtgagcagcgccctgaagagattcctgagagacctgcccgacggcctgttcaccagagcccagagactgacctggctggaggccagcgagatcgaggacgaggaggagaaggtgagcagatacagagagctgctggtgagactgccccccgtgaacagagccaccgtgaaggccctgatcagccacctgtactgcgtgcagtgcttcagcgacaccaaccagatgaacgtgcacaacctggccatcgtgttcggccccaccctgttccagaccgacggccaggactacaaggccggcagagtggtggaggacctgatcaaccactacgtggtggtgttcagcgtggacgaggaggagctgagaaagcagagagaggagatcaccgccatcgtgaagatgagagtggccggcaccgccagcggcacccagcacgccggcgacttcatctgcaccgtgtacctggaggagaagaaggccgagaccgagcagcacatcaaggtgcccgccagcatgaccgccgaggagctgaccctggagatcctggacagaagaaacgtgggcatcagagagaaggactactggacctgcttcgaggtgaacgagagagaggaggccgagagacccctgcacttcgccgagaaggtgctgcccatcctgcacggcctgggcaccgacagccacctggtggtgaagaagcaccaggccatggaggccatgctgctgtacctggccagcagagtgggcgacaccaagcacggcatgatgaagttcagagaggacagaagcctgctgggcctgggcctgcccagcggcggcttccacgacagatacttcatcctgaacagcagctgcctgagactgtacaaggaggtgagaagccacagacccgagaaggagtggcccatcaagagcctgaaggtgtacctgggcgtgaagaagaagctgagaccccccacctgctggggcttcaccgtggtgcacgagaccgagaagcacgagaagcagcagtggtacctgtgctgcgacacccagatggagctgagagagtggttcgccaccttcctgttcgtgcagcacgacggcctggtgtggcccagcgagcccagcagagtgagcagagccgtgcccgaggtgagactgggcagcgtgagcctgatccccctgagaggcagcgagaacgagatgagaagaagcgtggccgccttcaccgccgaccccctgagcctgctgagaaacgtgtag

SEQ ID NO: 32637 - DNA, 4353 bp, Artificial Sequence
  derived and/or modified sequence
atggccgaggccggcgacgccgccctgagcgtggccgagtggctgagagccctgcacctggagcagtacaccggcctgttcgagcagcacggcctggtgtgggccaccgagtgccagggcctgagcgacaccagactgatggacatgggcatgctgctgcccggccacagaagaagaatcctggccggcctgctgagagcccacaccagccccgcccccgcccccagacccacccccagacccgtgcccatgaagagacacatcttcagaagcccccccgtgcccgccaccccccccgagcccctgcccaccaccaccgaggacgagggcctgcccgccgccccccccatcccccccagaagaagctgcctgccccccacctgcttcaccacccccagcaccgccgcccccgaccccgtgctgccccccctgcccgccaagagacacctggccgagctgagcgtgccccccgtgccccccagaaccggcccccccagactgctggtgagcctgcccaccaaggaggaggagagcctgctgcccagcctgagcagccccccccagccccagagcgaggagcccctgagcaccctgccccagggccccccccagccccccagcccccccccctgcccccccgagatcccccccaagcccgtgagactgttccccgagttcgacgacagcgactacgacgaggtgcccgaggagggccccggcgcccccgccagagtgatgaccaagaaggaggagcccccccccagcagagtgcccagagccgtgagagtggccagcctgctgagcgagggcgaggagctgagcggcgacgaccagggcgacgaggaggaggacgaccacgcctacgagggcgtgcccaacggcggctggcacaccagcagcctgagcctgagcctgcccagcaccatcgccgccccccaccccatggacggcccccccggcggcagcacccccgtgacccccgtgatcaaggccggctggctggacaagaaccccccccagggcagctacatctaccagaagagatgggtgagactggacaccgaccacctgagatacttcgacagcaacaaggacgcctacagcaagagattcatcagcgtggcctgcatcagccacgtggccgccatcggcgaccagaagttcgaggtgatcaccaacaacagaaccttcgccttcagagccgagagcgacgtggagagaaaggagtggatgcaggccctgcagcaggccatggccgagcagagagccagagccagactgagcagcgcctacctgctgggcgtgcccggcagcgagcagcccgacagagccggcagcctggagctgagaggcttcaagaacaagctgtacgtggccgtggtgggcgacaaggtgcagctgtacaagaacctggaggagtaccacctgggcatcggcatcaccttcatcgacatgagcgtgggcaacgtgaaggaggtggacagaagaagcttcgacctgaccaccccctacagaatcttcagcttcagcgccgacagcgagctggagaaggagcagtggctggaggccatgcagggcgccatcgccgaggccctgagcaccagcgaggtggccgagagaatctgggccgccgcccccaacagattctgcgccgactgcggcgccccccagcccgactgggccagcatcaacctgtgcgtggtgatctgcaagagatgcgccggcgagcacagaggcctgggcgccggcgtgagcaaggtgagaagcctgaagatggacagaaaggtgtggaccgagaccctgatcgagctgttcctgcagctgggcaacggcgccggcaacagattctgggccgccaacgtgccccccagcgaggccctgcagcccagcagcagccccagcaccagaagatgccacctggaggccaagtacagagagggcaagtacagaagataccaccccctgttcggcaaccaggaggagctggacaaggccctgtgcgccgccgtgaccaccaccgacctggccgagacccaggccctgctgggctgcggcgccggcatcaactgcttcagcggcgaccccgaggcccccacccccctggccctggccgagcaggccggccagaccctgcagatggagttcctgagaaacaacagaaccaccgaggtgcccagactggacagcatgaagcccctggagaagcactacagcgtggtgctgcccaccgtgagccacagcggcttcctgtacaagaccgccagcgccggcaagctgctgcaggacagaagagccagagaggagttcagcagaagatggtgcgtgctgggcgacggcgtgctgagctacttcgagaacgagagagccgtgacccccaacggcgagatcagagccagcgagatcgtgtgcctggccgtgcccccccccgacacccacggcttcgagcacaccttcgaggtgtacaccgagggcgagagactgtacctgttcggcctggagagcgccgagcaggcccacgagtgggtgaagtgcatcgccaaggccttcgtgccccccctggccgaggacctgctggccagagacttcgagagactgggcagactgccctacaaggccggcctgagcctgcagagagcccaggagggctggttcagcctgagcggcagcgagctgagagccgtgttccccgagggcccctgcgaggagcccctgcagctgagaaagctgcaggagctgagcatccagggcgacagcgagaaccaggtgctggtgctggtggagagaagaagaaccctgtacatccagggcgagagaagactggacttcatgggctggctgggcgccatccagaaggccgccgccagcatgggcgacaccctgagcgagcagcagctgggcgacagcgacatccccgtgatcgtgtacagatgcgtggactacatcacccagtgcggcctgaccagcgagggcatctacagaaagtgcggccagaccagcaagacccagagactgctggagagcctgagacaggacgccagaagcgtgcacctgaaggagggcgagcagcacgtggacgacgtgagcagcgccctgaagagattcctgagagacctgcccgacggcctgttcaccagagcccagagactgacctggctggaggccagcgagatcgaggacgaggaggagaaggtgagcagatacagagagctgctggtgagactgccccccgtgaacagagccaccgtgaaggccctgatcagccacctgtactgcgtgcagtgcttcagcgacaccaaccagatgaacgtgcacaacctggccatcgtgttcggccccaccctgttccagaccgacggccaggactacaaggccggcagagtggtggaggacctgatcaaccactacgtggtggtgttcagcgtggacgaggaggagctgagaaagcagagagaggagatcaccgccatcgtgaagatgagagtggccggcaccgccagcggcacccagcacgccggcgacttcatctgcaccgtgtacctggaggagaagaaggccgagaccgagcagcacatcaaggtgcccgccagcatgaccgccgaggagctgaccctggagatcctggacagaagaaacgtgggcatcagagagaaggactactggacctgcttcgaggtgaacgagagagaggaggccgagagacccctgcacttcgccgagaaggtgctgcccatcctgcacggcctgggcaccgacagccacctggtggtgaagaagcaccaggccatggaggccatgctgctgtacctggccagcagagtgggcgacaccaagcacggcatgatgaagttcagagaggacagaagcctgctgggcctgggcctgcccagcggcggcttccacgacagatacttcatcctgaacagcagctgcctgagactgtacaaggaggtgagaagccagagaccctggagcggcgcccccgagaccagccacagacccgagaaggagtggcccatcaagagcctgaaggtgtacctgggcgtgaagaagaagctgagaccccccacctgctggggcttcaccgtggtgcacgagaccgagaagcacgagaagcagcagtggtacctgtgctgcgacacccagatggagctgagagagtggttcgccaccttcctgttcgtgcagcacgacggcctggtgtggcccagcgagcccagcagagtgagcagagccgtgcccgaggtgagactgggcagcgtgagcctgatccccctgagaggcagcgagaacgagatgagaagaagcgtggccgccttcaccgccgaccccctgagcctgctgagaaacgtgtag

SEQ ID NO: 32638 - protein, 348 aa, Artificial Sequence
  derived and/or modified sequence
MAGSLPPCVVDCGTGYTKLGYAGNTEPQFIIPSCIAIRESAKVVDQAQRRVLRGVDDLDFFIGDEAIDKPTYATKWPIRHGIIEDWDLMERFMEQVVFKYLRAEPEDHYFLMTEPPLNTPENREYLAEIMFESFNVPGLYIAVQAVLALAASWTSRQVGERTLTGIVIDSGDGVTHVIPVAEGYVIGSCIKHIPIAGRDITYFIQQLLREREVGIPPEQSLETAKAIKEKYCYICPDIVKEFAKYDVDPRKWIKQYTGINAINQKKFVIDVGYERFLGPEIFFHPEFANPDFMESISDVVDEVIQNCPIDVRRPLYKPEFFQVCHTKKDYEEYGPSICRHNPVFGVMS

SEQ ID NO: 32639 - protein, 51 aa, Artificial Sequence
  derived and/or modified sequence
MFESFNVPGLYIAVQAVLALAASWTSRQVGERTLTGIVIDSGDGVTHVIPV

SEQ ID NO: 32640 - DNA, 1047 bp, Artificial Sequence
  derived and/or modified sequence
atggccggcagcctgcccccctgcgtggtggactgcggcaccggctacaccaagctgggctacgccggcaacaccgagccccagttcatcatccccagctgcatcgccatcagagagagcgccaaggtggtggaccaggcccagagaagagtgctgagaggcgtggacgacctggacttcttcatcggcgacgaggccatcgacaagcccacctacgccaccaagtggcccatcagacacggcatcatcgaggactgggacctgatggagagattcatggagcaggtggtgttcaagtacctgagagccgagcccgaggaccactacttcctgatgaccgagccccccctgaacacccccgagaacagagagtacctggccgagatcatgttcgagagcttcaacgtgcccggcctgtacatcgccgtgcaggccgtgctggccctggccgccagctggaccagcagacaggtgggcgagagaaccctgaccggcatcgtgatcgacagcggcgacggcgtgacccacgtgatccccgtggccgagggctacgtgatcggcagctgcatcaagcacatccccatcgccggcagagacatcacctacttcatccagcagctgctgagagagagagaggtgggcatcccccccgagcagagcctggagaccgccaaggccatcaaggagaagtactgctacatctgccccgacatcgtgaaggagttcgccaagtacgacgtggaccccagaaagtggatcaagcagtacaccggcatcaacgccatcaaccagaagaagttcgtgatcgacgtgggctacgagagattcctgggccccgagatcttcttccaccccgagttcgccaaccccgacttcatggagagcatcagcgacgtggtggacgaggtgatccagaactgccccatcgacgtgagaagacccctgtacaagcccgagttcttccaggtgtgccacaccaagaaggactacgaggagtacggccccagcatctgcagacacaaccccgtgttcggcgtgatgagctag

SEQ ID NO: 32641 - DNA, 1047 bp, Artificial Sequence
  derived and/or modified sequence
atggctggatctctgcccccctgcgtggtcgattgcggcaccggctataccaagctgggttatgctggcaatacagagccacagtttatcatcccttcgtgcatcgccatcagggaaagtgcaaaagtggtagaccaggcccaaaggcgggtcctgaggggtgtggacgatctggatttctttatcggagacgaagcaatcgataaacctacttacgctactaagtggcctattcggcacggcattatcgaagattgggatctgatggagagattcatggagcaggtggtgtttaaatacctcagagctgaaccagaggaccattatttcttgatgacggagccacccctgaatacccctgaaaacagagaatatctcgctgaaatcatgtttgaatcattcaacgtccctggactgtacattgctgtccaggctgttcttgcgctcgcagcctcctggacgagcagacaggtgggagagagaacgttaaccggcatcgtgattgactctggcgatggggtgacacatgtcataccggtagctgagggctacgtcatcggatcatgtatcaagcacatccccatcgctgggagggacattacttactttatccagcagctcctgagggaaagagaggtgggtatacctcccgaacaatcgctggaaaccgccaaagcgattaaagagaaatattgttatatctgcccagacatcgtgaaagaattcgcaaagtacgacgtggacccgcgcaaatggattaagcaatacacaggaatcaacgcgatcaaccagaagaaatttgtgatcgacgtgggctatgagcgattcctgggtcccgagatcttctttcacccggagtttgccaacccggattttatggaatctatcagcgacgtggtggacgaagtgatccaaaattgccctattgacgtgcgtcgccctctgtacaagcccgagttctttcaggtgtgccatacgaaaaaagattatgaagaatatggtcccagcatttgccgccacaacccagtgttcggcgtgatgagttag

SEQ ID NO: 32642 - DNA, 1047 bp, Artificial Sequence
  derived and/or modified sequence
atggccggcagcctgcccccctgtgtggtggactgtggcaccggctacaccaagctgggctacgccggcaacacagagccccagttcatcatccccagctgcatcgccatccgggagagcgccaaggtggtggaccaggcccagaggagagtgctgcggggcgtggatgacctggacttcttcatcggagatgaggccatcgacaagcccacctacgccaccaagtggcccatccgccacggcatcatcgaggactgggacctgatggagcgcttcatggagcaggtggtgttcaagtacctgcgggcagagcctgaggaccactacttcctgatgacagagccccccctgaacaccccagaaaatcgggagtacctggccgagatcatgtttgagagcttcaacgtgcccggcctgtacatcgctgtgcaggccgtgctggccctggccgcctcctggaccagccggcaggtgggggagaggaccctgaccggcatcgtcatcgacagcggagatggagtgacccacgtgattcctgtggccgagggctacgtgattggcagctgcatcaagcacatccccatcgccggccgggacatcacctacttcatccagcagctgctgcgggagcgggaggtgggcatccccccagagcagagcctggagacagccaaggccatcaaggagaagtactgctacatctgcccagacatcgtgaaggagtttgccaagtatgatgtggaccccaggaagtggatcaagcagtacacaggcatcaatgccatcaaccagaagaagtttgtgattgatgtgggctatgagcgcttcctgggccctgagatcttcttccaccctgagtttgccaacccagacttcatggagagcatcagtgatgtggtggatgaagtcatccagaactgccccattgatgtgcggcggcccctgtacaagccagagttcttccaggtgtgccacaccaagaaggactatgaggagtatggccccagcatctgccgccacaaccctgtgtttggagtgatgtcctag

SEQ ID NO: 32643 - DNA, 1566 bp, Artificial Sequence
  derived and/or modified sequence
agcatccgggctcccggcagcggcgctgcggcggctcgcgggagacgctgcgcgcggggctagcgggcggcggagcggacggcgacggggcgctctcgggctgccggcggggccgagcgccgcgcgtcccgagcatggcaggctccctgcctccctgcgtggtggactgtggcaccgggtataccaagcttggctacgcaggcaacactgagccccagttcattattccttcatgtattgccatcagagagtcagcaaaggtagttgaccaagctcaaaggagagtgttgaggggagttgatgaccttgactttttcataggagatgaagccatcgataaacctacatatgctacaaagtggccgatacgacatggaatcattgaagactgggatcttatggaaaggttcatggagcaagtggtttttaaatatcttcgagctgaacctgaggaccattattttttaatgacagaacctccactcaatacaccagaaaacagagagtatcttgcagaaattatgtttgaatcatttaacgtaccaggactctacattgcagttcaggcagtgctggccttggcggcatcttggacatctcgacaagtgggtgaacgtacgttaacggggatagtcattgacagcggagatggagtcacccatgttatcccagtggcagaaggttatgtaattggaagctgcatcaaacacatcccgattgcaggtagagatattacgtatttcattcaacagctgctaagggagagggaggtgggaatccctcctgagcagtcactggagaccgcaaaagccattaaggagaaatactgttacatttgccccgatatagtcaaggaatttgccaagtatgatgtggatccccggaagtggatcaaacagtacacgggtatcaatgcgatcaaccagaagaagtttgttatagacgttggttacgaaagattcctgggacctgaaatattctttcacccggagtttgccaacccagactttatggagtccatctcagatgttgttgatgaagtaatacagaactgccccatcgatgtgcggcgcccgctgtataagcccgagttctttcaggtctgccacaccaagaaggactatgaagagtacgggcccagcatctgccgccacaaccccgtctttggagtcatgtcctagtgtctgcctgaacgcgtcgttcgatggtgtcacgttggggaacaagtgtccttcagaacccagagaaggccgccgttctgtaaatagcgacgtcggtgttgctgcccagcagcgtgcttgcattgccggtgcatgaggcgcggcgcgggcccttcagtaaaagccatttatccgtgtgccgaccgctgtctgccagcctcctccttctcccgccctcctcaccctcgctctccctcctcctcctcctccgagctgctagctgacaaatacaattctgaaggaatccaaatgtgactttgaaaattgttagagaaaacaacattagaaaatggcgcaaaatcgttaggtcccaggagagaatgtgggggcgcaaacccttttcctc

SEQ ID NO: 32644 - DNA, 1047 bp, Artificial Sequence
  derived and/or modified sequence
atggccggcagcctgcccccctgcgtggtggactgcggcaccggctataccaaactaggatacgccgggaacaccgagcctcagtttatcattccctcttgcatcgccattagggaatcagcaaaagtggtggatcaagcacagaggcgggtgcttcggggcgttgatgacttggacttctttattggcgacgaggctattgacaagcccacctacgccaccaaatggccaattcgccacggtattatcgaggactgggaccttatggagcggtttatggaacaagtcgtgtttaagtatctcagagctgaacccgaggaccattacttcttgatgaccgagcctcccctgaatactcccgaaaatcgagaatacctggccgaaatcatgtttgagagttttaacgtacccggcttgtacatcgctgtacaagccgtcctggcgctcgcagcaagctggaccagtaggcaggtgggagaaagaacattaactgggatcgtcattgactccggcgatggtgtaacacacgtaatcccagtcgctgaagggtacgtgatcgggtcatgcattaagcatatacccatagctggcagggacatcacctatttcatccagcagttgttgagagaacgagaggtagggatacccccagagcagtccctcgagacagctaaggcgatcaaggaaaagtattgttacatttgtcccgatatcgtgaaggaatttgccaagtatgacgtggatcctcggaagtggataaagcagtatacgggaatcaacgccattaaccagaagaaatttgtcatcgacgtgggatacgagaggttcctgggtccggaaatcttctttcaccccgagtttgctaaccccgatttcatggaaagtatatcggacgtggtagacgaagtaatccaaaactgcccgattgatgtgcggagacccctgtacaaacccgaattcttccaagtgtgtcataccaagaaggattacgaagaatatggcccgtctatttgtaggcataatcccgtctttggcgtcatgtcatag

SEQ ID NO: 32645 - DNA, 1047 bp, Artificial Sequence
  derived and/or modified sequence
atggcaggctctctgccaccgtgcgtggtagattgcggcacaggctacaccaaactaggttacgctggtaataccgaacctcaattcattatccctagttgcatcgccatacgggagtcagcgaaagtggtcgaccaggcccagcgcagggtactgagaggggtagatgatctagacttcttcattggagacgaggcgatcgacaaacctacgtatgctacaaaatggcccatcaggcacgggattatagaggactgggacctcatggaacggtttatggagcaggttgtctttaagtacctgcgcgctgaaccagaagaccactattttcttatgaccgaacctccccttaacacgcccgagaacagagaatatctggcggaaatcatgtttgaaagtttcaacgtacctggcctgtatatcgcggttcaagcagtgttggcactggcggctagctggacaagtaggcaagtgggggagcgcaccctcaccggtattgtcattgattccggggacggtgtgacccatgtgatcccagtagcggaggggtacgtcattgggtcctgtatcaagcatattcctattgcaggccgagatatcacttacttcatccagcagctgctgagagaaagagaggtgggcattccgccagagcaaagtctggaaacagctaaggccatcaaagaaaaatattgctacatctgtccggatatagttaaggaattcgccaaatatgacgtggaccctagaaagtggatcaaacagtacactgggattaatgccatcaatcagaagaagtttgtcatcgatgtgggttacgaacgcttcctgggacccgagatcttttttcaccctgaatttgccaaccctgactttatggagagcatctccgatgttgtggacgaggtgatacagaattgcccaatcgacgtgagacgccctttgtataagcccgagttctttcaagtttgccatactaagaaggattacgaggagtacggcccatctatctgccggcataatcctgtgtttggcgttatgtcatag

SEQ ID NO: 32646 - protein, 113 aa, Artificial Sequence
  derived and/or modified sequence
MDNVQPKIKHRPFCFSVKGHVKMLRLALTVTSMTFFIIAQAPEPYIVITGFEVTVILFFILLYVLRLDRLMKWLFWPLLDIINSLVTTVFMLIVSVLALIPETTTLTVGGGLF

SEQ ID NO: 32647 - DNA, 342 bp, Artificial Sequence
  derived and/or modified sequence
atggacaacgtacagccaaaaataaagcaccgaccattctgcttttccgtaaagggacacgtcaaaatgttgagattggctctgaccgtgacaagcatgactttttttatcatagcccaggcccctgagccttacattgtcattactggatttgaggtcactgtgatcctattctttattctgctctatgtgctgcggttggacaggctgatgaagtggctgttctggcccctcttagatatcatcaactcactggtgacaaccgtcttcatgctgatagtatccgtactggcccttataccagagactacaactctcacggttggaggtgggctattctag

SEQ ID NO: 32648 - DNA, 628 bp, Artificial Sequence
  derived and/or modified sequence
aagccgagctgggcgagaagtaggggagggcggtgctccgccgcggtggcggttgctatcgcttcgcagaacctactcaggcagccagctgagaagagttgagggaaagtgctgctgctgggtctgcagacgcgatggataacgtgcagccgaaaataaaacatcgccccttctgcttcagtgtgaaaggccacgtgaagatgctgcggctggcactaactgtgacatctatgaccttttttatcatcgcacaagcccctgaaccatatattgttatcactggatttgaagtcaccgttatcttatttttcatacttttatatgtactcagacttgatcgattaatgaagtggttattttggcctttgcttgatattatcaactcactggtaacaacagtattcatgctcatcgtatctgtgttggcactgataccagaaaccacaacattgacagttggtggagggttattttaactcagtataggagctagaggaagagatttccgaagtctgcaccccgcgcagagcactactgtaacttccaagggagcgctgggagcagcgggatcgggttttccggcacccgggcctgggtggcagggaagaatgtgccgggatccgcctca

SEQ ID NO: 32649 - DNA, 342 bp, Artificial Sequence
  derived and/or modified sequence
atggataatgtccaacctaaaattaaacatcgccccttctgtttcagtgtgaaaggtcacgtgaagatgctgcgactcgccttaaccgtaactagcatgacattttttatcattgcacaagcccccgagccatacattgtaatcactgggttcgaagttacagtgatcctcttctttatcctgctgtacgttctcagactggacagactcatgaagtggctgttctggcctctactcgacattattaacagtcttgtgaccaccgtattcatgctaatagttagcgtgctagccttaatccccgagactaccaccctcaccgttggtggcggcctgttctag

SEQ ID NO: 32650 - DNA, 342 bp, Artificial Sequence
  derived and/or modified sequence
atggataatgtccaacctaaaattaaacatcgccccttctgtttcagtgtgaaaggtcacgtgaagatgctgcgactcgccttaaccgtaactagcatgacattttttatcattgcacaagcccccgagccatacattgtaatcactgggttcgaagttacagtgatcctcttctttatcctgctgtacgttctcagactggacagactcatgaagtggctgttctggcctctactcgacattattaacagtcttgtgaccaccgtattcatgctaatagttagcgtgctagccttaatcccagaaacaacaactcttacagtcggcggcggactattttag

SEQ ID NO: 32651 - DNA, 342 bp, Artificial Sequence
  derived and/or modified sequence
atggacaacgtgcagcccaagatcaagcacagacccttctgcttcagcgtgaagggccacgtgaagatgctgagactggccctgaccgtgaccagcatgaccttcttcatcatcgcccaggcccccgagccctacatcgtgatcaccggcttcgaggtgaccgtgatcctgttcttcatcctgctgtacgtgctgagactggacagactgatgaagtggctgttctggcccctgctggacatcatcaacagcctggtgaccaccgtgttcatgctgatcgtgagcgtgctggccctgatccccgagaccaccaccctgaccgtgggcggcggcctgttctag

SEQ ID NO: 32652 - DNA, 342 bp, Artificial Sequence
  derived and/or modified sequence
atggataacgtccagcccaaaataaaacataggccattctgtttctcagtcaagggacacgtaaagatgctgcggctggcgctaaccgttactagcatgacttttttcattatcgcgcaagcacccgaaccctacattgtcattactggcttcgaggtgactgtgatcctcttttttatattactctacgtgctgaggctcgacaggctaatgaagtggttgttctggcccctgttggacatcatcaacagtttggtgacgacggtctttatgcttatcgtcagcgttctcgctctcatcccagaaacaacaacattgactgttgggggtgggctgttttag

SEQ ID NO: 32653 - DNA, 342 bp, Artificial Sequence
  derived and/or modified sequence
atggacaacgtgcagcccaagatcaagcaccggcccttctgcttctctgtgaagggccacgtgaagatgctgcggctggccctgactgtgacctccatgaccttcttcatcatcgcccaggcccctgagccctacatcgtcatcactggatttgaggtgaccgtcatcctcttcttcatcctgctgtatgtgctgcggctggaccggctgatgaagtggctgttctggcccctgctggacatcatcaacagcctggtgaccaccgtcttcatgctgattgtgtctgtgctggccctgatccctgagaccaccaccctgactgtgggcggcggcctcttctag

SEQ ID NO: 32654 - DNA, 342 bp, Artificial Sequence
  derived and/or modified sequence
atggacaacgtgcagcccaagatcaagcaccggcccttctgcttcagcgtcaaggggcacgtgaagatgctcagactggccctgaccgtaacgagtatgactttcttcatcatagcccaggcccctgaaccttacattgtcattaccggctttgaggtaactgtgattctgtttttcattctattgtacgtcttaaggctggaccgccttatgaagtggctattctggcctctcctggatattataaatagtctggttactacagtctttatgctcattgtgtctgtactggcactgattcccgagaccactacactaacggttggtggtggcctattttag

SEQ ID NO: 32655 - RNA, 342 nt, Artificial Sequence
  derived and/or modified sequence
auggauaauguccaaccuaaaauuaaacaucgccccuucuguuucagugugaaaggucacgugaagaugcugcgacucgccuuaaccguaacuagcaugacauuuuuuaucauugcacaagcccccgagccauacauuguaaucacuggguucgaaguuacagugauccucuucuuuauccugcuguacguucucagacuggacagacucaugaaguggcuguucuggccucuacucgacauuauuaacagucuugugaccaccguauucaugcuaauaguuagcgugcuagccuuaauccccgagacuaccacccucaccguugguggcggccuguucuag

SEQ ID NO: 32656 - RNA, 342 nt, Artificial Sequence
  derived and/or modified sequence
auggauaauguccaaccuaaaauuaaacaucgccccuucuguuucagugugaaaggucacgugaagaugcugcgacucgccuuaaccguaacuagcaugacauuuuuuaucauugcacaagcccccgagccauacauuguaaucacuggguucgaaguuacagugauccucuucuuuauccugcuguacguucucagacuggacagacucaugaaguggcuguucuggccucuacucgacauuauuaacagucuugugaccaccguauucaugcuaauaguuagcgugcuagccuuaaucccagaaacaacaacucuuacagucggcggcggacuauuuuag

SEQ ID NO: 32657 - protein, 325 aa, Artificial Sequence
  derived and/or modified sequence
MTERRRDELSEEINNLREKVMKQSEENNNLQSQVQKLTEENTTLREQVEPTPEDEDDDIELRGAAAAAAPPPPIEEECPEDLPEKFDGNPDMLAPFMAQCQIFMEKSTRDFSVDRVRVCFVTSMMTGRAARWASAKLERSHYLMHNYPAFMMEMKHVFEDPQRREVAKRKIRRLRQGMGSVIDYSNAFQMIAQDLDWNEPALIDQYHEGLSDHIQEELSHLEVAKSLSALIGQCIHIERRLARAAAARKPRSPPRALVLPHIASHHQVDPTEPVGGARMRLTQEEKERRRKLNLCLYCGTGGHYADNCPAKASKSSPAGNSPAPL

SEQ ID NO: 32658 - DNA, 978 bp, Artificial Sequence
  derived and/or modified sequence
atgacggaacgaagacgtgacgagctctctgaggaaatcaacaacctgcgggagaaagtgatgaaacaatcagaggaaaacaacaatctccagtcacaggtccaaaagctaacagaggagaacactacccttagggaacaggtggagccaacacctgaagatgaggatgatgatatagagcttcgtggagccgcagcagccgctgcgcccccccctcctatcgaggaagaatgtcctgaggaccttcccgagaaatttgacggaaatcccgatatgcttgccccattcatggctcaatgtcagattttcatggagaagagtacgcgggacttctccgtcgacagagttagagtgtgtttcgtgacttccatgatgactggacgggccgctagatgggcatctgcaaagctagaacgcagtcattacctcatgcacaattatccggcgtttatgatggagatgaaacacgtatttgaggatccacagaggcgagaggtggctaaacgcaaaatcagaagactgcgccaaggcatgggctcagttattgattacagcaatgcctttcagatgatagctcaggacctggattggaatgaacccgccttaatagatcaataccacgaggggctgtcagaccatatccaggaagaattgtctcatctcgaagtggctaaatcactctcggccctcatcgggcagtgcatccatatagaaagacggctcgcgagggctgccgcagccagaaagccgaggagtccacctcgtgccctggtgctgccccacatagcttcacaccatcaggtggatccaactgaacccgttggtggcgcacggatgcggctgacccaggaagaaaaggagaggcggcggaaactgaatctgtgtctctattgtggaaccggcgggcattacgccgataattgtccagcaaaagcatccaaatctagtccagctggcaactcacccgctcctctttag

SEQ ID NO: 32659 - DNA, 978 bp, Artificial Sequence
  derived and/or modified sequence
atgaccgaaaggagacgtgacgagctgagtgaggagattaataaccttagggagaaagtaatgaagcagtccgaagagaacaataacttgcagtcccaggtgcaaaaactcactgaggaaaacaccacgctccgcgaacaggtggagcctaccccagaggatgaggacgatgatattgaactgaggggggctgccgctgccgccgccccccctcccccaatagaagaagaatgtcctgaagatctcccagagaaattcgatggaaatccagacatgctggcaccatttatggctcagtgtcagatctttatggagaaatcgaccagagacttcagtgttgatcgggtcagggtttgtttcgtgacttcaatgatgacagggcgtgctgcccgttgggcatctgcaaaactagagaggtctcactatctgatgcataattatcctgcctttatgatggagatgaaacatgtgtttgaagatcctcaacgaagagaagttgctaagcgcaagattaggcggctgagacaagggatgggttcagtgatagattatagtaatgccttccagatgatcgctcaggatttggactggaacgaacccgcactgatcgaccagtatcatgaggggctgagcgaccacatccaggaggagctaagtcaccttgaggtcgccaaatcattatcggcgcttattgggcagtgcattcacattgagagacggctggcacgggccgccgcggcaagaaaaccccggtctcccccaagagcactggtgcttcctcatattgcctcacaccaccaggttgacccaaccgagcccgtgggcggggcgagaatgcgcctcactcaagaggagaaggaacggcggagaaagcttaacctgtgcttgtactgcgggacgggcggtcactatgcagataattgccctgctaaagcgagcaaatcaagtcctgcaggtaacagccccgctccattgtag

SEQ ID NO: 32660 - DNA, 978 bp, Artificial Sequence
  derived and/or modified sequence
atgacagagaggagaagagatgagctgtctgaggagatcaacaacctgcgggagaaggtgatgaagcagagcgaggagaacaacaacctgcagagccaggtgcagaagctgacagaggagaacaccaccctgcgggagcaggtggagcccaccccagaagatgaagatgatgacatcgagctgcggggagctgctgctgctgctgcccctcctccacccatcgaggaggagtgcccagaggacctgcctgagaagtttgatggcaacccagacatgctggcccccttcatggcccagtgccagatcttcatggagaagagcacccgggacttctctgtggacagagtgcgggtgtgctttgtgacctccatgatgacaggccgggccgcccgctgggccagcgccaagctggagaggagccactacctgatgcacaactacccagccttcatgatggagatgaagcacgtgtttgaggacccccagaggcgggaggtggccaagaggaagatccggcggctgcggcagggcatgggcagcgtcatcgactacagcaatgccttccagatgattgcccaggacctggactggaatgagcccgccctgattgaccagtaccacgagggcctgagtgaccacatccaggaggagctgagccacctggaggtggccaagagcctgagcgccctgattggccagtgcatccacattgaaagaaggctggcccgggctgctgctgccaggaagcccaggagccccccccgggccctggtgctgccccacatcgccagccaccaccaggtggaccccacagagcctgtgggcggggccaggatgaggctgacccaggaggagaaggagaggaggaggaagctgaacctgtgcctgtactgcggcaccggcggccactatgctgacaactgcccagccaaggccagcaagagcagccctgctggcaacagccctgcccccctgtag

SEQ ID NO: 32661 - DNA, 978 bp, Artificial Sequence
  derived and/or modified sequence
atgaccgagcggcggcgggacgagctgagcgaggagatcaacaacctgagagaaaaagtgatgaagcagtcggaggaaaataacaatctgcagagccaggtgcagaagcttacagaagaaaatacaactcttcgagaacaggtggagcccacaccagaggacgaggatgatgatatcgagctccgcggcgcagccgccgcggccgctccgcccccacctattgaggaagagtgccccgaggacctcccagagaagttcgacggtaatcctgacatgttagctccattcatggcccagtgtcagatctttatggagaagagcactagagatttcagcgtggacagggtcagggtctgtttcgtcactagcatgatgacaggtcgcgccgctcgatgggcctccgcaaagttagagagatcgcactatctcatgcacaactacccagcatttatgatggagatgaaacacgtcttcgaagacccccagcgccgggaggtggccaaacggaagatccgtcgccttcgccagggcatggggtctgtgattgactatagcaatgcttttcagatgattgcgcaggatctggactggaacgagccggccttaattgatcagtatcacgaaggactaagcgaccatattcaggaagagctttcacacctggaggtggctaagagccttagcgccctgatcggtcaatgcatccacatcgaacggaggctagctcgggctgctgccgcccgtaaacctaggtccccacctagggccctggtattgccccatattgcatctcatcaccaagtggaccccacagagccagtgggcggcgcgcggatgcggttaactcaggaagagaaggagcgtcgccgaaagcttaatctgtgtctgtactgtggaactggtgggcattacgctgataactgccccgccaaagcatccaagtctagtccagccgggaattcccctgcccccctgtag

SEQ ID NO: 32662 - DNA, 978 bp, Artificial Sequence
  derived and/or modified sequence
atgaccgagcggcggcgggacgagctgagcgaggagatcaacaacctgcgagaaaaagtgatgaagcagtctgaggagaacaataatttgcagagccaggtgcaaaaactgactgaggagaacacaactctgcgtgagcaagtggaaccgactcccgaggacgaggacgacgatatcgaactgcgtggggccgccgccgcggcggcacctcccccaccaattgaggaggaatgcccggaagatcttcctgagaagtttgacgggaatcccgatatgctggctccttttatggcacagtgtcagatattcatggaaaaatccacacgcgacttttccgtggaccgcgtgcgggtgtgtttcgttacatcgatgatgacagggcgcgctgcccggtgggcttccgctaaactggagaggtcccactacctgatgcacaattatcctgctttcatgatggagatgaaacacgtcttcgaagatccgcagagacgcgaagtcgccaaacgcaagatccgtagattaaggcaggggatggggagtgtcattgactactccaacgccttccagatgatcgcacaggacctggactggaatgagcctgccctcatcgaccagtaccatgaaggactctctgatcacattcaagaggagcttagccacctggaggttgcaaaaagtctctctgccctgatcgggcaatgcattcatatcgaacgccgccttgcccgcgctgccgccgcaagaaagccccggagcccgcctagggcgctggtactgccccacattgcctctcaccatcaggtcgatcccaccgagcccgtggggggagcacgaatgagactgacacaggaggaaaaggaaaggaggcgaaagctgaatctgtgcctgtactgtggaaccggcggacactacgcggacaattgcccagctaaagcctctaagtcatcccccgccggcaattccccggctccgttatag

SEQ ID NO: 32663 - DNA, 978 bp, Artificial Sequence
  derived and/or modified sequence
atgacagaacggagaagagacgaactcagtgaagaaattaacaatcttagggaaaaagtgatgaagcagagtgaagagaacaataatttgcagtctcaagtgcagaaattgacggaagaaaatactaccttgcgggaacaggtggagccaacacccgaagatgaggacgatgacatagagttgcgaggcgcagctgccgcagccgcaccccctcccccaatcgaggaggaatgtccagaagatctgccagagaagttcgatggcaaccctgacatgcttgcaccatttatggcacagtgccagatttttatggagaaaagcacacgagatttttccgttgacagagtgcgggtgtgctttgtgacctctatgatgacagggcgtgccgctcgctgggcatcggccaaactcgaaagaagccattaccttatgcacaattaccctgcatttatgatggaaatgaagcacgttttcgaggacccccagaggcgggaggtcgctaagagaaaaattcgtaggctgcggcagggtatgggctctgtgatcgactatagcaacgctttccagatgatcgcccaagacctggattggaatgaaccggcattgattgatcagtatcacgagggcctgtccgatcacatccaagaagagctttctcatctggaagtcgctaagtcactatctgcattgataggccagtgtatccacattgagaggagactcgccagagccgcagccgctaggaaacccagatctcctcccagagccctggtgctcccgcacatagccagccatcaccaagtcgaccctacggaaccagtgggaggagccaggatgaggctgactcaagaagaaaaagaaaggcggaggaagctaaacctctgcctctattgcggcacgggcggacattacgcagataactgtcccgcaaaggcctccaaatcctctccagcagggaactctccggctccactctag

SEQ ID NO: 32664 - DNA, 978 bp, Artificial Sequence
  derived and/or modified sequence
atgactgagaggcgacgggacgagctgtccgaggaaataaacaatctccgtgaaaaagtgatgaaacaatccgaagaaaataataatctgcagtcacaggtgcagaaattaacggaagaaaacacgacactcagggagcaggtcgagcccacacctgaagatgaagacgatgatattgaattacgcggtgcagcagcagccgcagcccctcctcccccaatcgaagaggaatgccctgaggatctgcccgagaagtttgacggtaatccagatatgctcgcacctttcatggctcagtgtcaaatcttcatggagaaatcaacccgtgacttctctgtggaccgtgtccgggtttgtttcgtaacctccatgatgacagggcgagctgcacgttgggcctcagccaagctggaacggtcacactacttaatgcacaattacccagcgtttatgatggagatgaaacatgtctttgaggaccctcagaggagggaagtggccaaacggaaaattaggcgcctgaggcaggggatgggaagtgtaatcgactacagcaatgcctttcaaatgatcgctcaggacctcgattggaatgaacctgcccttatcgaccagtatcacgaagggctctctgatcacatccaggaggagctgtctcacctggaagttgctaaatccctgagtgccctgattggccagtgtatacatattgaaaggagactggctcgtgcagccgctgcccgtaaaccaagaagccctcccagggctttagtgctcccacacattgcatcccaccaccaagtggatcccacagagcccgtaggtggagcaaggatgcgacttacccaggaagagaaagagagaagaagaaaacttaatttgtgcttgtactgtggtactggcggacactacgctgacaattgtcctgctaaagcgtccaaatcaagcccagcaggaaacagtcctgcccctctgtag

SEQ ID NO: 32665 - DNA, 978 bp, Artificial Sequence
  derived and/or modified sequence
atgaccgagagaagaagagacgagctgagcgaggagatcaacaacctgagagagaaggtgatgaagcagagcgaggagaacaacaacctgcagagccaggtgcagaagctgaccgaggagaacaccaccctgagagagcaggtggagcccacccccgaggacgaggacgacgacatcgagctgagaggcgccgccgccgccgccgccccccccccccccatcgaggaggagtgccccgaggacctgcccgagaagttcgacggcaaccccgacatgctggcccccttcatggcccagtgccagatcttcatggagaagagcaccagagacttcagcgtggacagagtgagagtgtgcttcgtgaccagcatgatgaccggcagagccgccagatgggccagcgccaagctggagagaagccactacctgatgcacaactaccccgccttcatgatggagatgaagcacgtgttcgaggacccccagagaagagaggtggccaagagaaagatcagaagactgagacagggcatgggcagcgtgatcgactacagcaacgccttccagatgatcgcccaggacctggactggaacgagcccgccctgatcgaccagtaccacgagggcctgagcgaccacatccaggaggagctgagccacctggaggtggccaagagcctgagcgccctgatcggccagtgcatccacatcgagagaagactggccagagccgccgccgccagaaagcccagaagcccccccagagccctggtgctgccccacatcgccagccaccaccaggtggaccccaccgagcccgtgggcggcgccagaatgagactgacccaggaggagaaggagagaagaagaaagctgaacctgtgcctgtactgcggcaccggcggccactacgccgacaactgccccgccaaggccagcaagagcagccccgccggcaacagccccgcccccctgtag

SEQ ID NO: 32666 - protein, 433 aa, Artificial Sequence
  derived and/or modified sequence
MLKVSAVLCVCAAAWCSQSLAAAAAVAAAGGRSDGGNFLDDKQWLTTISQYDKEVGQWNKFRDDDYFRTWSPGKPFDQALDPAKDPCLKMKCSRHKVCIAQDSQTAVCISHRRLTHRMKEAGVDHRQWRGPILSTCKQCPVVYPSPVCGSDGHTYSFQCKLEYQACVLGKQISVKCEGHCPCPSDKPTSTSRNVKRACSDLEFREVANRLRDWFKALHESGSQNKKTKTLLRPERSRFDTSILPICKDSLGWMFNRLDTNYDLLLDQSELRSIYLDKNEQCTKAFFNSCDTYKDSLISNNEWCYCFQRQQDPPCQTELSNIQKRQGVKKLLGQYIPLCDEDGYYKPTQCHGSVGQCWCVDRYGNEVMGSRINGVADCAIDFEISGDFASGDFHEWTDDEDDEDDIMNDEDEIEDDDEDEGDDDDGGDDHDVYI

SEQ ID NO: 32667 - DNA, 1302 bp, Artificial Sequence
  derived and/or modified sequence
atgctgaaggtgagcgccgtgctgtgcgtgtgcgccgccgcctggtgcagccagagcctggccgccgccgccgccgtggccgccgccggcggcagaagcgacggcggcaacttcctggacgacaagcagtggctgaccaccatcagccagtacgacaaggaggtgggccagtggaacaagttcagagacgacgactacttcagaacctggagccccggcaagcccttcgaccaggccctggaccccgccaaggacccctgcctgaagatgaagtgcagcagacacaaggtgtgcatcgcccaggacagccagaccgccgtgtgcatcagccacagaagactgacccacagaatgaaggaggccggcgtggaccacagacagtggagaggccccatcctgagcacctgcaagcagtgccccgtggtgtaccccagccccgtgtgcggcagcgacggccacacctacagcttccagtgcaagctggagtaccaggcctgcgtgctgggcaagcagatcagcgtgaagtgcgagggccactgcccctgccccagcgacaagcccaccagcaccagcagaaacgtgaagagagcctgcagcgacctggagttcagagaggtggccaacagactgagagactggttcaaggccctgcacgagagcggcagccagaacaagaagaccaagaccctgctgagacccgagagaagcagattcgacaccagcatcctgcccatctgcaaggacagcctgggctggatgttcaacagactggacaccaactacgacctgctgctggaccagagcgagctgagaagcatctacctggacaagaacgagcagtgcaccaaggccttcttcaacagctgcgacacctacaaggacagcctgatcagcaacaacgagtggtgctactgcttccagagacagcaggaccccccctgccagaccgagctgagcaacatccagaagagacagggcgtgaagaagctgctgggccagtacatccccctgtgcgacgaggacggctactacaagcccacccagtgccacggcagcgtgggccagtgctggtgcgtggacagatacggcaacgaggtgatgggcagcagaatcaacggcgtggccgactgcgccatcgacttcgagatcagcggcgacttcgccagcggcgacttccacgagtggaccgacgacgaggacgacgaggacgacatcatgaacgacgaggacgagatcgaggacgacgacgaggacgagggcgacgacgacgacggcggcgacgaccacgacgtgtacatctag

SEQ ID NO: 32668 - DNA, 1302 bp, Artificial Sequence
  derived and/or modified sequence
atgctgaaggtgtcagccgtattgtgtgtctgtgctgcagcctggtgctcacagagcctggcagccgccgccgctgtcgccgctgccggtggaagaagcgatggcggaaatttcctcgacgacaagcagtggctgactacgattagtcagtacgacaaagaggtgggacagtggaacaagtttagagacgacgattattttaggacgtggtcccctggcaaacccttcgaccaggctctcgacccagctaaggacccctgcttaaagatgaagtgctcacgccataaagtgtgtatcgctcaggactctcagaccgccgtgtgcattagtcacagacgcctgacccatcgcatgaaggaagccggtgtagaccaccggcaatggcgaggacccattctatccacttgtaagcagtgcccagtggtttatccatctcctgtgtgcggaagtgacgggcacacatactcgttccagtgtaaactcgaataccaggcttgcgtattgggcaaacagatttctgttaagtgtgaagggcattgcccttgtccgtctgacaagccaacaagtacttctcgaaacgtcaaacgggcctgtagcgacctggaatttcgcgaggttgcaaacaggctgagagactggttcaaggccctgcacgaaagtggatctcaaaacaagaagacgaagacccttcttcgtccagagaggagccggtttgacacatcaattttgccaatctgcaaggactcactgggctggatgtttaacaggctggatacaaactacgacctgctgctcgatcaaagtgagctgagaagtatttatttagacaagaacgagcagtgcaccaaggcttttttcaacagctgtgacacttataaggactctttaattagcaacaatgagtggtgctactgtttccaacgccaacaggatcctccatgccagacagaattaagtaatatccagaagagacagggagttaagaagcttctgggccagtatatcccactttgtgatgaagatgggtattacaaaccgactcagtgtcacggttccgttggccagtgctggtgcgtggaccgttacggaaatgaagttatggggtcacgtatcaacggggtggccgactgtgcaatcgactttgagatttccggcgatttcgcttcaggcgactttcacgaatggacggatgatgaggatgacgaggacgatattatgaacgacgaggatgagatcgaggatgatgacgaagacgagggagatgatgacgatggaggcgacgatcacgacgtctatatctag

SEQ ID NO: 32669 - DNA, 1302 bp, Artificial Sequence
  derived and/or modified sequence
atgctcaaagtgtctgctgtgctgtgcgtttgtgccgccgcatggtgcagccagtctctggcagcagccgctgccgtggctgccgccggcggccgctccgacgggggcaacttcctcgatgacaagcaatggctgacgacaatttcccagtatgacaaagaggtcgggcagtggaacaaatttagagacgacgactactttaggacttggtccccagggaagcccttcgaccaagctcttgaccctgccaaggatccttgcttgaaaatgaagtgttctcggcacaaagtgtgcatcgcgcaggatagtcagacagcagtctgtatttcccatcggagacttacacatcgtatgaaggaagccggagtcgatcatagacagtggcggggacctatcctgtctacgtgcaagcagtgtccagttgtgtaccccagcccagtatgcggcagtgacggtcatacctacagtttccagtgcaagctcgaataccaggcgtgcgtcctgggcaagcaaattagcgtgaagtgcgaagggcactgtccttgtccaagcgataagccgacaagcacttctcgtaacgtgaaacgcgcctgtagcgaccttgaattccgcgaggtggctaataggcttcgggactggtttaaagccctccatgagagcgggtcccagaacaagaaaaccaaaactctgctccggcccgaacgttcccggtttgacacttcaatcctgcctatctgtaaggatagcttgggatggatgttcaaccgactcgacacaaactatgatctgctcctggatcagtcggaactccggtccatctaccttgacaaaaatgagcagtgtaccaaagcttttttcaattcttgtgatacttataaagattccttgatatccaacaacgaatggtgctattgcttccaaagacaacaagaccccccgtgtcagacagagctatcaaatatccagaagcgacaaggcgtcaagaagcttctggggcaatatattccgttgtgcgacgaagacggatactataagccaacccagtgtcacgggtcagtgggccagtgctggtgcgtcgatcgatatggcaacgaagtgatgggatctcggattaacggggttgctgactgcgcaattgacttcgaaattagcggcgacttcgcttctggggacttccacgagtggacggacgatgaagacgatgaggacgacattatgaacgacgaggatgagatcgaggacgacgatgaggacgagggtgacgatgacgatgggggtgatgaccacgatgtttacatttag

SEQ ID NO: 32670 - DNA, 1302 bp, Artificial Sequence
  derived and/or modified sequence
atgctgaaggtgtccgcagtgctctgtgtgtgcgctgcagcttggtgttcacagtcattggcagctgcagcagccgtggctgccgccggtgggaggtcggatggggggaatttccttgacgacaaacaatggctcaccaccatctcccagtatgataaagaagtcggacagtggaacaagttcagagacgatgattattttagaacatggagtccaggtaagccatttgatcaagccctggacccggcaaaagatccttgcctcaagatgaagtgcagccgtcacaaggtgtgcattgcgcaggatagccagacagcggtctgtattagccaccggcgtttaacgcatcgtatgaaagaggctggggtggaccacaggcagtggaggggtcccattctatccacatgcaagcaatgtcccgttgtttacccctcacctgtttgtggtagtgacggacacacctactctttccaatgtaagttagaataccaggcttgcgttctgggtaaacagatctcagtcaaatgcgaaggtcattgtccgtgcccttcagataaacctacgagtacctctagaaatgtgaagagggcctgctccgaccttgagtttcgagaggtcgccaaccgccttagagactggtttaaggctctacacgagtcgggcagccagaacaaaaaaacaaagaccctgcttcggcccgagagaagccggttcgatacgtcaatcctgccgatctgtaaagattcacttggctggatgtttaatcggctggatactaactacgacttgttgctggaccaatcggagttaagatccatctatttagacaaaaatgaacagtgtacaaaggctttctttaactcgtgtgacacatataaggactcactcatttcaaacaatgaatggtgctactgctttcagcgccagcaggacccgccttgtcaaacagagctttccaacatccagaaaaggcagggcgtgaagaagttgctgggtcagtatattcctctttgcgacgaagatggctactacaagccgactcaatgtcatggatccgtggggcagtgctggtgcgtggaccgatacggcaatgaggtgatgggttcccggattaacggggttgcagattgcgccatcgatttcgaaatttccggcgatttcgcgagcggtgattttcacgagtggaccgatgacgaggacgatgaggacgatatcatgaacgacgaggacgagattgaagatgacgacgaagacgagggcgacgacgacgacggcggagatgatcacgacgtctacatttag

SEQ ID NO: 32671 - DNA, 1302 bp, Artificial Sequence
  derived and/or modified sequence
atgctgaaggtgtctgctgtgctgtgtgtgtgtgccgccgcctggtgcagccagagcctggccgctgctgctgctgtggccgctgctgggggccgcagtgatggcggcaacttcctggatgacaagcagtggctgaccaccatcagccagtatgacaaggaggtgggccagtggaacaagttcagagatgatgactacttccgcacctggagccctgggaagccctttgaccaggccctggaccctgccaaggacccctgcctgaagatgaagtgcagccgccacaaggtgtgcatcgcccaggacagccagacagctgtgtgcatcagccaccggcggctgacccacaggatgaaggaggccggcgtggaccaccggcagtggaggggccccatcctgagcacctgcaagcagtgccctgtggtgtaccccagccctgtgtgtggcagtgatggccacacctacagcttccagtgcaagctggagtaccaggcctgtgtgctgggcaagcagatctctgtgaagtgtgagggccactgcccctgccccagcgacaagcccaccagcaccagcagaaatgtgaagagggcctgcagcgacctggagttccgggaggtggccaaccggctgcgggactggttcaaggccctgcacgagagcggcagccagaacaagaagaccaagaccctgctgcggcctgagaggagcagatttgacaccagcatcctgcccatctgcaaggacagcctgggctggatgttcaaccggctggacaccaactatgacctgctgctggaccagagcgagctgcggagcatctacctggacaagaatgagcagtgcaccaaggccttcttcaacagctgtgacacctacaaggacagcctcatcagcaacaatgagtggtgctactgcttccagaggcagcaggaccccccctgccagacagagctgagcaacatccagaagaggcagggcgtgaagaagctgctgggccagtacatccccctgtgtgatgaagatggctactacaagcccacccagtgccacggctctgtgggccagtgctggtgtgtggacagatatggaaatgaggtgatgggcagccgcatcaacggggtggccgactgtgccatcgactttgagatcagcggggactttgccagcggggacttccacgagtggacagatgatgaagatgatgaagatgacatcatgaatgatgaagatgaaattgaagatgatgatgaagatgaaggagatgatgatgatggaggagatgaccatgatgtgtacatctag

SEQ ID NO: 32672 - DNA, 1302 bp, Artificial Sequence
  derived and/or modified sequence
atgctgaaggtgagcgccgtgctgtgcgtgtgcgccgccgcctggtgcagtcagagcctcgctgctgccgcagcagttgctgccgccggtggccgaagtgatgggggcaatttcctggacgacaagcaatggcttactacgatcagccagtacgacaaggaagtgggccagtggaacaagtttagggacgacgactacttccggacttggtcccccggcaagccgttcgaccaggcacttgatcccgctaaggatccgtgccttaaaatgaagtgttcacgacacaaggtctgtatcgctcaggacagccaaactgccgtctgtatctcccacaggaggcttacacaccgcatgaaagaggcaggggtcgaccacaggcaatggaggggcccaattctgagcacttgcaaacagtgccctgttgtctacccgtcccccgtctgcggctccgacgggcatacgtattcctttcagtgcaaattagaatatcaggcgtgtgtgttgggcaaacagatttcggttaaatgcgaaggccactgcccttgcccatctgataaaccaacctctactagccgtaacgtgaaaagggcctgctcagacctggagttccgggaggtcgcaaacaggctgcgggattggttcaaggccttacatgaatctggatctcagaacaaaaaaaccaagaccctcttgcgcccagaacggtctcggtttgacacatcaatcctgcccatctgcaaggactctcttggttggatgttcaatcgtcttgacaccaactacgacttacttctggaccagagtgaactgcgaagtatctacctcgataaaaatgagcagtgcaccaaagccttcttcaactcttgtgacacatacaaggacagtcttatctccaacaacgagtggtgctactgtttccagaggcagcaggatccgccctgccagactgagctgtcaaacatccagaagcgacaaggggtcaagaaactgctgggccagtacatacccctctgtgacgaagatggttactataaaccaacacagtgccacggttctgtcggtcagtgttggtgtgtggaccgctatggcaatgaagtgatgggcagcagaatcaacggtgtcgccgactgcgcaattgattttgagatcagcggggattttgcttccggagattttcatgaatggacggacgacgaagatgatgaagatgacatcatgaacgatgaggacgagatcgaggacgatgacgaagatgaaggcgacgacgatgacggtggcgacgaccacgatgtgtacatctag

SEQ ID NO: 32673 - DNA, 1302 bp, Artificial Sequence
  derived and/or modified sequence
atgctgaaggtgagcgccgtgctgtgcgtgtgcgccgccgcctggtgtagccaaagcctcgcggctgccgccgcagtagccgccgctgggggacgttccgatggtggcaactttctcgatgacaagcagtggcttactacaattagtcagtatgataaggaagtcgggcagtggaataagttccgtgatgacgactacttcaggacttggagcccagggaagcctttcgatcaagccctggatccggctaaggacccctgcctcaaaatgaagtgctctcgacataaggtgtgcatcgctcaagattcccagaccgcggtatgtatatcacaccgtcggctgacccacaggatgaaagaggccggtgtggatcacaggcagtggcgggggccgatcttatcaacctgcaaacagtgccctgtcgtgtatccttccccggtgtgtggatcagatggccatacttatagcttccagtgcaaactggaatatcaggcatgcgtactgggcaaacagatctccgtcaagtgcgagggacactgcccatgtcccagcgataagcccacaagtactagcaggaacgtaaagcgtgcgtgctctgatttggagttccgggaagtcgccaatagactgcgggactggttcaaagccttacacgaatccggctcccagaacaagaagaccaagaccctattgaggcccgagagatcccgtttcgacactagtattctgccgatttgtaaagatagcctagggtggatgttcaaccggctggatacgaattatgatctgctgctcgaccagagcgaacttcgatcgatctacctggataaaaatgaacagtgcaccaaggcattctttaactcgtgtgatacctacaaggattctctcatcagcaacaatgaatggtgctattgtttccagaggcaacaggatcctccttgccaaaccgagctctctaatatacagaaacgacagggtgtgaagaagctgttgggtcaatatattcccctctgcgatgaggacggctattacaaaccgacacagtgtcacggctccgtcggccagtgttggtgcgtcgaccgctacgggaatgaggtcatgggcagcagaattaatggcgtggccgactgtgccattgacttcgaaattagcggggactttgccagcggcgattttcacgagtggacagatgatgaggatgacgaagatgacattatgaacgatgaggatgaaatcgaggacgatgacgaagacgagggtgacgacgatgacggcggggatgatcatgatgtttacatttag

SEQ ID NO: 32674 - DNA, 1302 bp, Artificial Sequence
  derived and/or modified sequence
atgctgaaggtgagcgccgtgctgtgcgtgtgcgccgccgcctggtgttcccagtccctcgcagcagccgctgcagtcgccgcggccgggggtagaagtgacggtggaaattttcttgacgacaaacagtggctgacgacaatcagccagtacgataaggaggtgggacagtggaacaaatttcgcgacgatgattactttaggacgtggagtcctggcaagcctttcgaccaggccttagatcccgccaaggacccctgcctcaagatgaagtgttccagacacaaggtatgcatagcccaagacagccagaccgccgtttgtatctcccacagacgcctaacccatcgcatgaaggaggccggcgtggaccaccggcagtggagaggcccgattttatccacctgtaagcagtgtcccgtggtatatccatcccctgtctgcgggagcgacggccacacctattcctttcagtgcaagttggaataccaggcttgcgtcttaggaaaacagatcagcgtgaagtgtgaaggtcactgtccctgtcccagtgataaacctacgtcaacaagcaggaacgtaaaacgagcttgttctgatttagaatttcgagaggttgccaaccggcttagggattggtttaaggcgctgcacgaatccggtagtcagaacaagaaaactaaaacactgctgagacctgaacgttctaggttcgatacatctattctgccaatctgcaaggattccttaggctggatgtttaaccgcctggatacaaattatgatttgctcctcgaccagtcagagttaagatctatctacctagataagaacgagcagtgtaccaaagcgttttttaattcttgcgacacatacaaagacagccttatctccaacaacgagtggtgctattgtttccagcggcaacaagaccccccttgtcaaactgaactctctaacatccaaaagcgccagggggtgaaaaaacttctgggacagtacatcccactgtgtgacgaggatggctattataaacccacccagtgtcacggttctgttgggcagtgttggtgtgtcgatcgatacgggaatgaggtgatgggcagtcgcattaacggcgtggctgactgcgccatcgattttgagatctctggcgatttcgcttcaggcgactttcacgagtggactgatgacgaggacgacgaggacgatatcatgaatgacgaggatgagattgaggacgacgatgaggatgaaggcgatgacgatgatggtggcgacgatcacgatgtatatatatag

SEQ ID NO: 32675 - DNA, 1302 bp, Artificial Sequence
  derived and/or modified sequence
atgctgaaggtctctgccgtcctgtgtgtgtgtgcggcagcctggtgcagccagtctctggctgccgcagcagccgtggcggctgcaggtgggagatccgatggaggtaacttcctggatgataaacaatggctgacaactattagccaatatgataaagaggtcgggcagtggaataaatttagagatgacgattactttcggacatggagccctggtaaaccgtttgaccaggccctggacccagctaaagacccctgtttgaaaatgaaatgctccaggcataaggtttgtatcgctcaggactctcagacagccgtgtgtataagccaccggagacttacacacaggatgaaggaagcaggcgtcgatcacagacagtggagaggcccaatattaagcacctgcaaacagtgcccagtggtctatcctagccccgtctgtggctctgatggacacacttactccttccagtgcaagctggaataccaagcttgcgtcttaggtaagcagatctccgtgaagtgtgaggggcattgcccctgccccagtgataaaccgacctcaacttcaagaaacgtgaagcgcgcatgctccgacctagagttcagagaggttgcaaataggttgagagattggtttaaagcactccacgaatctggttctcagaacaaaaagaccaagacccttctcaggcctgagcgctcaaggttcgacacctcaatcctccctatttgcaaagactcgcttggctggatgttcaacagacttgacaccaattacgatttactactggatcagtctgaacttaggagtatttatctcgataagaatgaacaatgcactaaggcattctttaatagctgtgacacctataaagattccctcatttccaataacgaatggtgctactgctttcagagacaacaagatcctccatgtcagactgaactgtcaaatatccaaaagagacaaggggtgaaaaagctgcttggtcagtacattcccctgtgtgatgaagatggctactacaaacctacgcagtgtcatggctctgtcggacagtgttggtgtgtggatagatatggaaacgaggtgatgggatccagaatcaacggcgttgctgattgtgctatagactttgaaatctccggcgactttgcatccggtgatttccatgagtggacggatgatgaagatgacgaagacgacattatgaacgacgaggatgagattgaggacgacgatgaagatgaaggtgacgacgatgatggcggagacgatcatgatgtgtatatctag

SEQ ID NO: 32676 - DNA, 1302 bp, Artificial Sequence
  derived and/or modified sequence
atgctcaaagtctccgcagtgctgtgtgtgtgtgctgccgcttggtgctcacagtctctggctgccgcagcggcagtggctgcagcaggtggtcggagtgacggcggaaactttctggatgataaacaatggctaacaaccattagccagtacgacaaggaagtgggccagtggaataagttccgggacgatgattatttccggacctggagcccagggaagcctttcgaccaggcgctggatcctgcgaaggatccttgcttaaagatgaagtgttcacggcacaaggtgtgcatcgcccaggacagtcagaccgccgtttgcattagccatcggaggctcactcatcgcatgaaggaggccggtgtcgaccatagacagtggcgcggaccaatactcagtacatgcaaacagtgcccagtcgtatacccttcgccagtctgcggatcggatggtcacacctactcctttcagtgtaagctggagtaccaggcttgtgtccttgggaagcagatttccgtgaaatgtgagggacattgcccctgtccttccgacaagccaacatcgaccagtcgcaatgttaaaagggcgtgttctgaccttgaattccgcgaagttgccaataggctgagggattggtttaaggctctccatgaatccggcagccagaataagaaaaccaaaaccctgctgcggcctgaacgcagtcgtttcgacacaagcatcctgccaatctgtaaagacagtttaggatggatgtttaatagactggacacgaattacgacctccttctcgaccagtctgagctgcggtctatatatcttgataaaaatgagcagtgcacgaaagccttctttaacagctgcgacacttataaggacagcttgatttccaataacgagtggtgttactgtttccaacgtcaacaggaccctccttgtcagactgaactgagcaacatccagaagcgccaaggcgtcaagaagttgctggggcagtacatccctctatgcgatgaggatgggtactataaaccaacccagtgtcacgggagcgtcggacagtgctggtgtgtcgacagatacggaaatgaggtgatgggatcccgcatcaatggggtggctgactgtgccatcgacttcgagatctcaggtgattttgcctccggcgacttccatgagtggacagatgatgaggacgacgaagatgacatcatgaacgacgaggacgaaatcgaggacgacgacgaagatgaaggagacgacgacgatggcggtgatgatcatgacgtttatatctag

SEQ ID NO: 32677 - DNA, 1302 bp, Artificial Sequence
  derived and/or modified sequence
atgctcaaagtcagcgctgtgctgtgcgtgtgcgctgcagcttggtgtagccagtccctcgctgccgcagccgctgttgccgcagctggagggagatccgacgggggtaactttcttgacgataaacaatggctgacaactatttcacagtacgataaagaggtcggtcagtggaataaattccgggacgatgactacttcagaacttggagtccaggcaaaccttttgaccaggccctggatcccgctaaggacccatgcctaaagatgaagtgtagtagacacaaagtttgcatcgcccaggactcacagaccgcagtgtgcatctctcatcggagattgacgcatcggatgaaggaggccggagtagatcacagacagtggcgtgggcctatcctatcaacatgcaaacaatgccccgtcgtgtacccgtccccagtgtgtgggtccgatggtcacacctacagcttccagtgcaaactggaataccaagcttgcgtcctgggaaagcagataagtgtgaagtgtgaaggccactgcccctgtccaagtgacaaaccgacatctacatcgagaaatgtcaaacgtgcttgctcagacctggagtttcgcgaggttgcgaaccgcctccgcgactggttcaaagcactgcatgagtcagggagccagaataagaagacaaaaaccttactcagaccggagaggagccggtttgacacaagtatcctaccaatctgtaaggattcattaggttggatgttcaatcgcctggacaccaactatgatctattactcgatcagtcagaactcaggagcatatatctggacaagaatgaacagtgtaccaaagcgttctttaattcttgcgatacctataaagattcactgatctccaataacgagtggtgttactgtttccaaaggcaacaagatcccccatgtcagaccgaacttagcaatatccaaaaacggcaaggcgtaaagaaacttttaggacagtatatacccttatgcgacgaggacgggtactacaaacccacacagtgccacggttccgtgggtcagtgctggtgtgtggatagatacgggaatgaagtgatgggttctcgaattaacggcgtggctgattgcgcaatcgacttcgaaatatccggagatttcgcctccggcgattttcacgaatggacagacgatgaagacgatgaggacgacattatgaatgacgaggacgaaatcgaggacgacgatgaggatgagggggatgatgacgacggcggagacgaccacgacgtgtacatttag

SEQ ID NO: 32678 - DNA, 1302 bp, Artificial Sequence
  derived and/or modified sequence
atgctgaaggtcagcgccgttttgtgcgtctgtgccgctgcttggtgtagtcagtcattggctgcggctgccgcagtcgcagctgccggtggacgctctgatgggggaaactttctggacgataaacagtggttaaccaccatatcccagtacgataaggaagtgggtcagtggaataaatttcgcgacgacgactattttcgtacctggtctcctggcaagccctttgatcaagctcttgaccccgcgaaagatccttgtttaaagatgaaatgttcgcgacacaaggtatgcatagctcaagactcacagacggcagtgtgtatctctcatcgccggctcacacatcggatgaaagaggccggcgtggaccatagacagtggcggggcccaatcctgagtacttgtaagcagtgtcctgtggtctatccaagtccagtgtgcgggtcagacgggcacacatatagtttccagtgcaagctcgagtaccaggcctgtgtcttagggaagcagatctctgtcaagtgtgagggtcattgcccttgtccaagcgataagccaacaagtacctctcgaaatgtcaaacgtgcttgcagcgacctcgagtttcgggaggtggccaataggctacgcgattggtttaaggcactgcacgagtctggatctcaaaacaaaaagaccaaaaccctcctgcgtcccgaacgctcccggtttgacacaagtatcctgcctatctgcaaagatagtctgggctggatgttcaaccgactcgacacaaactatgatctgttacttgatcagtcagaattacgtagtatctacttagacaagaatgagcagtgcactaaagctttcttcaactcatgcgatacatataaagattctctgattagcaacaacgagtggtgctactgttttcagagacaacaagacccaccctgccaaacggagctcagcaatatccagaaaaggcaaggtgttaaaaaactgctgggccagtatataccactgtgtgacgaggacgggtactacaagcccacccagtgtcatgggtccgtgggccagtgttggtgtgttgataggtatgggaatgaagtcatgggctccagaattaacggagtcgcagattgtgcgatcgacttcgagatatcaggtgacttcgctagcggagatttccacgaatggacagacgatgaggatgacgaggatgacataatgaatgacgaagacgagatagaagatgatgacgaagacgagggggacgacgatgacggtggagacgatcacgacgtctacatctag

SEQ ID NO: 32679 - DNA, 1302 bp, Artificial Sequence
  derived and/or modified sequence
atgctcaaagtcagcgccgttctgtgtgtctgcgccgccgcttggtgtagtcagtcacttgccgcagctgcagctgtcgccgccgcaggcggacggtcggacggaggcaattttcttgacgacaaacagtggctcacaactattagtcagtatgacaaggaggtagggcaatggaataaattcagagacgacgactacttcaggacttggagtcctggcaagcctttcgatcaggcactggacccggctaaagatccctgcctcaaaatgaaatgttcaagacacaaagtatgtatcgcccaggactcccaaaccgccgtatgcatctcacaccgaagactgacacaccggatgaaagaggccggcgttgatcaccggcaatggagaggtcctatcctgtcaacatgtaagcagtgcccagttgtttacccatcgcccgtgtgtggaagcgatggacatacttatagctttcaatgcaagttggaatatcaggcctgcgtgttaggcaaacaaatctctgtgaaatgtgaaggacactgtccatgtccaagtgacaagccaactagtaccagcaggaatgtgaaacgggcttgcagtgacctagagtttcgggaagttgccaaccggctgcgtgattggttcaaggcactacatgaatcaggcagccagaacaagaagacgaagacactcctcagacctgaaaggtccagattcgatacttctatcctgcctatctgcaaagactctctcggatggatgttcaaccggctcgataccaactatgacctcctgctcgatcagtccgaacttaggtctatctatctcgacaaaaacgaacagtgcacaaaggctttctttaactcttgcgatacatacaaggacagcctgatttccaacaatgaatggtgctactgctttcagcggcaacaggaccccccctgccagaccgagctgtctaacatccagaagcgccagggcgttaaaaaactcttggggcaatacatccccctgtgtgacgaagatggctactacaaaccgactcaatgtcatggctctgttggtcaatgctggtgcgtcgataggtacggcaatgaggtcatgggctcccgaatcaacggcgtggcggattgtgctatcgatttcgaaatatcaggcgacttcgcatccggggacttccatgagtggacagatgacgaggatgatgaagatgatatcatgaatgatgaagacgagattgaagatgacgacgaagatgaaggtgacgacgatgacggtggggatgaccacgatgtctacatttag

SEQ ID NO: 32680 - DNA, 1302 bp, Artificial Sequence
  derived and/or modified sequence
atgctaaaagttagcgctgtgttatgcgtctgcgccgctgcatggtgttctcaatccctggccgcagctgctgccgtagccgctgccggaggccgctcggacggagggaactttctcgatgataagcaatggcttactactatctcccaatacgacaaagaggtaggccagtggaataagttcagggatgatgattattttcgtacatggagtcctggcaaaccttttgatcaggctttagaccctgccaaagacccctgtctgaaaatgaagtgctccagacacaaggtgtgcattgcgcaggattcccaaactgcagtgtgtatatcccataggaggctaacccaccgcatgaaggaggccggcgtagaccaccgacagtggcgcggacccatcctgtccacatgtaagcagtgccctgtggtatatccgagtcccgtctgtggcagcgacggccacacgtacagttttcagtgtaagctagagtaccaagcctgcgttctcggtaagcaaatctcagtgaagtgcgaaggacattgcccctgcccttcagataaaccaacctctacctcacgaaacgttaaaagagcttgcagcgatcttgaatttagagaggtggcaaaccggctgcgagattggtttaaagccctgcatgagagcggttcccagaataagaaaactaagactctcttgcgcccagaacgcagcaggttcgatacatccatattgcctatctgcaaggactctcttggctggatgttcaatcgactggacaccaattacgacttgttgctagaccagtccgaactgagaagcatatacctagacaaaaatgagcagtgtaccaaggcctttttcaatagttgtgacacatacaaagatagcctgatctcaaataacgaatggtgctactgtttccagaggcagcaggatccaccatgtcaaaccgagcttagcaacatccagaagagacaaggagtgaaaaagctgctgggccagtacattcccctctgcgatgaagacggctactacaagccaactcaatgtcacggaagcgtcggacagtgctggtgcgtcgatagatatggtaatgaggtcatgggctcccgaattaacggcgttgccgactgtgcgatagacttcgagatttcaggtgacttcgcctcgggggattttcatgaatggactgacgacgaagatgacgaggacgacattatgaacgatgaggacgagattgaagacgacgatgaagacgaaggtgacgacgacgacggtggagatgatcatgatgtctacatctag

SEQ ID NO: 32681 - DNA, 1302 bp, Artificial Sequence
  derived and/or modified sequence
atgctgaaggtgtcagccgtactgtgtgtgtgcgctgcagcctggtgttcacaatctctcgctgccgccgcagccgtggccgccgccggaggcagaagcgacggaggaaatttcctggatgacaagcaatggttgacaacgattagccagtatgataaggaggtggggcaatggaataaattcagggatgacgactattttaggacctggagccctggcaagcctttcgatcaggctcttgaccccgctaaagacccatgcctcaaaatgaaatgttcgcgccacaaagtgtgtattgctcaggatagccaaacggctgtctgtatttcccatcgaagactgacacaccggatgaaagaggccggagtggaccacaggcaatggagggggcccatcttatccacgtgcaaacaatgtcccgtcgtttacccatctcccgtctgcggatcagacggccacacatatagcttccagtgtaaactagagtatcaggcatgcgtgctcggcaagcaaatcagtgtcaaatgtgaaggtcactgcccgtgcccctccgataaacctacaagcactagccgaaacgtgaaacgagcttgttccgatctagaattccgcgaagtcgctaaccgcctgcgggactggtttaaggcgcttcacgagagcggctcccagaacaaaaagactaaaacattgctgaggcccgagcggagcaggttcgatacctctatcctccccatctgtaaggattcactgggctggatgtttaatagactcgacactaactacgacctcttgctggaccagtcagagctcaggagtatatacctagacaagaatgagcaatgcacaaaagcttttttcaactcgtgtgatacatataaagacagtttgatctccaacaatgaatggtgttactgctttcagaggcagcaagaccccccatgtcagacagaactgagcaacattcagaagagacagggtgtaaagaaattactcggacagtacattcccctatgcgatgaggatggctactacaagccgacacagtgccacgggtctgttggccagtgctggtgcgtcgaccggtatgggaatgaggttatgggctcaaggattaacggggttgctgactgcgcgatcgattttgaaatcagtggggattttgcgtcaggagactttcatgagtggacagacgatgaggatgacgaggatgatattatgaatgacgaagacgaaatcgaggacgacgacgaggatgagggagatgacgatgatggaggcgacgatcatgacgtatatatttag

SEQ ID NO: 32682 - DNA, 1302 bp, Artificial Sequence
  derived and/or modified sequence
atgctcaaggtctccgctgtcctctgcgtatgtgcagctgcatggtgctcccaaagcctggccgccgcagccgcagtggctgcagcgggaggaagatctgacggagggaactttctggacgataaacagtggttgacgacaatttcccagtatgacaaagaggtgggacaatggaacaaatttagggacgacgactacttccgcacttggtccccaggcaaacccttcgaccaggcccttgacccagcaaaggacccgtgcctgaaaatgaaatgcagccggcataaggtgtgcatcgctcaggactcccagacagcagtatgtatctctcatagaaggctgacacaccgcatgaaggaagctggggtggaccatcgacagtggcgaggccctatcctttctacatgtaagcaatgccccgttgtctacccttctccggtttgcggatccgacggccatacctattccttccaatgcaaacttgagtatcaggcttgtgtgttaggtaaacagatatcagtgaagtgtgaaggacattgcccctgcccatcagataagcccacctcgacaagccgtaacgtcaagagagcgtgttcagatcttgaatttcgtgaagtggccaacagattacgagactggttcaaggctcttcatgagtccggatctcagaataaaaagaccaaaacattattaagacctgaacgatcaagatttgatacaagcattcttcccatctgtaaggactcgttgggctggatgtttaatagattggacacaaactatgatctgctccttgatcaaagtgaactgcggtccatttatttagacaaaaatgaacagtgtacgaaggctttcttcaactcatgcgatacctataaggatagtctgattagcaataatgagtggtgttattgtttccaaaggcaacaagatccaccctgccaaacagagctgagcaatattcaaaaacgacaaggagtgaaaaaactgttaggacagtatatacctctttgcgatgaggatggatactataaacctacccaatgccatggtagtgtcggacagtgttggtgtgtcgacaggtacgggaatgaggttatgggcagtaggatcaatggcgtggccgactgtgctattgactttgagattagtggtgacttcgcatcaggggactttcatgaatggactgacgatgaggatgatgaggatgatataatgaatgatgaagatgaaattgaggatgacgacgaggacgagggtgatgatgatgacggtggagacgaccacgacgtgtatatttag

SEQ ID NO: 32683 - DNA, 1302 bp, Artificial Sequence
  derived and/or modified sequence
atgctcaaagtatctgcagtgctgtgtgtgtgcgccgccgcgtggtgtagccagagtctagccgccgctgcagccgttgctgccgcaggagggagaagtgacgggggaaattttttggatgacaagcagtggttgacaactattagtcagtatgacaaggaagtgggacaatggaataaatttagagatgatgactactttcgtacctggtcccctggtaaaccattcgaccaggccctggatccagccaaggatccttgtctgaaaatgaagtgttcaaggcataaagtgtgcatagcccaggattcccaaactgcagtgtgtatatcccataggaggctaacccaccgcatgaaggaggccggcgtagaccaccgacagtggcgcggacccatcctgtccacatgtaagcagtgccctgtggtatatccgagtcccgtctgtggcagcgacggccacacgtacagttttcagtgtaagctagagtaccaagcctgcgttctcggtaagcaaatctcagtgaagtgcgaaggacattgcccctgcccttcagataaaccaacctctacctcacgaaacgttaaaagagcttgcagcgatcttgagttccgggaagtagccaacagattacgtgattggttcaaagccctgcacgaatccggttcccagaataaaaagaccaagacgcttttgcgcccagagcgtagccgtttcgatacttcaatcctccctatttgcaaggattccctgggctggatgttcaaccgcctggatacaaattatgatttgttactggaccaatcggaactccgatccatttaccttgacaaaaacgaacaatgtactaaagcctttttcaattcgtgtgatacgtataaagattcactaattagtaacaacgagtggtgttactgttttcaacgccagcaggacccaccgtgccagaccgaattgtcaaatatccagaagagacagggcgtgaagaagcttttagggcagtatatcccactgtgtgacgaagatggatactacaaacctactcagtgtcatggaagtgtggggcagtgttggtgtgtggatcgatatgggaatgaagtaatggggagtagaatcaacggagtagcagactgcgctatcgacttcgaaatcagtggcgatttcgcatcaggcgattttcatgagtggactgacgatgaggatgacgaggacgatattatgaacgatgaagacgagattgaagacgacgatgaagatgagggtgatgatgacgacgggggggacgatcacgatgtgtatatatag

SEQ ID NO: 32684 - DNA, 2936 bp, Artificial Sequence
  derived and/or modified sequence
gagacggcggcgcgtgcagcagctccagaaagcagcgagttggcagagcagggctgcatttccagcaggagctgcgagcacagtgctggctcacaacaagatgctcaaggtgtcagccgtactgtgtgtgtgtgcagccgcttggtgcagtcagtctctcgcagctgccgcggcggtggctgcagccggggggcggtcggacggcggtaattttctggatgataaacaatggctcaccacaatctctcagtatgacaaggaagtcggacagtggaacaaattccgagacgatgattatttccgcacttggagtccaggaaaacccttcgatcaggctttagatccagctaaggatccatgcttaaagatgaaatgtagtcgccataaagtatgcattgctcaagattctcagactgcagtctgcattagtcaccggaggcttacacacaggatgaaagaagcaggagtagaccataggcagtggaggggtcccatattatccacctgcaagcagtgcccagtggtctatcccagccctgtttgtggttcagatggtcatacctactcttttcagtgcaaactagaatatcaggcatgtgtcttaggaaaacagatctcagtcaaatgtgaaggacattgcccatgtccttcagataagcccaccagtacaagcagaaatgttaagagagcatgcagtgacctggagttcagggaagtggcaaacagattgcgggactggttcaaggcccttcatgaaagtggaagtcaaaacaagaagacaaaaacattgctgaggcctgagagaagcagattcgataccagcatcttgccaatttgcaaggactcacttggctggatgtttaacagacttgatacaaactatgacctgctattggaccagtcagagctcagaagcatttaccttgataagaatgaacagtgtaccaaggcattcttcaattcttgtgacacatacaaggacagtttaatatctaataatgagtggtgctactgcttccagagacagcaagacccaccttgccagactgagctcagcaatattcagaagcggcaaggggtaaagaagctcctaggacagtatatccccctgtgtgatgaagatggttactacaagccaacacaatgtcatggcagtgttggacagtgctggtgtgttgacagatatggaaatgaagtcatgggatccagaataaatggtgttgcagattgtgctatagattttgagatctccggagattttgctagtggcgattttcatgaatggactgatgatgaggatgatgaagacgatattatgaatgatgaagatgaaattgaagatgatgatgaagatgaaggggatgatgatgatggtggtgatgaccatgatgtatacatttgattgatgacagttgaaatcaataaattctacatttctaatatttacaaaaatgatagcctatttaaaattatcttcttccccaataacaaaatgattctaaacctcacatatattttgtataattatttgaaaaattgcagctaaagttatagaactttatgtttaaataagaatcatttgctttgagtttttatattccttacacaaaaagaaaatacatatgcagtctagtcagacaaaataaagttttgaagtgctactataataagtttttcacgagaacaaactttgtaaatcttccataagcaaaatgacagctagtgcttgggatcgtacatgttaattttctgaaagataattctaagtgaaatttaaaataaataaatttttaatgacctgggtcttaaggatttaggaaaaatatgcatgctttaattgcatttccaaagtagcatcttgctagacctagttgagtcaggataacagagagataccacatggcaagaaaaacaaagtgacaattgtagagtcctcaattgtgtttacattaatagtggtgtttttacctatgaaattattctggatctaataggacattttacaaaatggcaagtatggaaaaccatggattctgaaagttaaaaatttagttgttctccccaatgtgtattttaatttggatggcagtctcatgcagattttttaaaagattctttaataacatgatttgtttgcctttctagatttctttatctttctgaccagcaacttagggagcagaatttaaattaggaagacaaagggaaagattcatttaaaccatatttttacaaagtttgtcatttgccccaaggtcaaattttaaattcttaattttcattttatttcccattttaggtaaaagtttgcatttaatcttagaattatgttatttttgttagtagtgtggaaacttagagaacttattgtatggtgccttgcaaaaatagagatagaaagattttagcatgcataccaatatagtatattacgcaatatataagcacacctaattaacagattaatatcagtaaaggtattgctgctggaatgaagaaaatgggatacgtttgtttctttttttctattgttacataattgccatgtggacttgtttatgattattgtgtagagtagcatttaagatttaactgtagcaaaaattactttaaccgctgtatttaagttagcatgttaattaattgtgtagacattttggcacaccatcacttttaactatatcataccaatggttttgtgcccataataaaaatggaaaaacctgttgaatgttacgtattggtatctttaatttcaacagtgggtaaactggtttcccagtatacaattcattgaaagcaaaattgattaattatttccatttaatttatacacactcaatacaaaatttaatgttgactttacgtaataaagtataatgcattttcttttttactgtttatgtatagtttacaaaataaagaatcttgtaacc

SEQ ID NO: 32685 - DNA, 2900 bp, Artificial Sequence
  derived and/or modified sequence
tcctctggctccagccaagcgtcctatccggagccaactgtagctgggatccagcgagaggaagatgctcaaggtgtcagccgtactgtgtgtgtgtgcagccgcttggtgcagtcagtctctcgcagctgccgcggcggtggctgcagccggggggcggtcggacggcggtaattttctggatgataaacaatggctcaccacaatctctcagtatgacaaggaagtcggacagtggaacaaattccgagacgatgattatttccgcacttggagtccaggaaaacccttcgatcaggctttagatccagctaaggatccatgcttaaagatgaaatgtagtcgccataaagtatgcattgctcaagattctcagactgcagtctgcattagtcaccggaggcttacacacaggatgaaagaagcaggagtagaccataggcagtggaggggtcccatattatccacctgcaagcagtgcccagtggtctatcccagccctgtttgtggttcagatggtcatacctactcttttcagtgcaaactagaatatcaggcatgtgtcttaggaaaacagatctcagtcaaatgtgaaggacattgcccatgtccttcagataagcccaccagtacaagcagaaatgttaagagagcatgcagtgacctggagttcagggaagtggcaaacagattgcgggactggttcaaggcccttcatgaaagtggaagtcaaaacaagaagacaaaaacattgctgaggcctgagagaagcagattcgataccagcatcttgccaatttgcaaggactcacttggctggatgtttaacagacttgatacaaactatgacctgctattggaccagtcagagctcagaagcatttaccttgataagaatgaacagtgtaccaaggcattcttcaattcttgtgacacatacaaggacagtttaatatctaataatgagtggtgctactgcttccagagacagcaagacccaccttgccagactgagctcagcaatattcagaagcggcaaggggtaaagaagctcctaggacagtatatccccctgtgtgatgaagatggttactacaagccaacacaatgtcatggcagtgttggacagtgctggtgtgttgacagatatggaaatgaagtcatgggatccagaataaatggtgttgcagattgtgctatagattttgagatctccggagattttgctagtggcgattttcatgaatggactgatgatgaggatgatgaagacgatattatgaatgatgaagatgaaattgaagatgatgatgaagatgaaggggatgatgatgatggtggtgatgaccatgatgtatacatttgattgatgacagttgaaatcaataaattctacatttctaatatttacaaaaatgatagcctatttaaaattatcttcttccccaataacaaaatgattctaaacctcacatatattttgtataattatttgaaaaattgcagctaaagttatagaactttatgtttaaataagaatcatttgctttgagtttttatattccttacacaaaaagaaaatacatatgcagtctagtcagacaaaataaagttttgaagtgctactataataagtttttcacgagaacaaactttgtaaatcttccataagcaaaatgacagctagtgcttgggatcgtacatgttaattttctgaaagataattctaagtgaaatttaaaataaataaatttttaatgacctgggtcttaaggatttaggaaaaatatgcatgctttaattgcatttccaaagtagcatcttgctagacctagttgagtcaggataacagagagataccacatggcaagaaaaacaaagtgacaattgtagagtcctcaattgtgtttacattaatagtggtgtttttacctatgaaattattctggatctaataggacattttacaaaatggcaagtatggaaaaccatggattctgaaagttaaaaatttagttgttctccccaatgtgtattttaatttggatggcagtctcatgcagattttttaaaagattctttaataacatgatttgtttgcctttctagatttctttatctttctgaccagcaacttagggagcagaatttaaattaggaagacaaagggaaagattcatttaaaccatatttttacaaagtttgtcatttgccccaaggtcaaattttaaattcttaattttcattttatttcccattttaggtaaaagtttgcatttaatcttagaattatgttatttttgttagtagtgtggaaacttagagaacttattgtatggtgccttgcaaaaatagagatagaaagattttagcatgcataccaatatagtatattacgcaatatataagcacacctaattaacagattaatatcagtaaaggtattgctgctggaatgaagaaaatgggatacgtttgtttctttttttctattgttacataattgccatgtggacttgtttatgattattgtgtagagtagcatttaagatttaactgtagcaaaaattactttaaccgctgtatttaagttagcatgttaattaattgtgtagacattttggcacaccatcacttttaactatatcataccaatggttttgtgcccataataaaaatggaaaaacctgttgaatgttacgtattggtatctttaatttcaacagtgggtaaactggtttcccagtatacaattcattgaaagcaaaattgattaattatttccatttaatttatacacactcaatacaaaatttaatgttgactttacgtaataaagtataatgcattttcttttttactgtttatgtatagtttacaaaataaagaatcttgtaacc

SEQ ID NO: 32686 - DNA, 1768 bp, Artificial Sequence
  derived and/or modified sequence
gctaatgcatgttttccagggtcgctcctggcttcgtaccccttatttgacactgacatgcccccccaccccccgttgtgtctcctctcccagatgctcaaggtgtcagccgtactgtgtgtgtgtgcagccgcttggtgcagtcagtctctcgcagctgccgcggcggtggctgcagccggggggcggtcggacggcggtaattttctggatgataaacaatggctcaccacaatctctcagtatgacaaggaagtcggacagtggaacaaattccgagacgatgattatttccgcacttggagtccaggaaaacccttcgatcaggctttagatccagctaaggatccatgcttaaagatgaaatgtagtcgccataaagtatgcattgctcaagattctcagactgcagtctgcattagtcaccggaggcttacacacaggatgaaagaagcaggagtagaccataggcagtggaggggtcccatattatccacctgcaagcagtgcccagtggtctatcccagccctgtttgtggttcagatggtcatacctactcttttcagtgcaaactagaatatcaggcatgtgtcttaggaaaacagatctcagtcaaatgtgaaggacattgcccatgtccttcagataagcccaccagtacaagcagaaatgttaagagagcatgcagtgacctggagttcagggaagtggcaaacagattgcgggactggttcaaggcccttcatgaaagtggaagtcaaaacaagaagacaaaaacattgctgaggcctgagagaagcagattcgataccagcatcttgccaatttgcaaggactcacttggctggatgtttaacagacttgatacaaactatgacctgctattggaccagtcagagctcagaagcatttaccttgataagaatgaacagtgtaccaaggcattcttcaattcttgtgacacatacaaggacagtttaatatctaataatgagtggtgctactgcttccagagacagcaagacccaccttgccagactgagctcagcaatattcagaagcggcaaggggtaaagaagctcctaggacagtatatccccctgtgtgatgaagatggttactacaagccaacacaatgtcatggcagtgttggacagtgctggtgtgttgacagatatggaaatgaagtcatgggatccagaataaatggtgttgcagattgtgctatagattttgagatctccggagattttgctagtggcgattttcatgaatggactgatgatgaggatgatgaagacgatattatgaatgatgaagatgaaattgaagatgatgatgaagatgaaggggatgatgatgatggtggtgatgaccatgatgtatacatttgattgatgacagttgaaatcaataaattctacatttctaatatttacaaaaatgatagcctatttaaaattatcttcttccccaataacaaaatgattctaaacctcacatatattttgtataattatttgaaaaattgcagctaaagttatagaactttatgtttaaataagaatcatttgctttgagtttttatattccttacacaaaaagaaaatacatatgcagtctagtcagacaaaataaagttttgaagtgctactataataagtttttcacgagaacaaactttgtaaatcttccataagcaaaatgacagctagtgcttgggatcgtacatgttaattttctgaaagataattctaagtgaaattt

SEQ ID NO: 32687 - protein, 379 aa, Artificial Sequence
  derived and/or modified sequence
MLKRCGRRLLLALAGALLACLLVLTADPPPPPLPAERGRRALRSLAGPAGAAPAPGLGAAAAAPGALVRDVHSLSEYFSLLTRARRDAGPPPGAAPRPADGHPRPLAEPLAPRDVFIAVKTTKKFHRARLDLLLETWISRHKEMTFIFTDGEDEALARHTGNVVITNCSAAHSRQALSCKMAVEYDRFIESGRKWFCHVDDDNYVNLRALLRLLASYPHTRDVYVGKPSLDRPIQAMERVSENKVRPVHFWFATGGAGFCISRGLALKMSPWASGGHFMNTAERIRLPDDCTIGYIVEALLGVPLIRSGLFHSHLENLQQVPTSELHEQVTLSYGMFENKRNAVHVKGPFSVEADPSRFRSIHCHLYPDTPWCPRTAIF

SEQ ID NO: 32688 - DNA, 1140 bp, Artificial Sequence
  derived and/or modified sequence
atgcttaagcgttgcggaagacgcttgctcttagccctggccggagctctcttggcatgtctcctggtcctcactgccgatcctccacctccgcctctgcccgccgagcgggggcgaagggcattacggagcctggccggcccggcaggtgccgcccctgccccggggctgggagcagctgccgccgcacccggggctctggtgagagatgtgcattccctgtccgaatacttctcactgctcacacgcgcccgacgcgatgcaggcccacctccaggggcggccccacgcccagctgatgggcatccacgacccctggctgaacctctggcaccacgcgacgtctttatcgccgtcaagacaacaaaaaagttccaccgtgcccggcttgacctcctgctggaaacatggattagcaggcacaaagaaatgacgtttattttcaccgacggcgaggacgaggcactcgcgagacatacaggcaacgtagtgataacaaactgctctgcggcccacagcaggcaggctctgtcatgcaagatggcggtcgaatatgataggtttatcgagtccgggagaaaatggttttgtcatgtcgatgatgacaattatgtcaatctgcgcgcactgcttcgactcctggcgtcataccctcacacacgggacgtgtacgtgggaaagccttcgctggatcggcctatccaagcgatggagagagtgagcgagaacaaggtcagacctgtgcacttttggtttgcaacagggggcgccggattctgcatttcccgggggctggcactcaaaatgtccccttgggccagcgggggccactttatgaacactgccgagaggatccgattaccagatgattgcactatcgggtacattgtcgaggccctgcttggagtcccactaatcaggagcggactgtttcacagccatctagagaacctgcagcaagtgcctacctcagaattgcacgaacaggtgaccctgtcatatggtatgtttgagaacaaacgcaacgcagtgcatgttaaaggccctttctcagtggaggccgacccctccaggtttcggtccatccattgccacctctatcctgacaccccttggtgccctcggaccgccattttttag

SEQ ID NO: 32689 - DNA, 1140 bp, Artificial Sequence
  derived and/or modified sequence
atgctgaagagatgtggccgccgcctgctgctggccctggccggggccctgctggcctgcctgctggtgctgacagctgaccccccacctccacccctgcctgctgagcggggcagaagagccctgcggagcctggccggccctgctggagctgccccagcccctggcctgggcgctgctgctgctgcccctggggccctggtgagagatgtgcacagcctgtctgagtacttcagcctgctgacccgggccaggagagatgctggccccccacctggggccgcccccaggcctgcagatggccacccccggcccctggccgagcccctggcccccagagatgtgttcatcgctgtgaagaccaccaagaagttccaccgggcccggctggacctgctgctggagacctggatcagccgccacaaggagatgaccttcatcttcacagatggagaagatgaggccctggcccggcacactggaaatgtggtgatcaccaactgcagcgctgcccacagccggcaggccctgagctgcaagatggctgtggagtatgaccgcttcattgaaagtggcaggaagtggttctgccacgtggatgatgacaactacgtgaacctgcgggccctgctgcggctgctggccagctacccccacaccagagatgtgtatgtgggcaagcccagcctggaccggcccatccaggccatggagcgggtgtctgagaacaaggtgcggcctgtgcacttctggtttgccaccggcggggccggcttctgcatcagccggggcctggccctgaagatgagcccctgggccagcggcggccacttcatgaacacagctgagcgcatccggctgcctgatgactgcaccatcggctacatcgtggaggccctgctgggcgtgcccctcatccgcagcggcctcttccacagccacctggagaacctgcagcaggtgcccaccagcgagctgcacgagcaggtgaccctgtcctatggcatgtttgagaacaagagaaatgctgtgcacgtgaagggccccttctctgtggaggccgaccccagccgcttccgcagcatccactgccacctgtacccagacaccccctggtgccccaggacagccatcttctag

SEQ ID NO: 32690 - DNA, 2377 bp, Artificial Sequence
  derived and/or modified sequence
cgcgcggccgccaccccaccatgctcaagcgctgcggccggcgcctgctgctggcgctggcgggcgcgctgctcgcctgcctgctggtgctcaccgccgacccgccgccgcctccactgcccgccgagcgcggccggcgcgcgctgcgcagcctggcgggccccgcgggggctgccccggcgcccgggctgggggcggcggcggcggcgcccggggcgctggtccgcgacgtgcacagtctgtccgagtacttcagcctgctcacccgcgcgcgcagagatgcgggcccgccgcccggggctgccccccgccccgccgacggccacccgcgccccctggccgagccgctcgcgccccgagacgtcttcatcgctgtcaagaccaccaaaaagttccaccgcgcgcgcctcgacctgctgctggagacctggatctcgcgccacaaggagatgacgttcatcttcactgacggggaagatgaggccctggccaggcacacgggcaacgtggtcatcacaaactgctcggccgcccacagccgccaggcgctgtcctgcaagatggccgtggagtatgaccgcttcatcgagtccggcaggaagtggttctgccacgtggacgatgacaactacgtcaacctgcgggccctgctgcggctgctggccagctacccgcacacgcgggacgtctacgtcggcaagcccagcctggacaggcccatccaggccatggagcgggtcagcgagaacaaggtgcgtcctgtccacttctggtttgccacgggcggcgctggcttctgcatcagccgtgggctggctctgaagatgagcccgtgggccagcgggggtcacttcatgaatacggctgagcggatccggctgcctgatgactgcaccatcggctacatcgtggaggccctgctgggtgtgcccctcatccgcagcggcctcttccactcccacctggagaacctgcagcaggtgcccacctcggagctccacgagcaggtgacgctgagctacggtatgtttgaaaacaagcggaacgccgtccacgtgaaggggcccttctcggtggaggccgacccatccaggttccgctccatccactgccacctgtacccggacacaccctggtgtccccgcactgccatcttctagtggccatggctgagacccaatccctgggcgcccctggtatccaaagggcccagggaccctgttgcgctgccctggcctcggcattcgaggctcccctagggccgtgcctgtgcgtgtgcgtgtgcgtgtgtgtgtgtgtgtactgcatgcccacccgggtagcaggctgctgggcagttctgctctgtggaggggcgggcaccagcgccacttatgtgcctctgctccgagggccagtgggctgcagggcctgcttggaggaaggatttgtgtgtcggaggccactccgagggcaattctgttaggatttttggatctttctacagctacggggctccgggctactttgcagggatgcgatgcgtaggtgcctttctcttcctgctgaccacaagctctgtgctgggggtacctgtgccctgaagtcctggcccctgtgtcatagccccaagtacgactcactgagccatgctcattgcaggggaggctgggtctgggggtgcgtgacccaatccccttcctcctggcctggacgctgtggcttaagagtaacagcagccaccgcccagttccagtggccccacgaagcccccagtggctggctgtccagctgggcaaacagtggcacccctcccagctcttctgagtggggagtcttccaggcctcctcagaggtcttccctttgcctccccaggacagggtgagtcagagctcagcatttaatctcctctccaaagtagagagcaagtcgcccacagtgggcgtgtctgtaaatattgtgacagtatttttttactgtgctgttttttttgaaaggggatgggtaaaaagtagggtgttcttgttttttgcttgggagggtgggggtgggggagggtcttattttatcttatcttttctgtggatcagaaaaaacagaagccaaactcggggtcatctttgtttttaaagctgaagtgggactgtctggcactctgtgtatttatgcgttccagcatctggaacctcccatccctgccctcctcctgtgtagctgccacctccccgctgggcccagcatggctcacctgtcccgtgggctgtgtttcttgttgtttttctctttgcaaagacatagctaggaaagcgaatgataagggaaaagttctcagggaattgaagtgttgttgctatggtgacgtccttttgctgtgaataaaggtgctctttgcagcaa

SEQ ID NO: 32691 - DNA, 1140 bp, Artificial Sequence
  derived and/or modified sequence
atgctgaagcggtgcggccggcggctgctgctggccctggccggcgcactcctcgcctgtttgttagtgctgactgccgaccctcctccacctccccttcctgcagaaagggggcgtagagctctgaggtccctcgccgggcccgctggggcagcacccgctcccggactaggagcagccgcagccgctcctggcgccttggtgcgagacgtgcatagtttatctgaatacttcagtctgctgacccgggcgcggcgggacgccggccctcctcccggcgcagctcctaggcctgccgacggtcatccacgcccacttgctgagcccctggccccacgggacgttttcattgccgttaagaccacaaagaaattccatagagctcgtttggatctgctcctggaaacttggatctcacgtcacaaagagatgacctttatttttaccgatggtgaagacgaggcactcgccagacacacgggtaacgtcgtaattacaaattgcagcgctgcacatagccgacaggctcttagctgcaagatggccgtcgaatatgatcgttttatagaatcgggaaggaagtggttctgccacgtagacgacgacaactacgtgaacttaagagcattactgaggctgctagcctcatacccacatacacgcgatgtgtatgtgggaaaaccatctctcgaccggcccatacaggccatggaaagagtgtcggaaaacaaggtgagaccagtccatttttggttcgcaacgggtggtgctggcttctgtatcagcagagggctggcgttgaagatgtctccatgggctagcggaggacattttatgaatacagctgaaagaatccgcttgcccgacgattgcactattgggtacatcgtggaagccctacttggggtgcctctcatcagatctggactgtttcattcgcacctggagaatctgcagcaagtgcccacatccgagttacatgagcaagttacactgagttacggaatgttcgagaataagagaaatgccgtgcacgtaaaagggccttttagcgttgaagctgatccgtcccggttccgttccattcattgtcacctgtatccggacacaccgtggtgcccccggaccgccatcttctag

SEQ ID NO: 32692 - DNA, 1140 bp, Artificial Sequence
  derived and/or modified sequence
atgctgaaacggtgtgggaggcgcctccttctggctctcgccggtgctctcttggcttgtctgctcgttctgactgcagatcctcctccaccacccctgcccgctgagagaggaaggcgtgctctgagatcactggcaggcccagccggagctgctccggctcctggactgggggctgcagcagccgcaccaggtgctttagtgagagatgtgcattctctgagtgagtacttctccctcctcacccgggcacggagggatgccggaccccctcccggagctgcgccaaggccagccgatgggcaccccagacctctggcggagcccctggcccctagggacgtgttcattgcagtgaagaccactaagaagtttcatcgtgcacgcctcgatctccttcttgaaacatggatcagtagacacaaggagatgaccttcatcttcacggatggcgaggatgaagcattggctcggcatacaggcaatgttgtgatcacgaactgctcggctgctcattctcggcaggcattgagttgtaagatggccgtggaatatgacaggttcattgaatctggtaggaagtggttttgtcacgttgatgatgataattatgttaacctgagagctcttctcagactgctggctagttatccacacactcgggatgtgtacgtaggaaagccctcgcttgaccgcccaatccaggcgatggagcgagtttctgagaataaggtgagacctgttcatttctggtttgctacaggaggggctggcttttgcataagtagagggctagcactgaaaatgtctccctgggctagtggcggacacttcatgaacacggctgagcggatcagattacctgacgactgcaccatcggctacattgtggaagcactgctcggtgttccccttatacggtctggcctgtttcactcacacctcgaaaatctccagcaggtgccaactagcgaactacatgaacaagtaactctctcttacgggatgttcgaaaacaaacgaaacgcggtccatgtgaaaggccctttttccgtcgaggccgacccaagcagattcagaagcatccattgccatctctatcccgacaccccatggtgccctcggaccgctatcttctag

SEQ ID NO: 32693 - DNA, 1140 bp, Artificial Sequence
  derived and/or modified sequence
atgctgaagagatgcggcagaagactgctgctggccctggccggcgccctgctggcctgcctgctggtgctgaccgccgaccccccccccccccccctgcccgccgagagaggcagaagagccctgagaagcctggccggccccgccggcgccgcccccgcccccggcctgggcgccgccgccgccgcccccggcgccctggtgagagacgtgcacagcctgagcgagtacttcagcctgctgaccagagccagaagagacgccggccccccccccggcgccgcccccagacccgccgacggccaccccagacccctggccgagcccctggcccccagagacgtgttcatcgccgtgaagaccaccaagaagttccacagagccagactggacctgctgctggagacctggatcagcagacacaaggagatgaccttcatcttcaccgacggcgaggacgaggccctggccagacacaccggcaacgtggtgatcaccaactgcagcgccgcccacagcagacaggccctgagctgcaagatggccgtggagtacgacagattcatcgagagcggcagaaagtggttctgccacgtggacgacgacaactacgtgaacctgagagccctgctgagactgctggccagctacccccacaccagagacgtgtacgtgggcaagcccagcctggacagacccatccaggccatggagagagtgagcgagaacaaggtgagacccgtgcacttctggttcgccaccggcggcgccggcttctgcatcagcagaggcctggccctgaagatgagcccctgggccagcggcggccacttcatgaacaccgccgagagaatcagactgcccgacgactgcaccatcggctacatcgtggaggccctgctgggcgtgcccctgatcagaagcggcctgttccacagccacctggagaacctgcagcaggtgcccaccagcgagctgcacgagcaggtgaccctgagctacggcatgttcgagaacaagagaaacgccgtgcacgtgaagggccccttcagcgtggaggccgaccccagcagattcagaagcatccactgccacctgtaccccgacaccccctggtgccccagaaccgccatcttctag

SEQ ID NO: 32694 - protein, 361 aa, Artificial Sequence
  derived and/or modified sequence
MLKRCGRRLLLALAGALLACLLVLTADPPPPPLPAERGRRALRSLAGPAGAAPAPGLGAAAAAPGALVRDVHSLSEYFSLLTRARRDAGPPPGAAPRPADGHPRPLAEPLAPRDVFIAVKTTKKFHRARLDLLLETWISRHKEMTFIFTDGEDEALARHTGNVVITNCSAAHSRQALSCKMAVEYDRFIESGRKWFCHVDDDNYVNLRALLRLLASYPHTRDVYVGKPSLDRPIQAMERVSENKVRPVHFWFATGGAGFCISRGLALKMSPWASGGHFMNTAERIRLPDDCTIGYIVEALLGVPLIRSGLFHSHLENLQQVPTSELHEQVTLSYGMFENKRNAVHVKGPFSVEADPSRWGN

SEQ ID NO: 32695 - DNA, 1086 bp, Artificial Sequence
  derived and/or modified sequence
atgctgaaaaggtgtggaagacgtctgcttctggccctggccggcgcactgctggcatgtttattagttctgacagcggaccccccacctccgcccctcccggcagaaagaggccggcgtgctctaagatcgctggctggtcccgctggggccgctcctgcccctggcctgggcgccgcggcagccgcccccggcgcgcttgttcgggacgtccactctttgtccgaatatttcagtctgctgacaagggctagacgagatgctggaccacctcctggagcagctccaaggcccgctgacggccaccccaggcctctggccgaacccttagcaccaagggatgtgttcattgctgtgaaaaccacaaagaaatttcaccgcgccaggctcgatctgctgctcgagacgtggatcagccgacacaaggagatgactttcattttcacagacggagaggacgaggccctggcaagacacaccggaaatgtggtcattaccaattgttccgctgcgcattcacgccaagcattatcatgcaaaatggcagttgaatacgatcggttcattgagtccggacggaagtggttctgccatgtagatgatgataattatgtgaatttgagggcgctgctaagactgctggcaagctatcctcacacgcgagacgtttatgtggggaaacccagtctggacaggcctatccaggccatggagcgagtctctgagaacaaagttagaccagtgcatttttggtttgccaccggaggagctgggttctgcatctcacgcggtctggcactgaaaatgtcaccttgggcaagcggaggccattttatgaatacggccgaacggattagacttcctgatgattgtacaatcggctacatagtggaagcgctcctgggcgtccccctgatccgctctggactctttcattcacacctcgagaatctccaacaggtgcctacgagcgagttgcatgaacaggtcaccctttcgtacggaatgtttgaaaataaaagaaatgcagtacacgtgaagggcccctttagcgtggaggcagatccgtctcgctggggcaactag

SEQ ID NO: 32696 - DNA, 1086 bp, Artificial Sequence
  derived and/or modified sequence
atgctgaagagatgtggccgccgcctgctgctggccctggccggggccctgctggcctgcctgctggtgctgacagctgaccccccacctccacccctgcctgctgagcggggcagaagagccctgcggagcctggccggccctgctggagctgccccagcccctggcctgggcgctgctgctgctgcccctggggccctggtgagagatgtgcacagcctgtctgagtacttcagcctgctgacccgggccaggagagatgctggccccccacctggggccgcccccaggcctgcagatggccacccccggcccctggccgagcccctggcccccagagatgtgttcatcgctgtgaagaccaccaagaagttccaccgggcccggctggacctgctgctggagacctggatcagccgccacaaggagatgaccttcatcttcacagatggagaagatgaggccctggcccggcacactggaaatgtggtgatcaccaactgcagcgctgcccacagccggcaggccctgagctgcaagatggctgtggagtatgaccgcttcattgaaagtggcaggaagtggttctgccacgtggatgatgacaactacgtgaacctgcgggccctgctgcggctgctggccagctacccccacaccagagatgtgtatgtgggcaagcccagcctggaccggcccatccaggccatggagcgggtgtctgagaacaaggtgcggcctgtgcacttctggtttgccaccggcggggccggcttctgcatcagccggggcctggccctgaagatgagcccctgggccagcggcggccacttcatgaacacagctgagcgcatccggctgcctgatgactgcaccatcggctacatcgtggaggccctgctgggcgtgcccctcatccgcagcggcctcttccacagccacctggagaacctgcagcaggtgcccaccagcgagctgcacgagcaggtgaccctgtcctatggcatgtttgagaacaagagaaatgctgtgcacgtgaagggccccttctctgtggaggccgaccccagccgctggggcaactag

SEQ ID NO: 32697 - DNA, 1377 bp, Artificial Sequence
  derived and/or modified sequence
atgctcaagcgctgcggccggcgcctgctgctggcgctggcgggcgcgctgctcgcctgcctgctggtgctcaccgccgacccgccgccgcctccactgcccgccgagcgcggccggcgcgcgctgcgcagcctggcgggccccgcgggggctgccccggcgcccgggctgggggcggcggcggcggcgcccggggcgctggtccgcgacgtgcacagtctgtccgagtacttcagcctgctcacccgcgcgcgcagagatgcgggcccgccgcccggggctgccccccgccccgccgacggccacccgcgccccctggccgagccgctcgcgccccgagacgtcttcatcgctgtcaagaccaccaaaaagttccaccgcgcgcgcctcgacctgctgctggagacctggatctcgcgccacaaggagatgacgttcatcttcactgacggggaagatgaggccctggccaggcacacgggcaacgtggtcatcacaaactgctcggccgcccacagccgccaggcgctgtcctgcaagatggccgtggagtatgaccgcttcatcgagtccggcaggaagtggttctgccacgtggacgatgacaactacgtcaacctgcgggccctgctgcggctgctggccagctacccgcacacgcgggacgtctacgtcggcaagcccagcctggacaggcccatccaggccatggagcgggtcagcgagaacaaggtgcgtcctgtccacttctggtttgccacgggcggcgctggcttctgcatcagccgtgggctggctctgaagatgagcccgtgggccagcgggggtcacttcatgaatacggctgagcggatccggctgcctgatgactgcaccatcggctacatcgtggaggccctgctgggtgtgcccctcatccgcagcggcctcttccactcccacctggagaacctgcagcaggtgcccacctcggagctccacgagcaggtgacgctgagctacggtatgtttgaaaacaagcggaacgccgtccacgtgaaggggcccttctcggtggaggccgacccatccaggtggggaaactgaggcacggagcagctgatgcccaaggtccagcagccatgctggtgggctggggaggcgctcagactccaagccaggcaggccgtgggtccggccgccccacagctggtaatgctgcacctccctctcctgtgatgtggccccaggccccgaccccgctcaggggtggtgggaagagtcctggagagcaggagcagtgccggagcccccactgcagctggtcccagcccctgcagagatccagacgcttgttttttaaatacagcagctctgcggtgcttttccttcctcaaa

SEQ ID NO: 32698 - DNA, 1086 bp, Artificial Sequence
  derived and/or modified sequence
atgctgaagcggtgcggccggcggctgctgctggccctggccggcgcacttcttgcctgtcttttggtgctgactgccgacccgccaccaccccccctgcctgccgagagaggtaggagagcactccggagtctggcaggacccgctggggccgctcctgcccccggtttgggcgcggcggcagcagctcccggagcgctggttagagacgtccactctctaagtgagtattttagtctgctcaccagagctaggagagatgcgggccccccgcctggtgcagcccccaggcccgcagatggccaccctaggcctctagctgaaccccttgctccgagagacgttttcatcgccgtgaagacaaccaagaagtttcatagggccagattggatttgctccttgaaacttggatttcacgccataaggagatgaccttcatctttactgatggggaagacgaagccctggctcgacacacagggaacgttgttatcaccaactgcagcgcagcacacagtcgacaggcactgagttgtaaaatggcggttgagtatgaccgatttattgagagtggacggaagtggttttgtcacgttgacgacgataattatgtcaatctccgcgccttgctgcgtctcctggcttcttatccccatactagggatgtgtatgtaggcaagccctccttagaccgccccatacaagcgatggaacgcgtttctgaaaataaggtgcgaccagttcacttttggttcgctaccgggggagcgggtttttgcatcagtcgcggtcttgcgttaaagatgtcaccttgggcaagcgggggacatttcatgaacaccgccgaacgcattcgcctgcccgatgattgcacaatcggatatatcgtggaagcgcttctaggagtgcctctcattcgctccggcctgttccatagccatttagaaaatctgcagcaggttccgacttcggaactccatgagcaggttacgttatcctatggtatgtttgagaataagcgcaacgccgtccacgtcaaggggcctttttctgtggaagccgacccttcccggtggggaaactag

SEQ ID NO: 32699 - DNA, 1086 bp, Artificial Sequence
  derived and/or modified sequence
atgttaaaacggtgtgggagaagattgctgttagctttggcaggtgcactgcttgcctgcttgctggtgttgactgcggatccaccgcctcccccactgcccgcagagcggggacggagagcacttcgcagcctggctggccctgccggagccgctcccgctcctgggctgggagccgcagcggcagctccaggtgcgcttgtgcgcgatgtccacagcctatctgaatatttctccctgctcaccagagccagacgcgatgctggccctccccctggcgctgcacccagacctgctgatggacacccccgtccccttgccgaaccactggcaccacgagatgtattcatcgctgtaaagacaaccaagaaattccacagggccaggctggatttgctcttagagacgtggatcagtcgtcataaggaaatgacatttatctttaccgatggtgaggacgaggccctggcacgacatactgggaatgtagtaatcacaaattgctctgccgcacattcaagacaagcactgtcctgtaagatggctgtggagtatgacagatttatagagtccgggaggaagtggttttgtcacgtggatgatgacaactacgtcaaccttagagccctcctccggctgctggcatcatacccccacactcgtgacgtttacgtcgggaaaccttcccttgacaggccaatacaggccatggaacgcgtctctgagaacaaagtgaggccagtgcacttctggtttgccaccggcggagccggattctgtatctctcgcggacttgccctcaaaatgtcaccctgggcatccggagggcatttcatgaataccgccgagcgcataagactccctgatgactgcactattggatacatcgttgaggctctgctgggtgtgcctcttatccgttctggtctctttcacagtcacctggagaacctccagcaagtgccaacgagtgagttgcatgagcaggtgaccctgagctatggcatgttcgaaaacaagcgcaacgccgtgcacgttaaaggtcccttcagtgtggaggccgatcccagccggtggggcaactag

SEQ ID NO: 32700 - DNA, 1086 bp, Artificial Sequence
  derived and/or modified sequence
atgctgaagagatgcggcagaagactgctgctggccctggccggcgccctgctggcctgcctgctggtgctgaccgccgaccccccccccccccccctgcccgccgagagaggcagaagagccctgagaagcctggccggccccgccggcgccgcccccgcccccggcctgggcgccgccgccgccgcccccggcgccctggtgagagacgtgcacagcctgagcgagtacttcagcctgctgaccagagccagaagagacgccggccccccccccggcgccgcccccagacccgccgacggccaccccagacccctggccgagcccctggcccccagagacgtgttcatcgccgtgaagaccaccaagaagttccacagagccagactggacctgctgctggagacctggatcagcagacacaaggagatgaccttcatcttcaccgacggcgaggacgaggccctggccagacacaccggcaacgtggtgatcaccaactgcagcgccgcccacagcagacaggccctgagctgcaagatggccgtggagtacgacagattcatcgagagcggcagaaagtggttctgccacgtggacgacgacaactacgtgaacctgagagccctgctgagactgctggccagctacccccacaccagagacgtgtacgtgggcaagcccagcctggacagacccatccaggccatggagagagtgagcgagaacaaggtgagacccgtgcacttctggttcgccaccggcggcgccggcttctgcatcagcagaggcctggccctgaagatgagcccctgggccagcggcggccacttcatgaacaccgccgagagaatcagactgcccgacgactgcaccatcggctacatcgtggaggccctgctgggcgtgcccctgatcagaagcggcctgttccacagccacctggagaacctgcagcaggtgcccaccagcgagctgcacgagcaggtgaccctgagctacggcatgttcgagaacaagagaaacgccgtgcacgtgaagggccccttcagcgtggaggccgaccccagcagatggggcaactag

SEQ ID NO: 32701 - protein, 387 aa, Artificial Sequence
  derived and/or modified sequence
MDKLDANVSSEEGFGSVEKVVLLTFLSTVILMAILGNLLVMVAVCWDRQLRKIKTNYFIVSLAFADLLVSVLVMPFGAIELVQDIWIYGEVFCLVRTSLDVLLTTASIFHLCCISLDRYYAICCQPLVYRNKMTPLRIALMLGGCWVIPTFISFLPIMQGWNNIGIIDLIEKRKFNQNSNSTYCVFMVNKPYAITCSVVAFYIPFLLMVLAYYRIYVTAKEHAHQIQMLQRAGASSESRPQSADQHSTHRMRTETKAAKTLCIIMGCFCLCWAPFFVTNIVDPFIDYTVPGQVWTAFLWLGYINSGLNPFLYAFLNKSFRRAFLIILCCDDERYRRPSILGQTVPCSTTTINGSTHVLRYTVLHRGHHQELEKLPIHNDPESLESCF

SEQ ID NO: 32702 - DNA, 1164 bp, Artificial Sequence
  derived and/or modified sequence
atggataagttagacgccaatgtgtccagcgaagagggatttggctctgttgagaaagttgttctgctgaccttcctctcaaccgttattctgatggctattctaggaaacctgcttgttatggtggcagtctgctgggaccgccaactgagaaaaataaagaccaattatttcatcgtgtcgcttgcgttcgctgatctgctagtctccgtcctggtgatgcccttcggagctatagagctggtacaggacatatggatttacggggaagtcttctgccttgtgcgcacatccctggatgtgctgttgactaccgcatcaatttttcacttatgttgtatcagtctggaccgttactacgcaatttgttgtcaacctctggtctaccgcaacaaaatgacccctcttcgcattgcactgatgctaggcgggtgttgggttattcctacattcatttccttcctgccaataatgcagggatggaacaatattggcattatcgatctgatcgagaagaggaagttcaatcagaacagtaactcaacttactgtgtgttcatggtgaacaaaccttatgctattacatgctccgtggtggctttctacattccctttctcttgatggtgctcgcatactatcggatctacgtgacggctaaagagcacgcccatcagatccaaatgcttcagcgagccggagcatccagcgagtcaagacctcagagtgccgaccaacacagtacgcaccgaatgcgcacagagacaaaggccgccaagaccctctgcattatcatgggttgtttctgcctgtgttgggccccattctttgtgacaaacatcgtggatcccttcatcgactatacggtgcccggccaggtttggacagcgtttctgtggctagggtatatcaatagcggtctcaacccttttctgtacgctttccttaataagagtttcaggagagcgtttctcatcatcctgtgctgcgacgatgagagatataggcgtccatcaatactgggtcagactgtgccgtgcagtacaacaaccattaatgggtcaacccacgtgctgcggtacacggttttacaccgcggccatcaccaggaactggagaaactgccaatacacaacgaccccgagagccttgagagctgtttttag

SEQ ID NO: 32703 - DNA, 1164 bp, Artificial Sequence
  derived and/or modified sequence
atggataagctcgacgccaacgtgtcctctgaagaaggctttggatccgtggagaaggtcgtacttctgacctttctctcaactgtcatcctaatggcaatccttgggaacttacttgtgatggttgccgtttgctgggacagacagctcagaaagatcaagaccaattacttcattgtcagtttggctttcgccgacctgctggttagcgttctggtgatgccgtttggcgccatagaactagtccaggatatctggatctatggcgaagtgttctgtttggtaaggaccagcctggacgtgctgctgaccaccgcatcaatcttccatctgtgttgtatatccctcgatcggtattacgcgatttgctgtcagccacttgtttaccggaacaagatgaccccactgaggatcgcattgatgctcggtggttgttgggtaattcctacattcatcagttttcttccaattatgcaggggtggaataatataggcattatagatttaatagagaagcgaaagttcaaccaaaactccaactccacctattgcgttttcatggttaataagccttacgctatcacctgcagcgtagtggccttctacataccctttctgctgatggttcttgcctactaccgaatatacgtgaccgctaaggagcatgcccaccagatccaaatgctgcaacgggccggcgcatccagcgaatcacgtcctcagtcggcagaccagcactctacccaccgcatgagaaccgaaactaaagctgctaaaacactctgtattattatggggtgtttctgcctgtgttgggccccgttttttgttaccaatatcgttgatccttttatagattacacagtgccaggacaagtgtggacagcttttctgtggctgggttatatcaactcgggcctcaacccttttttatacgccttcctgaataaaagtttcagacgggccttcctgatcatactgtgctgcgacgacgagaggtacaggcgcccatcgattttaggacagactgtgccttgcagcaccaccaccatcaacggaagcacccacgtcctgcgatatactgtcctgcatcgagggcaccaccaggaactggagaagttgcctattcacaacgatcccgagtctctggagtcctgtttttag

SEQ ID NO: 32704 - DNA, 1164 bp, Artificial Sequence
  derived and/or modified sequence
atggacaagctggatgccaacgtgagcagcgaggagggcttcggctctgtggagaaggtggtgctgctgaccttcctgagcaccgtcatcctgatggccatcctgggcaacctgctggtgatggtggccgtgtgctgggaccggcagctgaggaagatcaagaccaactacttcatcgtgtccctggcctttgctgacctgctggtgtctgtgctggtgatgccctttggagccatcgagctggtgcaggacatctggatctacggggaggtgttctgcctggtgaggaccagcctggatgtgctgctgaccacagccagcatcttccacctgtgctgcatcagcctggaccgctactatgccatctgctgccagcccctggtgtacagaaacaagatgacccccctgcgcatcgccctgatgctgggcggctgctgggtgatccccaccttcatctccttcctgcccatcatgcagggctggaacaacatcggcatcatcgacctgattgagaagaggaagttcaaccagaacagcaacagcacctactgtgtgttcatggtgaacaagccctatgccatcacctgcagcgtggtggccttctacatccccttcctgctgatggtgctggcctactaccgcatctacgtgacagccaaggagcacgcccaccagatccagatgctgcagagagctggggccagcagcgagagccggccccagagcgctgaccagcacagcacccacaggatgaggacagagaccaaggccgccaagaccctgtgcatcatcatgggctgcttctgcctgtgctgggcccccttctttgtgaccaacatcgtggaccccttcatcgactacacagtgcccggccaggtgtggacagccttcctgtggctgggctacatcaacagcggcctgaaccccttcctgtatgccttcctgaacaagagcttccggcgggccttcctgatcatcctgtgctgtgatgatgagcgctacagaagacccagcatcctgggccagacagtgccctgcagcaccaccaccatcaatggcagcacccacgtgctgcgctacacagtgctgcaccggggccaccaccaggagctggagaagctgcccatccacaatgaccctgagagcctggagagctgcttctag

SEQ ID NO: 32705 - DNA, 1164 bp, Artificial Sequence
  derived and/or modified sequence
atggacaagctggacgccaacgtgagcagcgaggagggcttcggcagtgtggaaaaagtggttctgcttacgtttttgtccactgtgattttaatggccatccttggaaatttgctcgtaatggtggctgtgtgttgggaccgacagctgagaaagattaagactaattacttcattgtttctctggccttcgctgacttgcttgtgagtgtgctcgttatgcctttcggagctattgaattggtccaggatatatggatctacggtgaagtgttctgccttgtgagaacatctctcgacgtgctcttgacaaccgccagcatttttcacctgtgctgcatctctctcgatcggtactacgctatatgttgccagcctttagtctatcgcaataaaatgactcccctcagaatcgcccttatgctaggcggctgttgggtgatccctacctttatctcctttctccccataatgcaaggctggaacaacattgggattatcgatctgatcgaaaagcgcaagttcaaccagaactcaaatagcacatattgtgtatttatggttaacaaaccttatgccatcacctgcagcgtggtggcgttttatattccctttctcctcatggtcctggcttattaccgaatttacgttacggccaaagagcacgcccaccaaattcagatgttgcagcgggccggagcttctagtgaatctcgccctcagtctgccgaccagcactctactcatcggatgcggacagagaccaaggcggccaaaactctgtgcattatcatggggtgcttttgtttatgttgggcaccctttttcgttactaacattgttgatccttttattgactataccgtgccaggccaagtgtggacagcatttttgtggttaggctatatcaacagtggcttgaatccctttctgtatgccttcttgaataaatcattccgccgggccttcttaatcattttatgctgcgacgacgaaagatacagaagacctagcattcttggacagaccgtgccatgttccacaacaacaattaacggaagtactcatgtgctcaggtacaccgtgcttcacagaggacaccatcaagagctggagaagttgcctattcataacgacccggagtccctcgagtcctgtttttag

SEQ ID NO: 32706 - DNA, 1164 bp, Artificial Sequence
  derived and/or modified sequence
atggacaagctggacgccaacgtgagcagcgaggagggcttcggctccgtggagaaagtggtgcttctcacctttctgtctaccgtgatcctaatggctatcttgggtaacctattggtcatggtcgcagtgtgttgggatcggcagctgcgaaagatcaagaccaattacttcatagtttccctcgcctttgccgatctactggtgagcgtccttgtgatgccgtttggtgctatcgagctcgtacaggacatttggatttacggtgaagtgttctgcctggttagaacaagcctggatgtactgctgacaacagcctccatcttccacctgtgctgtatcagcctggaccggtactatgcaatttgctgtcaaccactggtttaccgcaacaaaatgacccccctccgaatagctctgatgctcggtgggtgctgggtaatcccaacgtttatatcttttctacccataatgcaaggatggaacaatataggaatcatcgatctaattgaaaagaggaagttcaatcagaactccaactctacttactgtgtgttcatggtcaacaagccctacgccatcacatgtagtgtcgttgctttttacataccctttctactgatggtcctcgcctactacagaatctacgttacagccaaggaacacgctcaccaaatccaaatgctccaaagggccggagcctcctccgagtcccggcctcaaagcgccgatcaacacagcacccataggatgcgcaccgaaaccaaggcagccaaaacactttgcattattatgggctgcttttgcctctgctgggccccgtttttcgtaaccaacatcgttgatccatttattgactatacagtgcctggccaggtctggacagcttttctttggctaggttacatcaactccggactgaatcctttcctctacgcatttctgaacaaatccttccgcagagcctttttgattatcctgtgctgtgatgatgagcgctatcgaagaccatctatcctcgggcaaaccgtaccatgttcgacaacgaccattaatggttccacgcatgtgcttcgatacacagtgctgcacagagggcaccatcaggagctggagaaactgccaatccacaacgaccctgagtccttagaaagttgcttctag

SEQ ID NO: 32707 - DNA, 1164 bp, Artificial Sequence
  derived and/or modified sequence
atggacaagcttgatgcaaatgtctcctccgaggaagggttcggttccgttgagaaagtggtcctgttaacttttctcagcactgttattctgatggccattctgggaaacctgttggtaatggttgcggtgtgttgggaccgtcagcttcgaaagataaaaactaactactttatcgtgagtctggccttcgccgatctgttggtttccgtcctggtgatgccattcggggcaattgagctagttcaggatatttggatatacggcgaagtgttttgtcttgtgaggaccagcttagatgtgctacttacaaccgctagtatttttcatctctgctgtatttcccttgacagatattatgccatttgttgtcagcctttggtgtacagaaataagatgacccccctcagaatcgctctcatgcttggtgggtgttgggtgatacccaccttcatcagctttcttcccatcatgcagggttggaacaacataggcattatcgacttgattgagaagcgcaaatttaaccagaactctaacagcacctattgtgtgttcatggtaaataagccatacgcaattacatgtagcgtcgtggctttttacatcccatttttactcatggtactggcctactacaggatttacgtgacagccaaggagcacgcccaccaaatccagatgctgcaacgggctggcgcaagcagcgaatctcgaccgcagagcgctgaccagcatagcacccaccggatgcgcaccgagactaaggctgctaaaactctttgcattattatgggctgcttctgtctttgttgggcccctttctttgtaactaacatcgtggatcctttcatcgactatactgtcccaggacaagtgtggactgcattcttgtggttgggttatattaattcaggactcaatccatttttgtatgcgtttcttaacaaaagttttagaagagccttcctgatcatcttgtgctgcgatgacgagcgctatagacgtcccagcatcctcgggcagaccgtcccttgctccaccaccactatcaatgggtccactcacgtgctaagatacactgtgctacaccgcggacaccatcaggagctggagaagctacccatccacaatgatccagaatccctggaaagctgtttctag

SEQ ID NO: 32708 - DNA, 1164 bp, Artificial Sequence
  derived and/or modified sequence
atggacaagttggatgccaacgtgtccagcgaagagggctttggttctgtagagaaagtggtgcttctgacctttctgagcacagtgattctcatggccatcctgggcaatttacttgtgatggtcgccgtgtgctgggacagacagctgagaaagatcaaaacaaactactttatagtgagtctggcctttgctgacttacttgtgagtgtgctagtgatgccctttggggctatcgagttggtccaggacatttggatctacggcgaagtattctgcctcgttaggacaagcctcgacgttctcctcaccaccgcctccatatttcacctgtgctgcatcagcctcgaccgatactacgcaatctgctgtcagccgttggtgtatcggaataagatgactccactgagaatcgccctgatgctcggcggttgttgggtcattcctactttcatttccttcctgcccatcatgcaggggtggaataacattgggataattgacctgatcgagaaaaggaaattcaatcagaattcgaacagtacatactgtgtttttatggtaaacaagccatatgccatcacttgttccgtagtagcgttttatattcctttcctcctgatggtgctcgcatactaccgcatctatgtgaccgcgaaggaacacgcgcaccagatccaaatgctccagcgagccggagcctcctctgagtcccggcctcagagtgccgaccagcatagcactcatcggatgagaacagagacaaaggccgcaaagacgctttgcattatcatgggatgtttctgtctgtgctgggcccctttctttgtgacaaacatcgtggatccatttattgattacacagtgcctggtcaagtgtggacagcattcttgtggctggggtacatcaacagcggtttgaatccattcctctatgccttcctgaataagtccttcagaagagcctttctgattattctttgctgtgacgatgagcggtatagaagacccagtattctgggacagacggtcccctgctccaccaccactatcaatgggtctactcacgtgcttcgttacactgtgctccataggggtcaccaccaagagctggagaagctcccgatccataacgatcccgagtcactggagtcttgtttctag

SEQ ID NO: 32709 - DNA, 1481 bp, Artificial Sequence
  derived and/or modified sequence
ggcgcaggcagcggctgggagcgcagcggcagcggcggcagcagaagctcggctcagcggctgggggtggccgctcgaatctgccagggcacctcgctccctcgcctctggcagcgggaccctgtgggcattgaaatccaactcactcatgcttatttcctgtaatggacaaacttgatgctaatgtgagttctgaggagggtttcgggtcagtggagaaggtggtgctgctcacgtttctctcgacggttatcctgatggccatcttggggaacctgctggtgatggtggctgtgtgctgggacaggcagctcaggaaaataaaaacaaattatttcattgtatctcttgcttttgcggatctgctggtttcggtgctggtgatgccctttggtgccattgagctggttcaagacatctggatttatggggaggtgttttgtcttgttcggacatctctggacgtcctgctcacaacggcatcgatttttcacctgtgctgcatttctctggataggtattacgccatctgctgccagcctttggtctataggaacaagatgacccctctgcgcatcgcattaatgctgggaggctgctgggtcatccccacgtttatttcttttctccctataatgcaaggctggaataacattggcataattgatttgatagaaaagaggaagttcaaccagaactctaactctacgtactgtgtcttcatggtcaacaagccctacgccatcacctgctctgtggtggccttctacatcccatttctcctcatggtgctggcctattaccgcatctatgtcacagctaaggagcatgcccatcagatccagatgttacaacgggcaggagcctcctccgagagcaggcctcagtcggcagaccagcatagcactcatcgcatgaggacagagaccaaagcagccaagaccctgtgcatcatcatgggttgcttctgcctctgctgggcaccattctttgtcaccaatattgtggatcctttcatagactacactgtccctgggcaggtgtggactgctttcctctggctcggctatatcaattccgggttgaacccttttctctacgccttcttgaataagtcttttagacgtgccttcctcatcatcctctgctgtgatgatgagcgctaccgaagaccttccattctgggccagactgtcccttgttcaaccacaaccattaatggatccacacatgtactaaggtacaccgttctgcacaggggacatcatcaggaactcgagaaactgcccatacacaatgacccagaatccctggaatcatgcttctgattgaggacatggctcacaacttagccattcattcgcattcatgtttgcatgaacaggtcaccctggcatcacttctgaacctcatcaccaccagtgaggcatcaggtagtaggggctgagagcccagaggaggtacatggaggacagtgttgg

SEQ ID NO: 32710 - DNA, 1323 bp, Artificial Sequence
  derived and/or modified sequence
cctgtaatggacaaacttgatgctaatgtgagttctgaggagggtttcgggtcagtggagaaggtggtgctgctcacgtttctctcgacggttatcctgatggccatcttggggaacctgctggtgatggtggctgtgtgctgggacaggcagctcaggaaaataaaaacaaattatttcattgtatctcttgcttttgcggatctgctggtttcggtgctggtgatgccctttggtgccattgagctggttcaagacatctggatttatggggaggtgttttgtcttgttcggacatctctggacgtcctgctcacaacggcatcgatttttcacctgtgctgcatttctctggataggtattacgccatctgctgccagcctttggtctataggaacaagatgacccctctgcgcatcgcattaatgctgggaggctgctgggtcatccccacgtttatttcttttctccctataatgcaaggctggaataacattggcataattgatttgatagaaaagaggaagttcaaccagaactctaactctacgtactgtgtcttcatggtcaacaagccctacgccatcacctgctctgtggtggccttctacatcccatttctcctcatggtgctggcctattaccgcatctatgtcacagctaaggagcatgcccatcagatccagatgttacaacgggcaggagcctcctccgagagcaggcctcagtcggcagaccagcatagcactcatcgcatgaggacagagaccaaagcagccaagaccctgtgcatcatcatgggttgcttctgcctctgctgggcaccattctttgtcaccaatattgtggatcctttcatagactacactgtccctgggcaggtgtggactgctttcctctggctcggctatatcaattccgggttgaacccttttctctacgccttcttgaataagtcttttagacgtgccttcctcatcatcctctgctgtgatgatgagcgctaccgaagaccttccattctgggccagactgtcccttgttcaaccacaaccattaatggatccacacatgtactaaggtacaccgttctgcacaggggacatcatcaggaactcgagaaactgcccatacacaatgacccagaatccctggaatcatgcttctgattgaggacatggctcacaacttagccattcattcgcattcatgtttgcatgaacaggtcaccctggcatcacttctgaacctcatcaccaccagtgaggcatcaggtagtaggggctgagagcccagaggaggtacatggaggacagtgttgg

SEQ ID NO: 32711 - DNA, 1164 bp, Artificial Sequence
  derived and/or modified sequence
atggacaagctggacgccaacgtgagcagcgaggagggcttcggcagcgtggagaaggtggtgctgctgaccttcctgagcaccgtgatcctgatggccatcctgggcaacctgctggtgatggtggccgtgtgctgggacagacagctgagaaagatcaagaccaactacttcatcgtgagcctggccttcgccgacctgctggtgagcgtgctggtgatgcccttcggcgccatcgagctggtgcaggacatctggatctacggcgaggtgttctgcctggtgagaaccagcctggacgtgctgctgaccaccgccagcatcttccacctgtgctgcatcagcctggacagatactacgccatctgctgccagcccctggtgtacagaaacaagatgacccccctgagaatcgccctgatgctgggcggctgctgggtgatccccaccttcatcagcttcctgcccatcatgcagggctggaacaacatcggcatcatcgacctgatcgagaagagaaagttcaaccagaacagcaacagcacctactgcgtgttcatggtgaacaagccctacgccatcacctgcagcgtggtggccttctacatccccttcctgctgatggtgctggcctactacagaatctacgtgaccgccaaggagcacgcccaccagatccagatgctgcagagagccggcgccagcagcgagagcagaccccagagcgccgaccagcacagcacccacagaatgagaaccgagaccaaggccgccaagaccctgtgcatcatcatgggctgcttctgcctgtgctgggcccccttcttcgtgaccaacatcgtggaccccttcatcgactacaccgtgcccggccaggtgtggaccgccttcctgtggctgggctacatcaacagcggcctgaaccccttcctgtacgccttcctgaacaagagcttcagaagagccttcctgatcatcctgtgctgcgacgacgagagatacagaagacccagcatcctgggccagaccgtgccctgcagcaccaccaccatcaacggcagcacccacgtgctgagatacaccgtgctgcacagaggccaccaccaggagctggagaagctgcccatccacaacgaccccgagagcctggagagctgcttctag

SEQ ID NO: 32712 - protein, 360 aa, Artificial Sequence
  derived and/or modified sequence
MDKLDANVSSEEGFGSVEKVVLLTFLSTVILMAILGNLLVMVAVCWDRQLRKIKTNYFIVSLAFADLLVSVLVMPFGAIELVQDIWIYGEVFCLVRTSLDVLLTTASIFHLCCISLDRYYAICCQPLVYRNKMTPLRIALMLGGCWVIPTFISFLPIMQGWNNIGIIDLIEKRKFNQNSNSTYCVFMVNKPYAITCSVVAFYIPFLLMVLAYYRIYVTAKEHAHQIQMLQRAGASSESRPQSADQHSTHRMRTETKAAKTLCIIMGCFCLCWAPFFVTNIVDPFIDYTVPGQVWTAFLWLGYINSGLNPFLYAFLNKSFRRAFLIILCCDDERYRRPSILGQTVPCSTTTINGSTHVLRF

SEQ ID NO: 32713 - DNA, 1083 bp, Artificial Sequence
  derived and/or modified sequence
atggacaagttggatgccaatgtgagcagcgaagaagggtttggcagcgtagaaaaggtcgtgctcctcactttcttaagcacagtgattctaatggctattttggggaacctcttagtcatggtggccgtgtgctgggaccggcagctgagaaaaataaaaactaactacttcatcgtttccctcgcttttgccgacctcttagtttctgtcctggttatgccatttggcgcgattgaactggttcaagatatctggatatacggggaagtcttctgtctagttcggacatcccttgatgtgttactgacaacggcctccatttttcacctctgctgtatctcattagatcgttactacgctatctgctgccaacccctcgtctatcgcaacaagatgacaccgcttcgcattgcgcttatgctggggggatgctgggtcatccccacatttatcagcttcctgcctatcatgcaggggtggaataatatcggaatcatcgacctaatagagaaacgcaaattcaaccagaatagcaactccacatactgcgttttcatggttaataagccctatgccatcacttgtagtgtggtcgctttctatatacccttcctgctcatggtcttggcttattacagaatctatgtgaccgcgaaagaacatgcccatcagattcagatgttacagcgggcaggagcgtcatccgagagccgcccccagagcgcggaccagcactctacccacaggatgagaactgaaaccaaagccgcaaagacactgtgcatcataatgggttgcttctgtctgtgctgggctccgttcttcgtcactaacatcgtggatccctttatcgattatacagtccctgggcaggtttggacagcatttctgtggctcgggtatatcaatagtggactgaacccattcctatacgccttcttgaataaatcatttaggcgggccttcctcattatcctgtgttgcgatgatgaaaggtacagaagaccctctatactgggacagactgtgccctgtagtacaacaacaataaatgggtcgactcatgtcctgcgattctag

SEQ ID NO: 32714 - DNA, 1083 bp, Artificial Sequence
  derived and/or modified sequence
atggacaagctggatgccaacgtgagcagcgaggagggcttcggctctgtggagaaggtggtgctgctgaccttcctgagcaccgtcatcctgatggccatcctgggcaacctgctggtgatggtggccgtgtgctgggaccggcagctgaggaagatcaagaccaactacttcatcgtgtccctggcctttgctgacctgctggtgtctgtgctggtgatgccctttggagccatcgagctggtgcaggacatctggatctacggggaggtgttctgcctggtgaggaccagcctggatgtgctgctgaccacagccagcatcttccacctgtgctgcatcagcctggaccgctactatgccatctgctgccagcccctggtgtacagaaacaagatgacccccctgcgcatcgccctgatgctgggcggctgctgggtgatccccaccttcatctccttcctgcccatcatgcagggctggaacaacatcggcatcatcgacctgattgagaagaggaagttcaaccagaacagcaacagcacctactgtgtgttcatggtgaacaagccctatgccatcacctgcagcgtggtggccttctacatccccttcctgctgatggtgctggcctactaccgcatctacgtgacagccaaggagcacgcccaccagatccagatgctgcagagagctggggccagcagcgagagccggccccagagcgctgaccagcacagcacccacaggatgaggacagagaccaaggccgccaagaccctgtgcatcatcatgggctgcttctgcctgtgctgggcccccttctttgtgaccaacatcgtggaccccttcatcgactacacagtgcccggccaggtgtggacagccttcctgtggctgggctacatcaacagcggcctgaaccccttcctgtatgccttcctgaacaagagcttccggcgggccttcctgatcatcctgtgctgtgatgatgagcgctacagaagacccagcatcctgggccagacagtgccctgcagcaccaccaccatcaatggcagcacccacgtgctgcgcttctag

SEQ ID NO: 32715 - DNA, 1083 bp, Artificial Sequence
  derived and/or modified sequence
atggacaagctggacgccaacgtgagcagcgaggagggcttcggctccgtggaaaaggtggtgctgctgacttttctaagtactgtgatcctgatggccatactgggcaatctccttgtgatggttgcggtgtgttgggatcgacaattgcgaaagataaaaacgaactattttatcgtgtccctagcctttgccgacctgcttgttagcgtccttgtgatgccctttggggccatagagcttgtgcaggacatttggatctacggcgaggttttttgtttggtacgtaccagtcttgacgttttgctcactactgcctccatctttcacttgtgctgcatatccctggaccgctactatgccatttgttgtcagcccttagtgtatcggaacaaaatgactccgctgcgcattgccttaatgctggggggttgctgggttattccaacatttattagtttccttcctatcatgcagggctggaacaacatcggcattattgatttgatcgaaaagcgcaagtttaatcaaaattcaaacagtacttactgcgtgtttatggtgaacaagccctatgcgatcacctgtagtgtagttgcattctatattccattcctccttatggtcctcgcatattatagaatatatgtgaccgcaaaggaacacgcccaccaaatacagatgctgcagcgcgcaggggcctcctctgaatcaagaccacagagcgctgaccagcacagcacccaccgaatgcgtactgagaccaaagctgcaaaaactttatgcattataatgggctgcttctgtctgtgctgggcgccgtttttcgtaacgaatatagtagaccctttcattgactacacagttccgggccaggtgtggacagcgttcctgtggctcggctatattaacagcggactgaatccgtttctctacgcctttctgaacaaaagctttaggcgcgcgtttttgatcattctgtgctgcgacgacgaacgctatagacgcccttcaatcctgggtcagacagtcccctgctccaccaccacaatcaatggcagtacacacgtcctaagattttag

SEQ ID NO: 32716 - DNA, 1083 bp, Artificial Sequence
  derived and/or modified sequence
atggacaagctggacgccaatgtgtcttccgaggagggctttggatctgtggagaaggttgtcctgctcaccttcctgagcaccgtcatcctgatggcaattttgggcaacctcctggtgatggtcgctgtgtgttgggataggcagctgcggaaaatcaaaacaaactacttcatcgtgagcctggcatttgccgacttgctggtgtcggtgttggtcatgcctttcggcgcaatcgagctcgttcaggacatttggatttacggagaagtattttgcctagtacgcacttcactcgacgtgttactgaccactgcctctatcttccatctgtgttgtattagcttagatagatattacgcaatttgttgtcagccgctggtgtacaggaataagatgaccccactgcggattgctctgatgttaggtggttgctgggtgatccctacttttatctcgttcctcccaatcatgcagggatggaataacatcggaatcattgatctgatagagaagaggaagtttaaccagaacagtaactccacctattgcgtttttatggtcaacaagccatatgctatcacttgctcagttgtggccttctacatcccattcctgctgatggtgctcgcttactatagaatctacgtgacagcgaaagaacacgcccatcagatccagatgctgcagcgggctggcgcatcaagcgaaagtcggccacaaagcgccgaccagcacagcacacacagaatgaggacagagactaaagctgcaaaaactctgtgcatcatcatggggtgcttctgcctatgctgggcccctttcttcgtgactaacattgtggatcctttcatcgattacaccgtgcccggtcaggtgtggacagcctttctctggctgggttatattaacagcggcctaaaccctttcctgtatgcattcctaaacaagagcttccgtcgcgctttcctgataattctatgctgtgacgacgagagataccgcagaccatctattctggggcagacagtgccatgctccactacaacaatcaacggctctacccacgtgctgcgcttctag

SEQ ID NO: 32717 - DNA, 1201 bp, Artificial Sequence
  derived and/or modified sequence
tgcttatttcctgtaatggacaaacttgatgctaatgtgagttctgaggagggtttcgggtcagtggagaaggtggtgctgctcacgtttctctcgacggttatcctgatggccatcttggggaacctgctggtgatggtggctgtgtgctgggacaggcagctcaggaaaataaaaacaaattatttcattgtatctcttgcttttgcggatctgctggtttcggtgctggtgatgccctttggtgccattgagctggttcaagacatctggatttatggggaggtgttttgtcttgttcggacatctctggacgtcctgctcacaacggcatcgatttttcacctgtgctgcatttctctggataggtattacgccatctgctgccagcctttggtctataggaacaagatgacccctctgcgcatcgcattaatgctgggaggctgctgggtcatccccacgtttatttcttttctccctataatgcaaggctggaataacattggcataattgatttgatagaaaagaggaagttcaaccagaactctaactctacgtactgtgtcttcatggtcaacaagccctacgccatcacctgctctgtggtggccttctacatcccatttctcctcatggtgctggcctattaccgcatctatgtcacagctaaggagcatgcccatcagatccagatgttacaacgggcaggagcctcctccgagagcaggcctcagtcggcagaccagcatagcactcatcgcatgaggacagagaccaaagcagccaagaccctgtgcatcatcatgggttgcttctgcctctgctgggcaccattctttgtcaccaatattgtggatcctttcatagactacactgtccctgggcaggtgtggactgctttcctctggctcggctatatcaattccgggttgaacccttttctctacgccttcttgaataagtcttttagacgtgccttcctcatcatcctctgctgtgatgatgagcgctaccgaagaccttccattctgggccagactgtcccttgttcaaccacaaccattaatggatccacacatgtactaagattttgagctccttgaggactgtggccaattcttattgctcatttttttttcttagtgcccaacacaggtttttgtacactgaagttatcaaataaattcattggatgta

SEQ ID NO: 32718 - DNA, 1083 bp, Artificial Sequence
  derived and/or modified sequence
atggacaagctggacgccaacgtgagcagcgaggagggcttcggcagcgtggagaaggtggtgctgctgaccttcctgagcaccgtgatcctgatggccatcctgggcaacctgctggtgatggtggccgtgtgctgggacagacagctgagaaagatcaagaccaactacttcatcgtgagcctggccttcgccgacctgctggtgagcgtgctggtgatgcccttcggcgccatcgagctggtgcaggacatctggatctacggcgaggtgttctgcctggtgagaaccagcctggacgtgctgctgaccaccgccagcatcttccacctgtgctgcatcagcctggacagatactacgccatctgctgccagcccctggtgtacagaaacaagatgacccccctgagaatcgccctgatgctgggcggctgctgggtgatccccaccttcatcagcttcctgcccatcatgcagggctggaacaacatcggcatcatcgacctgatcgagaagagaaagttcaaccagaacagcaacagcacctactgcgtgttcatggtgaacaagccctacgccatcacctgcagcgtggtggccttctacatccccttcctgctgatggtgctggcctactacagaatctacgtgaccgccaaggagcacgcccaccagatccagatgctgcagagagccggcgccagcagcgagagcagaccccagagcgccgaccagcacagcacccacagaatgagaaccgagaccaaggccgccaagaccctgtgcatcatcatgggctgcttctgcctgtgctgggcccccttcttcgtgaccaacatcgtggaccccttcatcgactacaccgtgcccggccaggtgtggaccgccttcctgtggctgggctacatcaacagcggcctgaaccccttcctgtacgccttcctgaacaagagcttcagaagagccttcctgatcatcctgtgctgcgacgacgagagatacagaagacccagcatcctgggccagaccgtgccctgcagcaccaccaccatcaacggcagcacccacgtgctgagattctag

SEQ ID NO: 32719 - protein, 428 aa, Artificial Sequence
  derived and/or modified sequence
MDKLDANVSSEEGFGSVEKVVLLTFLSTVILMAILGNLLVMVAVCWDRQLRKIKTNYFIVSLAFADLLVSVLVMPFGAIELVQDIWIYGEVFCLVRTSLDVLLTTASIFHLCCISLDRYYAICCQPLVYRNKMTPLRIALMLGGCWVIPTFISFLPIMQGWNNIGIIDLIEKRKFNQNSNSTYCVFMVNKPYAITCSVVAFYIPFLLMVLAYYRIYVTAKEHAHQIQMLQRAGASSESRPQSADQHSTHRMRTETKAAKTLCIIMGCFCLCWAPFFVTNIVDPFIDYTVPGQVWTAFLWLGYINSGLNPFLYAFLNKSFRRAFLIILCCDDERYRRPSILGQTVPCSTTTINGSTHVLRTDFLFDRDILARYWTKPARAGPFSGTLSIRCLTARKPVLGDAVECGGQWESQCHPPATSPLVAAQPSDT

SEQ ID NO: 32720 - DNA, 1287 bp, Artificial Sequence
  derived and/or modified sequence
atggacaagctcgatgcgaacgtgagctcagaagagggatttggaagcgtggagaaggtggtcctgttgacattcctctcaacagtgatactgatggctatcctcggcaacttactggtcatggtggctgtttgttgggatcgacagctgcgcaagatcaagaccaactatttcatagtctccttggcatttgccgatctgctggtctctgtcttagtgatgcctttcggtgccatcgagttagtccaagacatttggatctacggggaggtgttctgcctggtccgtaccagcctcgacgttctactaactactgccagtatatttcacctgtgttgtattagcctggatcgatactatgctatttgttgtcagcctctggtctatcgcaataagatgacccccctgaggatagctctcatgctgggtggttgctgggtgatcccaacctttatcagctttctacctataatgcaggggtggaataacatcggaattattgatctaatagagaaaaggaaattcaaccaaaattccaattccacctactgcgtattcatggttaacaagccgtacgcgatcacatgtagcgtggtggcattctacattccattcttgctcatggtactagcttactatcggatctacgtgactgccaaggagcacgcccaccaaattcagatgttacagagagcaggggcctcttccgaaagcagaccacagagcgctgatcagcattccacccaccgcatgaggactgaaaccaaagccgcaaaaactctgtgtattatcatgggctgtttctgcttatgctgggcaccttttttcgttaccaatatcgtggatcccttcattgactacacggtccctggccaagtgtggacggccttcttatggttgggatatatcaacagcggtctcaacccttttctgtacgcttttctcaataaaagctttcgccgcgcctttctgatcatactgtgttgcgatgatgagagataccggaggccaagcatcctgggccagacagtgccttgttcgacaactactattaacggatcgactcatgtgttgaggactgactttcttttcgatcgagacatcctggcccgatattggacaaagcccgctagagccggcccgttttccggaacactgagtataaggtgccttaccgcaaggaaacctgtactaggggacgccgtagagtgcggaggccagtgggagagccaatgccatcccccagccacttcccccctcgtggccgctcaaccctcagacacatag

SEQ ID NO: 32721 - DNA, 1287 bp, Artificial Sequence
  derived and/or modified sequence
atggacaagctggatgccaacgtgagcagcgaggagggcttcggctctgtggagaaggtggtgctgctgaccttcctgagcaccgtcatcctgatggccatcctgggcaacctgctggtgatggtggccgtgtgctgggaccggcagctgaggaagatcaagaccaactacttcatcgtgtccctggcctttgctgacctgctggtgtctgtgctggtgatgccctttggagccatcgagctggtgcaggacatctggatctacggggaggtgttctgcctggtgaggaccagcctggatgtgctgctgaccacagccagcatcttccacctgtgctgcatcagcctggaccgctactatgccatctgctgccagcccctggtgtacagaaacaagatgacccccctgcgcatcgccctgatgctgggcggctgctgggtgatccccaccttcatctccttcctgcccatcatgcagggctggaacaacatcggcatcatcgacctgattgagaagaggaagttcaaccagaacagcaacagcacctactgtgtgttcatggtgaacaagccctatgccatcacctgcagcgtggtggccttctacatccccttcctgctgatggtgctggcctactaccgcatctacgtgacagccaaggagcacgcccaccagatccagatgctgcagagagctggggccagcagcgagagccggccccagagcgctgaccagcacagcacccacaggatgaggacagagaccaaggccgccaagaccctgtgcatcatcatgggctgcttctgcctgtgctgggcccccttctttgtgaccaacatcgtggaccccttcatcgactacacagtgcccggccaggtgtggacagccttcctgtggctgggctacatcaacagcggcctgaaccccttcctgtatgccttcctgaacaagagcttccggcgggccttcctgatcatcctgtgctgtgatgatgagcgctacagaagacccagcatcctgggccagacagtgccctgcagcaccaccaccatcaatggcagcacccacgtgctgaggacagacttcctgtttgaccgggacatcctggcccgctactggaccaagccagcccgggccggccccttcagcggcaccctgagcatccgctgcctgacagccaggaagcctgtgctgggagatgctgtggagtgtggcggccagtgggagagccagtgccaccccccagccaccagccccctggtggccgcccagcccagcgacacctag

SEQ ID NO: 32722 - DNA, 1287 bp, Artificial Sequence
  derived and/or modified sequence
atggacaagctggacgccaacgtgagcagcgaggagggcttcggctccgtggaaaaagtggtgctgctcaccttcctgagtaccgtgattcttatggcaattctgggcaatttactcgtaatggtagctgtgtgctgggatagacagctgaggaagataaagacaaactacttcatcgtcagcctggccttcgccgatttgcttgtgagcgtcctggtcatgccttttggggcaatcgagctcgtgcaggatatttggatttatggtgaggtgttttgcctggtgagaactagcctggacgtcctgctgacgacggcttcaatctttcatctgtgctgcatatctttggatcggtactatgccatctgttgccagccacttgtttaccgaaacaagatgacccccctccggatcgccctgatgctagggggatgttgggtgattccgacattcatcagcttcctgccaatcatgcagggctggaacaatatcggtatcatcgatttgatagaaaagaggaagtttaatcagaacagtaattctacctattgtgtcttcatggtgaataaaccttatgccatcacctgctccgtcgtggccttttacattccattccttttaatggtcctggcttactaccgtatctacgtaaccgcaaaagaacatgctcaccagattcaaatgctgcaacgtgcaggcgcatcctctgagagcagaccccaaagcgctgatcagcactcaacgcaccggatgaggaccgagaccaaagccgcaaagacactctgtattataatgggctgtttttgcctctgctgggcccctttcttcgtgactaacatcgttgacccatttatcgattatactgtacctggccaggtgtggacggcattcctgtggctgggctacatcaattcaggcctcaatcccttcctctacgcttttctgaacaaaagctttaggcgggcctttctaatcatactctgttgcgatgatgagcgctacaggaggccctccatccttgggcaaacagtgccttgtagcactaccaccatcaatggcagcacccatgtgctgcggacagattttcttttcgaccgcgatatactggcccgatattggaccaaaccggctagagcaggacccttttcaggtacactctctatccgctgtttgacagcacggaaacccgtgctgggggatgctgtcgagtgtggtggtcagtgggagagccagtgccatcctcctgccacatcacccctggttgcagctcagccaagtgatacttag

SEQ ID NO: 32723 - DNA, 1287 bp, Artificial Sequence
  derived and/or modified sequence
atggataagttggatgcgaatgtttcgtccgaggagggattcgggagcgttgagaaggtcgtgttgctgacattcttaagcacggttatcctgatggcaattctggggaatcttctcgttatggtcgctgtctgctgggatagacagttgaggaagatcaagaccaattatttcattgtgtcgcttgctttcgcagatctcctcgtctccgtcctggtgatgccattcggagctattgaactcgtccaagacatctggatatacggggaagtcttttgcctcgtgaggaccagcctggatgtgcttttgacaaccgcctcaatcttccatctgtgctgtattagcctggaccgctattacgccatctgctgccagcctttagtttaccgcaataagatgacaccccttcgaatcgctcttatgctgggtggatgttgggtgatacctacattcatttccttcttgcccatcatgcagggatggaacaatatcggtattattgacctgatagaaaaacggaagtttaatcagaattccaatagtacgtattgcgtctttatggtgaataaaccgtacgcgattacttgtagcgtagtcgcgttctacattcccttcctgctaatggtcctggcttactatcgcatctatgtaacggcgaaggagcatgcccatcaaatccagatgctgcagcgtgcaggtgcttctagtgagtcgagacctcagtctgccgatcaacactctacccatcgaatgagaacggaaacaaaggccgctaaaacactgtgcatcattatggggtgtttctgtctgtgctgggccccatttttcgtgacaaatatcgtcgacccattcatcgattataccgtgccaggccaagtgtggacagccttcctctggctaggctacattaattccggccttaaccctttcctgtacgcgtttctgaacaagagctttcgcagggcttttctgatcatcctttgttgcgatgatgaaaggtaccgcaggccatcaattttgggccagaccgttccatgttcgactaccacaattaatggaagcacccacgtcctgcggactgattttctttttgacagggacatactagccagatactggacgaagcccgcacgtgccggaccattctccggcaccctgagcatcagatgcctcactgcgcgtaagcctgtcctcggcgatgccgtcgagtgtgggggacagtgggagagtcagtgccaccccccagctacttctccgctcgttgccgctcagccgtccgatacctag

SEQ ID NO: 32724 - DNA, 3082 bp, Artificial Sequence
  derived and/or modified sequence
gcggcagcggcggcagcagaagctcggctcagcggctgggggtggccgctcgaatctgccagggcacctcgctccctcgcctctggcagcgggaccctgtgggcattgaaatccaactcactcatgcttatttcctgtaatggacaaacttgatgctaatgtgagttctgaggagggtttcgggtcagtggagaaggtggtgctgctcacgtttctctcgacggttatcctgatggccatcttggggaacctgctggtgatggtggctgtgtgctgggacaggcagctcaggaaaataaaaacaaattatttcattgtatctcttgcttttgcggatctgctggtttcggtgctggtgatgccctttggtgccattgagctggttcaagacatctggatttatggggaggtgttttgtcttgttcggacatctctggacgtcctgctcacaacggcatcgatttttcacctgtgctgcatttctctggataggtattacgccatctgctgccagcctttggtctataggaacaagatgacccctctgcgcatcgcattaatgctgggaggctgctgggtcatccccacgtttatttcttttctccctataatgcaaggctggaataacattggcataattgatttgatagaaaagaggaagttcaaccagaactctaactctacgtactgtgtcttcatggtcaacaagccctacgccatcacctgctctgtggtggccttctacatcccatttctcctcatggtgctggcctattaccgcatctatgtcacagctaaggagcatgcccatcagatccagatgttacaacgggcaggagcctcctccgagagcaggcctcagtcggcagaccagcatagcactcatcgcatgaggacagagaccaaagcagccaagaccctgtgcatcatcatgggttgcttctgcctctgctgggcaccattctttgtcaccaatattgtggatcctttcatagactacactgtccctgggcaggtgtggactgctttcctctggctcggctatatcaattccgggttgaacccttttctctacgccttcttgaataagtcttttagacgtgccttcctcatcatcctctgctgtgatgatgagcgctaccgaagaccttccattctgggccagactgtcccttgttcaaccacaaccattaatggatccacacatgtactaaggacagattttctgtttgacagagacattttagcaaggtattggacaaagcctgccagagcgggtccattctcaggcacattgagcattagatgtttgactgcaaggaagcctgtcttgggggatgcagtggagtgtggtggccagtgggagagtcagtgtcacccgccagcaacttctcctttggtggctgctcagcccagtgacacttaggcccctgggacaatgacccagaagacagccatgcctccgaaagagggccaggtcctaagctgctgcttgtgcgcgactgcacccggtattctcttcacctgaggctttccgtccgccagtgcaggaacccggtgctcgctgggcttttcctctgagattccagcaggtggcgctggagggagtcaggggacataatggcctccttgttcactttttatttcccaacactccctcttcccagattctctgcttttgccgcgtggtctctggtgtctctgacatgttcccgtcactcactgtgtctgatctgtctcactcacgttctaagcacgatagcttgctgcgtcctatctcggtcactgatgtctccaaatacgccttctttgctgtgtgggcttccagatatcaacaaaatactccctctctgttcctgtcttagccagaggcgtcgctcctgtcttgcttacttgcttggtcacgtccgtcacagccatgttcaagctatcccctgcctcttcttcgccctgttctgtgccagacgctaacacacttttctccctgtgtctgggtccaaacgtgcatcctcttggttggcccccttgtcagtcccagacgtccacttgctcttccttatgtccaatgtctgtcctcctcttcaggacatgctccatttattttccatggaagacacagggtcagagatctgtcagaggaaaatggtctccacagcaactctggagggaagctgaagacagatagcttcctcctggtgtcctggccgctggcgtgtctgccctgagatgctcgctctcctgctgggctagaacgggacgtcttctaaaaagccttgggcagggctagcaacatcgtaggtgtttattaggcttcaggatctttcccatgaacttgtgatatcattttgaaacccttcaatctggctttgttgctgccaaaggagataactgttggaagttcacactggggaaactcattttcccctgcagctcccccaaggtgcaggagggcaggatccagcagcactggggatgccgaggcaatgctgtacttgaagccagaggacccaaattgccgccctggctgtgctgcaaacaagctgtgagatcttgaatagtgttctttcatctctggaccccactttccacatctgtgcactcaagcttggactagaggacctttaagttttctttctgtttctaagacaacagtatgctgctatagccgtctgctacctcgagaagccatggcctgcctgccttttggctttgtttcaaaggaacgaccctcctcatttgggccttttagacccctgacctttccagctttgtccttcagattaatctggatgtcttttattcaaagctgagtcagtggctcttgcgaatgccccatagcagaagtcccgggaaggtaaatgccaaacccagagccatgtgagattctgactttgatcttggctgtggtttaatagcatctcaggattatttatcatattctctttttttcttattgcttataaggtgtcagttattgtttccattgttgtttactttagttctggaactgaaaccgacaggaagaaactttggaataaggaagagaagattgaccaaaccatccaaatgccaaaaagaaaaa

SEQ ID NO: 32725 - DNA, 1287 bp, Artificial Sequence
  derived and/or modified sequence
atggacaagctggacgccaacgtgagcagcgaggagggcttcggcagcgtggagaaggtggtgctgctgaccttcctgagcaccgtgatcctgatggccatcctgggcaacctgctggtgatggtggccgtgtgctgggacagacagctgagaaagatcaagaccaactacttcatcgtgagcctggccttcgccgacctgctggtgagcgtgctggtgatgcccttcggcgccatcgagctggtgcaggacatctggatctacggcgaggtgttctgcctggtgagaaccagcctggacgtgctgctgaccaccgccagcatcttccacctgtgctgcatcagcctggacagatactacgccatctgctgccagcccctggtgtacagaaacaagatgacccccctgagaatcgccctgatgctgggcggctgctgggtgatccccaccttcatcagcttcctgcccatcatgcagggctggaacaacatcggcatcatcgacctgatcgagaagagaaagttcaaccagaacagcaacagcacctactgcgtgttcatggtgaacaagccctacgccatcacctgcagcgtggtggccttctacatccccttcctgctgatggtgctggcctactacagaatctacgtgaccgccaaggagcacgcccaccagatccagatgctgcagagagccggcgccagcagcgagagcagaccccagagcgccgaccagcacagcacccacagaatgagaaccgagaccaaggccgccaagaccctgtgcatcatcatgggctgcttctgcctgtgctgggcccccttcttcgtgaccaacatcgtggaccccttcatcgactacaccgtgcccggccaggtgtggaccgccttcctgtggctgggctacatcaacagcggcctgaaccccttcctgtacgccttcctgaacaagagcttcagaagagccttcctgatcatcctgtgctgcgacgacgagagatacagaagacccagcatcctgggccagaccgtgccctgcagcaccaccaccatcaacggcagcacccacgtgctgagaaccgacttcctgttcgacagagacatcctggccagatactggaccaagcccgccagagccggccccttcagcggcaccctgagcatcagatgcctgaccgccagaaagcccgtgctgggcgacgccgtggagtgcggcggccagtgggagagccagtgccacccccccgccaccagccccctggtggccgcccagcccagcgacacctag

SEQ ID NO: 32726 - protein, 320 aa, Artificial Sequence
  derived and/or modified sequence
MGDIPAVGLSSWKASPGKVTEAVKEAIDAGYRHFDCAYFYHNEREVGAGIRCKIKEGAVRREDLFIATKLWCTCHKKSLVETACRKSLKALKLNYLDLYLIHWPMGFKPPHPEWIMSCSELSFCLSHPRVQDLPLDESNMVIPSDTDFLDTWEAMEDLVITGLVKNIGVSNFNHEQLERLLNKPGLRFKPLTNQIECHPYLTQKNLISFCQSRDVSVTAYRPLGGSCEGVDLIDNPVIKRIAKEHGKSPAQILIRFQIQRNVIVIPGSITPSHIKENIQVFDFELTQHDMDNILSLNRNLRLAMFPITKNHKDYPFHIEY

SEQ ID NO: 32727 - DNA, 963 bp, Artificial Sequence
  derived and/or modified sequence
atgggggacattcctgcggtggggctctcttcatggaaggcttccccaggcaaagtgaccgaggcagtgaaagaggccattgacgcaggctatcggcattttgactgtgcttatttttatcataacgaacgagaggtgggagcgggtattaggtgtaaaattaaagaaggagcagtaaggcgcgaagacctctttatagctactaaattatggtgcacttgccacaagaagtctttggtggagacggcctgtaggaaaagcttgaaggccctgaagctaaactacctggatctgtaccttattcattggccaatgggcttcaagccacctcatcctgagtggattatgtcctgttcagagctctctttctgcttatcccacccgcgagttcaagatcttcctctggatgagagtaatatggttatcccgtctgacacagactttctcgacacttgggaagccatggaagacctcgtgatcacaggcctggtgaagaacattggtgtgtcaaactttaatcacgaacagctggagcgcctgctgaacaaacccggcctgcgtttcaaaccactgactaaccaaattgaatgtcatccttacctgacccagaagaacctgatcagcttttgccagagccgggatgtttctgtgacagcttacaggcccttgggcggcagttgtgagggcgtggacctgatcgataaccccgtcattaagcgaatagcaaaggagcacggaaagtctcctgcccagattctgatccgcttccagatacagaggaacgtcatcgttattcctggtagcatcactccttcccacattaaagaaaacattcaagtgtttgatttcgagttgactcagcacgatatggacaacatcctttcattgaatcggaatctccgcctggctatgttcccaattaccaagaaccataaggattatccgtttcatattgagtactag

SEQ ID NO: 32728 - DNA, 963 bp, Artificial Sequence
  derived and/or modified sequence
atgggagacatcccagctgtgggcctgagctcctggaaggccagccctgggaaggtgacagaggccgtgaaggaggccattgatgctggctaccgccactttgactgtgcctacttctaccacaatgaaagagaggtgggcgccggcatccgctgcaagatcaaggagggcgctgtgcggcgggaggacctcttcatcgccaccaagctgtggtgcacctgccacaagaagagcctggtggagacagcctgcaggaagagcctgaaggccctgaagctgaactacctggacctgtacctgatccactggcccatgggcttcaagccaccccaccctgagtggatcatgagctgcagcgagctgtccttctgcctgagccacccccgggtgcaggacctgcccctggatgagagcaacatggtgatccccagcgacacagacttcctggacacctgggaggccatggaggacctggtgatcaccggcctggtgaagaacattggagtgagcaacttcaaccacgagcagctggagcggctgctgaacaagccaggcctgcgcttcaagcccctgaccaaccagatcgagtgccacccctacctgacccagaagaacctgatctccttctgccagagcagagatgtgtctgtgacagcctaccggcccctgggcggcagctgtgaaggagtggacctgattgacaaccctgtgatcaagagaattgccaaggagcacggcaagagccctgcccagatcctgatccgcttccagatccagagaaatgtgattgtcatccctggcagcatcacccccagccacatcaaggagaacatccaggtgtttgattttgagctgacccagcacgacatggacaacatcctgagcctgaacagaaacctgcggctggccatgttccccatcaccaagaaccacaaggactaccccttccacatcgagtactag

SEQ ID NO: 32729 - DNA, 963 bp, Artificial Sequence
  derived and/or modified sequence
atgggcgacatccccgccgtgggcctgagcagctggaaggccagcccgggtaaggtcaccgaagctgttaaggaggccatcgacgctggttacagacattttgactgcgcctacttttaccataatgagcgggaggtgggtgccggaatccggtgtaagataaaagagggggcagtgcgccgagaggatttgttcatagccacaaaactctggtgtacctgtcacaaaaagagccttgtggagactgcttgtcggaaatcgctgaaggcattgaagctcaattacctggatctttacctgattcattggcccatgggatttaaaccaccacacccagagtggattatgtcttgtagcgagctgagtttttgtctgagccacccgcgcgtgcaagacttgcccctcgacgagtctaacatggtaatcccctctgataccgactttctggacacatgggaagcaatggaagacctagtgatcacaggattagtcaaaaatattggagtgagtaatttcaatcacgaacagctggagcgcctgttgaataagcccggcctccggttcaagcccctcactaatcagatcgaatgccatccatacttgactcagaagaacctgatttccttttgccaatccagagatgtctcggtgactgcttaccgaccattgggaggcagttgcgagggggtggatttaatagataatccagtaatcaagcgtattgctaaggaacacggaaagtcccccgctcagattcttatccgattccagatccagcggaacgtgatcgttatccctggaagtatcacccccagccacatcaaagagaacatccaagttttcgatttcgagctgacccaacacgacatggacaatatcttatccctcaatagaaatctcagactggccatgttccctatcacaaaaaatcataaagattacccatttcatatagagtattag

SEQ ID NO: 32730 - DNA, 963 bp, Artificial Sequence
  derived and/or modified sequence
atgggagatatcccagcggttggcctgagttcttggaaggccagccccggaaaagtgactgaggccgtgaaagaggcgatcgatgccggatataggcatttcgattgtgcctacttctaccataacgaacgcgaggttggcgctgggatcagatgtaaaatcaaagaaggggcagttaggcgtgaagacctgtttattgctactaagctatggtgcacatgccataaaaagagcctagtagaaacagcctgtagaaagtcacttaaagcattgaagctaaactacctggatttgtaccttattcattggcccatgggcttcaagcctcctcatccggagtggattatgtcctgcagcgaattgagcttctgtctctcacatccacgggttcaggacctgcccctggatgaatctaatatggttattccatccgacaccgattttctggacacatgggaggcaatggaggacctcgtgataacaggactggttaaaaacattggtgttagcaacttcaaccacgagcagctggagcgcctccttaataagcctggattgagatttaagcctttaaccaatcagattgagtgccatccctatctcacccagaaaaacctgatctccttctgccagtcacgggacgtgtcagtcactgcatatcggccattgggaggaagctgcgagggcgtcgacctgattgacaatcccgtaatcaagagaatagccaaagagcatggaaagagtccagcccagatccttatcagattccagatacagaggaatgtcattgttattccaggctcaataacgccttcccacattaaggagaatatccaggtgtttgattttgaattgacacagcatgacatggacaatattctgtccctgaataggaaccttcggttagccatgttccccattacaaagaatcacaaggattacccatttcacattgagtattag

SEQ ID NO: 32731 - DNA, 1566 bp, Artificial Sequence
  derived and/or modified sequence
cagtagctcgcgcggtgcctgtcggtagtcgcgtgcggggcggcggggcggcggggcggccggcggcggccatgggagatatcccagccgtgggcctcagctcctggaaggcttctccagggaaagtgaccgaggcagtgaaagaggccattgacgcagggtaccggcacttcgactgtgcttacttttaccacaatgagagggaggttggagcagggatccgttgcaagatcaaggaaggcgctgtaagacgggaggatctgttcattgccactaagctgtggtgcacctgccataagaagtccttggtggaaacagcatgcagaaagagtctcaaggccttgaagctgaactatttggacctctacctcatacactggcccatgggtttcaagcctcctcatccagaatggatcatgagctgcagtgaactttccttctgcctctcacatcctcgagtgcaggacttgcctctggacgagagcaacatggttattcccagtgacacggacttcctggacacgtgggaggccatggaggacctggtgatcaccgggctggtgaagaacatcggggtgtcaaacttcaaccatgaacagcttgagaggcttttgaataagcctgggttgaggttcaagccactaaccaaccagattgagtgccacccatatcttactcagaagaatctgatcagtttttgccaatccagagatgtgtccgtgactgcttaccgtcctcttggtggctcgtgtgagggggttgacctgatagacaaccctgtgatcaagaggattgcaaaggagcacggcaagtctcctgctcagattttgatccgatttcaaatccagaggaatgtgatagtgatccccggatctatcaccccaagtcacattaaagagaatatccaggtgtttgattttgaattaacacagcacgatatggataacatcctcagcctaaacaggaatctccgactggccatgttccccataactaaaaatcacaaagactatcctttccacatagaatactgaggacgcttccccttccttgtttctgctcagcccagatgcacagacactattggcaatgttgaccctcctctgtcatcacagcgccagggcagctgtgcctgggacaggagccacacagtcagagggggatgtaagagccaccttctctgacaaatctggagaattgagtgtgttctaagtgaaggcaatggggtttctccaagacagcctgtgtggcctctactctgaacaaatacactgatgagtcatcagtgaaatttgccttcacattttaagaaaactttatcttatggagttatttaagccatctacagagctgaggaaacagtgtaatgtgtctctgccccattgcgcagctccacccattgtgccccaggccagcccgcgtcacctacacttccttctgtgccctgccagtgacccccaggttattctaaagcagagtccttcccttcccccagtgagaaggaaaatgggataagtctgggacactgtttcagttcaataaagaggcttttttcttccttaaaaa

SEQ ID NO: 32732 - DNA, 963 bp, Artificial Sequence
  derived and/or modified sequence
atgggcgacatccccgccgtgggcctgagcagctggaaggccagccccggcaaggtgaccgaggccgtgaaggaggccatcgacgccggctacagacacttcgactgcgcctacttctaccacaacgagagagaggtgggcgccggcatcagatgcaagatcaaggagggcgccgtgagaagagaggacctgttcatcgccaccaagctgtggtgcacctgccacaagaagagcctggtggagaccgcctgcagaaagagcctgaaggccctgaagctgaactacctggacctgtacctgatccactggcccatgggcttcaagcccccccaccccgagtggatcatgagctgcagcgagctgagcttctgcctgagccaccccagagtgcaggacctgcccctggacgagagcaacatggtgatccccagcgacaccgacttcctggacacctgggaggccatggaggacctggtgatcaccggcctggtgaagaacatcggcgtgagcaacttcaaccacgagcagctggagagactgctgaacaagcccggcctgagattcaagcccctgaccaaccagatcgagtgccacccctacctgacccagaagaacctgatcagcttctgccagagcagagacgtgagcgtgaccgcctacagacccctgggcggcagctgcgagggcgtggacctgatcgacaaccccgtgatcaagagaatcgccaaggagcacggcaagagccccgcccagatcctgatcagattccagatccagagaaacgtgatcgtgatccccggcagcatcacccccagccacatcaaggagaacatccaggtgttcgacttcgagctgacccagcacgacatggacaacatcctgagcctgaacagaaacctgagactggccatgttccccatcaccaagaaccacaaggactaccccttccacatcgagtactag

SEQ ID NO: 32733 - protein, 340 aa, Artificial Sequence
  derived and/or modified sequence
MNPFHASCWNTSAELLNKSWNKEFAYQTASVVDTVILPSMIGIICSTGLVGNILIVFTIIRSRKKTVPDIYICNLAVADLVHIVGMPFLIHQWARGGEWVFGGPLCTIITSLDTCNQFACSAIMTVMSVDRYFALVQPFRLTRWRTRYKTIRINLGLWAASFILALPVWVYSKVIKFKDGVESCAFDLTSPDDVLWYTLYLTITTFFFPLPLILVCYILILCYTWEMYQQNKDARCCNPSVPKQRVMKLTKMVLVLVVVFILSAAPYHVIQLVNLQMEQPTLAFYVGYYLSICLSYASSSINPFLYILLSGNFQKRLPQIQRRATEKEINNMGNTLKSHF

SEQ ID NO: 32734 - DNA, 1023 bp, Artificial Sequence
  derived and/or modified sequence
atgaatcctttccacgcgtcttgctggaacacatccgctgagctgctaaacaagtcatggaataaggaattcgcctaccagacggcatcggtggtggacacagtgatcctgccttctatgatcgggatcatatgtagcacaggcctggtcggaaacattttgatagtttttacaattatccgcagccgcaagaaaacagtccctgacatctatatatgcaacttggcagtggcagaccttgtgcacatcgttggcatgccttttctcattcatcaatgggcccggggcggagaatgggttttcggcggccctctgtgcaccataatcacctctttagatacctgcaaccagttcgcctgttctgccatcatgactgtgatgtctgtggaccgttactttgcactggttcaaccctttcggctcacccgatggaggacaagatacaagacaattagaatcaatttgggactgtgggctgcctccttcatcctcgcactccctgtgtgggtatactcaaaagtgatcaagttcaaggacggcgtggagtcctgcgcatttgacctgacctctcccgacgacgtactctggtacaccctgtaccttactattactaccttttttttccctcttcccttaatcttggtgtgttacatcctgatactgtgttacacatgggagatgtaccagcagaataaggatgcccgttgctgtaatccatccgtgcctaagcagagagtcatgaaattgaccaagatggttcttgtgctggtagtggtgtttatactttctgcagctccctaccacgtcattcaactagtcaatctgcaaatggagcagccgacattggcgttctatgtcggctactacctgagtatttgcttatcatacgcctcttcaagcattaaccccttcttgtacattctactgagtggtaacttccagaagaggctgccccagatccagcgtagagcaacagagaaagagataaacaatatgggcaatacactcaaatcccacttttag

SEQ ID NO: 32735 - DNA, 1023 bp, Artificial Sequence
  derived and/or modified sequence
atgaacccctttcacgcaagttgttggaacaccagcgctgagctactaaataaaagctggaataaagagttcgcttaccagacagcttctgtggtggataccgtgatcctgccatcaatgattggcattatatgttccactggtctggtaggaaatattcttatcgtatttaccatcattcgctctcgaaaaaagactgtgcccgacatctatatttgtaacctcgcagtggcagacctggtgcacatcgtggggatgccttttcttatccatcagtgggcccgcggcggggagtgggtatttggagggccgctgtgcacaattatcacatctcttgatacatgtaatcagttcgcatgctccgctattatgaccgtgatgagcgtggacaggtatttcgccttggtgcaaccgttcaggttgacaaggtggagaactagatataaaactattcggatcaacttagggctgtgggctgcgtcattcatcctcgccctgccagtctgggtatacagtaaggtcattaagttcaaagatggagtggaaagctgcgccttcgacctgactagccccgatgacgtattgtggtatacgctgtatctcaccatcacaacgttcttcttccccctgcccttaatccttgtgtgctatatcttgattctctgttacacctgggaaatgtatcagcaaaataaggatgccagatgttgtaatccctcagtcccaaagcaacgcgtcatgaaacttaccaagatggtattggtcttggttgtggtgttcattctttccgcggcgccctaccacgttatccagcttgtgaacttgcagatggaacagcctacacttgcgttttacgtaggctattacctgtcaatatgtttgtcgtacgcaagcagctcgatcaacccattcctttacatcctgctgtcaggcaattttcaaaagcggctgcctcaaatccaaaggagggctactgagaaagagatcaacaacatgggtaatacactgaagtctcatttctag

SEQ ID NO: 32736 - DNA, 1023 bp, Artificial Sequence
  derived and/or modified sequence
atgaacccatttcatgctagctgttggaacacctccgcagaactgctgaataagagttggaacaaagagttcgcataccaaactgccagcgtggtagataccgtcatacttccctccatgatcggtattatctgcagcaccgggctggtgggcaatatccttatagtattcaccataatcagaagtcggaaaaaaaccgtgcctgatatttacatttgcaatctggctgtcgcggacctggtgcatatcgtgggaatgcccttccttattcatcagtgggcacgaggcggtgagtgggtgtttggaggcccgctgtgtaccattattacttccctggacacatgcaaccagttcgcttgtagtgccataatgaccgtcatgagtgtggataggtacttcgcacttgtgcagcctttcagactaacgagatggcgaaccagatacaagacaatcaggattaacctggggctatgggcggcaagtttcatcctcgcattgcccgtttgggtttactccaaggtcatcaaattcaaggacggagtcgaaagctgcgcttttgacttgacaagcccagatgacgtgctgtggtatacgttgtacctgaccatcaccaccttcttttttccgctcccccttattctcgtctgttatatcctgatactatgttatacatgggagatgtaccagcagaacaaggacgccaggtgttgcaacccttcagtgccaaagcagcgggtgatgaaactgactaagatggttcttgttttggtcgtggtgtttatcctatctgcagcaccttatcatgtgatccagctggtgaatttgcagatggagcagcccaccttagccttttatgtcggctactatctgtctatctgcctgtcgtatgcatctagttccattaatcccttcctttatatcctcctatcgggcaacttccaaaaaagactaccccaaattcagcggcgtgctacagaaaaagagataaacaacatggggaatactctgaagagccacttctag

SEQ ID NO: 32737 - DNA, 1023 bp, Artificial Sequence
  derived and/or modified sequence
atgaaccccttccacgccagctgctggaacaccagcgctgagctgctgaacaagtcctggaacaaggagtttgcctaccagacagcctctgtggtggacaccgtcatcctgcccagcatgattggcatcatctgcagcacaggcctggtgggcaacatcctgattgtgttcaccatcatccgcagcaggaagaagacagtgcctgacatctacatctgcaacctggccgtggccgacctggtgcacatcgtgggcatgcccttcctgatccaccagtgggcccggggcggggagtgggtgtttggaggccccctgtgcaccatcatcaccagcctggacacctgcaaccagtttgcctgcagcgccatcatgacagtgatgtctgtggaccgctactttgccctggtgcagcccttccggctgacccgctggaggacccgctacaagaccatccgcatcaacctgggcctgtgggccgccagcttcatcctggccctgcctgtgtgggtgtacagcaaggtgatcaagttcaaggatggagtggagagctgtgcctttgacctgaccagcccagatgatgtgctgtggtacaccctgtacctgaccatcaccaccttcttcttccccctgcccctcatcctggtgtgctacatcctgatcctgtgctacacctgggagatgtaccagcagaacaaggatgcccgctgctgcaaccccagcgtgcccaagcagagggtgatgaagctgaccaagatggtgctggtgctggtggtggtgttcatcctgtctgctgccccctaccacgtgatccagctggtgaacctgcagatggagcagcccaccctggccttctacgtgggctactacctgagcatctgcctgtcctatgccagcagcagcatcaaccccttcctgtacatcctgctgagcggcaacttccagaagaggctgccccagatccagaggcgggccacagagaaggagatcaacaacatgggcaacaccctgaagagccacttctag

SEQ ID NO: 32738 - DNA, 2368 bp, Artificial Sequence
  derived and/or modified sequence
agaaaagagcacgacgcacccgatgctcggattggatgaagtggcaaaggtaaccccgctggttcgggcgtttggctgttcctgtgcctggacccccgctttggaaatggaggtggggctggctcccaacctgtctcagagaccctcgcactcctcccccaccttccgtcagctgggacccgctgagagccgtttttggtcacgcgcgcttagcggatagacctgcagtcccgcagagaggaagggcgcccgggctgtccgccgcgcggggaggacgcgagcacccagctttaatccctggaaagtccacgaacaatgaatccatttcatgcatcttgttggaacacctctgccgaacttttaaacaaatcctggaataaagagtttgcttatcaaactgccagtgtggtagatacagtcatcctcccttccatgattgggattatctgttcaacagggctggttggcaacatcctcattgtattcactataataagatccaggaaaaaaacagtccctgacatctatatctgcaacctggctgtggctgatttggtccacatagttggaatgccttttcttattcaccaatgggcccgagggggagagtgggtgtttggggggcctctctgcaccatcatcacatccctggatacttgtaaccaatttgcctgtagtgccatcatgactgtaatgagtgtggacaggtactttgccctcgtccaaccatttcgactgacacgttggagaacaaggtacaagaccatccggatcaatttgggcctttgggcagcttcctttatcctggcattgcctgtctgggtctactcgaaggtcatcaaatttaaagacggtgttgagagttgtgcttttgatttgacatcccctgacgatgtactctggtatacactttatttgacgataacaactttttttttccctctacccttgattttggtgtgctatattttaattttatgctatacttgggagatgtatcaacagaataaggatgccagatgctgcaatcccagtgtaccaaaacagagagtgatgaagttgacaaagatggtgctggtgctggtggtagtctttatcctgagtgctgccccttatcatgtgatacaactggtgaacttacagatggaacagcccacactggccttctatgtgggttattacctctccatctgtctcagctatgccagcagcagcattaacccttttctctacatcctgctgagtggaaatttccagaaacgtctgcctcaaatccaaagaagagcgactgagaaggaaatcaacaatatgggaaacactctgaaatcacacttttaggaaagtacatggatcaccatgagtctagacatgattgtctatcttactggtattatcagaaagggcaggtgtaccgatatgtttatgcccattcttcttgtgtacttgtgactcttagcagcatggaagagaagtgtaaccatgcaaatacaatgagcttaatatgctaactttagcaagatgtaaaatgttgatctatattgtgggtagggaatgggatagtctgagatacccaggcttcatgatggtgtatattatttcagcatattataaactagtcactaatgaaaatggccatccatgaccattgactcaaaactcaccaaggaacctgaccttgccctccacactgtggcctcactgtaacagtttcctcaaggttcctaggagggtatcaccttagagtgaagtctaaaatttggctattttttatctataaaaaatgtcagttttatatggtccaatactaataccctcaacaactaagccccaccttttagaataagttaccatttattgcacacatgcaatgtgtaagattacatgtaacaaacctgtgaaataagtattattacctttgtttgctaaggctcagaaaggagaaatgataggcctaatgctgcaacagctatctaagagctgagctaacattcagctctgcctgtttcttttctactgcacgaccttgacaacctttacttatcatactggagaacccagtaacttggagtttcttttgctttctcctgtagccctacaagaggagaactaaagtctgatagaaatgagttgatgttttaagcatcattttggattatctttgttctcacacctgctaactgtagaaactggcatctgcactttaataataatactttacttctggactttaagcataattaggaaacattcctggccgggtgcagtggctcatgcctgtaatcccagcactttgggaggtggaggcaggtggatcacaaagtcagaagttcaagaccagtctggccaacatagtgagaccctgtctact

SEQ ID NO: 32739 - DNA, 1253 bp, Artificial Sequence
  derived and/or modified sequence
cgcccgggctgtccgccgcgcggggaggacgcgagcacccagatgaatccatttcatgcatcttgttggaacacctctgccgaacttttaaacaaatcctggaataaagagtttgcttatcaaactgccagtgtggtagatacagtcatcctcccttccatgattgggattatctgttcaacagggctggttggcaacatcctcattgtattcactataataagatccaggaaaaaaacagtccctgacatctatatctgcaacctggctgtggctgatttggtccacatagttggaatgccttttcttattcaccaatgggcccgagggggagagtgggtgtttggggggcctctctgcaccatcatcacatccctggatacttgtaaccaatttgcctgtagtgccatcatgactgtaatgagtgtggacaggtactttgccctcgtccaaccatttcgactgacacgttggagaacaaggtacaagaccatccggatcaatttgggcctttgggcagcttcctttatcctggcattgcctgtctgggtctactcgaaggtcatcaaatttaaagacggtgttgagagttgtgcttttgatttgacatcccctgacgatgtactctggtatacactttatttgacgataacaactttttttttccctctacccttgattttggtgtgctatattttaattttatgctatacttgggagatgtatcaacagaataaggatgccagatgctgcaatcccagtgtaccaaaacagagagtgatgaagttgacaaagatggtgctggtgctggtggtagtctttatcctgagtgctgccccttatcatgtgatacaactggtgaacttacagatggaacagcccacactggccttctatgtgggttattacctctccatctgtctcagctatgccagcagcagcattaacccttttctctacatcctgctgagtggaaatttccagaaacgtctgcctcaaatccaaagaagagcgactgagaaggaaatcaacaatatgggaaacactctgaaatcacacttttaggaaagtacatggatcaccatgagtctagacatgattgtctatcttactggtattatcagaaagggcaggtgtaccgatatgtttatgcccattcttcttgtgtacttgtgactcttagcagcatggaagagaagtgtaaccatgcaaatacaatgagcttaatatgctaactttagcaagatgtaaaa

SEQ ID NO: 32740 - DNA, 2144 bp, Artificial Sequence
  derived and/or modified sequence
gcaccccacgctcctagaaaagagcacgacgcacccgatgctcggattggatgaagtggcaaagctttaatccctggaaagtccacgaacaatgaatccatttcatgcatcttgttggaacacctctgccgaacttttaaacaaatcctggaataaagagtttgcttatcaaactgccagtgtggtagatacagtcatcctcccttccatgattgggattatctgttcaacagggctggttggcaacatcctcattgtattcactataataagatccaggaaaaaaacagtccctgacatctatatctgcaacctggctgtggctgatttggtccacatagttggaatgccttttcttattcaccaatgggcccgagggggagagtgggtgtttggggggcctctctgcaccatcatcacatccctggatacttgtaaccaatttgcctgtagtgccatcatgactgtaatgagtgtggacaggtactttgccctcgtccaaccatttcgactgacacgttggagaacaaggtacaagaccatccggatcaatttgggcctttgggcagcttcctttatcctggcattgcctgtctgggtctactcgaaggtcatcaaatttaaagacggtgttgagagttgtgcttttgatttgacatcccctgacgatgtactctggtatacactttatttgacgataacaactttttttttccctctacccttgattttggtgtgctatattttaattttatgctatacttgggagatgtatcaacagaataaggatgccagatgctgcaatcccagtgtaccaaaacagagagtgatgaagttgacaaagatggtgctggtgctggtggtagtctttatcctgagtgctgccccttatcatgtgatacaactggtgaacttacagatggaacagcccacactggccttctatgtgggttattacctctccatctgtctcagctatgccagcagcagcattaacccttttctctacatcctgctgagtggaaatttccagaaacgtctgcctcaaatccaaagaagagcgactgagaaggaaatcaacaatatgggaaacactctgaaatcacacttttaggaaagtacatggatcaccatgagtctagacatgattgtctatcttactggtattatcagaaagggcaggtgtaccgatatgtttatgcccattcttcttgtgtacttgtgactcttagcagcatggaagagaagtgtaaccatgcaaatacaatgagcttaatatgctaactttagcaagatgtaaaatgttgatctatattgtgggtagggaatgggatagtctgagatacccaggcttcatgatggtgtatattatttcagcatattataaactagtcactaatgaaaatggccatccatgaccattgactcaaaactcaccaaggaacctgaccttgccctccacactgtggcctcactgtaacagtttcctcaaggttcctaggagggtatcaccttagagtgaagtctaaaatttggctattttttatctataaaaaatgtcagttttatatggtccaatactaataccctcaacaactaagccccaccttttagaataagttaccatttattgcacacatgcaatgtgtaagattacatgtaacaaacctgtgaaataagtattattacctttgtttgctaaggctcagaaaggagaaatgataggcctaatgctgcaacagctatctaagagctgagctaacattcagctctgcctgtttcttttctactgcacgaccttgacaacctttacttatcatactggagaacccagtaacttggagtttcttttgctttctcctgtagccctacaagaggagaactaaagtctgatagaaatgagttgatgttttaagcatcattttggattatctttgttctcacacctgctaactgtagaaactggcatctgcactttaataataatactttacttctggactttaagcataattaggaaacattcctggccgggtgcagtggctcatgcctgtaatcccagcactttgggaggtggaggcaggtggatcacaaagtcagaagttcaagaccagtctggccaacatagtgagaccctgtctact

SEQ ID NO: 32741 - DNA, 1023 bp, Artificial Sequence
  derived and/or modified sequence
atgaaccccttccacgccagctgctggaacaccagcgccgagctgctgaacaagagttggaacaaggaattcgcatatcagaccgcgagcgtggtggatacagttattctccctagcatgatcggaataatttgcagtacagggctggtaggcaacatactaatcgtgtttactattatccggtcacgaaagaagaccgttccagatatttacatatgcaacctggcagttgccgacctggttcatatcgtcggaatgccttttctgatccaccagtgggcccggggcggcgaatgggtgtttggcggaccattgtgcaccatcattacatccctggatacctgtaatcagttcgcttgctctgcaatcatgaccgtgatgtcggtcgatcggtatttcgccttagtccagcctttcaggctcacaagatggcgaacacggtataaaaccatcagaatcaatttggggctctgggcagcctccttcatcctggcactgcctgtgtgggtctattcaaaagtgattaagtttaaggacggcgtggaatcgtgtgcttttgatcttacttctcctgatgacgttctctggtacacgctttacctgaccattacgacattcttcttccctttacccctgatactggtgtgctacatcttgatcctatgttacacgtgggagatgtaccagcagaacaaggacgcgcgctgttgtaatccatccgtgcctaagcaacgggtcatgaagcttacaaaaatggtactggtgctggttgtggtgtttattctgagcgccgccccttatcatgtaatacaactcgtgaacctccaaatggaacagcccacactggccttttacgtcggctactacctatctatctgcttatcctacgcttcaagttctattaacccattcctgtacatcctgctcagcggaaacttccagaaaagactacctcagatccagcgtagagcaactgagaaggagatcaataatatgggaaacactcttaaaagccacttttag

SEQ ID NO: 32742 - DNA, 1023 bp, Artificial Sequence
  derived and/or modified sequence
atgaaccccttccacgccagctgctggaacaccagcgccgagctgttaaataagtcgtggaataaagagttcgcttatcagaccgcttctgtcgttgatacggttatcctgcccagtatgatcgggataatctgcagtacaggactcgtcgggaacatcctcattgtattcacaattatccgctctaggaagaagacggtgccagatatctacatttgtaatctggccgtggctgacttagtacacattgtcggcatgccttttctgatacatcagtgggctcggggcggcgaatgggtgtttgggggtccattgtgtactattataacaagcctggacacttgtaatcaattcgcatgtagcgccatcatgacagttatgagcgtagatcgttatttcgccctggtccagcccttccggttgactaggtggcgtactagatacaaaaccatccgcattaaccttggtctttgggcagcatcttttatactcgccctgccagtgtgggtgtatagcaaggtgattaagtttaaagatggggtcgagtcttgcgcctttgacttgacctcaccggacgacgtcctttggtataccctgtatttaaccatcactacctttttttttccactgcctttgattttggtttgttatattttaatcctatgctatacatgggagatgtaccagcaaaataaagatgcccgctgttgcaacccttcagttccaaaacagcgcgtaatgaaactgaccaagatggtgctcgtgttggtggtcgtgttcatacttagcgcagccccgtatcatgttatacaactggtcaatctgcaaatggagcaaccaacactggccttctatgtcggatactacctgagtatttgcttatcgtatgcgagctcttccataaacccttttctctatattctgctgtctggcaattttcaaaagaggctgcctcaaatccagaggagggcgactgagaaagagatcaataatatggggaataccctcaagagtcatttttag

SEQ ID NO: 32743 - DNA, 1023 bp, Artificial Sequence
  derived and/or modified sequence
atgaaccccttccacgccagctgctggaacaccagcgccgagctgcttaacaaaagttggaacaaggaatttgcctaccagactgctagtgttgttgatactgtgattctgccctccatgatcggcatcatatgtagcactgggctagtgggaaacattctcatagtgtttacgatcattcgttctcggaagaagactgttcctgatatttacatttgcaacctggctgttgccgatcttgtgcacatagtgggtatgccttttttaatccatcagtgggctaggggcggtgaatgggtattcggtggtccactgtgtacgatcataacatccctcgatacttgtaaccagttcgcctgtagtgccattatgacggttatgtctgtggatagatattttgcattggtccagccctttcgcttgactagatggagaacgagatataagacaattcgaatcaacctaggcttatgggcggcttccttcatcctcgctttacctgtgtgggtctacagcaaggtcattaagttcaaggatggggtggagtcctgtgcgtttgaccttacgtcaccagacgacgttctttggtatacactctacctaaccattactacttttttctttccattgcccttaatcctggtgtgctacatcctgattctctgctacacctgggagatgtaccaacagaacaaggatgccaggtgttgcaacccaagcgtccctaaacagcgtgtgatgaagctgacaaagatggtgttagtcctggtcgtggtgtttattcttagcgccgcaccctaccacgtaatacagctagtgaacctgcagatggaacagcctaccctggccttctacgtcggctactatctgagcatctgcctgagctatgccagttcctctatcaatcctttcctctatatattgctgtccggaaacttccagaagcggttgccacagatccagagaagagcaaccgagaaggagattaataatatggggaatactttgaaatctcacttttag

SEQ ID NO: 32744 - DNA, 1023 bp, Artificial Sequence
  derived and/or modified sequence
atgaaccccttccacgccagctgctggaacacctccgcagagctgcttaacaaaagctggaacaaggagttcgcttatcaaacagcttccgtcgttgatacggtcattctgccatctatgatcgggataatatgctccaccggtctggtgggcaatatcctgattgtatttactattatccgatcacgaaagaaaaccgtgcccgacatatacatatgtaatttggccgtcgctgacctggtacacattgttggaatgcccttcctcatccaccagtgggcccgaggaggcgaatgggttttcggaggccctctgtgcacaataataacttccctggacacttgcaaccagtttgcctgcagcgcaatcatgaccgtgatgtctgtcgacagatactttgccctcgtgcagcccttcaggctgactagatggcgcactcgctacaaaacgataagaattaatctggggctttgggccgcatctttcatacttgccctgccagtgtgggtgtattcaaaggtcattaaattcaaggacggcgtcgagagttgtgcttttgacctaaccagccccgatgacgtcctttggtacacgctgtacctgaccatcacaacatttttctttcccctccccttgatcctagtttgttatatccttatcctgtgttacacttgggaaatgtatcagcagaataaagatgcacgttgctgtaatccatctgttccaaagcagagagtgatgaagctgacaaagatggttcttgtcctggtggtggttttcatcttgagtgccgctccataccacgtgatacaacttgtcaatctgcagatggaacagcccaccttggcattttacgtgggttattatctatcgatttgcctatcatacgctagcagcagtattaaccccttcctgtacatccttctgtcagggaacttccagaaaaggcttcctcagatccagcggagagccacagaaaaggaaatcaataatatgggaaatactctaaaaagtcacttttag

SEQ ID NO: 32745 - DNA, 1023 bp, Artificial Sequence
  derived and/or modified sequence
atgaacccatttcacgctagctgctggaacacgtccgccgaattgttgaacaagtcatggaacaaagagtttgcctaccagacagcctcagtggtggatacagtgattctgccatcaatgatcggcatcatatgcagcactggtctagttggtaatattcttatagtcttcacgatcatccggtctcggaagaagactgtgcctgatatctacatttgcaacctggcagtcgcggaccttgtacatatagtaggtatgccttttttaatccatcaatgggctcgtgggggagagtgggtcttcggaggacccttatgtacgattatcacttcactcgacacctgcaaccagttcgcgtgctcagccattatgacggtgatgagcgtggacaggtacttcgctctggtccagccatttagactgactaggtggcgaacccgctacaaaacaatccgaattaatctgggcctctgggctgcatcattcatcctcgctcttccagtttgggtctattctaaggtcataaagttcaaggatggtgtagagtcctgcgccttcgatctgacatcccctgacgacgtcctgtggtatacattgtatttgaccattactaccttcttcttccccttaccactcattctggtgtgttatattctgatactgtgctatacatgggaaatgtatcaacaaaataaggatgctcgctgctgtaacccttcagtaccaaagcagcgcgtgatgaagcttactaagatggttctggtactcgtagtcgtatttatcctctcagctgcaccatatcacgtgatacagctagtgaacttgcagatggaacagcccaccctggcattttacgtgggctattacctcagcatctgcttatcatatgcgtcatcctcgatcaacccattcctgtatatcctgttgtccggaaactttcagaaaagactgccacagattcagcggcgagccactgaaaaggaaattaacaacatgggtaacacactcaaaagtcatttctag

SEQ ID NO: 32746 - DNA, 1023 bp, Artificial Sequence
  derived and/or modified sequence
atgaatcctttccacgcctcatgctggaacacttctgcagagttactgaataaaagttggaataaggaattcgcttatcagactgccagtgtcgtagacaccgttatcctcccatcaatgatcgggataatctgttcaaccggcttagtgggaaacatactgattgttttcaccatcatccgtagtcgaaagaagaccgtgcccgacatttatatttgtaatctagccgtcgcggacttggtgcatatcgtgggaatgccgtttttgatacatcagtgggctcgcggtggtgagtgggtgtttggaggaccgctctgcactatcattactagtttagatacctgtaatcagtttgcctgctctgcaataatgacagtgatgtcagtagacaggtactttgctctagttcagccgttccggctcacccggtggaggacaaggtataagaccatccgcattaacttgggactttgggcggcaagctttattctagcactgcctgtgtgggtttactcaaaggtgataaagtttaaggacggcgtggaatcatgcgcttttgacttgacttcccctgacgatgtgctttggtataccctgtatctgaccattaccacattcttcttccctctccctctaatacttgtgtgctacattctgatactttgttacacttgggaaatgtatcagcagaataaagacgccaggtgctgtaatccttcggtccccaagcaacgggtgatgaaactgaccaaaatggtcctcgtgctggtggttgtctttatcctatctgccgctccgtaccacgtgatacaactggtgaatctacagatggagcagcccaccctcgctttttatgtgggatactacttatctatctgcctgagctacgcgtccagctccattaaccccttcctttatattttgttgtctggcaacttccagaagaggctgccacagatacagaggcgggctacagaaaaagagatcaataatatggggaacacactgaagtcacatttctag

SEQ ID NO: 32747 - DNA, 1023 bp, Artificial Sequence
  derived and/or modified sequence
atgaaccccttccacgccagctgctggaacaccagcgccgagctgctgaacaagagctggaacaaggagttcgcctaccagaccgccagcgtggtggacaccgtgatcctgcccagcatgatcggcatcatctgcagcaccggcctggtgggcaacatcctgatcgtgttcaccatcatcagaagcagaaagaagaccgtgcccgacatctacatctgcaacctggccgtggccgacctggtgcacatcgtgggcatgcccttcctgatccaccagtgggccagaggcggcgagtgggtgttcggcggccccctgtgcaccatcatcaccagcctggacacctgcaaccagttcgcctgcagcgccatcatgaccgtgatgagcgtggacagatacttcgccctggtgcagcccttcagactgaccagatggagaaccagatacaagaccatcagaatcaacctgggcctgtgggccgccagcttcatcctggccctgcccgtgtgggtgtacagcaaggtgatcaagttcaaggacggcgtggagagctgcgccttcgacctgaccagccccgacgacgtgctgtggtacaccctgtacctgaccatcaccaccttcttcttccccctgcccctgatcctggtgtgctacatcctgatcctgtgctacacctgggagatgtaccagcagaacaaggacgccagatgctgcaaccccagcgtgcccaagcagagagtgatgaagctgaccaagatggtgctggtgctggtggtggtgttcatcctgagcgccgccccctaccacgtgatccagctggtgaacctgcagatggagcagcccaccctggccttctacgtgggctactacctgagcatctgcctgagctacgccagcagcagcatcaaccccttcctgtacatcctgctgagcggcaacttccagaagagactgccccagatccagagaagagccaccgagaaggagatcaacaacatgggcaacaccctgaagagccacttctag

SEQ ID NO: 32748 - protein, 311 aa, Artificial Sequence
  derived and/or modified sequence
MHQKLLKSAHYIELGSYQYWPVLVPRGIRLYTYEQIPGSLKDNPYITDGYRAYLPSRLCIKSLFILSNETVNIWSHLLGFFLFFTLGIYDMTSVLPSASASREDFVICSICLFCFQVCMLCSVGYHLFSCHRSEKTCRRWMALDYAGISIGILGCYVSGVFYAFYCNNYWRQVYLITVLAMILAVFFAQIHPNYLTQQWQRLRSIIFCSVSGYGVIPTLHWVWLNGGIGAPIVQDFAPRVIVMYMIALLAFLFYISKVPERYFPGQLNYLGSSHQIWHILAVVMLYWWHQSTVYVMQYRHSKPCPDYVSHL

SEQ ID NO: 32749 - DNA, 936 bp, Artificial Sequence
  derived and/or modified sequence
atgcaccagaagctgctgaagagcgcccactacatcgagctgggcagctaccagtactggcccgtgctggtgcccagaggcatcagactgtacacctacgagcagatccccggcagcctgaaggacaacccctacatcaccgacggctacagagcctacctgcccagcagactgtgcatcaagagcctgttcatcctgagcaacgagaccgtgaacatctggagccacctgctgggcttcttcctgttcttcaccctgggcatctacgacatgaccagcgtgctgcccagcgccagcgccagcagagaggacttcgtgatctgcagcatctgcctgttctgcttccaggtgtgcatgctgtgcagcgtgggctaccacctgttcagctgccacagaagcgagaagacctgcagaagatggatggccctggactacgccggcatcagcatcggcatcctgggctgctacgtgagcggcgtgttctacgccttctactgcaacaactactggagacaggtgtacctgatcaccgtgctggccatgatcctggccgtgttcttcgcccagatccaccccaactacctgacccagcagtggcagagactgagaagcatcatcttctgcagcgtgagcggctacggcgtgatccccaccctgcactgggtgtggctgaacggcggcatcggcgcccccatcgtgcaggacttcgcccccagagtgatcgtgatgtacatgatcgccctgctggccttcctgttctacatcagcaaggtgcccgagagatacttccccggccagctgaactacctgggcagcagccaccagatctggcacatcctggccgtggtgatgctgtactggtggcaccagagcaccgtgtacgtgatgcagtacagacacagcaagccctgccccgactacgtgagccacctgtag

SEQ ID NO: 32750 - DNA, 936 bp, Artificial Sequence
  derived and/or modified sequence
atgcaccagaagctgttgaaatcagctcactatattgagttggggtcttatcaatactggccggttctggtgccacgcggaatccggctgtacacatacgaacaaatcccagggagcctcaaagacaacccatacatcactgatggataccgggcatatctcccgtcccgactttgtatcaagagcttattcatcctgagcaacgagaccgtgaacatatggtcacaccttttgggcttttttctgttcttcacattgggaatttatgatatgacttcggttctgccgtccgcgagtgcttcaagggaggactttgtaatttgtagtatctgcctcttttgtttccaggtatgcatgctttgctcggtgggctatcacctgttttcttgtcatagatccgaaaaaacgtgtcggcggtggatggcactggactacgctggcatttctataggaatccttggctgctacgtatcaggagtgttttatgccttctattgtaataattattggcgccaggtgtatcttattactgtgttggctatgatccttgcagttttcttcgcccaaatacacccaaactatttaacacagcagtggcagcggctccgcagcataattttctgttcagtttccgggtatggggtcattccaactttgcattgggtgtggctcaatggcggaattggtgcgcccattgtccaggactttgcccccagagtgattgtgatgtatatgatcgccctcttggctttccttttttatatctccaaagtgccagagaggtattttccgggccagctcaattatctgggatcgagtcatcagatatggcacattctcgcagtggtgatgctctactggtggcatcagtcaacggtgtacgttatgcaatatagacattcaaagccgtgccctgactacgtctcccatttatag

SEQ ID NO: 32751 - DNA, 936 bp, Artificial Sequence
  derived and/or modified sequence
atgcaccagaagctcctcaagagcgcccattacattgagcttggaagttatcaatactggccggttctggtcccaaggggtatacgactgtacacgtacgagcagattccgggtagtctcaaagataacccctacattacagacggatatcgagcgtacctgcccagtagactatgtatcaaatccctgttcatacttagtaatgaaacagtgaatatatggtcccacctgctggggttctttctgttcttcactctggggatctacgatatgacatccgttttgccgagtgcctctgccagccgagaggattttgtcatctgttctatctgtctgttctgttttcaggtctgcatgctgtgcagcgtggggtatcatctcttctcttgccacagaagcgagaaaacttgccgccggtggatggccctagactatgcaggcatcagtattggaatattaggttgctacgtctctggggttttctatgccttttattgcaacaactactggagacaagtttatctgatcaccgtcttggcgatgatactggccgttttcttcgcacaaatacacccaaattacttaacgcagcagtggcagcggctgagatctattattttttgttctgtaagtggctacggcgtcatccctactcttcattgggtgtggctcaatggaggtataggcgcaccgatcgttcaggactttgcacccagggttatcgtgatgtatatgatagcactgttggcctttctgttctatatctctaaagtgcctgagaggtatttccctggtcaactaaactatctgggtagcagtcatcagatttggcacatcttggctgttgtgatgctttactggtggcatcaatcaacagtatatgtgatgcaataccggcactccaagccatgtccggactatgtctcacatttatag

SEQ ID NO: 32752 - DNA, 936 bp, Artificial Sequence
  derived and/or modified sequence
atgcaccagaagctgctgaagagcgcccactacatcgagctgggcagctaccagtactggcctgtgctggtgccccggggcatccggctgtacacctatgagcagatccctggcagcctgaaggacaacccctacatcacagatggctaccgggcctacctgcccagccggctgtgcatcaagagcctcttcatcctgagcaatgagaccgtgaacatctggagccacctgctgggcttcttcctgttcttcaccctgggcatctatgacatgacctctgtgctgcccagcgccagcgccagcagagaagattttgtgatctgcagcatctgcctcttctgcttccaggtgtgcatgctgtgcagcgtgggctaccacctgttcagctgccacaggtctgagaagacctgccgccgctggatggccctggactatgccggcatcagcatcggcatcctgggctgctacgtgtctggagtcttctacgccttctactgcaacaactactggaggcaggtgtacctgatcaccgtgctggccatgatcctggccgtgttctttgcccagatccaccccaactacctgacccagcagtggcagaggctgcggagcatcatcttctgcagcgtgtctggctatggagtcatccccaccctgcactgggtgtggctgaatggaggcatcggggcccccatcgtgcaggactttgccccccgggtgattgtgatgtacatgattgccctgctggccttcctgttctacatcagcaaggtgcctgagcgctacttccctggccagctgaactacctgggcagcagccaccagatctggcacatcctggccgtggtgatgctgtactggtggcaccagagcacagtgtatgtgatgcagtaccgccacagcaagccctgcccagactatgtgagccacctgtag

SEQ ID NO: 32753 - DNA, 936 bp, Artificial Sequence
  derived and/or modified sequence
atgcaccagaagctgctgaagagcgcccactacatcgagctgggcagctatcagtactggcctgtgctggttccacggggaatccgtttatacacgtatgaacagatacccgggagtctgaaggacaatccatacatcactgatggctaccgagcctacttaccctcgcgcctgtgtattaagtccttattcattctttccaacgaaactgtaaatatttggagccatctgctgggcttcttcctgttcttcacgctcggtatttacgatatgacctctgtgttgccaagtgccagtgccagcagggaagactttgtgatatgcagtatctgtcttttttgcttccaggtgtgcatgttatgtagtgtgggatatcatctgttctcttgccaccggtctgagaagacctgccgccgttggatggccctggactacgcagggatctctattggtattctcgggtgctatgtgtccggggtgttctatgcattctattgcaataattattggcggcaggtgtacttaatcaccgtgctagcaatgatcctggccgtgttttttgcccagatacatccaaattatcttacccagcaatggcaacgactgcggtctattatcttctgttctgtgagcggttacggggtgatccctaccctgcactgggtctggctgaacgggggaataggtgcccctatcgtccaagatttcgctccaagagtcatcgtgatgtacatgatagctctcttagcctttctgttttacatatcaaaggtcccagaacgctacttccccggacaactcaactatttggggagcagccaccaaatctggcatatcctggccgttgttatgctgtactggtggcaccagagcacagtttatgtgatgcagtaccgtcatagtaagccatgtcccgactatgtgagccatctgtag

SEQ ID NO: 32754 - DNA, 936 bp, Artificial Sequence
  derived and/or modified sequence
atgcaccagaagctgctgaagagcgcccactacatcgagctgggcagctaccagtattggcctgttctggtgccccggggtatcagactgtacacatatgagcagatccctggaagcctaaaggataatccatatattacggatggctacagagcatacctgccctcccgtctgtgcattaagtcactgttcatcctctccaatgagactgtcaacatctggtcgcacctactggggttctttctgttcttcacactgggaatttacgacatgacttcagtactgcccagcgcatcggcctcccgtgaagacttcgtcatctgcagtatttgtctcttctgcttccaagtctgtatgctttgctccgtgggctatcaccttttcagttgtcacaggtccgagaagacttgccgccgatggatggcgctggactacgccggaatcagtatcggcatcctagggtgctatgtgtctggggttttttatgcattttattgcaataactattggagacaggtgtatctgatcacagtgctcgcaatgatcttggccgtgttctttgcacagatccatcctaactacctcacccagcagtggcagcggttgagaagtataattttctgtagcgtgagtggatatggagtgatccccaccctgcattgggtctggctgaacggtggaatcggcgcacccattgtgcaagatttcgcaccaagggtaatcgtgatgtatatgatcgcactcctcgccttccttttctacataagcaaggtgcccgagcgatacttccccgggcaattgaattatctgggttcctcccatcagatttggcacatcctggccgtggtcatgctctattggtggcaccagagcacagtttatgtgatgcagtacagacactccaagccatgtccggactacgtgagccacctctag

SEQ ID NO: 32755 - DNA, 9811 bp, Artificial Sequence
  derived and/or modified sequence
agaggaggctgcgacgctgccgggtccgccgcggcgctggcggcagtggccggtgtgagcgcagagccgggccctgggcagcagcggcagcgcggtaggacctcgcgcagcgtccgcgggctccggggcgggggcgccagcggcgaagccccctccccggggaggcgggacctgggggagctcccgagccggggagcggcggcggccgggaacgatgcatcagaagctgctgaagagcgcgcattacatcgagctgggcagctaccagtactggccggtcctggtgccccgtggcatccgcctgtacacctacgagcagatccccgggtccctcaaggacaacccgtacatcaccgacggctaccgggcctacctgccgtccaggctgtgtatcaaaagtttgtttattttatctaatgagacagtaaacatctggagtcatttgctgggtttctttctcttcttcaccctgggaatatatgacatgacatctgtgttaccttcagcaagtgcgtccagagaagattttgtaatttgttctatttgtcttttctgcttccaggtctgtatgctttgctctgtgggctatcatcttttttcctgccatcggtcagaaaaaacatgtcgaagatggatggcattagattatgcaggaatttctattggaatactgggctgctatgtctcaggagtattttacgcattttattgtaataactactggcgtcaggtgtacttgatcacagtgcttgctatgatcctggcagtgttctttgcgcagattcatcccaattacctcacgcagcaatggcaaaggctccgttctatcatcttttgttctgtttcgggatatggagtgattcctactcttcactgggtttggctcaatggaggaattggtgctcctattgtacaggactttgcaccccgtgtaattgtgatgtatatgattgctcttcttgctttcctattctacatttccaaagtcccagagcggtactttccaggacaactaaactacctcggatcaagccaccaaatatggcatatccttgcagtagtgatgttatattggtggcatcagtcaacagtgtatgtcatgcagtacagacatagcaagccttgtcctgactatgtttcacatttgtgaattaggtatggccacctggtgaattcagttgttaagcaatatataatggggaattgtataccccactatttctaagattcccattagttttccctttttcctttttaatatgagtaatgctttataaaaatgggaaaaaaagtatacttaaggatctgtagtaataactgctttacaaaatccttaaaactactaatttgctgcttgtacagaaagtgaaaattagttggcaatcataagaaacatctgaataacaacgatgaatgggaaactagtgttgaaataggattcattttacttagcaccagcttaatttccttaggaagggctcatgtccattagaaaatggagtcatcttatgtgcttaattattttcagttaattgtcaagtttaagtgcctaatcaaggcaagtgttgtttcagcctatgcttaatgcaagctaggatagtgattttaaataatcactaaaatcactagatttaaataatcactaaaatgatttgtgagaaactggcacttcagatattatatcctttagctataggttcttctctccctaagaacattagatattttagttttccagaacaaaagctttaaacttctgcagtaagttgagagaagggttgagaagaggaaaagaacttctcattttctatcagataagaatcacattagaaactaagtacaagattagacaacaaattatgtggtcaaataatatagtcattagccacctaaacattttaattccagatattatttaattccatataataactgaattcttgtgagtggattacaggtttttgatcccaaaattccagagctttcaactctctgaatttgtagtcctgaatatcccagtggtgggggttcccagcattgtgggtgctacttgcaaggccatagaatctagatggccctgtcttgaccctgaaatgaaccttaagccttagaacaaagtcatgcagatgccccatttgataataatcttattcacctgtgctctggtcctcggtttctgcatgtgttagcattgcattgataactcagaatcttgataaacacttaatatttgggcctgaagcattaaactttctttttattgtatatacttaaaaaatagaactcactgccctatcatacattgtagccctcttattctttggtctttcatatgcattagttaaatcccttaaagtagacattcataaaaacttacattgtttattggagtataaaatattacccaagtttcttcatgagttgacatgagctgttttaaatactggtgtattttcagaacagtaaaattactgaatatcagaaaaaatgttaattgatgatgaagcttattcccaaaatgccttttgtgcatatgatacttggaaagtcactaatgtgcctcagttaatacatcagtaaaatgttgtgtttcttttccagtgtagtgtttttggaatataaattccccatgctagtatagtatctcagcaaagagaatttccccccaggaggctcagtaaaggaataccgtgtcttacccatcgttatgatggaaggctgctttgaaaatggctgttttaccttataaggttaaaattttgatccatatgttaagtgatagaagattttggtgcaacagtagtaggatatatttctcctagaacatcccttattggcttacatgattttattgccttttaatagatattttgtcattttggccaaacaaaagacactgagtagttacacttaagttaaaaatgaggggaaaatcattattttaggtgtggagccatttttattataaaactttctcaaaataaaaaaacattgaatcatttcaatttttgcagtccctgtattagtatatgaatacatacttgccatttgaattaataacatgaaaagagtatactgtgtttttaaatccgtgtttctttgaatttaaagggtgtacaggtctttctgtagggaaaattattccatgtaaacatttcaactctgtatgaaaatgttaaatattgtaagaaagttatcctctcattttttcactgctatgatatatttattataaaatagggaatgaatgaatgaatatggattgctgttaactagaaacacttctgtatgtcagtcagcatttaatgaccacctactgtgtgcacagcactactggtaaaattttgaagacattgttaacattaaaaaatattttaaagttgtctacaaatctgagccttgtaatgatgtatatttaagttatttttgtttttatagattaaagtaagattaaaatatactatccagttttattactaaaaaagactggttttaattttaccaatgtgtgaactataaaagctttttgcctacagattttacattttaaaattatctatggctgttttaaattgtctagcaatttatatggttgtggttaactcatttaagaaacaattatctttctatattaagccattttcaaatagcaagacagtgcttgtctttttttgttattacactaactgcaattcagtaagctgcatgacaaaatatgtattatgtaaataaactgggtttactaaatatttttaactgctgcttgtcattctttgtaatacataacagctttaaaatcatattttagaatcaggaacgaagattcagggaatgtctgtcacatcttatggcatcccacctggacagaatatccgatttgaagattgtgattgacttccgtaaaactgtacaactctccatttggcaggtacctactagataatactttgccctgtattaaatgtcaaggggcaaagcctattcctgtgaattcctgctggttgctttgctgcattaggtccctgtccactgtaaatcatcattcctgggaattctacttctgcccaagtgtgtaaagaatcagctcacctattagagaaggggtagaaataccttctgtgtgcattatcacaataactgtgtttacactaaagaggtgtaaatacagtcctctgaaattttgtaccagaattcccaagtagtgtaatgagataatgatccagaactgaaactacccttaagaaaacatttttggaagggagaggtaaatagcagtagggggtttcttgtgaaaaattaacctccatccttaagagggctgaaatgaacagccaccaaggttctagtcctgctctataaaatctgagatcaaaatactacctaacctgcacataatctcaattgtgacaaccatctgaactatctcatttaatatgtaacaacaaatacaagctcaagctttcaatatgagaatattaactacatgttacatatgatgcttgacctgggcttccttaaaaaggtattcgttatccaaaataaatagctcaaattgcagcatatattcatctcaagtaactataactgaatttgaacagtaatacactgcaaactattctttgttaatagaacttttctaatcatttgtgttattttgctttgtaccattcattttcattaaaaagatacaaagcccctttttttcacataactttagataaatgttacaacttcagaaaaagttaattcataaaaataggatgaacctttccacaggctaccaaagactccagtttttggaataatacatattataaccttgatgccaagcttagtccatcaatccaataaataggttttctctttaatgtgtcatagcctcttttctgatataattgaggattacaatgttatttaagcaaataaccagtattaattcagccaaagatgttatcagttttaaagatttttaaaaatttataatgtggaagctgtaaaataagttattcagaaggcactacacaatattgtttttgccttactgtcatcactcgagtatcagtaattatgactcactgaaaaagtcgtgctattaagtgttcttgtggcaaaaactcttaagtcaaatgggttttcttacctaaattgtaaactctgagctccttaagaatagggatctaatcttagcaacttttctattccactagctgctacataataggtgcttaatgtttgtggtgtgaatgaaataactgaatttgaatagaagtttacatccaaaagtcataataagacaaataatgaaaaactccaaagtcactgattataaagaatatgcaatccatttgggatttattgcatttaaagaaaacagattaaaacaggtatgataaatacagtaagaaaataactttaaatttcaaacaaaacagtgaatcagggacagaattcagtcaaaaagaataagcagtgtaaaggcaataaagtaataaaatcagttagtgcttaattagatatggcaggggaaaaggggtgggagggggagactgagtctatctcataattgtttcccagctatatttgaggactgaagttactttagcaagtatgttttgtaacaagtagaaatacaataaagatgtaaatttgctttatttaaaggttaaagttatttgcttagtggtacataaaaggcttcagaaaattcaagtttaacaaaaaatggaagtgtaatcaaagaaagtgcacttaaagctgtttgccagcaattaaaaagtagcttctatacagcttctattagatgacttttcaatcacaaaaagagcatagtcataaaaacaattctttcaaaagtagcagtataaattttaaaataaaacaaaaataaccccaaatcatgaccctttgcattatcatctaccttattctcttagtagcttttgtaaaccctcactaggagtgaatgttctcttagatatgattgtggttgcaattccattttttaaaaattcacattaactccacagtagagagatgtgacatgcatgtgtgtacatatttttatcttaatatataaaacaccactgagtataaaagttctcaaataaactattcatcatttatggtattctcacagtagatatgtcatctcattctcacagtagactgtcaactcaataattggacctaaaataacaagtttgctaaaaagaaaaaaaaatgagaaaaaagtttactgcacattctaaatatattaaaaacaaatgtacccaagcgcctcaaaactagtgatattaatacacttgtaccttctaacagtgcttacgtgaagtaccaaaacctaaaataaaccaagcagagtagctgacttgtaagaaaactgctctgcctggtgaacttcagcatagaagagtgggctccaccttagattttccaccagcaagaggacaacagtctatcactcttaaacaataaacagggtaagactgaaagttgtgtctatttgcaaatccggataatgtcgtaactatacccaacacgtacacagggattggggtaagggaaaataattacactcctgaataaatgttctagtcagttaaattttcatccggcctacaacctttcctcctccacctattatacttaccatgcaatttttgtgtcttagcagatacattcttcaatgccataaaaagctgatctttttaatactaacattttactgacgtgatattaaaataagcaaatggtccactttttaaaggattattcaaaatcaacaagcattattaaagctgttaagaaacaactttggcctcaagatttttgctagcttcataataatttacttctcttagtgatgttcaagtataacaggtttagttataactacatcctaaagaagcacaggggacacccaaataatattagggaaaaaaaaccccaaatatatatatatatatatatttgcttagtggtacatatataataacctttcttccttccttaaaccagaattgaaccatcccataatagagccaaacttttattgagtgctgtgtgccaggtactgtgttaagcactttcacatatcttgggagctttattctcataattctcacaagggaataacctgagcatcagctgtgtggagtgacctacaccttgaccatgattctgggggatgatgaatgaaaatgcaaagtataaatctatactccttaggaaaatgcctctactacaacacaaaggaatctctccatttctatcctattgaacccccaattgaatcctgtatcttttctctgagctacaatcttgaaagaagaaagtcactgtgctgtgttataagaatgtaaatattttatgctgtcagttgtttcctcagaatttataagtcaaagggtctacatcagtgtcagaatcatttaaaattattcagtgtattgaaaagcaagtaaaactctaggtatttcatgtttacatctgaaggagacattagttcatcctctaccccttttctaaatgatgaaactcatgaggtctagcagagaccaaggactaatacaatcaagaagcatattgtgtacacctcaacagattttcattaaaaaaaattgtttgatacaaacctactgtagttcatgaatttactatgtgtaatcatcaactcttcacttttaaaagaaagtatcacttgaatctattttgtaaagtttttaaacatctacttgagcatttgcattagcagtattaatcaacctgagaatcagaaaaaaaaaaaaaggtgcaaacatatttgcctttggcacgaggacaagtaattggtgcagtccagctctaaataataatgtaatgcttggtctgcctctgctacattgtgattcacatattgcttccctatccacaaatctatatttgatttagcatataaaagaagggaaaaagcaataaaaagacaaatatgtggtttagttacatatactttgcttctttccaagttcagaactgtgaaaataggcaaatagcttatcccattggggcactataagagattcctaataaaattactcgtaaaatatactttgagatcgaagagagttaatttaaaatataaaaatcaaagagagtgccagttgatgagtttctactcctttctgtaaatagcattaactgttctagaaacttccaaatgttaatctgatagcgcagcacaattatatcttaaaatagtcatagacacaggaagcacagatactatattcacattaattcacatatgtaatctctatcattaaatgatttctataaaacctcaagtttctaattaggatttgtggtgtaaaaaaaggcaaattggtagctgggttcttttcagtaaagacacaatcaactagcagaattaagatgctagtccaccttatatgcattttaggatctggtatattagtgcagaggtacttgcagcaggatgcatgaatcctgcctttatataaggctttgtgggtgtcaccattctgtgcactttattaaaactactccaccccccaaaacctaataaaaataattgttgcttatgacttggggaatatttggtgaagttgctaataaagtacattgttaaatgcaacatgatttcacattgtaaatgtcttgaaaattcagtttccgctacatattttcttcataaaataaaatttttatacaacccttgtcctccaatttttccaataatctgctttattagggccatcacaataaaagtttggggcaagaagccatgcataaagtgtttctaaagtagtgaatgttttctgttctgtatctttttttcttcttataatttctttacaaatgtcagatatttctcttcatatttttgttctaggcttctgtgcgacgatagtccatttttttaatttgttttaactgacaaaaattatatatatttatcatgtataacattgttttggaatatgtaagttgtggaatagttaaattgagctaattacacattatttcatatgcttatcattagatattccattttaatggcacttgtttttaaaaatgaaacagagttttaggcacaatagtcagttacttctggctctgctttgtggagaaaggtgtatggactgaaatctctgcactctccagataataactttctaatgctttaagataactagattgtttttaactgtctggaaattaaaagagaccttaaaaaaaattcacaagtgtaactagtgtatgtagaaataaccctaattttagggatatgcacataaaaatgacattctgatatcaaaaataacagtttcactgtcccttctcagtggctacacacctagaaaggtgccatgtgctttcactggaagtaccacacttgcatttctgtgttgtgatgtcagtagcagaaacccttagttagagcttgcaatttagctcccttttctcctgaagaggaatcaagttactaccctgtagagatacttcattcttctatttggtttatttagaaatcacctattctgactgatctttaagaatgaatgctataaagagctaccaaattttctttcaaattcataaaactgttcacacttttttgaaacaggagttaatgccgagaatccatcagaagtatctactgtttagaaggaaatggagcagcaccaaatgggtctaattcgactggttgggactgttgggactgatgtggagtgatgctttgcaccacaagttctgtaaagggcacggcaccaaaatcatccattttcaatacatctgcactatggaatga

SEQ ID NO: 32756 - DNA, 936 bp, Artificial Sequence
  derived and/or modified sequence
atgcatcagaaactgctgaagtccgctcattacatcgagcttgggagttatcaatattggcccgtattagtcccacgagggattaggctgtacacgtacgaacagattccagggtctctgaaagacaacccttacatcactgacgggtatcgcgcataccttcctagtcgcctctgtattaagagtctgtttatcctgagcaacgagactgttaacatctggtctcatctcttgggattcttcctgttctttaccctgggaatatatgatatgacaagcgtgcttccatctgctagcgccagccgggaggattttgtgatttgcagtatttgcctgttttgctttcaggtgtgcatgctctgttctgtggggtatcatttgtttagttgccatcgtagtgagaagacgtgtagacgctggatggcactggattatgctggtatctccattggtattttaggctgctatgtctccggggtcttttatgcattctattgtaataattactggcgtcaggtgtacctgatcacagtgctggcaatgatacttgcagtattctttgcccagatacacccaaactatctcacccagcagtggcagaggttacgatccatcattttttgttccgtgagcggttatggtgtgataccaaccctacattgggtatggttaaacgggggaattggagctccaatcgtccaggactttgctccgagggtgatcgttatgtacatgatcgcactgctcgccttcctgttctacatttcgaaagtgccagaacgatatttccccggacagttgaactaccttggcagttcccaccagatttggcatattctcgccgtcgtgatgctttattggtggcaccagagcacagtgtacgtgatgcagtatcgccactcaaaaccctgccctgattacgtgtcacatctgtag

SEQ ID NO: 32757 - DNA, 936 bp, Artificial Sequence
  derived and/or modified sequence
atgcaccaaaagctgctgaaaagtgcccactacatagagctgggtagctaccagtactggccagttttggtcccaagaggtattcggctgtacacttacgagcagatcccagggagcctgaaggataacccttatattacggatggatatcgcgcttacctgccctctcgcctctgtatcaagtccttgttcatcttaagtaatgaaacggtgaacatctggagccatcttctgggatttttcctgttctttacactggggatttacgacatgacctctgtgctgccctctgcctctgcctctcgggaggattttgtgatttgctcaatttgcctattctgctttcaggtttgcatgctgtgtagcgtcggatatcatctttttagctgccatagaagtgaaaagacctgtcgcagatggatggcactcgactacgccggaatatcaatcggtattctgggttgttatgtgagcggcgtgttctacgctttctactgcaataattattggcgccaagtctacctgatcaccgtcctggcaatgatcctcgccgtttttttcgcccagatccatccaaactacctgacccagcagtggcagaggttacgctctatcatcttttgctctgtcagtggttacggtgtgattcccaccctgcactgggtgtggctaaacggcggtatcggggctccaattgtacaggattttgccccaagagtgatcgtcatgtatatgatcgcgttgctcgccttcctgttctatattagtaaagtgccagagagatattttcctgggcagctgaattatctgggaagtagtcatcagatctggcacatcctggccgtggtgatgctttactggtggcatcagagcacagtctacgtgatgcagtaccgccactcaaaaccttgcccggattatgtttcccacctgtag

SEQ ID NO: 32758 - protein, 188 aa, Artificial Sequence
  derived and/or modified sequence
MGYCSGRCTLIFICGMQLVCVLERQIFDFLGYQWAPILANFVHIIIVILGLFGTIQYRPRYITGYAVWLVLWVTWNVFVICFYLEAGDLSKETDLILTFNISMHRSWWMENGPGCTVTSVTPAPDWAPEDHRYITVSGCLLEYQYIEVAHSSLQIVLAVSVGSQPLLLVPLGLFYFCANSVHTNGICG

SEQ ID NO: 32759 - protein, 208 aa, Artificial Sequence
  derived and/or modified sequence
MGYCSGRCTLIFICGMQLVCVLERQIFDFLGYQWAPILANFVHIIIVILGLFGTIQYRPRYITGYAVWLVLWVTWNVFVICFYLEAGDLSKETDLILTFNISMHRSWWMENGPGCTVTSVTPAPDWAPEDHRYITVSGCLLEYQYIEVAHSSLQIVLALAGFIYACYVVKCITEEEDSFDFIGGFDSYGYQGPQKTSHLQLQPMYMSK

SEQ ID NO: 32760 - protein, 191 aa, Artificial Sequence
  derived and/or modified sequence
MKIVCVLERQIFDFLGYQWAPILANFVHIIIVILGLFGTIQYRPRYITGYAVWLVLWVTWNVFVICFYLEAGDLSKETDLILTFNISMHRSWWMENGPGCTVTSVTPAPDWAPEDHRYITVSGCLLEYQYIEVAHSSLQIVLALAGFIYACYVVKCITEEEDSFDFIGGFDSYGYQGPQKTSHLQLQPMYM

SEQ ID NO: 32761 - DNA, 627 bp, Artificial Sequence
  derived and/or modified sequence
atgggctattgttctggtaggtgcacgctgatcttcatatgtggaatgcagctcgtctgtgtcctcgagcgacagatcttcgacttccttggctatcaatgggcgcctatactggccaacttcgtacacataatcattgtgatcctgggactgttcggcacaatccaatataggccccgttacattactggctacgctgtgtggcttgtgttatgggtgacctggaacgtgttcgtgatctgcttttacctcgaggctggggacctgtcaaaggagacggacctgatccttacgtttaacatttccatgcatcgctcttggtggatggagaacgggccaggctgtactgtaacttctgtgacaccagccccagattgggctcctgaggaccaccggtatattacggtcagtgggtgcctactggagtatcaatacattgaggtggcgcattcctctctgcagatagtgcttgcactggctgggtttatttacgcgtgttacgtagtgaaatgtataaccgaggaagaggattcgtttgactttattggtggttttgacagttacggttatcagggcccacagaaaacgagccacctgcagctgcagccaatgtacatgtctaaatag

SEQ ID NO: 32762 - DNA, 576 bp, Artificial Sequence
  derived and/or modified sequence
atgaagatcgtttgcgtcttagaaagacagatcttcgatttcctgggttaccagtgggctccaatcttggccaactttgtgcacattattatcgtgatactcggcctgttcggcactatccagtacagaccacgttacataaccggctacgccgtctggctggtactctgggtaacttggaatgtctttgtcatttgtttttatttggaagccggcgacctcagtaaagaaactgacctcatcttaacatttaatattagtatgcaccgaagctggtggatggagaacggtccagggtgcaccgttacctcagtaacccccgctcctgactgggccccggaagaccacagatatattaccgtgagtggttgtctgctcgaatatcagtacatcgaagtggcacattcgtctttgcagatagtgctggctctcgctggttttatttacgcgtgttacgttgttaaatgtatcacagaggaggaggactcctttgatttcatcgggggctttgacagctacggctaccagggcccccagaaaacctcacaccttcaactccagccaatgtatatgtag

SEQ ID NO: 32763 - DNA, 627 bp, Artificial Sequence
  derived and/or modified sequence
atgggctactgcagcggccgctgcaccctcatcttcatctgtggcatgcagctggtgtgtgtgctggagcggcagatctttgacttcctgggctaccagtgggcccccatcctggccaactttgtgcacatcatcatcgtcatcctgggcctgtttggcaccatccagtaccggccccgctacatcaccggctatgctgtgtggctggtgctgtgggtgacctggaatgtgtttgtgatctgcttctacctggaggccggggacctgagcaaggagacagacctgatcctgaccttcaacatctccatgcaccgctcctggtggatggagaatggacctggctgcaccgtgacctctgtgaccccagccccagactgggcccctgaggaccaccgctacatcaccgtgtctggctgcctgctggagtaccagtacatcgaggtggcccacagcagcctgcagatcgtgctggccctggccggcttcatctatgcctgctacgtggtgaagtgcatcacagaggaggaggacagctttgacttcatcggcggctttgacagctatggctaccagggcccccagaagaccagccacctgcagctgcagcccatgtacatgagcaagtag

SEQ ID NO: 32764 - DNA, 576 bp, Artificial Sequence
  derived and/or modified sequence
atgaagatcgtgtgtgtgctggagcggcagatctttgacttcctgggctaccagtgggcccccatcctggccaactttgtgcacatcatcatcgtcatcctgggcctgtttggcaccatccagtaccggccccgctacatcaccggctatgctgtgtggctggtgctgtgggtgacctggaatgtgtttgtgatctgcttctacctggaggccggggacctgagcaaggagacagacctgatcctgaccttcaacatctccatgcaccgctcctggtggatggagaatggacctggctgcaccgtgacctctgtgaccccagccccagactgggcccctgaggaccaccgctacatcaccgtgtctggctgcctgctggagtaccagtacatcgaggtggcccacagcagcctgcagatcgtgctggccctggccggcttcatctatgcctgctacgtggtgaagtgcatcacagaggaggaggacagctttgacttcatcggcggctttgacagctatggctaccagggcccccagaagaccagccacctgcagctgcagcccatgtacatgtag

SEQ ID NO: 32765 - DNA, 3115 bp, Artificial Sequence
  derived and/or modified sequence
gtgggggctcgacggtggccgacgtgggacagtctggctgtggcaggggtctcggaaaccatgggttattgcagtggcaggtgcacgcttatctttatctgtggcatgcaactggtttgtgtgctggagaggcaaatatttgacttccttggatatcagtgggcacctatcctggcaaattttgtacatattattatcgtcattcttggtttgtttggaactattcaatatagacctcgttacataacaggatatgctgtctggctagtcctctgggttacgtggaatgtgtttgttatctgcttctatttggaggctggggacctctcaaaggaaacagaccttatcctgacttttaatatatcaatgcaccgatcttggtggatggagaatggaccaggatgtacggtgacgtcagtgacacctgccccagactgggccccagaagaccatcgctacatcacggtctcagggtgtttgctggagtaccagtacatagaagtggctcatagttccctccagattgtcctcgcactggcaggtttcatctacgcctgttatgttgtgaaatgtataactgaagaagaggacagctttgatttcataggtggctttgactcttatggctatcaagggcctcagaagacatctcatttacaactacagcctatgtacatgtcaaaataatacagatgacttcagtatgtcagcccatggacctttcaaagaacttttttcgcagtggcctcctgcatttcatgaagagcaagaagcaactgagtttaaatacatacacgtattaacaaaacaaatgcaaagcctctacatacaacactgacacacacacacacacacacgtgagcacgcacacaccaattccacttgacctcctctttctaactgaaacagacaaatatgcaggacacgcccatcttggatttcctgaaagcaggcccctttctcccaggccttcggaaagttcagaaggagatgtgttgatgcccaacggttgccggccattgctaactcctctgcagcccagcgggttggcctctgtgagctgggaagtcatccaaggcacattagtttgagagctctgtcttctgcactccatacatcttgacagcaccacggctacttaggcaatgtaattgcaaaaacaaacgaaacatgccatgatgaccttgtacccgaagtccgaaatggcagattgtttgccctaaaggctgtaccgtacatacttgccttaacccacctacattgtgtgcccaagaatcccagtgcagacagccccaagccacttcctttaggctaacacactgctattaattctaaatgagttcaagcctgtgtgtttcatgtcaaggaacaagactgaatagctcagcagctccagtgtgtctgtataagaaaagtgccagctgtcagcaaagtgctttaccatagagcctccatggtggcccaaaagagacaagtaacaataacaatatctgtcatctttataattctaaaatatggtcttctgatggggttgggggtgggacagagtaaaacattaatctactaaactcactaatctactggaagcagaaagcagaaatggcttaactcgctgattttatttattgcactctaggtgcttttataagtatctacaattgtcttttactaacacagaaacagctgtggatttctatcaacagaggccaactgaatatgtattagctatgtttactcttttatatctaattcaaattgaagactctacgtaggtgaacttttttttctaacttcagtgtacaagattatttttgggtgggtggggggagcaatagttaccttggtgaaatatttgagatctttttgtggtatttgggggatctgttgtgtgttagagtgtatttcaaccctcctgtattattgtggcagaaaaactgtgctgttaacgtagttggcaacaagatgcctttggaaacttaatagtaggtcaatgtgtttatggaatattctgaactcctaggaaattttgttctatattttaaagcattatttggttttcattagtggaaaacataattagctcaggcttatcaggaactcagatgagtcatattttttcttggatacacctgagacattaaactcaattttttaaaactaacacaccattctttagtgcagtgaaattcaaaagttataaattggcatggagcaagttttttctttgatttctatgaagtttcagttattggattaaactactttagaccttagcccattcggatctacatacaccagttccattactgtgtttgcatggatgtctgtaatatacacacacatatacatttgaaaatgatagaggaacaaagagttatcattggaacataaactataaaaaaagattccagcactcatgcttgaatttcctcagtgggttgtatgtttgtccatacatacatgtataaaataaacaattgcaaacatgtcagtgaaacctcatatgacgcttttatagtgacatgcatgtttaatgtatgagaaaaatatttaccaatgtattgtcctttgagtcctaaaatataaatactatacatgccagaaactattctaatgtgacttttaatgtgactattaaaaatgaggtttcactgtacattcatgctgtgatgcgatttcaccttatagtacatgtatatgggtacagaaaataaaccctcatattcctgctttaagttacagccaagttttcaccaaatcacaactatcatcaccaccaaaattttaaaaaacagtagttgactactaaaaagtaatcagtggacaggtcatttatgggatcagtaagcacagtagtgtgattatatctgggaaaacatctacagttgtacagctgtatcctcctcaaaatccggtgaagaatgctatttttctaggctgagcttttgttataaacttaatattcagaaggcaagggttatgatcctgatgtgtcctttttttttgcatttgttaattctgaatgtatttttaacagaatgatttttttgacttactagtgtaatttgcattttaaaaataaatggaaaaatacttaagtttctgagccatccct

SEQ ID NO: 32766 - DNA, 576 bp, Artificial Sequence
  derived and/or modified sequence
atgaaaatagtttgtgtgctggagaggcaaatatttgacttccttggatatcagtgggcacctatcctggcaaattttgtacatattattatcgtcattcttggtttgtttggaactattcaatatagacctcgttacataacaggatatgctgtctggctagtcctctgggttacgtggaatgtgtttgttatctgcttctatttggaggctggggacctctcaaaggaaacagaccttatcctgacttttaatatatcaatgcaccgatcttggtggatggagaatggaccaggatgtacggtgacgtcagtgacacctgccccagactgggccccagaagaccatcgctacatcacggtctcagggtgtttgctggagtaccagtacatagaagtggctcatagttccctccagattgtcctcgcactggcaggtttcatctacgcctgttatgttgtgaaatgtataactgaagaagaggacagctttgatttcataggtggctttgactcttatggctatcaagggcctcagaagacatctcatttacaactacagcctatgtacatgtaa

SEQ ID NO: 32767 - DNA, 627 bp, Artificial Sequence
  derived and/or modified sequence
atgggctactgcagcggccggtgcaccctgatcttcatctgcggcatgcaattagtatgtgtgctcgaacgacagattttcgacttcctcggatatcagtgggctccaatccttgctaacttcgttcacattatcattgtgattttagggctgtttgggaccattcagtaccggcctaggtatatcacaggctatgcggtatggctagtcctgtgggtaacttggaatgtctttgtgatctgcttctacctcgaagcaggggacctgagtaaagagactgatctgatcctaaccttcaatatttctatgcatcgctcgtggtggatggagaatgggccaggatgtactgtcacgagtgtcacccctgcaccggactgggcccccgaggaccacagatatatcactgtgagcgggtgcctgcttgagtatcagtacatcgaagtcgctcactctagcctccagattgtgcttgccttggccggattcatttacgcatgttatgttgtaaagtgcattaccgaagaggaggatagcttcgactttatcgggggatttgattcgtacggctatcaggggccacaaaaaacctcacatcttcagctgcagcccatgtacatgagcaaatag

SEQ ID NO: 32768 - DNA, 576 bp, Artificial Sequence
  derived and/or modified sequence
atgaagatcgtgtgcgtgctggagcggcagatcttcgacttcctgggttatcaatgggcccccatcctggcgaacttcgtgcatataattatagtgatcctggggctcttcggcaccatccagtatcgacctcgctatatcactggttacgccgtttggcttgtgctctgggttacatggaacgtttttgtcatctgcttctacctagaggctggcgacctcagcaaggaaactgacttgatcctaacattcaacattagtatgcatcggagttggtggatggagaacgggcccgggtgtactgtaacttctgtcactcccgcacctgactgggcacccgaagaccatcggtacatcactgttagcggctgtctgttagagtaccagtacatcgaggtggctcatagcagcctgcaaatcgtgctggccctggctggctttatctatgcctgttacgtggtgaaatgcattacagaggaagaagactcctttgactttatcgggggctttgacagctatggttatcaaggcccacagaaaacctctcacttacaactccagcccatgtacatgtag

SEQ ID NO: 32769 - DNA, 627 bp, Artificial Sequence
  derived and/or modified sequence
atgggctattgctctggacgctgcacccttatctttatctgtggcatgcagttggtgtgcgtgctggagcggcagatctttgacttcctgggataccaatgggccccaattctcgccaatttcgtccatattatcatcgtgatcttagggctgtttggaaccatacagtaccggccaagatacattaccggctacgccgtttggttggttttgtgggtcacttggaatgttttcgtcatttgcttctacctggaagcgggagaccttagtaaagaaacagacctcattttgacattcaacatatctatgcatagaagctggtggatggaaaatggtcccggatgtacagtcaccagtgttacccctgctccagactgggccccagaagaccatcggtatattacagtgtcagggtgtttgctggaataccaatacatcgaggtggctcactctagtctccagatcgtgctcgctcttgctgggtttatctacgcgtgttatgtcgtcaagtgcatcactgaggaggaggatagctttgacttcatcggcggattcgactcctatggataccaaggtccacagaagacctcccacctgcagttacaacccatgtacatgtccaagtag

SEQ ID NO: 32770 - DNA, 576 bp, Artificial Sequence
  derived and/or modified sequence
atgaaaattgtgtgtgtgctcgaacgccagatctttgacttccttggatatcagtgggcgccaatcttggcgaacttcgttcatattatcatcgtcatacttgggctgttcggaaccatccagtacagaccccgatacatcacagggtatgccgtatggttagttttgtgggtgacatggaatgtgtttgtaatctgcttctatctggaagccggtgatttgagtaaagagacggacctgattttaacattcaacatcagtatgcacagatcttggtggatggagaatggccctgggtgcactgtcacatctgtcacccccgcacctgactgggcgccagaagatcacagatacataaccgttagtggctgtctcctggaatatcagtatattgaggtggcccactctagtctgcaaattgtgttagcacttgcaggatttatctatgcctgctatgtggtgaagtgtatcactgaggaggaggactcattcgatttcatcgggggatttgacagctacgggtatcaggggccacagaaaacaagccatctgcagctgcagccaatgtatatgtag

SEQ ID NO: 32771 - DNA, 627 bp, Artificial Sequence
  derived and/or modified sequence
atgggctactgcagcggcagatgcaccctgatcttcatctgcggcatgcagctggtgtgcgtgctggagagacagatcttcgacttcctgggctaccagtgggcccccatcctggccaacttcgtgcacatcatcatcgtgatcctgggcctgttcggcaccatccagtacagacccagatacatcaccggctacgccgtgtggctggtgctgtgggtgacctggaacgtgttcgtgatctgcttctacctggaggccggcgacctgagcaaggagaccgacctgatcctgaccttcaacatcagcatgcacagaagctggtggatggagaacggccccggctgcaccgtgaccagcgtgacccccgcccccgactgggcccccgaggaccacagatacatcaccgtgagcggctgcctgctggagtaccagtacatcgaggtggcccacagcagcctgcagatcgtgctggccctggccggcttcatctacgcctgctacgtggtgaagtgcatcaccgaggaggaggacagcttcgacttcatcggcggcttcgacagctacggctaccagggcccccagaagaccagccacctgcagctgcagcccatgtacatgagcaagtag

SEQ ID NO: 32772 - DNA, 576 bp, Artificial Sequence
  derived and/or modified sequence
atgaagatcgtgtgcgtgctggagagacagatcttcgacttcctgggctaccagtgggcccccatcctggccaacttcgtgcacatcatcatcgtgatcctgggcctgttcggcaccatccagtacagacccagatacatcaccggctacgccgtgtggctggtgctgtgggtgacctggaacgtgttcgtgatctgcttctacctggaggccggcgacctgagcaaggagaccgacctgatcctgaccttcaacatcagcatgcacagaagctggtggatggagaacggccccggctgcaccgtgaccagcgtgacccccgcccccgactgggcccccgaggaccacagatacatcaccgtgagcggctgcctgctggagtaccagtacatcgaggtggcccacagcagcctgcagatcgtgctggccctggccggcttcatctacgcctgctacgtggtgaagtgcatcaccgaggaggaggacagcttcgacttcatcggcggcttcgacagctacggctaccagggcccccagaagaccagccacctgcagctgcagcccatgtacatgtag

SEQ ID NO: 32773 - protein, 766 aa, Artificial Sequence
  derived and/or modified sequence
MASTRSIELEHFEERDKRPRPGSRRGAPSSSGGSSSSGPKGNGLIPSPAHSAHCSFYRTRTLQALSSEKKAKKARFYRNGDRYFKGLVFAISSDRFRSFDALLIELTRSLSDNVNLPQGVRTIYTIDGSRKVTSLDELLEGESYVCASNEPFRKVDYTKNINPNWSVNIKGGTSRALAAASSVKSEVKESKDFIKPKLVTVIRSGVKPRKAVRILLNKKTAHSFEQVLTDITEAIKLDSGVVKRLCTLDGKQVTCLQDFFGDDDVFIACGPEKFRYAQDDFVLDHSECRVLKSSYSRSSAVKYSGSKSPGPSRRSKSPASVNGTPSSQLSTPKSTKSSSSSPTSPGSFRGLKQISAHGRSSSNVNGGPELDRCISPEGVNGNRCSESSTLLEKYKIGKVIGDGNFAVVKECIDRSTGKEFALKIIDKAKCCGKEHLIENEVSILRRVKHPNIIMLVEEMETATELFLVMELVKGGDLFDAITSSTKYTERDGSAMVYNLANALRYLHGLSIVHRDIKPENLLVCEYPDGTKSLKLGDFGLATVVEGPLYTVCGTPTYVAPEIIAETGYGLKVDIWAAGVITYILLCGFPPFRSENNLQEDLFDQILAGKLEFPAPYWDNITDSAKELISQMLQVNVEARCTAGQILSHPWVSDDASQENNMQAEVTGKLKQHFNNALPKQNSTTTGVSVIMNTALDKEGQIFCSKHCQDSGRPGMEPISPVPPSVEEIPVPGEAVPAPTPPESPTPHPPPAAPGGERAGTWRRHRD

SEQ ID NO: 32774 - DNA, 2301 bp, Artificial Sequence
  derived and/or modified sequence
atggcaagcacaaggtctatcgaactggaacatttcgaagagcgggataagcgtcctagaccgggcagcagacggggagcccccagttctagtggcggaagttcctccagcgggcctaaaggcaatggccttatacctagtccagcccactccgcccattgctctttctatagaactaggacacttcaggctttgtcttctgaaaagaaggcgaaaaaagctcggttctatcgcaatggggaccggtactttaagggattggtattcgccatctctagcgaccgctttagaagcttcgatgctcttctcattgagctgactcgcagcctgagtgataatgtcaatctgcctcaaggtgtaagaacaatttacacaatcgacggtagccgcaaagttacaagccttgacgagctattggagggtgaatcatacgtctgtgcgagcaatgaaccattccgtaaggttgattacacgaagaacattaaccccaattggagtgtgaacataaaaggcggcacctcgcgggccctagcggcagcctcttctgtcaagtcagaggttaaggaatccaaagattttattaagccaaagcttgtgacagtgatcaggtcgggtgtgaaacctaggaaagccgtccggatccttctcaacaagaaaaccgcacactccttcgagcaggttttgaccgacatcactgaggccatcaagctggactctggtgtggtgaagcgcctttgcactctcgacggcaaacaggtgacttgcctccaggacttctttggggacgacgacgtgtttattgcctgcggacctgaaaagtttcgttacgcccaggacgacttcgtgttggatcactccgagtgtcgggtgcttaagtccagttattcacgcagcagcgctgtaaagtacagcggcagtaaatcccctggtccttcgaggagatctaaaagtcccgcctctgttaatggaacaccaagcagccagctcagtactcctaaatccactaagagttcatcctcttctcccacgagccctggctcctttcgcgggcttaaacagatctcagcccatggtcggtcctccagcaacgttaacgggggccccgaattggatcgttgtatcagtcctgagggggtaaatgggaatagatgctccgaaagctcaactttacttgagaagtacaagatcggcaaggtgataggtgacggcaactttgccgtcgtgaaggagtgcatcgaccggtcgacgggcaaggaattcgccctgaagattattgataaggccaaatgctgcgggaaggagcacctgatagaaaacgaggtctccatcttacggcgtgtgaagcatccaaatattattatgctcgtcgaggagatggaaacggcaacagaactctttctggtaatggaactggtaaaggggggtgacctgttcgacgcgattacaagctcaacaaagtacaccgagagagacgggagcgccatggtctacaacttagctaacgctctgagatatcttcacggcctgagcatcgtccatcgggacatcaaacctgagaacctgctggtctgcgagtatcctgacggaaccaagagcctgaaattgggcgacttcggtcttgcgacagtcgtcgagggcccactgtatacagtttgtggcacaccaacatatgtggctccagaaatcattgccgaaactggttacggattgaaggttgacatttgggcggctggagtgataacctacattttgctgtgcggctttccgccgtttaggtcggagaataacctgcaagaggacctattcgatcagatactggccggcaaactggagtttcccgccccttactgggataacatcacagacagtgccaaggagttgatttctcaaatgttgcaggtgaacgtggaggcacgctgcacggcaggacaaatcctttcacatccctgggtgagcgatgatgcttcacaggagaacaatatgcaggctgaggtcactggtaaactgaaacagcacttcaataacgcactgcccaagcaaaattcgaccactaccggggtatccgtaattatgaatactgctttggataaagaaggtcagattttttgttctaaacattgtcaagattctggcaggccaggcatggagcctatttcaccagttcccccgtctgtggaagaaattcccgtccccggcgaagccgtgcctgcccctaccccccctgaatcccccaccccccatcctccgccagccgcacccggcggtgagcgcgctggcacttggcggagacatcgggactag

SEQ ID NO: 32775 - DNA, 2301 bp, Artificial Sequence
  derived and/or modified sequence
atggccagcaccaggagcattgagctggagcactttgaggagcgggacaagaggcccaggcctggcagccggcggggggcccccagcagcagcggcggcagcagcagcagcggccccaagggaaatggcctcatccccagccctgcccacagcgcccactgcagcttctaccgcaccaggaccctgcaggccctgagcagcgagaagaaggccaagaaggcccgcttctacagaaatggagaccgctacttcaagggcctggtgtttgccatcagcagtgaccgcttccgcagctttgatgccctgctgattgagctgaccaggagcctgagtgacaacgtgaacctgccccagggcgtgaggaccatctacaccattgatggcagcaggaaggtgaccagcctggatgagctgctggagggggagagctatgtgtgtgccagcaatgagcccttcaggaaggtggactacaccaagaacatcaaccccaactggagcgtgaacatcaagggcggcaccagccgggccctggccgccgccagctctgtgaagtctgaggtgaaggagagcaaggacttcatcaagcccaagctggtgaccgtcatccgcagcggcgtgaagcccaggaaggctgtgcgcatcctgctgaacaagaagacagcccacagctttgagcaggtgctgacagacatcacagaggccatcaagctggacagcggcgtggtgaagaggctgtgcaccctggatggcaagcaggtgacctgcctgcaggacttctttggagatgatgatgtgttcatcgcctgtggccctgagaagttccgctatgcccaggatgactttgtgctggaccacagtgaatgtcgggtgctgaagagcagctacagccgcagcagcgctgtgaagtacagcggcagcaagagccctggccccagcagaagaagcaagagccctgcctctgtgaatggcacccccagcagccagctgagcacccccaagagcaccaagagcagcagcagcagccccaccagccctggcagcttccggggcctgaagcagatcagcgcccacggccgcagcagcagcaatgtgaatggaggccctgagctggaccgctgcatcagccctgagggcgtgaatggaaaccgctgcagcgagagcagcaccctgctggagaagtacaagattggcaaggtgattggagatggcaactttgctgtggtgaaggagtgcatcgacaggagcacaggcaaggagtttgccctgaagatcatcgacaaggccaagtgctgcggcaaggagcacctgattgaaaatgaggtgtccatcctgcggcgggtgaagcaccccaacatcatcatgctggtggaggagatggagacagccacagagctgttcctggtgatggagctggtgaagggcggggacctgtttgatgccatcaccagcagcaccaagtacacagaaagagatggcagcgccatggtgtacaacctggccaatgccctgcgctacctgcacggcctgagcatcgtgcaccgggacatcaagccagagaacctgctggtgtgtgagtacccagatggcaccaagagcctgaagctgggggactttggcctggccaccgtggtggagggccccctgtacacagtgtgtggcacccccacctacgtggcccctgagatcatcgccgagaccggctacggcctgaaggtggacatctgggccgccggggtcatcacctacatcctgctgtgtggcttcccccccttccgctctgagaacaacctgcaggaggacctgtttgaccagatcctggccggcaagctggagttccctgccccctactgggacaacatcacagattctgccaaggagctgatcagccagatgctgcaggtgaatgtggaggcccgctgcacagctggccagatcctgagccacccctgggtgtctgatgatgccagccaggagaacaacatgcaggccgaggtgacaggcaagctgaagcagcacttcaacaatgccctgcccaagcagaacagcaccaccactggagtgtctgtcatcatgaacacagccctggacaaggagggccagatcttctgcagcaagcactgccaggacagcggccggcccggcatggagcccatcagccctgtgccccccagcgtggaggagatccctgtgcctggagaggccgtgcctgcccccaccccacctgagagccccaccccccaccccccacctgctgcccctggaggagagcgggccggcacctggaggaggcaccgggactag

SEQ ID NO: 32776 - DNA, 2301 bp, Artificial Sequence
  derived and/or modified sequence
atggccagcacccggagcatcgagctggagcacttcgaggagcgggataaacggcccagaccgggctcccggcgcggtgcacctagctcatccggaggaagcagttcaagcgggccaaaggggaacgggttgatcccttctcccgctcattcggcacattgcagtttctaccggactagaacacttcaggctctatcttctgagaagaaggcgaagaaagcacgattctaccgtaacggagatcgctatttcaagggattggtgttcgcaataagttctgacagattccgcagcttcgatgctctgctgatcgagctgaccaggtccctgtcggataacgtgaatctcccacagggagtgcgtaccatctacacgatcgatggctctcgcaaagtaacaagtttggatgagctgttggaaggcgagagctatgtctgcgcctctaatgagccctttcggaaggtagattacactaaaaatatcaatccgaactggtccgtgaacatcaaagggggtacatcccgcgcactggccgcagcctcatcagtaaagagcgaagttaaagagagcaaggattttataaagcctaaactggtgactgttattaggtctggagttaaacctcggaaggcagtgcgcatcttgttaaacaaaaaaaccgcccacagcttcgagcaggtattaactgacattaccgaagctataaagttggactccggtgtggtcaagcgtttatgtactctcgacggtaagcaggttacctgcttgcaagacttctttggagacgacgacgtctttattgcatgtggtccggaaaaattcaggtacgcgcaagatgactttgtgcttgaccactctgagtgtcgtgttctgaaatcgagctactctagaagtagcgctgtgaaatacagcggatcaaaatctccaggaccatcacgtcgttctaaaagtccggcttccgtcaacggaacacctagcagccaactcagcaccccaaagtctacaaaaagctcttcaagttccccaacatcccctggaagctttaggggtctgaagcagattagcgctcatggaagaagtagttccaacgtgaacggcgggcctgagcttgacagatgtatcagccctgaaggcgtaaacgggaatcgctgctcagagtcatcgactctgctggagaagtataagattgggaaggtgattggggacggcaatttcgctgtggtgaaagagtgtatcgataggagcaccggcaaggagttcgcactgaaaatcattgataaggctaagtgctgcggtaaggagcacctgattgaaaacgaggtgagcatccttagaagagtgaaacatccaaatatcattatgctggtggaagagatggagacggctactgagttatttttggtaatggaactggtgaagggcggcgacctgtttgatgcgatcactagcagcacgaaatatacggagagagatgggtctgctatggtttacaacctcgcgaacgccctgcggtatcttcacgggctcagcatcgtgcaccgagatattaaacccgagaatctgttagtctgcgagtaccctgacggcaccaagagcttaaaactgggagactttggcctggctacagttgtcgagggcccactatacacagtgtgcggtacacccacttatgtggcaccagagatcatcgcggaaacaggatacggcctgaaagtcgatatctgggccgcaggcgttatcacctacatcctgctctgtggatttccccccttccggagcgagaataacctgcaggaagaccttttcgatcagatccttgcgggcaagctagagttccccgccccatactgggacaacattaccgactctgccaaggagcttatttcccagatgcttcaggtgaatgttgaagctaggtgtaccgcaggacaaattttgtcccacccctgggttagtgacgacgcgtctcaggaaaataacatgcaggcagaggtaaccgggaagctaaagcagcactttaataatgcgttgccaaagcaaaactccacaacaaccggcgtctctgtgatcatgaacacagccctggacaaggagggacagatcttctgcagcaaacactgtcaagacagtggtcggccaggaatggaaccaataagtccagtaccaccatccgttgaagagatccccgtccccggggaagctgtccctgctcccactcctcctgagtctcccacaccccacccacccccagccgcccccggaggggagcgcgcaggcacgtggcggcgccacagagattag

SEQ ID NO: 32777 - DNA, 2301 bp, Artificial Sequence
  derived and/or modified sequence
atggctagcacaaggtcaattgaacttgagcacttcgaggagcgcgataaacgcccacggcctggttcccgccgtggggctcctagttctagtgggggttcgtcatcaagtggaccaaagggaaatggactgattccaagccccgcacactcagcccattgctccttttaccgcacacgcacattgcaggctctgagctctgagaagaaggctaagaaagcccgattttaccggaatggggacagatacttcaagggacttgttttcgctattagctccgaccggtttaggtccttcgatgctcttctgattgagctcacgaggtcactcagcgacaatgtaaacctgccccagggcgttcgcaccatctacacgattgacggatctcgcaaggtgacaagcctggatgagctcctcgagggggagagctacgtgtgtgcttccaacgaacctttcagaaaggtggattataccaagaatataaatcccaattggtccgtgaacatcaagggcggtacaagccgggctctcgcggctgcctccagcgtcaagagcgaagtcaaggagagtaaagacttcatcaagccaaagctcgtcaccgtgatcagatctggggtgaagcctaggaaagcagtccgtatacttctgaacaagaagaccgcccattccttcgagcaggtcctgactgacatcacggaggccatcaagctcgatagcggggtggtgaagagactgtgtacactggatggtaagcaggttacgtgtctgcaggactttttcggtgatgatgacgtatttattgcatgcggtccagagaaatttcggtatgctcaagatgatttcgtgctagaccactcggagtgccgagtgttgaagtccagctactcccggagcagtgcggtgaagtattctggttccaagagtcctggcccttcacgtcggagcaagtccccagcctctgtgaacggcacaccctcaagccaactgagtaccccgaagtcaacaaagtcttcatcatcctctccgacttcccctggctcttttcgcggactgaaacagatcagtgcacatgggagatccagttccaacgtcaacggcggtccagagctggatagatgtattagccctgaaggggtgaatggtaataggtgctccgagtcttccactctcctggaaaagtacaaaatcggcaaggtcattggagatgggaattttgctgtcgtcaaggaatgtattgaccgtagtaccggcaaggaattcgccctgaagatcattgacaaggccaagtgctgcgggaaggagcacctgattgaaaatgaagtcagcattttgcgcagagtgaaacaccctaatataatcatgctggtcgaggaaatggagaccgcaaccgagctgttcctcgttatggaactcgtaaagggaggggatttgtttgatgccataacgagctctacaaagtacacagaacgagacggttctgccatggtgtacaaccttgccaatgctctaaggtacctccatggcctgtcaatcgtgcaccgggacataaagccggaaaacctgctagtgtgcgaatatcccgacggcactaagtctctaaagctgggagacttcggactggctactgtggtagaaggccctctctataccgtgtgtggcacccctacgtacgtcgcacctgaaataattgctgaaacgggctatgggttgaaagttgatatatgggccgcaggagtgatcacttacatattgctctgtgggttccctccattcagaagcgaaaacaatcttcaggaggacctgtttgatcagattctggccggaaagcttgaattcccagctccttactgggataacatcacagactcggccaaagaactgatctcccaaatgctccaagtaaacgtggaagctagatgtaccgccggacagatcttgtcacacccctgggtcagcgatgatgcctcacaggagaataacatgcaggccgaggttacaggcaaactgaagcagcactttaacaacgctttgcctaagcagaattccacaaccacaggggtctctgtcataatgaatactgccttggacaaggagggacagatattctgctcgaagcactgccaggacagtggcaggccaggtatggagcccatatcccccgttccccctagtgtagaggagattcctgtgcctggtgaggctgtccctgcacccacaccccctgaatctccaactcctcacccaccccctgccgctccaggcggtgaacgcgctggaacctggaggcgtcaccgtgactag

SEQ ID NO: 32778 - DNA, 2301 bp, Artificial Sequence
  derived and/or modified sequence
atggccagcaccagaagcatcgagctggagcacttcgaggagagagacaagagacccagacccggcagcagaagaggcgcccccagcagcagcggcggcagcagcagcagcggccccaagggcaacggcctgatccccagccccgcccacagcgcccactgcagcttctacagaaccagaaccctgcaggccctgagcagcgagaagaaggccaagaaggccagattctacagaaacggcgacagatacttcaagggcctggtgttcgccatcagcagcgacagattcagaagcttcgacgccctgctgatcgagctgaccagaagcctgagcgacaacgtgaacctgccccagggcgtgagaaccatctacaccatcgacggcagcagaaaggtgaccagcctggacgagctgctggagggcgagagctacgtgtgcgccagcaacgagcccttcagaaaggtggactacaccaagaacatcaaccccaactggagcgtgaacatcaagggcggcaccagcagagccctggccgccgccagcagcgtgaagagcgaggtgaaggagagcaaggacttcatcaagcccaagctggtgaccgtgatcagaagcggcgtgaagcccagaaaggccgtgagaatcctgctgaacaagaagaccgcccacagcttcgagcaggtgctgaccgacatcaccgaggccatcaagctggacagcggcgtggtgaagagactgtgcaccctggacggcaagcaggtgacctgcctgcaggacttcttcggcgacgacgacgtgttcatcgcctgcggccccgagaagttcagatacgcccaggacgacttcgtgctggaccacagcgagtgcagagtgctgaagagcagctacagcagaagcagcgccgtgaagtacagcggcagcaagagccccggccccagcagaagaagcaagagccccgccagcgtgaacggcacccccagcagccagctgagcacccccaagagcaccaagagcagcagcagcagccccaccagccccggcagcttcagaggcctgaagcagatcagcgcccacggcagaagcagcagcaacgtgaacggcggccccgagctggacagatgcatcagccccgagggcgtgaacggcaacagatgcagcgagagcagcaccctgctggagaagtacaagatcggcaaggtgatcggcgacggcaacttcgccgtggtgaaggagtgcatcgacagaagcaccggcaaggagttcgccctgaagatcatcgacaaggccaagtgctgcggcaaggagcacctgatcgagaacgaggtgagcatcctgagaagagtgaagcaccccaacatcatcatgctggtggaggagatggagaccgccaccgagctgttcctggtgatggagctggtgaagggcggcgacctgttcgacgccatcaccagcagcaccaagtacaccgagagagacggcagcgccatggtgtacaacctggccaacgccctgagatacctgcacggcctgagcatcgtgcacagagacatcaagcccgagaacctgctggtgtgcgagtaccccgacggcaccaagagcctgaagctgggcgacttcggcctggccaccgtggtggagggccccctgtacaccgtgtgcggcacccccacctacgtggcccccgagatcatcgccgagaccggctacggcctgaaggtggacatctgggccgccggcgtgatcacctacatcctgctgtgcggcttcccccccttcagaagcgagaacaacctgcaggaggacctgttcgaccagatcctggccggcaagctggagttccccgccccctactgggacaacatcaccgacagcgccaaggagctgatcagccagatgctgcaggtgaacgtggaggccagatgcaccgccggccagatcctgagccacccctgggtgagcgacgacgccagccaggagaacaacatgcaggccgaggtgaccggcaagctgaagcagcacttcaacaacgccctgcccaagcagaacagcaccaccaccggcgtgagcgtgatcatgaacaccgccctggacaaggagggccagatcttctgcagcaagcactgccaggacagcggcagacccggcatggagcccatcagccccgtgccccccagcgtggaggagatccccgtgcccggcgaggccgtgcccgcccccaccccccccgagagccccaccccccaccccccccccgccgcccccggcggcgagagagccggcacctggagaagacacagagactag

SEQ ID NO: 32779 - DNA, 4265 bp, Artificial Sequence
  derived and/or modified sequence
ccgcggtttggcatccccggggccgggaagcctcctccagcgctgacagcctgtcggcggcggagggaggccagagcgcggatgcttgccagtgggccgggcctgaccgctgcgtgggaggcgggctgcattatttcccgctagggccgcgctccagggaaggaaggggccagacacggccctctcagccccgaacggcgcgcgctgcccggcgggcgggatccgggcgcggccgaggcggcggcgctgcaccccgggcctgggcccgcgcgactcccccgggggcctctcccacgctccgcgccccgccccacccttccttccttcctcccctcggcgctcccgggagcgctcggcagacgcccgagctttgtgggcgcccgcgggcccagcgcgagcctcgggcggcccaactttgcctctcccggtcggctcccgagcgggacttgtgaggcgtggccgggtggaggaggcgcttgcgggggcgtggggctccccggcaggcgggaggcacggagcaagtcgcactggacaatgacctgggcagctcggcgctgcggacacttttagctgagggcgcgggcgggtcggctcctccgcggctcctcggccccacctgcgcggagagggcgggatgccagagccaggtgtcccggcgcgttaagggccctcgcagtcagacgtccctgcaccggcgctcgcacccttagtcggcccggaacgtctttttgcggacgccctcggagcagccgcgatggccagcaccaggagtatcgagctggagcactttgaggaacgggacaaaaggccgcggccggggtcgcggagaggggcccccagctcctccgggggcagcagcagctcgggccccaaggggaacgggctcatccccagtccggcgcacagtgcccactgcagcttctaccgcacgcggaccctgcaggccctcagctcggagaagaaggccaagaaggcgcgcttctaccggaacggggaccgctacttcaagggcctggtgtttgccatctccagcgaccgcttccggtccttcgatgcgctcctcatagagctcacccgctccctgtcggacaacgtgaacctgccccagggtgtccgcactatctacaccatcgacggcagccggaaggtcaccagcctggacgagctgctggaaggtgagagttacgtgtgtgcatccaatgaaccatttcgtaaagtcgattacaccaaaaatattaatccaaactggtctgtgaacatcaagggtgggacatcccgagcgctggctgctgcctcctctgtgaaaagtgaagtaaaagaaagtaaagatttcatcaaacccaagttagtgactgtgattcgaagtggagtgaagcctagaaaagccgtgcggatccttctgaataaaaagactgctcattcctttgaacaagtcttaacagatatcaccgaagccattaaactagactcaggagtcgtcaagaggctctgcaccctggatggaaagcaggttacttgtctgcaagacttttttggtgatgacgatgtttttattgcatgtggaccagaaaaatttcgttatgcccaagatgactttgtcctggatcatagtgaatgtcgtgtcctgaagtcatcttattctcgatcctcagctgttaagtattctggatccaaaagccctgggccctctcgacgcagcaaatcaccagcttcagttaatggaactcccagcagccaactttctactcctaaatctacgaaatcctccagttcctctccaactagtccaggaagtttcagaggattaaagcagatttctgctcatggcagatcttcttccaatgtaaacggtggacctgagcttgaccgttgcataagtcctgaaggtgtgaatggaaacagatgctctgaatcatcaactcttcttgagaaatacaaaattggaaaggtcattggtgatggcaattttgcagtagtcaaagagtgtatagacaggtccactggaaaggagtttgccctaaagattatagacaaagccaaatgttgtggaaaggaacacctgattgagaatgaagtgtcaatactgcgccgagtgaaacatcccaatatcattatgctggtcgaggagatggaaacagcaactgagctctttctggtgatggaattggtcaaaggtggagatctctttgatgcaattacttcgtcgaccaagtacactgagagagatggcagtgccatggtgtacaacttagccaatgccctcaggtatctccatggcctcagcatcgtgcacagagacatcaaaccagagaatctcttggtgtgtgaatatcctgatggaaccaagtctttgaaactgggagactttgggcttgcgactgtggtagaaggccctttatacacagtctgtggcacacccacttatgtggctccagaaatcattgctgaaactggctatggcctgaaggtggacatttgggcagctggtgtgatcacatacatacttctctgtggattcccaccattccgaagtgagaacaatctccaggaagatctcttcgaccagatcttggctgggaagctggagtttccggccccctactgggataacatcacggactctgccaaggaattaatcagtcaaatgcttcaggtaaatgttgaagctcggtgtaccgcgggacaaatcctgagtcacccctgggtgtcagatgatgcctcccaggagaataacatgcaagctgaggtgacaggtaaactaaaacagcactttaataatgcgctccccaaacagaacagcactaccaccggggtctccgtcatcatgaacacggctctagataaggaggggcagattttctgcagcaagcactgtcaagacagcggcaggcctgggatggagcccatctctccagttcctccctcagtggaggagatccctgtgcctggggaagcagtcccggcccccacccctccggaatctcccaccccccaccctcctcccgctgccccgggtggtgagcgggcaggaacctggcgccgccaccgagactgagcctcctgcagacgggcgaagccgcctgctgcagcccaggaagccagccctctgctcggcctcgccggcctccctgctgcaggcctccctctcttcaccgcctgcgcctgagttcgcgggtcctccgcaggccgcctgggaaccggagcctggcgtgccggagcctggcctggtgctctgggctctgccttctggttcctggaggcatcaaaggctgcatccgttctgccaacagctgttcggagagactcgttccagatcatcccgtcattttcagtttgttggacattttacagcttcaccaggagaatgtgcaactttattccagcattcgatgcatttttatagaaacactttggaaacactttggatgaaccaaggccttttccttatttaagtagactcagaacactccctttcttttcttttctctctctctctctcttttttttttacgaaagacttagaattgcatttgtccttttgtgggtgtcctgtgagaggtgatatgggggctaagaggactggctttctaatagaagaagtgagcgcctgagaggacaatttggtcattggacacggattgcaggctttgagaagcgctcagaggcccagggcggcgggctcagccattcggcttggggcaccaggctccccagagacaatgctcagtattcattcatacacagacgatggaagaagccacttcttccctgggcggtgtgggtttcccccagctcttcccacacgtgtgttaggaaatgcccgtgaacttgccctctgggctttttaatgagaggcttggcgcatgcggcacccagcggctgcttccctgcaagccagcgacttgccgagcagaatgagctctgctcctgagccccggtagctgcttcctcatctgcatttcatctggagcagggcaggtaaccacaggaggaggcatgcccgaggcagccaggactgggcgggaaggtgctccctggatatactctgtgaaccttctggaaggctgctggcagtttttcctttttgtccaccaccctgctctttttaataattgtacataatccgtgtatttgttttacctgctcatcttctaaactggcgagccctatagttcgttctcattgttagattttgccttttacaagtgtccccaacctgcaataaacttttccctcttgaaaaaaagtaatcagggatgggcaaa

SEQ ID NO: 32780 - protein, 783 aa, Artificial Sequence
  derived and/or modified sequence
MASTRSIELEHFEERDKRPRPGSRRGAPSSSGGSSSSGPKGNGLIPSPAHSAHCSFYRTRTLQALSSEKKAKKARFYRNGDRYFKGLVFAISSDRFRSFDALLIELTRSLSDNVNLPQGVRTIYTIDGSRKVTSLDELLEGESYVCASNEPFRKVDYTKNINPNWSVNIKGGTSRALAAASSVKSEVKESKDFIKPKLVTVIRSGVKPRKAVRILLNKKTAHSFEQVLTDITEAIKLDSGVVKRLCTLDGKQVTCLQDFFGDDDVFIACGPEKFRYAQDDFVLDHSECRVLKSSYSRSSAVKYSGSKSPGPSRRSKSPASVKRGGHYSSAYSTAKSPVNGTPSSQLSTPKSTKSSSSSPTSPGSFRGLKQISAHGRSSSNVNGGPELDRCISPEGVNGNRCSESSTLLEKYKIGKVIGDGNFAVVKECIDRSTGKEFALKIIDKAKCCGKEHLIENEVSILRRVKHPNIIMLVEEMETATELFLVMELVKGGDLFDAITSSTKYTERDGSAMVYNLANALRYLHGLSIVHRDIKPENLLVCEYPDGTKSLKLGDFGLATVVEGPLYTVCGTPTYVAPEIIAETGYGLKVDIWAAGVITYILLCGFPPFRSENNLQEDLFDQILAGKLEFPAPYWDNITDSAKELISQMLQVNVEARCTAGQILSHPWVSDDASQENNMQAEVTGKLKQHFNNALPKQNSTTTGVSVIMNTALDKEGQIFCSKHCQDSGRPGMEPISPVPPSVEEIPVPGEAVPAPTPPESPTPHPPPAAPGGERAGTWRRHRD

SEQ ID NO: 32781 - DNA, 2352 bp, Artificial Sequence
  derived and/or modified sequence
atggcgagtactcgctccattgagttagagcacttcgaagaacgcgacaaaaggccacgccctggatcacggcgtggggcgccatcttcctcaggtggcagtagcagctccggcccgaagggaaatggtctaatcccttcaccggcgcactctgcacattgttccttctaccgcactcgtacactccaggccttaagcagcgagaaaaaagccaaaaaagcaagattttacagaaatggggacaggtactttaaggggttagtctttgctatctccagtgacaggtttaggtcctttgacgccttactcattgagttgacccggtccctaagtgataatgtaaatctgccccagggcgtccgaaccatatacaccattgatggcagcaggaaagtgacctctctagatgagttgttggaaggcgagagttacgtttgtgctagtaatgagccttttcgcaaagtggactatacaaaaaatatcaatcccaattggagcgtcaacatcaagggtgggacctctcgtgcactggcggctgcctcgtccgtgaagtccgaggttaaggagtccaaggactttattaaacctaaactggtcaccgttatccgctccggtgtgaagccaaggaaggccgttcggatactgctgaataagaagactgctcatagcttcgagcaggtgctgactgatataaccgaggctattaagcttgattcgggtgtggtgaaacgcctgtgcaccctcgacgggaagcaggttacgtgtctgcaggatttctttggcgacgacgacgtcttcatcgcctgtggtcccgagaaatttcggtatgcccaagatgacttcgtgcttgaccacagcgagtgtagagttttaaaaagcagctatagccggtcaagcgccgtgaaatattccgggtccaaatcccctggcccttctcgcaggtccaagagccctgctagtgtgaaacgcggaggtcattactcttctgcatactcaactgctaagtcccctgtcaatggcaccccatcatctcagctttctactcccaagagcactaagtcttcctccagttctccaaccagccctggctcctttagagggcttaagcagatctccgcccacgggcggtcttcctctaatgtgaacggcggtcccgagctggatcgatgtatttcccccgaaggtgtgaatgggaatagatgtagcgaatctagtaccctgctcgaaaaatataagatagggaaagttataggcgatgggaacttcgcagttgtcaaagaatgtatcgacaggtccaccggtaaagaatttgccctgaaaatcattgacaaggcaaagtgctgtggcaaggagcatctcatcgagaatgaagtgtccatcttgcgccgggtaaagcaccccaatatcatcatgctagtggaagagatggagactgctacggaattattccttgttatggagctggtgaaaggcggtgatctctttgatgccattacttctagcactaagtacacagagcgggatgggagcgccatggtctacaaccttgcaaacgcattgcggtacctccacggcctgtccatcgtccacagggacataaaacctgagaacttgctcgtttgcgaatatcctgacggtactaaaagtttgaaactgggcgacttcggacttgcaacggttgtggaaggacccctgtacacggtttgcggtactcctacgtacgtcgccccagaaattatcgccgagacaggctatggcctgaaggtggatatttgggccgcaggtgtgatcacctatatcctcttatgcggctttccgccatttcggagcgaaaacaatttgcaggaagatctcttcgaccagatcctggccggaaaactcgagttccccgcaccttactgggacaatataactgatagtgctaaagagctaatctcacagatgttgcaagtgaacgtcgaagcaagatgcaccgcaggtcagattttgagccatccttgggtaagtgacgacgcatcacaagaaaacaatatgcaggctgaagtcaccggcaaactgaagcaacacttcaataacgccctgcccaaacaaaattctactacaacgggcgtctctgtgattatgaacaccgccctggataaggaaggccagatcttctgctcgaagcactgccaagactccggaagacccggtatggaacccatcagccccgtacccccatcagttgaagagattcctgtacccggcgaggctgtgcccgctccgactcctcctgaatcccctaccccacacccaccacctgctgcccccggtggagaacgcgccggcacctggcgcagacatcgcgactag

SEQ ID NO: 32782 - DNA, 2352 bp, Artificial Sequence
  derived and/or modified sequence
atggccagcaccaggagcattgagctggagcactttgaggagcgggacaagaggcccaggcctggcagccggcggggggcccccagcagcagcggcggcagcagcagcagcggccccaagggaaatggcctcatccccagccctgcccacagcgcccactgcagcttctaccgcaccaggaccctgcaggccctgagcagcgagaagaaggccaagaaggcccgcttctacagaaatggagaccgctacttcaagggcctggtgtttgccatcagcagtgaccgcttccgcagctttgatgccctgctgattgagctgaccaggagcctgagtgacaacgtgaacctgccccagggcgtgaggaccatctacaccattgatggcagcaggaaggtgaccagcctggatgagctgctggagggggagagctatgtgtgtgccagcaatgagcccttcaggaaggtggactacaccaagaacatcaaccccaactggagcgtgaacatcaagggcggcaccagccgggccctggccgccgccagctctgtgaagtctgaggtgaaggagagcaaggacttcatcaagcccaagctggtgaccgtcatccgcagcggcgtgaagcccaggaaggctgtgcgcatcctgctgaacaagaagacagcccacagctttgagcaggtgctgacagacatcacagaggccatcaagctggacagcggcgtggtgaagaggctgtgcaccctggatggcaagcaggtgacctgcctgcaggacttctttggagatgatgatgtgttcatcgcctgtggccctgagaagttccgctatgcccaggatgactttgtgctggaccacagtgaatgtcgggtgctgaagagcagctacagccgcagcagcgctgtgaagtacagcggcagcaagagccctggccccagcagaagaagcaagagccctgcctctgtgaagaggggcggccactacagcagcgcctacagcacagccaagagccctgtgaatggcacccccagcagccagctgagcacccccaagagcaccaagagcagcagcagcagccccaccagccctggcagcttccggggcctgaagcagatcagcgcccacggccgcagcagcagcaatgtgaatggaggccctgagctggaccgctgcatcagccctgagggcgtgaatggaaaccgctgcagcgagagcagcaccctgctggagaagtacaagattggcaaggtgattggagatggcaactttgctgtggtgaaggaatgtattgacaggagcacaggcaaggagtttgccctgaagatcatcgacaaggccaagtgctgcggcaaggagcacctgattgaaaatgaggtgtccatcctgcggcgggtgaagcaccccaacatcatcatgctggtggaggagatggagacagccacagagctgttcctggtgatggagctggtgaagggcggggacctgtttgatgccatcaccagcagcaccaagtacacagaaagagatggcagcgccatggtgtacaacctggccaatgccctgcgctacctgcacggcctgagcatcgtgcaccgggacatcaagccagagaacctgctggtgtgtgagtacccagatggcaccaagagcctgaagctgggggactttggcctggccaccgtggtggagggccccctgtacacagtgtgtggcacccccacctacgtggcccctgagatcatcgccgagaccggctacggcctgaaggtggacatctgggccgccggggtcatcacctacatcctgctgtgtggcttcccccccttccgctctgagaacaacctgcaggaggacctgtttgaccagatcctggccggcaagctggagttccctgccccctactgggacaacatcacagacagcgccaaggagctgatcagccagatgctgcaggtgaatgtggaggcccgctgcacagctggccagatcctgagccacccctgggtgtctgatgatgccagccaggagaacaacatgcaggccgaggtgacaggcaagctgaagcagcacttcaacaatgccctgcccaagcagaacagcaccaccaccggggtgtctgtcatcatgaacacagccctggacaaggagggccagatcttctgcagcaagcactgccaggacagcggccggcccggcatggagcccatcagccctgtgcccccatctgtggaggagatccctgtgcctggagaggccgtgcctgcccccaccccacctgagagccccaccccccaccccccacctgctgcccctggaggagagagagctggcacctggaggaggcaccgggactag

SEQ ID NO: 32783 - DNA, 2352 bp, Artificial Sequence
  derived and/or modified sequence
atggccagcacccggagcatcgagctggagcacttcgaggagcgggataaacgccctcgtcctggaagcaggaggggagccccctcctcaagtggtggatcttcttcctctgggcccaagggcaatggcttaataccaagtcctgcacatagcgcccactgcagtttctatcgcactcgaactctgcaggcactgagttctgagaagaaggcaaagaaggcaaggttctacaggaatggcgatagatactttaaaggtctggtgtttgcaatctcatctgatagatttcggtccttcgacgctctgctcatcgagctgacacgatccctttccgacaacgtcaacctgcctcagggcgttagaaccatttacactattgatggcagtcgtaaagtaacttctttggacgaactgctggagggagaaagctatgtctgtgcttccaatgaacccttcaggaaggtggattacaccaagaatataaatccgaactggtcagttaacatcaagggaggaacctctagggcgctggcagccgcctcaagtgttaagtccgaagtcaaggaatcaaaagattttattaagccaaaactcgtgacggtgattcgtagcggagtaaaaccacggaaagcagttcgtatactgctcaataaaaagaccgcacattcatttgagcaggtcctgacagacattacggaagctataaagttggactctggtgtggtgaagcgcctctgcacactcgatggtaaacaggttacttgcctgcaggacttttttggagatgatgacgtttttatcgcttgtgggcccgagaagttccggtatgcccaggatgatttcgtgctcgaccactctgagtgtcgagtgttaaaaagctcttatagcaggtcatccgcagttaaatacagcgggagtaaatccccaggaccgtcaaggcgtagcaagagccctgctagcgtgaagagaggggggcactacagttctgcctactctacagccaagtctcctgtgaatgggacaccttcgtcgcagctgtcaacgcctaaatccacaaaatcctcatcaagctccccaacgagcccgggatcttttcgaggcctgaaacagatttccgcccacggaagaagcagcagcaatgtgaacggaggtcccgagctcgacagatgtattagccctgagggcgtcaacggtaacagatgttccgaaagctcgacactgctcgagaaatataaaatcggcaaggtcattggcgacggaaatttcgctgttgtcaaagagtgcattgataggtccactggtaaagagttcgctctcaagatcatcgataaggctaaatgctgcggtaaagagcatttgatcgagaacgaagtgtctatcctaaggcgcgtgaagcatcctaacattatcatgctcgtggaagagatggagactgcaacggaattgttcctggtgatggagctggtgaaagggggggatctgttcgacgctattactagctcaaccaaatatactgagcgagacgggtctgctatggtgtacaatctggcaaatgcactgagatacctgcacggcctgtctattgtgcatcgagacattaaacccgaaaatttgctggtctgtgaataccctgacggtaccaagtccctcaaacttggggattttggcctcgccacagttgtcgagggacctttatataccgtgtgcggaacccccacatatgtggcacccgagattattgccgagaccggctatggattgaaagtcgatatctgggctgctggtgtgatcacctatatcttgctgtgcggattccctcccttcaggagcgaaaacaacctccaggaggacttgtttgaccaaatccttgccggtaaactggaattccccgctccttactgggacaatattaccgactccgcgaaggagctgatctcacagatgctgcaggtcaatgtcgaggcccgctgtacagccggacaaattttgtcgcacccctgggtgtccgatgacgcatcccaggagaataatatgcaggccgaggtcaccggcaagttgaaacagcactttaacaatgccctgcctaagcagaatagcaccacaacaggagtctcggtaattatgaataccgccctggataaagaaggccaaattttttgttctaaacactgccaagactcgggacgccccggaatggaaccgatcagccccgtgccaccatctgttgaggagattccagttccgggcgaggccgtccccgcccctaccccacctgaaagccctactccccacccaccaccggccgccccgggaggggaacgcgcagggacttggcgacgccaccgggattag

SEQ ID NO: 32784 - DNA, 2352 bp, Artificial Sequence
  derived and/or modified sequence
atggcgtccactcgttccattgaactggagcattttgaggagcgagataagaggccacgaccaggctcccgaagaggcgctccctcatccagtggtggatcctcaagctccggtccaaaaggaaacggactaatcccttcaccagctcacagtgctcactgctcattctataggacccgcacactgcaggccctgtcttctgaaaagaaggccaaaaaagctaggttctacagaaatggtgatcgatattttaaagggttggtctttgctattagctccgatcgcttcaggtcttttgacgcgctgctcatcgagttaactaggtccctctcagacaatgtcaacctgccacagggcgtgcggacgatttacaccatcgatggttccaggaaagtcacaagtcttgatgagcttctagaaggcgaatcttacgtctgcgctagcaacgagccgttccgaaaggtcgattacactaagaacatcaatcctaattggtcggtcaatatcaagggtggaacctcacgggcattagcagctgcatcctccgtaaaatctgaagtgaaagagtccaaggacttcatcaaacctaagctcgtaacggttattcgcagtggggtgaaaccaagaaaagctgtgagaatcttacttaacaaaaaaacagctcactcatttgagcaggtgctgaccgatatcaccgaagcgattaaactcgattctggagtagtgaaacgactgtgtacccttgacggaaaacaagttacatgcttgcaagatttttttggcgacgacgatgtttttattgcgtgcggccctgaaaagttcaggtacgcccaagatgacttcgtcttggaccatagcgagtgtcgagtcctcaagtctagttacagtcgaagttccgccgtcaaatatagcgggtccaaatccccgggacctagccgacgctcgaaatcgcctgcatctgtgaagagaggaggacactattcctctgcctacagtacagccaagtcacccgtaaatgggactcctagctctcagctaagtacacccaagtccaccaagtcgtcaagcagcagtcccacctcaccgggttcgttcagaggacttaaacagatttccgcgcatgggcgatcttccagcaacgtgaacggcggtcccgaattggatagatgtattagcccagagggcgtcaacgggaatcggtgctccgaatcctccactctactcgagaagtataagatcggtaaagttatcggcgatggcaactttgctgtggtcaaggagtgcatcgaccgttccacgggaaaagagtttgctctaaaaatcattgacaaggctaagtgttgcggcaaggagcaccttattgaaaacgaagttagtatcttgcgccgagtgaagcatcctaatattatcatgctggtcgaagaaatggagacagccacagaactttttctagtgatggaactcgtgaaaggaggcgacctattcgatgcaataacatcctccacaaaatatacggaacgcgacggctctgccatggtgtataacctggctaatgccctccgctatctccatggactgtctatcgtccatagggacatcaagcccgagaaccttctcgtatgcgagtacccggacggtacaaaaagcctgaagttgggagattttgggcttgcaactgtcgtggagggcccactgtatactgtttgtggcactcctacgtatgtggctccagagattatagcagagacgggctatggactgaaagtagacatttgggccgcaggggtaatcacatacatcctcctgtgcggttttcccccattcagatctgagaacaacctccaagaggatctgttcgatcagatcctggccggtaaactggaatttccagcgccttactgggacaacatcacagatagcgcaaaagaactgatttcacagatgctacaggttaacgtggaagcacgatgtacagcaggacagatactgtcccacccctgggtatcagatgacgcctctcaagagaataacatgcaggccgaagtaacgggcaagctcaaacagcactttaataatgcgcttcctaaacaaaatagtacgaccacgggagtgagtgtgataatgaataccgcactggacaaggaaggacagattttttgtagcaagcactgtcaggactccggccgtcccggtatggagccaatctccccagtccctcccagcgtagaagaaatacccgtgcctggcgaggcagtcccagctccaacaccacctgagagcccgaccccacacccaccacccgctgctccagggggagagagggccggtacgtggcgaaggcatagagactag

SEQ ID NO: 32785 - DNA, 2352 bp, Artificial Sequence
  derived and/or modified sequence
atggccagcaccagaagcatcgagctggagcacttcgaggagagagacaagagacccagacccggcagcagaagaggcgcccccagcagcagcggcggcagcagcagcagcggccccaagggcaacggcctgatccccagccccgcccacagcgcccactgcagcttctacagaaccagaaccctgcaggccctgagcagcgagaagaaggccaagaaggccagattctacagaaacggcgacagatacttcaagggcctggtgttcgccatcagcagcgacagattcagaagcttcgacgccctgctgatcgagctgaccagaagcctgagcgacaacgtgaacctgccccagggcgtgagaaccatctacaccatcgacggcagcagaaaggtgaccagcctggacgagctgctggagggcgagagctacgtgtgcgccagcaacgagcccttcagaaaggtggactacaccaagaacatcaaccccaactggagcgtgaacatcaagggcggcaccagcagagccctggccgccgccagcagcgtgaagagcgaggtgaaggagagcaaggacttcatcaagcccaagctggtgaccgtgatcagaagcggcgtgaagcccagaaaggccgtgagaatcctgctgaacaagaagaccgcccacagcttcgagcaggtgctgaccgacatcaccgaggccatcaagctggacagcggcgtggtgaagagactgtgcaccctggacggcaagcaggtgacctgcctgcaggacttcttcggcgacgacgacgtgttcatcgcctgcggccccgagaagttcagatacgcccaggacgacttcgtgctggaccacagcgagtgcagagtgctgaagagcagctacagcagaagcagcgccgtgaagtacagcggcagcaagagccccggccccagcagaagaagcaagagccccgccagcgtgaagagaggcggccactacagcagcgcctacagcaccgccaagagccccgtgaacggcacccccagcagccagctgagcacccccaagagcaccaagagcagcagcagcagccccaccagccccggcagcttcagaggcctgaagcagatcagcgcccacggcagaagcagcagcaacgtgaacggcggccccgagctggacagatgcatcagccccgagggcgtgaacggcaacagatgcagcgagagcagcaccctgctggagaagtacaagatcggcaaggtgatcggcgacggcaacttcgccgtggtgaaggagtgcatcgacagaagcaccggcaaggagttcgccctgaagatcatcgacaaggccaagtgctgcggcaaggagcacctgatcgagaacgaggtgagcatcctgagaagagtgaagcaccccaacatcatcatgctggtggaggagatggagaccgccaccgagctgttcctggtgatggagctggtgaagggcggcgacctgttcgacgccatcaccagcagcaccaagtacaccgagagagacggcagcgccatggtgtacaacctggccaacgccctgagatacctgcacggcctgagcatcgtgcacagagacatcaagcccgagaacctgctggtgtgcgagtaccccgacggcaccaagagcctgaagctgggcgacttcggcctggccaccgtggtggagggccccctgtacaccgtgtgcggcacccccacctacgtggcccccgagatcatcgccgagaccggctacggcctgaaggtggacatctgggccgccggcgtgatcacctacatcctgctgtgcggcttcccccccttcagaagcgagaacaacctgcaggaggacctgttcgaccagatcctggccggcaagctggagttccccgccccctactgggacaacatcaccgacagcgccaaggagctgatcagccagatgctgcaggtgaacgtggaggccagatgcaccgccggccagatcctgagccacccctgggtgagcgacgacgccagccaggagaacaacatgcaggccgaggtgaccggcaagctgaagcagcacttcaacaacgccctgcccaagcagaacagcaccaccaccggcgtgagcgtgatcatgaacaccgccctggacaaggagggccagatcttctgcagcaagcactgccaggacagcggcagacccggcatggagcccatcagccccgtgccccccagcgtggaggagatccccgtgcccggcgaggccgtgcccgcccccaccccccccgagagccccaccccccaccccccccccgccgcccccggcggcgagagagccggcacctggagaagacacagagactag

SEQ ID NO: 32786 - DNA, 3543 bp, Artificial Sequence
  derived and/or modified sequence
atggccagcaccaggagtatcgagctggagcactttgaggaacgggacaaaaggccgcggccggggtcgcggagaggggcccccagctcctccgggggcagcagcagctcgggccccaaggggaacgggctcatccccagtccggcgcacagtgcccactgcagcttctaccgcacgcggaccctgcaggccctcagctcggagaagaaggccaagaaggcgcgcttctaccggaacggggaccgctacttcaagggcctggtgtttgccatctccagcgaccgcttccggtccttcgatgcgctcctcatagagctcacccgctccctgtcggacaacgtgaacctgccccagggtgtccgcactatctacaccatcgacggcagccggaaggtcaccagcctggacgagctgctggaaggtgagagttacgtgtgtgcatccaatgaaccatttcgtaaagtcgattacaccaaaaatattaatccaaactggtctgtgaacatcaagggtgggacatcccgagcgctggctgctgcctcctctgtgaaaagtgaagtaaaagaaagtaaagatttcatcaaacccaagttagtgactgtgattcgaagtggagtgaagcctagaaaagccgtgcggatccttctgaataaaaagactgctcattcctttgaacaagtcttaacagatatcaccgaagccattaaactagactcaggagtcgtcaagaggctctgcaccctggatggaaagcaggttacttgtctgcaagacttttttggtgatgacgatgtttttattgcatgtggaccagaaaaatttcgttatgcccaagatgactttgtcctggatcatagtgaatgtcgtgtcctgaagtcatcttattctcgatcctcagctgttaagtattctggatccaaaagccctgggccctctcgacgcagcaaatcaccagcttcagtaaagcggggtggccactactccagtgcctattctacagccaaatccccagttaatggaactcccagcagccaactttctactcctaaatctacgaaatcctccagttcctctccaactagtccaggaagtttcagaggattaaagcagatttctgctcatggcagatcttcttccaatgtaaacggtggacctgagcttgaccgttgcataagtcctgaaggtgtgaatggaaacagatgctctgaatcatcaactcttcttgagaaatacaaaattggaaaggtcattggtgatggcaattttgcagtagtcaaagagtgtatagacaggtccactggaaaggagtttgccctaaagattatagacaaagccaaatgttgtggaaaggaacacctgattgagaatgaagtgtcaatactgcgccgagtgaaacatcccaatatcattatgctggtcgaggagatggaaacagcaactgagctctttctggtgatggaattggtcaaaggtggagatctctttgatgcaattacttcgtcgaccaagtacactgagagagatggcagtgccatggtgtacaacttagccaatgccctcaggtatctccatggcctcagcatcgtgcacagagacatcaaaccagagaatctcttggtgtgtgaatatcctgatggaaccaagtctttgaaactgggagactttgggcttgcgactgtggtagaaggccctttatacacagtctgtggcacacccacttatgtggctccagaaatcattgctgaaactggctatggcctgaaggtggacatttgggcagctggtgtgatcacatacatacttctctgtggattcccaccattccgaagtgagaacaatctccaggaagatctcttcgaccagatcttggctgggaagctggagtttccggccccctactgggataacatcacggactctgccaaggaattaatcagtcaaatgcttcaggtaaatgttgaagctcggtgtaccgcgggacaaatcctgagtcacccctgggtgtcagatgatgcctcccaggagaataacatgcaagctgaggtgacaggtaaactaaaacagcactttaataatgcgctccccaaacagaacagcactaccaccggggtctccgtcatcatgaacacggctctagataaggaggggcagattttctgcagcaagcactgtcaagacagcggcaggcctgggatggagcccatctctccagttcctccctcagtggaggagatccctgtgcctggggaagcagtcccggcccccacccctccggaatctcccaccccccaccctcctcccgctgccccgggtggtgagcgggcaggaacctggcgccgccaccgagactgagcctcctgcagacgggcgaagccgcctgctgcagcccaggaagccagccctctgctcggcctcgccggcctccctgctgcaggcctccctctcttcaccgcctgcgcctgagttcgcgggtcctccgcaggccgcctgggaaccggagcctggcgtgccggagcctggcctggtgctctgggctctgccttctggttcctggaggcatcaaaggctgcatccgttctgccaacagctgttcggagagactcgttccagatcatcccgtcattttcagtttgttggacattttacagcttcaccaggagaatgtgcaactttattccagcattcgatgcatttttatagaaacactttggaaacactttggatgaaccaaggccttttccttatttaagtagactcagaacactccctttcttttcttttctctctctctctctcttttttttttacgaaagacttagaattgcatttgtccttttgtgggtgtcctgtgagaggtgatatgggggctaagaggactggctttctaatagaagaagtgagcgcctgagaggacaatttggtcattggacacggattgcaggctttgagaagcgctcagaggcccagggcggcgggctcagccattcggcttggggcaccaggctccccagagacaatgctcagtattcattcatacacagacgatggaagaagccacttcttccctgggcggtgtgggtttcccccagctcttcccacacgtgtgttaggaaatgcccgtgaacttgccctctgggctttttaatgagaggcttggcgcatgcggcacccagcggctgcttccctgcaagccagcgacttgccgagcagaatgagctctgctcctgagccccggtagctgcttcctcatctgcatttcatctggagcagggcaggtaaccacaggaggaggcatgcccgaggcagccaggactgggcgggaaggtgctccctggatatactctgtgaaccttctggaaggctgctggcagtttttcctttttgtccaccaccctgctctttttaataattgtacataatccgtgtatttgttttacctgctcatcttctaaactggcgagccctatagttcgttctcattgttagattttgccttttacaagtgtccccaacctgcaataaacttttccctcttgaaaaaaa

SEQ ID NO: 32787 - protein, 683 aa, Artificial Sequence
  derived and/or modified sequence
MECCRRATPGTLLLFLAFLLLSSRTARSEEDRDGLWDAWGPWSECSRTCGGGASYSLRRCLSSKSCEGRNIRYRTCSNVDCPPEAGDFRAQQCSAHNDVKHHGQFYEWLPVSNDPDNPCSLKCQAKGTTLVVELAPKVLDGTRCYTESLDMCISGLCQIVGCDHQLGSTVKEDNCGVCNGDGSTCRLVRGQYKSQLSATKSDDTVVAIPYGSRHIRLVLKGPDHLYLETKTLQGTKGENSLSSTGTFLVDNSSVDFQKFPDKEILRMAGPLTADFIVKIRNSGSADSTVQFIFYQPIIHRWRETDFFPCSATCGGGYQLTSAECYDLRSNRVVADQYCHYYPENIKPKPKLQECNLDPCPASDGYKQIMPYDLYHPLPRWEATPWTACSSSCGGGIQSRAVSCVEEDIQGHVTSVEEWKCMYTPKMPIAQPCNIFDCPKWLAQEWSPCTVTCGQGLRYRVVLCIDHRGMHTGGCSPKTKPHIKEECIVPTPCYKPKEKLPVEAKLPWFKQAQELEEGAAVSEEPSFIPEAWSACTVTCGVGTQVRIVRCQVLLSFSQSVADLPIDECEGPKPASQRACYAGPCSGEIPEFNPDETDGLFGGLQDFDELYDWEYEGFTKCSESCGGGVQEAVVSCLNKQTREPAEENLCVTSRRPPQLLKSCNLDPCPARSSIDSAWNACNVLC

SEQ ID NO: 32788 - protein, 1762 aa, Artificial Sequence
  derived and/or modified sequence
MECCRRATPGTLLLFLAFLLLSSRTARSEEDRDGLWDAWGPWSECSRTCGGGASYSLRRCLSSKSCEGRNIRYRTCSNVDCPPEAGDFRAQQCSAHNDVKHHGQFYEWLPVSNDPDNPCSLKCQAKGTTLVVELAPKVLDGTRCYTESLDMCISGLCQIVGCDHQLGSTVKEDNCGVCNGDGSTCRLVRGQYKSQLSATKSDDTVVAIPYGSRHIRLVLKGPDHLYLETKTLQGTKGENSLSSTGTFLVDNSSVDFQKFPDKEILRMAGPLTADFIVKIRNSGSADSTVQFIFYQPIIHRWRETDFFPCSATCGGGYQLTSAECYDLRSNRVVADQYCHYYPENIKPKPKLQECNLDPCPASDGYKQIMPYDLYHPLPRWEATPWTACSSSCGGGIQSRAVSCVEEDIQGHVTSVEEWKCMYTPKMPIAQPCNIFDCPKWLAQEWSPCTVTCGQGLRYRVVLCIDHRGMHTGGCSPKTKPHIKEECIVPTPCYKPKEKLPVEAKLPWFKQAQELEEGAAVSEEPSFIPEAWSACTVTCGVGTQVRIVRCQVLLSFSQSVADLPIDECEGPKPASQRACYAGPCSGEIPEFNPDETDGLFGGLQDFDELYDWEYEGFTKCSESCGGGVQEAVVSCLNKQTREPAEENLCVTSRRPPQLLKSCNLDPCPARWEIGKWSPCSLTCGVGLQTRDVFCSHLLSREMNETVILADELCRQPKPSTVQACNRFNCPPAWYPAQWQPCSRTCGGGVQKREVLCKQRMADGSFLELPETFCSASKPACQQACKKDDCPSEWLLSDWTECSTSCGEGTQTRSAICRKMLKTGLSTVVNSTLCPPLPFSSSIRPCMLATCARPGRPSTKHSPHIAAARKVYIQTRRQRKLHFVVGGFAYLLPKTAVVLRCPARRVRKPLITWEKDGQHLISSTHVTVAPFGYLKIHRLKPSDAGVYTCSAGPAREHFVIKLIGGNRKLVARPLSPRSEEEVLAGRKGGPKEALQTHKHQNGIFSNGSKAEKRGLAANPGSRYDDLVSRLLEQGGWPGELLASWEAQDSAERNTTSEEDPGAEQVLLHLPFTMVTEQRRLDDILGNLSQQPEELRDLYSKHLVAQLAQEIFRSHLEHQDTLLKPSERRTSPVTLSPHKHVSGFSSSLRTSSTGDAGGGSRRPHRKPTILRKISAAQQLSASEVVTHLGQTVALASGTLSVLLHCEAIGHPRPTISWARNGEEVQFSDRILLQPDDSLQILAPVEADVGFYTCNATNALGYDSVSIAVTLAGKPLVKTSRMTVINTEKPAVTVDIGSTIKTVQGVNVTINCQVAGVPEAEVTWFRNKSKLGSPHHLHEGSLLLTNVSSSDQGLYSCRAANLHGELTESTQLLILDPPQVPTQLEDIRALLAATGPNLPSVLTSPLGTQLVLDPGNSALLGCPIKGHPVPNITWFHGGQPIVTATGLTHHILAAGQILQVANLSGGSQGEFSCLAQNEAGVLMQKASLVIQDYWWSVDRLATCSASCGNRGVQQPRLRCLLNSTEVNPAHCAGKVRPAVQPIACNRRDCPSRWMVTSWSACTRSCGGGVQTRRVTCQKLKASGISTPVSNDMCTQVAKRPVDTQACNQQLCVEWAFSSWGQCNGPCIGPHLAVQHRQVFCQTRDGITLPSEQCSALPRPVSTQNCWSEACSVHWRVSLWTLCTATCGNYGFQSRRVECVHARTNKAVPEHLCSWGPRPANWQRCNITPCENMECRDTTRYCEKVKQLKLCQLSQFKSRCCGTCGKA

SEQ ID NO: 32789 - protein, 439 aa, Artificial Sequence
  derived and/or modified sequence
MECCRRATPGTLLLFLAFLLLSSRTARSEEDRDGLWDAWGPWSECSRTCGGGASYSLRRCLSSKSCEGRNIRYRTCSNVDCPPEAGDFRAQQCSAHNDVKHHGQFYEWLPVSNDPDNPCSLKCQAKGTTLVVELAPKVLDGTRCYTESLDMCISGLCQIVGCDHQLGSTVKEDNCGVCNGDGSTCRLVRGQYKSQLSATKSDDTVVAIPYGSRHIRLVLKGPDHLYLETKTLQGTKGENSLSSTGTFLVDNSSVDFQKFPDKEILRMAGPLTADFIVKIRNSGSADSTVQFIFYQPIIHRWRETDFFPCSATCGGGYQLTSAECYDLRSNRVVADQYCHYYPENIKPKPKLQECNLDPCPARWEATPWTACSSSCGGGIQSRAVSCVEEDIQGHVTSVEEWKCMYTPKMPIAQPCNIFDCPKWLAQEWSPVTVPSFFVH

SEQ ID NO: 32790 - DNA, 2253 bp, Artificial Sequence
  derived and/or modified sequence
atggaatgctgccgtcgggcaactcctggcacactgctcctctttctggctttcctgctcctgagttccaggaccgcacgctccgaggaggaccgggacggcctatgggatgcctggggcccatggagtgaatgctcacgcacctgcgggggtggggcctcctactctctgaggcgctgcctgagcagcaagagctgtgaaggaagaaatatccgatacagaacatgcagtaatgtggactgcccaccagaagcaggtgatttccgagctcagcaatgctcagctcataatgatgtcaagcaccatggccagttttatgaatggcttcctgtgtctaatgaccctgacaacccatgttcactcaagtgccaagccaaaggaacaaccctggttgttgaactagcacctaaggtcttagatggtacgcgttgctatacagaatctttggatatgtgcatcagtggtttatgccaaattgttggctgcgatcaccagctgggaagcaccgtcaaggaagataactgtggggtctgcaacggagatgggtccacctgccggctggtccgagggcagtataaatcccagctctccgcaaccaaatcggatgatactgtggttgcaattccctatggaagtagacatattcgccttgtcttaaaaggtcctgatcacttatatctggaaaccaaaaccctccaggggactaaaggtgaaaacagtctcagctccacaggaactttccttgtggacaattctagtgtggacttccagaaatttccagacaaagagatactgagaatggctggaccactcacagcagatttcattgtcaagattcgtaactcgggctccgctgacagtacagtccagttcatcttctatcaacccatcatccaccgatggagggagacggatttctttccttgctcagcaacctgtggaggaggttatcagctgacatcggctgagtgctacgatctgaggagcaaccgtgtggttgctgaccaatactgtcactattacccagagaacatcaaacccaaacccaagcttcaggagtgcaacttggatccttgtccagccagtgacggatacaagcagatcatgccttatgacctctaccatccccttcctcggtgggaggccaccccatggaccgcgtgctcctcctcgtgtggggggggcatccagagccgggcagtttcctgtgtggaggaggacatccaggggcatgtcacttcagtggaagagtggaaatgcatgtacacccctaagatgcccatcgcgcagccctgcaacatttttgactgccctaaatggctggcacaggagtggtctccgtgcacagtgacatgtggccagggcctcagataccgtgtggtcctctgcatcgaccatcgaggaatgcacacaggaggctgtagcccaaaaacaaagccccacataaaagaggaatgcatcgtacccactccctgctataaacccaaagagaaacttccagtcgaggccaagttgccatggttcaaacaagctcaagagctagaagaaggagctgctgtgtcagaggagccctcgttcatcccagaggcctggtcggcctgcacagtcacctgtggtgtggggacccaggtgcgaatagtcaggtgccaggtgctcctgtctttctctcagtccgtggctgacctgcctattgacgagtgtgaagggcccaagccagcatcccagcgtgcctgttatgcaggcccatgcagcggggaaattcctgagttcaacccagacgagacagatgggctctttggtggcctgcaggatttcgacgagctgtatgactgggagtatgaggggttcaccaagtgctccgagtcctgtggaggaggtgtccaggaggctgtggtgagctgcttgaacaaacagactcgggagcctgctgaggagaacctgtgcgtgaccagccgccggcccccacagctcctgaagtcctgcaatttggatccctgcccagcaagaagcagtatcgactcagcatggaacgcctgcaacgttctttgttaggcaaccaagaggcctggcttctcatcctgctgtcaccaactagctctgtggcctagggcgaggtgtctgccctttatgtttccacatctgcaaagtgaactggttgtacctgatgatctgagatcccatgacttgctcacatgtcccatgattctttattttgtaggcagaagcattaaacagctactcctgctgctgtgt

SEQ ID NO: 32791 - DNA, 3800 bp, Artificial Sequence
  derived and/or modified sequence
atgtgtttgactgatgagtggggtttttttttttttttcttcctaggagtgcctgaagctgaagtcacttggttcaggaataaaagcaaactgggctccccgcaccatctgcacgaaggctccttgctgctcacaaacgtgtcctcctcggatcagggcctgtactcctgcagggcggccaatcttcatggagagctgactgagagcacccagctgctgatcctagatcccccccaagtccccacacagttggaagacatcagggccttgctcgctgccactggaccgaaccttccttcagtgctgacgtctcctctgggaacacagctggtcctggatcctgggaattctgctctccttggctgccccatcaaaggtcaccctgtccctaatatcacctggtttcatggtggtcagccaattgtcactgccacaggactgacgcatcacatcttggcagctggacagatccttcaagttgcaaaccttagcggtgggtctcaaggggaattcagctgccttgctcagaatgaggcaggggtgctcatgcagaaggcatctttagtgatccaagattactggtggtctgtggacagactggcaacctgctcagcctcctgtggtaaccggggggttcagcagccccgcttgaggtgcctgctgaacagcacggaggtcaaccctgcccactgcgcagggaaggttcgccctgcggtgcagcccatcgcgtgcaaccggagagactgcccttctcggtggatggtgacctcctggtctgcctgtacccggagctgtgggggaggtgtccagacccgcagggtgacctgtcaaaagctgaaagcctctgggatctccacccctgtgtccaatgacatgtgcacccaggtcgccaagcggcctgtggacacccaggcctgtaaccagcagctgtgtgtggagtgggccttctccagctggggccagtgcaatgggccttgcatcgggcctcacctagctgtgcaacacagacaagtcttctgccagacacgggatggcatcaccttaccatcagagcagtgcagtgctcttccgaggcctgtgagcacccagaactgctggtcagaggcctgcagtgtacactggagagtcagcctgtggaccctgtgcacagctacctgtggcaactacggcttccagtcccggcgtgtggagtgtgtgcatgcccgcaccaacaaggcagtgcctgagcacctgtgctcctgggggccccggcctgccaactggcagcgctgcaacatcaccccatgtgaaaacatggagtgcagagacaccaccaggtactgcgagaaggtgaaacagctgaaactctgccaactcagccagtttaaatctcgctgctgtggaacttgtggcaaagcgtgaagatagggtgtggggaaaaactctaccctggccacacgaaggactcacgcaaccacctcggacagaacctaagctttcttcattttatttatttatttccccctccccactccacacacacccttccaacctcctccacctccaccttcaagcataaggacgtccgcgtgttttctctttcagttagctggaggacaggatgttgggaaaggaaaggacagatgtctaaaggaggttgcagagcaggccaggcagacagtgggggctcccttgaagagcttcctccctcccaaacctgggtctcaaagacctagaaagaggcaggcacagcccctgcggacagcagggagccagaaggtttgtagcctattggtgcaaacattggacaaattcctgtgtctttcctagaagcgcactatcacaaacacaggagtgttttgctcctttgtctcctcttccccatctatgtccctttagtcacagttaggacaaatggggaggggacaccatgctgaggcagaaactagcccagaactcactcagttcttctagtgggtgagtgcagagagagaagaactcagatcaccagtagggagaggtaaaaaagcaaacaaagcaggctctaaggcacacaacattgcagaaaatgaggaagggaggggagggaagggacagaagcaaaaaggagcctgtggtgttccccagtggggcagggtgagcaggggcttccaggctgcatgaggctcatggaccagctctgatcccatgcatgtgcgcatgctcagagccctgctgcccacaacagagcactgcgctgcgtgggagtccccacttcccaagctatcagagtcaacgtcctgcctgtgcagctgcagcaaagccagtgagaggtgggtctcgccatgcagtaaggccaccctggcacctctttatctaaatccgaagtcccctagccccgcactaactaactgctgctgtgggccagggccattttgagcatgaatggcccaggttttttgccttctaggacctttgctgctccaccgaagggccagggactatggttaacttatcaacatcaacccattaactagtcactgtgccagagagtatctgtcaggctgtcaggttgtagcaacctcttcattccagagctggcccagggaccggggtgggacaatgggtttatgcgtgtccacagtacaccctccctctcccagcctccaccccagggtctgcaggtcctccggcatgtagtatttatctagcaaggcggggtggtggaggcagcaccctggcaaagcagctcacacactgcagccacactcatcagctgtggtgaggcggctggagcaaagtcaaagtcatgcagcaaaatgaaaactctgggactcttcggcaaaatcctcattaagccgagcagctttggccaagtaatttttgcctccttccctcgcgtggcctgagtttaggagcaagggtggccagagtcccttacccacagataagcctcccctcatgaaatgccactcaccccgggctaccattgacatcagggctgcatttccagccagcctggaagtaaaatttgagaggaagacaatattaatctgtgtccccacctagtgagctgtggacaggtttaagttgggtctccttcttcttcaccacaaaaacaggctctaagaaatcatgttactaaaaaatcagtgtaaagtctgtttaaaataaaaaagaatgttttctatgtctgtatatcttttgtgaatatttattaggatttcttattaaaaaagtgcaatattaataattgtacattgtcatccagaaacaaaactattggggggactttattaactaacttcctgcagttgtgttcctgtaaactcagtagtgattattatatttttcctatttttaatagaacctggtgtttaactctggatccattcactgtacaggatgtgttgtaaaaactaacatgggatgctgaggcagtaagagggaattcatttgtggcataatagttatgcatggaatgataaagacagacaaattccatactactactaatgtggttaattatttctagttcgatagtgattgaaaatcagtggtcactatttacatttcctaaagagcaagcatcctccagctccatgttgggttggagcagttggcagtgggtctcagtgagctggcagaacctaggtttgggtgggaagcagaatgctcgttgcatgaaatgaatgtacatttaatgtttgttctgtgaattgcaactcagcagcaccacaagacaatgaaggctgctggctaatgtggaaggaggcactttctcctctaaaacacaaaactgtatttgtattttttgtacagataatacagcttatttattt

SEQ ID NO: 32792 - DNA, 1864 bp, Artificial Sequence
  derived and/or modified sequence
aaatgtgagaggggctgatggaagctgataggcaggactggagtgttagcaccagtactggatgtgacagcaggcagaggagcacttagcagcttattcagtgtccgattctgattccggcaaggatccaagcatggaatgctgccgtcgggcaactcctggcacactgctcctctttctggctttcctgctcctgagttccaggaccgcacgctccgaggaggaccgggacggcctatgggatgcctggggcccatggagtgaatgctcacgcacctgcgggggtggggcctcctactctctgaggcgctgcctgagcagcaagagctgtgaaggaagaaatatccgatacagaacatgcagtaatgtggactgcccaccagaagcaggtgatttccgagctcagcaatgctcagctcataatgatgtcaagcaccatggccagttttatgaatggcttcctgtgtctaatgaccctgacaacccatgttcactcaagtgccaagccaaaggaacaaccctggttgttgaactagcacctaaggtcttagatggtacgcgttgctatacagaatctttggatatgtgcatcagtggtttatgccaaattgttggctgcgatcaccagctgggaagcaccgtcaaggaagataactgtggggtctgcaacggagatgggtccacctgccggctggtccgagggcagtataaatcccagctctccgcaaccaaatcggatgatactgtggttgcaattccctatggaagtagacatattcgccttgtcttaaaaggtcctgatcacttatatctggaaaccaaaaccctccaggggactaaaggtgaaaacagtctcagctccacaggaactttccttgtggacaattctagtgtggacttccagaaatttccagacaaagagatactgagaatggctggaccactcacagcagatttcattgtcaagattcgtaactcgggctccgctgacagtacagtccagttcatcttctatcaacccatcatccaccgatggagggagacggatttctttccttgctcagcaacctgtggaggaggttatcagctgacatcggctgagtgctacgatctgaggagcaaccgtgtggttgctgaccaatactgtcactattacccagagaacatcaaacccaaacccaagcttcaggagtgcaacttggatccttgtccagccagtgacggatacaagcagatcatgccttatgacctctaccatccccttcctcggtgggaggccaccccatggaccgcgtgctcctcctcgtgtggggggggcatccagagccgggcagtttcctgtgtggaggaggacatccaggggcatgtcacttcagtggaagagtggaaatgcatgtacacccctaagatgcccatcgcgcagccctgcaacatttttgactgccctaaatggctggcacaggagtggtctccgtgcacagtgacatgtggccagggcctcagataccgtgtggtcctctgcatcgaccatcgaggaatgcacacaggaggctgtagcccaaaaacaaagccccacataaaagaggaatgcatcgtacccactccctgctataaacccaaagagaaacttccagtcgaggccaagttgccatggttcaaacaagctcaagagctagaagaaggagctgctgtgtcagaggagccctcgtaagttgtaaaagcacagactgttctatatttgaaactgttttgtttaaagaaagcagtgtctcactggttgtagctttcatgggttctgaactaagtgtaatcatctcaccaaagctttttggctctcaaattaaagattgattagtttcaaaaa

SEQ ID NO: 32793 - DNA, 8030 bp, Artificial Sequence
  derived and/or modified sequence
tttcccttctcgctctgctgctcgctcgcctttctttttcgtccttttcccccttttttgctcgcaccgttacactttctctgtcctcctggctttgttattcagcatgtctgattagcaggagcctgattggctggctgcctgctccgagagagattccattcagcttaccccccacccatccacccacccacccctcggtcaggaaatgtgagaggggctgatggaagctgataggcaggactggagtgttagcaccagtactggatgtgacagcaggcagaggagcacttagcagcttattcagtgtccgattctgattccggcaaggatccaagcatggaatgctgccgtcgggcaactcctggcacactgctcctctttctggctttcctgctcctgagttccaggaccgcacgctccgaggaggaccgggacggcctatgggatgcctggggcccatggagtgaatgctcacgcacctgcgggggtggggcctcctactctctgaggcgctgcctgagcagcaagagctgtgaaggaagaaatatccgatacagaacatgcagtaatgtggactgcccaccagaagcaggtgatttccgagctcagcaatgctcagctcataatgatgtcaagcaccatggccagttttatgaatggcttcctgtgtctaatgaccctgacaacccatgttcactcaagtgccaagccaaaggaacaaccctggttgttgaactagcacctaaggtcttagatggtacgcgttgctatacagaatctttggatatgtgcatcagtggtttatgccaaattgttggctgcgatcaccagctgggaagcaccgtcaaggaagataactgtggggtctgcaacggagatgggtccacctgccggctggtccgagggcagtataaatcccagctctccgcaaccaaatcggatgatactgtggttgcaattccctatggaagtagacatattcgccttgtcttaaaaggtcctgatcacttatatctggaaaccaaaaccctccaggggactaaaggtgaaaacagtctcagctccacaggaactttccttgtggacaattctagtgtggacttccagaaatttccagacaaagagatactgagaatggctggaccactcacagcagatttcattgtcaagattcgtaactcgggctccgctgacagtacagtccagttcatcttctatcaacccatcatccaccgatggagggagacggatttctttccttgctcagcaacctgtggaggaggttatcagctgacatcggctgagtgctacgatctgaggagcaaccgtgtggttgctgaccaatactgtcactattacccagagaacatcaaacccaaacccaagcttcaggagtgcaacttggatccttgtccagccagtgacggatacaagcagatcatgccttatgacctctaccatccccttcctcggtgggaggccaccccatggaccgcgtgctcctcctcgtgtggggggggcatccagagccgggcagtttcctgtgtggaggaggacatccaggggcatgtcacttcagtggaagagtggaaatgcatgtacacccctaagatgcccatcgcgcagccctgcaacatttttgactgccctaaatggctggcacaggagtggtctccgtgcacagtgacatgtggccagggcctcagataccgtgtggtcctctgcatcgaccatcgaggaatgcacacaggaggctgtagcccaaaaacaaagccccacataaaagaggaatgcatcgtacccactccctgctataaacccaaagagaaacttccagtcgaggccaagttgccatggttcaaacaagctcaagagctagaagaaggagctgctgtgtcagaggagccctcgttcatcccagaggcctggtcggcctgcacagtcacctgtggtgtggggacccaggtgcgaatagtcaggtgccaggtgctcctgtctttctctcagtccgtggctgacctgcctattgacgagtgtgaagggcccaagccagcatcccagcgtgcctgttatgcaggcccatgcagcggggaaattcctgagttcaacccagacgagacagatgggctctttggtggcctgcaggatttcgacgagctgtatgactgggagtatgaggggttcaccaagtgctccgagtcctgtggaggaggtgtccaggaggctgtggtgagctgcttgaacaaacagactcgggagcctgctgaggagaacctgtgcgtgaccagccgccggcccccacagctcctgaagtcctgcaatttggatccctgcccagcaaggtgggaaattggcaagtggagtccatgtagtctcacatgtggggtcggcctacagaccagagacgtcttctgcagccacctgctttccagagagatgaatgaaacagtcatcctggctgatgagctgtgtcgccagcccaagcccagcacggtgcaagcttgtaaccgctttaattgccccccagcctggtaccctgcacagtggcagccgtgttccagaacgtgtggcgggggtgttcagaaacgtgaggttctttgcaagcagcgcatggctgatggcagcttcctggagcttcctgagaccttctgttcagcttcaaaacctgcctgccagcaagcatgcaagaaagatgactgtcccagcgagtggcttctctcagactggacagagtgttccacaagctgcggggaaggcacccagactcgaagcgccatttgccgaaagatgctgaaaaccggcctctcaacggttgtcaattccaccctgtgcccgcccctgcctttctcttcctccatcaggccctgtatgctggcaacctgtgcaaggcccgggcggccatccacgaagcacagcccgcacatcgcggccgccaggaaggtctacatacagactcgcaggcagaggaagctgcacttcgtggtggggggcttcgcctacctgctccccaagacggcggtggtgctgcgctgcccggcgcgcagggtccgcaagcccctcatcacctgggagaaggacggccagcacctcatcagctcgacgcacgtcacggtggcccccttcggctatctcaagatccaccgcctcaagccctcggatgcaggcgtctacacctgctcagcgggcccggcccgggagcactttgtgattaagctcatcggaggcaaccgcaagctcgtggcccggcccttgagcccgagaagtgaggaagaggtgcttgcggggaggaagggcggcccgaaggaggccctgcagacccacaaacaccagaacgggatcttctccaacggcagcaaggcggagaagcggggcctggccgccaacccggggagccgctacgacgacctcgtctcccggctgctggagcagggcggctggcccggagagctgctggcctcgtgggaggcgcaggactctgcggaaaggaacacgacctcggaggaggacccgggtgcagagcaagtgctcctgcacctgcccttcaccatggtgaccgagcagcggcgcctggacgacatcctggggaacctctcccagcagcccgaggagctgcgcgacctctacagcaagcacctggtggcccagctggcccaggagatcttccgcagccacctggagcaccaggacacgctcctgaagccctcggagcgcaggacttccccagtgactctctcgcctcataaacacgtgtctggcttcagcagctccctgcggacctcctccaccggggacgccgggggaggctctcgaaggccacaccgcaagcccaccatcctgcgcaagatctcagcggcccagcagctctcagcctcggaggtggtcacccacctggggcagacggtggccctggccagcgggacactgagtgttcttctgcactgtgaggccatcggccacccaaggcctaccatcagctgggccaggaatggagaagaagttcagttcagtgacaggattcttctacagccagatgattccttacagatcttggcaccagtggaagcagatgtgggtttctacacttgcaatgccaccaatgccttgggatacgactctgtctccattgccgtcacattagcaggaaagccactagtgaaaacgtcacgaatgacagtgatcaacacggagaagcctgcagtcacagtcgatataggaagcaccatcaaaacagtgcagggagtgaatgtgacaatcaactgccaggttgcaggagtgcctgaagctgaagtcacttggttcaggaataaaagcaaactgggctccccgcaccatctgcacgaaggctccttgctgctcacaaacgtgtcctcctcggatcagggcctgtactcctgcagggcggccaatcttcatggagagctgactgagagcacccagctgctgatcctagatcccccccaagtccccacacagttggaagacatcagggccttgctcgctgccactggaccgaaccttccttcagtgctgacgtctcctctgggaacacagctggtcctggatcctgggaattctgctctccttggctgccccatcaaaggtcaccctgtccctaatatcacctggtttcatggtggtcagccaattgtcactgccacaggactgacgcatcacatcttggcagctggacagatccttcaagttgcaaaccttagcggtgggtctcaaggggaattcagctgccttgctcagaatgaggcaggggtgctcatgcagaaggcatctttagtgatccaagattactggtggtctgtggacagactggcaacctgctcagcctcctgtggtaaccggggggttcagcagccccgcttgaggtgcctgctgaacagcacggaggtcaaccctgcccactgcgcagggaaggttcgccctgcggtgcagcccatcgcgtgcaaccggagagactgcccttctcggtggatggtgacctcctggtctgcctgtacccggagctgtgggggaggtgtccagacccgcagggtgacctgtcaaaagctgaaagcctctgggatctccacccctgtgtccaatgacatgtgcacccaggtcgccaagcggcctgtggacacccaggcctgtaaccagcagctgtgtgtggagtgggccttctccagctggggccagtgcaatgggccttgcatcgggcctcacctagctgtgcaacacagacaagtcttctgccagacacgggatggcatcaccttaccatcagagcagtgcagtgctcttccgaggcctgtgagcacccagaactgctggtcagaggcctgcagtgtacactggagagtcagcctgtggaccctgtgcacagctacctgtggcaactacggcttccagtcccggcgtgtggagtgtgtgcatgcccgcaccaacaaggcagtgcctgagcacctgtgctcctgggggccccggcctgccaactggcagcgctgcaacatcaccccatgtgaaaacatggagtgcagagacaccaccaggtactgcgagaaggtgaaacagctgaaactctgccaactcagccagtttaaatctcgctgctgtggaacttgtggcaaagcgtgaagatagggtgtggggaaaaactctaccctggccacacgaaggactcacgcaaccacctcggacagaacctaagctttcttcattttatttatttatttccccctccccactccacacacacccttccaacctcctccacctccaccttcaagcataaggacgtccgcgtgttttctctttcagttagctggaggacaggatgttgggaaaggaaaggacagatgtctaaaggaggttgcagagcaggccaggcagacagtgggggctcccttgaagagcttcctccctcccaaacctgggtctcaaagacctagaaagaggcaggcacagcccctgcggacagcagggagccagaaggtttgtagcctattggtgcaaacattggacaaattcctgtgtctttcctagaagcgcactatcacaaacacaggagtgttttgctcctttgtctcctcttccccatctatgtccctttagtcacagttaggacaaatggggaggggacaccatgctgaggcagaaactagcccagaactcactcagttcttctagtgggtgagtgcagagagagaagaactcagatcaccagtagggagaggtaaaaaagcaaacaaagcaggctctaaggcacacaacattgcagaaaatgaggaagggaggggagggaagggacagaagcaaaaaggagcctgtggtgttccccagtggggcagggtgagcaggggcttccaggctgcatgaggctcatggaccagctctgatcccatgcatgtgcgcatgctcagagccctgctgcccacaacagagcactgcgctgcgtgggagtccccacttcccaagctatcagagtcaacgtcctgcctgtgcagctgcagcaaagccagtgagaggtgggtctcgccatgcagtaaggccaccctggcacctctttatctaaatccgaagtcccctagccccgcactaactaactgctgctgtgggccagggccattttgagcatgaatggcccaggttttttgccttctaggacctttgctgctccaccgaagggccagggactatggttaacttatcaacatcaacccattaactagtcactgtgccagagagtatctgtcaggctgtcaggttgtagcaacctcttcattccagagctggcccagggaccggggtgggacaatgggtttatgcgtgtccacagtacaccctccctctcccagcctccaccccagggtctgcaggtcctccggcatgtagtatttatctagcaaggcggggtggtggaggcagcaccctggcaaagcagctcacacactgcagccacactcatcagctgtggtgaggcggctggagcaaagtcaaagtcatgcagcaaaatgaaaactctgggactcttcggcaaaatcctcattaagccgagcagctttggccaagtaatttttgcctccttccctcgcgtggcctgagtttaggagcaagggtggccagagtcccttacccacagataagcctcccctcatgaaatgccactcaccccgggctaccattgacatcagggctgcatttccagccagcctggaagtaaaatttgagaggaagacaatattaatctgtgtccccacctagtgagctgtggacaggtttaagttgggtctccttcttcttcaccacaaaaacaggctctaagaaatcatgttactaaaaaatcagtgtaaagtctgtttaaaataaaaaagaatgttttctatgtctgtatatcttttgtgaatatttattaggatttcttattaaaaaagtgcaatattaataattgtacattgtcatccagaaacaaaactattggggggactttattaactaacttcctgcagttgtgttcctgtaaactcagtagtgattattatatttttcctatttttaatagaacctggtgtttaactctggatccattcactgtacaggatgtgttgtaaaaactaacatgggatgctgaggcagtaagagggaattcatttgtggcataatagttatgcatggaatgataaagacagacaaattccatactactactaatgtggttaattatttctagttcgatagtgattgaaaatcagtggtcactatttacatttcctaaagagcaagcatcctccagctccatgttgggttggagcagttggcagtgggtctcagtgagctggcagaacctaggtttgggtgggaagcagaatgctcgttgcatgaaatgaatgtacatttaatgtttgttctgtgaattgcaactcagcagcaccacaagacaatgaaggctgctggctaatgtggaaggaggcactttctcctctaaaacacaaaactgtatttgtattttttgtacagataatacagcttatttatttaaa

SEQ ID NO: 32794 - DNA, 2052 bp, Artificial Sequence
  derived and/or modified sequence
atggagtgttgccgtagagctaccccggggacccttcttctatttttggccttcctgcttctatccagccgcacggcgagaagtgaggaggatcgtgacggtctctgggacgcctggggtccatggagtgaatgttctcgtacatgcgggggaggagcctcctacagtctgagacgatgtcttagctcaaagtcctgcgaggggagaaatatccggtaccgcacttgctcaaacgtggactgcccccctgaggccggtgatttcagggctcagcagtgcagcgctcataatgacgtcaagcaccacgggcaattctatgagtggcttcccgtgagcaacgatcccgataacccctgcagtttgaaatgtcaggctaaagggacaaccctggttgtagagcttgcccctaaagtgctggacggcacgcgttgctataccgaaagcttggatatgtgcatttccggcctttgccagattgtgggttgcgaccatcagctcggcagcacagttaaagaggacaattgcggcgtttgtaatggtgatggatcaacttgcaggttggtgcgcggacagtataagtcccagctgagcgccacaaaatccgacgacaccgtcgtcgctattccttatggaagcagacacattcggcttgttctgaaaggccccgaccatctgtatctggaaaccaagaccctgcagggcacaaagggggaaaattcactctcaagcaccggtaccttcctggtggacaattcctcagtcgactttcagaagtttcccgacaaggagatactgcgaatggccggccctcttactgccgattttatcgtgaagatacggaactccggctccgcagactctaccgttcagttcattttctatcagccgatcatacatcgatggagagagacagatttttttccttgcagcgctacctgcggcgggggataccaacttacctccgccgaatgctacgatctcagatcaaatagggtggttgccgaccagtattgtcactactatccagagaacattaaaccaaagcccaagctgcaggagtgtaacctggatccttgtcctgcatctgacggctacaagcaaattatgccgtatgatttgtaccatccattaccccgatgggaagccacaccttggaccgcctgttcctccagctgtggcggaggcattcagtctagagctgtgtcctgtgtggaggaggacatccaaggccacgtgactagcgtagaggagtggaagtgtatgtacacaccaaaaatgcctatcgcacagccctgcaatattttcgactgcccaaagtggctcgcacaggagtggtcaccatgtaccgtgacttgcggacagggcctgcggtaccgagtggtgctctgtatcgatcaccgcgggatgcacactggtgggtgctctcccaagaccaagccacatatcaaggaggaatgtattgtccccacaccttgttacaagcctaaggaaaagctccccgtcgaggccaaattaccatggttcaagcaagctcaggaacttgaggaaggggccgccgtgagcgaagagccttcctttatcccagaagcctggtccgcctgtaccgtgacatgtggtgttggaacccaagtgcggatcgtccgctgccaggttctgctgagtttcagccagtcagtggcagacctgccgatcgatgaatgcgagggtccaaagcctgcctcccagcgggcctgttatgccggcccctgtagcggggagatccctgagttcaacccggacgagaccgacggacttttcggcggactccaggatttcgacgagctgtacgactgggaatacgaggggtttacaaagtgcagcgagagctgcggagggggagtacaggaagctgttgtgtcgtgtcttaacaagcagacacgagaaccggccgaagagaatctctgtgtaaccagcaggcggcctcctcagctgctgaagtcctgcaatctggacccttgtcccgcccgcagtagtattgactccgcctggaacgcgtgtaacgttttgtgctag

SEQ ID NO: 32795 - DNA, 1401 bp, Artificial Sequence
  derived and/or modified sequence
atgtgcctgactgatgagtgggggttctttttctttttttttctgggcgtgcccgaagcggaggttacctggtttcgaaacaaaagtaagctgggctcaccccaccatcttcacgaagggtcacttctgcttaccaacgtcagctcatccgaccaaggcctgtactcttgtagggcagccaacctgcacggcgagctgaccgagtccacacaactgctaattctggaccctccacaggtccctactcagctcgaggacataagagcgctgttggccgctacaggcccaaatctgccctctgtcctgacgagcccactcggaacccagctggtgctggatccgggtaattctgcgctcctaggctgtccaattaaagggcaccctgtgcccaacatcacctggtttcatggcggccaacctattgtgaccgccaccggcttgacgcaccacatccttgccgctggccagatcctgcaggtggctaacttgagcgggggttcccagggtgaatttagctgcttagctcaaaacgaggccggcgtgctgatgcagaaggcctctctcgtaattcaagactattggtggtctgtagacagactggccacttgttccgccagctgcggtaacagaggcgtgcagcagcccaggctccgctgtcttctcaattccacagaggtcaacccagcccattgcgccggaaaggttcggcccgccgtacagccaattgcgtgtaaccggcgggactgtcccagtagatggatggtgacctcttggagtgcttgcacccggtcatgcggcggaggcgtgcagacgcgaagggtcacgtgtcagaaattgaaggcctccggcatcagcacccctgtcagcaatgatatgtgcacgcaggttgccaaacgccctgtagacactcaggcctgtaaccagcaactctgcgtagagtgggcattctccagctggggccagtgtaatgggccatgcatcggccctcacctggccgtgcaacacaggcaagtgttctgccaaacaagagacggaatcacgcttccgtccgagcaatgtagcgctctcccgaggccagtgtctacccagaattgctggagcgaagcatgctcagttcattggagagtttccctttggactctctgcacagccacctgtggaaactacggctttcagagcaggcgtgtggaatgtgtacacgcccggaccaacaaagcagtgccagagcatctttgtagctggggaccccgtccagccaactggcagaggtgcaacataacaccatgtgaaaatatggaatgcagagatacaaccagatactgtgagaaggtcaagcagctgaagctgtgccagttgtcccagtttaaatcccgatgttgtggaacctgtggcaaggcttag

SEQ ID NO: 32796 - DNA, 5289 bp, Artificial Sequence
  derived and/or modified sequence
atggagtgttgcagaagagcaacacctggcacattattgttgttcctggcctttctactgttgtcaagcaggaccgctcgaagcgaggaagatcgggatggactgtgggacgcgtgggggccatggtcggaatgtagcaggacctgcggaggtggcgccagttatagcttaagaaggtgcttaagcagcaagtcttgtgaaggacggaacatcagatataggacctgttcaaatgtagactgcccacctgaggccggcgacttcagagcacagcagtgcagcgcgcataacgacgttaagcaccacggacaattttacgagtggctgccagtgtctaacgaccctgacaacccatgttccctcaagtgccaggccaaaggcacaactctggttgttgaactggccccaaaggtactggatggcacgcgttgttacactgagagcctggacatgtgcatttcaggtttgtgtcaaatagtcggatgtgaccaccagttagggtcgacggtgaaggaggacaactgtggtgtgtgcaacggagacggctctacgtgtcgcctggttcggggccagtataaaagtcagctctccgcaaccaaatctgacgatacggtcgtagctatcccctatggttctaggcacatcaggctggtcctgaagggcccagaccacctttatctggaaacgaagactctacaaggcaccaagggagagaacagtctctcaagtaccggtacgtttctggtggataattcaagcgtagactttcaaaaatttccggacaaggagatactccgaatggcagggccgctcaccgctgacttcatagtgaaaattcggaattctggctctgctgactccaccgtgcagtttatcttctaccagccgatcatacaccgctggagggagaccgatttctttccttgctctgctacttgtggaggagggtatcagctcaccagcgccgaatgttatgacctccgctctaatcgagtggttgccgaccagtattgccattactatcccgaaaacataaagcccaagccaaagttacaggagtgcaacctagacccttgtccggcgtcagatggctacaaacaaattatgccttacgacctgtatcatcctctgcctaggtgggaagcaacgccatggacagcctgttcatcatcctgcgggggcggcatacaatccagggccgtgtcttgcgtcgaggaggacatacagggtcatgtcacgagcgtagaagagtggaaatgcatgtacacccctaaaatgcccattgctcagccctgtaatattttcgattgcccgaaatggctggcccaagagtggagcccctgtacagtgacgtgtgggcaaggcctgaggtatcgggtggtgctctgcattgaccaccgcggaatgcacaccggcggctgctcacccaagaccaagccccatatcaaagaggagtgcattgtacccaccccatgctataagccaaaggaaaaattgcctgtagaggcaaagcttccctggttcaaacaggcccaggaactggaagaaggggcagcggtgagtgaagagccctcattcattcctgaagcttggtcagcctgtaccgtgacatgcggagtggggacacaggttagaatcgttcggtgtcaggtactcctcagtttttctcaaagcgtggcagatctgcccatagatgaatgcgagggcccaaagcctgcctctcagcgtgcctgttatgcaggcccttgctcaggtgagatccccgagttcaacccagatgaaacagacggactttttggtggccttcaggactttgatgagctgtacgattgggaatatgagggatttacgaagtgcagtgaaagttgcggcggaggcgtccaggaggccgtggtctcttgcctgaataaacagacaagagaaccagctgaagagaacctgtgcgttaccagccggcgaccaccccagctgcttaagtcttgcaaccttgatccttgcccggctcggtgggaaatcggcaaatggagtccctgcagtcttacatgtggcgtggggctacagacccgcgatgtgttttgcagccatcttctttcaagagaaatgaacgagacagtcatcctggctgatgagctgtgtcggcagccaaagccatctactgttcaggcctgcaatcggttcaattgtcccccagcctggtaccccgctcagtggcaaccatgttccaggacctgtggtggaggagtccagaagcgggaagtgctctgcaagcaacggatggcagatggcagttttctggagctcccagagacattttgttctgctagcaagcccgcctgccaacaggcttgtaaaaaggatgattgcccaagcgaatggctgctgtcggactggaccgagtgttccacaagctgtggagaaggcacccaaacccgatcagctatctgtcggaagatgctcaaaaccgggctgtctaccgtggttaactcgaccctgtgtccgcctctcccttttagttcctccattagaccctgtatgttggcaacctgtgctcggcctggcaggcccagcactaagcacagccctcacattgccgcagctagaaaagtatatatccaaactcggcggcagcgtaagctgcacttcgtagtgggcgggttcgcatacttactgcctaagacagccgttgttctcagatgtcccgcccggcgggtgcgtaagcccctcattacatgggaaaaagatgggcagcaccttatcagttccacccatgtgactgttgcaccgtttggctatttgaaaatacaccgtcttaagccaagtgatgccggtgtatacacatgttctgccggcccagcccgcgagcattttgtgatcaaactcatcggagggaacaggaagctcgtcgctcgccccctgtcgccgcggagcgaggaggaagtattagcgggacggaagggcgggcccaaagaggcccttcagactcataagcaccagaacggtatcttttccaacgggtctaaggccgaaaagcgcggactggcagcaaatcccgggagcagatatgatgacctggtgagccgactactggagcaggggggatggccaggtgaactattagcatcttgggaagctcaagactccgcagaacgcaacaccacaagcgaagaagatcctggtgcagagcaagtgctgcttcatttgccctttaccatggtgaccgagcagaggagactggacgacatcctggggaacctgtcccagcagccagaagagttgcgcgacttatattctaaacacttggtggctcagctggcacaggaaatctttcggtctcacctcgaacatcaggatacactactcaaaccatccgagaggcgcacttctccagtgacactgagcccccataaacatgtgtccggattttccagttcgcttcgtacctcttctacaggcgacgccggcggtggttcccggagacctcaccgaaagcctaccatcctccggaagatcagcgctgcccagcagctgtcagcctcagaagtcgtgacacatttggggcaaacagtcgcactggctagcgggaccctcagtgtcctgctgcactgcgaagctataggtcacccccggcctacaatctcttgggctcggaatggagaggaggtacagtttagtgatcggattttgctccagccagatgatagcctgcagatcctggcaccagtcgaagccgatgttgggttttacacgtgtaatgctaccaacgctttgggctatgacagcgtctccatcgcagtaaccctcgcaggtaaacccctggttaaaaccagcaggatgactgtcattaatactgagaagcccgccgtgactgtcgatattggtagcacaatcaagaccgtgcagggggtgaacgtcacaattaattgccaggtggccggggtgccagaagctgaagtgacatggtttcgaaataagagtaagctcggaagcccacaccacctccatgagggatcgctgctcttaaccaacgtctccagctctgaccagggcttatacagctgcagagctgccaatctgcacggtgagctcaccgagtctacacagctgttgatactggaccctccccaggttccaacacagctggaggatatacgcgcactgctggccgccaccggccctaatttgcctagcgttctgacatcccctttggggacacagttggtcctggatcccggcaattccgctctgctaggctgccctattaagggacaccccgttccgaatatcacgtggttccacgggggtcagcccatagtgactgccacagggctaacacaccatattttggcagctggacagattcttcaggtagccaacctatccggcggttctcagggtgagttcagttgccttgcccagaacgaggccggcgtgcttatgcaaaaggccagccttgtcatacaggattattggtggtcggtggataggttggccacatgttccgcttcatgtggaaaccgaggggttcagcagcccagactcaggtgtttactcaactcgactgaagttaacccagcccactgtgccggaaaagtaaggcctgctgtgcagccaatcgcatgtaacagacgggattgtccgtctagatggatggttacatcatggagtgcatgtacccgtagctgcgggggcggtgtgcagacccgtcgggtcacatgtcagaagctcaaagcgtccggtattagcaccccggtgtcaaacgacatgtgtacacaggtggcaaaacgccctgtagacactcaggcctgcaaccagcaactatgtgtggagtgggcattttcgtcgtgggggcagtgtaatggcccctgtatcggcccgcatctggcagtgcagcaccggcaggtgttctgccaaacacgagacggaatcactctgccgtcagaacaatgtagtgccttgccgagaccagtgtcaacacagaattgctggtctgaggcttgctccgtccactggcgtgttagtctgtggaccctgtgtacagcgacttgtggcaactatggctttcagtcccggagagtcgaatgcgtccatgcacggactaataaggctgtccccgaacatctatgcagttgggggccacggcccgctaattggcaaaggtgtaatattacgccctgcgaaaatatggagtgcagagacacgactagatactgcgagaaagtgaagcagttgaaattatgccagctcagccagttcaagagccgctgttgcggtacctgtggtaaagcctag

SEQ ID NO: 32797 - DNA, 2052 bp, Artificial Sequence
  derived and/or modified sequence
atggagtgctgcagaagagccaccccaggcaccctgctgctcttcctggccttcctgctgctgagcagcaggacagcccggtctgaggaggacagagatggcctgtgggatgcctggggcccctggagcgagtgcagcaggacctgtggcggcggggccagctacagcctgcggcgctgcctgagcagcaagagctgtgagggcaggaacatccgctaccgcacctgcagcaatgtggactgccccccagaggccggggacttccgggcccagcagtgcagcgcccacaatgatgtgaagcaccacggccagttctatgagtggctgcctgtgtccaatgaccctgacaacccctgcagcctgaagtgccaggccaagggcaccaccctggtggtggagctggcccccaaggtgctggatggcacccgctgctacacagagagcctggacatgtgcatcagcggcctgtgccagatcgtgggctgtgaccaccagctgggcagcacagtgaaggaggacaactgtggggtgtgcaatggagatggcagcacctgccgcctggtgcggggccagtacaagagccagctgagcgccaccaagagtgatgacacagtggtggccatcccctacggcagccgccacatccggctggtgctgaagggccctgaccacctgtacctggagaccaagaccctgcagggcaccaagggggagaacagcctgagcagcacaggcaccttcctggtggacaacagctctgtggacttccagaagttcccagacaaggagatcctgaggatggccggccccctgacagctgacttcatcgtgaagatccggaacagcggcagcgctgacagcacagtgcagttcatcttctaccagcccatcatccaccgctggagggagacagacttcttcccctgcagcgccacctgtggcggcggctaccagctgaccagcgcagaatgttatgacctgcggagcaacagagtggtggccgaccagtactgccactactacccagagaacatcaagcccaagcccaagctgcaggagtgcaacctggacccctgcccagccagtgatggctacaagcagatcatgccctatgacctgtaccaccccctgccccgctgggaggccaccccctggacagcctgcagcagcagctgtggcggcggcatccagagcagagctgtgtcctgtgtggaggaggacatccagggccacgtgacctctgtggaggagtggaagtgcatgtacacccccaagatgcccatcgcccagccctgcaacatctttgactgccccaagtggctggcccaggagtggagcccctgcaccgtgacctgtggccagggcctgcgctacagagtggtgctgtgcatcgaccaccggggcatgcacactggaggctgcagccccaagaccaagccccacatcaaggaggagtgcatcgtgcccaccccctgctacaagcccaaggagaagctgcctgtggaggccaagctgccctggttcaagcaggcccaggagctggaggagggcgctgctgtgtctgaggagcccagcttcatccctgaggcctggagcgcctgcaccgtgacctgtggggtgggcacccaggtgcgcatcgtgcgctgccaggtgctgctgtccttcagccagagcgtggccgacctgcccattgatgaatgtgagggccccaagccagccagccagagggcctgctacgccggcccctgcagcggggagatccctgagttcaacccagatgaaacagatggcctgtttggaggcctgcaggactttgatgagctgtatgactgggagtatgagggcttcaccaagtgcagcgagagctgtggcggcggcgtgcaggaggccgtggtgtcctgcctgaacaagcagacccgggagcctgctgaggagaacctgtgtgtgaccagccggcggcccccccagctgctgaagagctgcaacctggacccctgcccagcccggagcagcattgacagcgcctggaatgcctgcaatgtgctgtgctag

SEQ ID NO: 32798 - DNA, 1401 bp, Artificial Sequence
  derived and/or modified sequence
atgtgcctgacagatgagtggggcttcttcttcttcttcttcctgggcgtgcctgaggccgaggtgacctggttcaggaacaagagcaagctgggcagcccccaccacctgcacgagggcagcctgctgctgaccaacgtgagcagcagtgaccagggcctgtacagctgcagagctgccaacctgcatggagagctgacagagagcacccagctgctgatcctggaccccccccaggtgcccacccagctggaggacatccgggccctgctggccgccaccggccccaacctgcccagcgtgctgaccagccccctgggcacccagctggtgctggaccccggcaacagcgccctgctgggctgccccatcaagggccaccctgtgcccaacatcacctggttccacggcggccagcccatcgtgacagccaccggcctgacccaccacatcctggccgccggccagatcctgcaggtggccaacctgagcggcggcagccagggcgagttcagctgcctggcccagaatgaagctggggtgctgatgcagaaggccagcctggtgatccaggactactggtggagcgtggaccggctggccacctgcagcgccagctgtggcaacagaggagtgcagcagccccggctgcgctgcctgctgaacagcacagaggtgaacccagcccactgtgccggcaaggtgcggcctgctgtgcagcccatcgcctgcaacagaagagactgccccagccgctggatggtgacctcctggagcgcctgcaccaggagctgtggcggcggcgtgcagacccggcgggtgacctgccagaagctgaaggccagcggcatcagcacccctgtgtccaatgacatgtgcacccaggtggccaagaggcctgtggacacccaggcctgcaaccagcagctgtgtgtggagtgggccttcagctcctggggccagtgcaatggcccctgcatcggcccccacctggccgtgcagcaccggcaggtgttctgccagaccagagatggcatcaccctgcccagcgagcagtgcagcgccctgcccaggcctgtgtccacccagaactgctggagcgaggcctgcagcgtgcactggagggtgtccctgtggaccctgtgcacagccacctgtggcaactacggcttccagagccggcgggtggagtgtgtgcacgcccggaccaacaaggctgtgcctgagcacctgtgctcctggggccccaggcctgccaactggcagcgctgcaacatcaccccctgtgagaacatggagtgccgggacaccacccgctactgtgagaaggtgaagcagctgaagctgtgccagctgagccagttcaagagccgctgctgcggcacctgtgggaaggcctag

SEQ ID NO: 32799 - DNA, 5289 bp, Artificial Sequence
  derived and/or modified sequence
atggagtgctgcagaagagccaccccaggcaccctgctgctcttcctggccttcctgctgctgagcagcaggacagcccggtctgaggaggacagagatggcctgtgggatgcctggggcccctggagcgagtgcagcaggacctgtggcggcggggccagctacagcctgcggcgctgcctgagcagcaagagctgtgagggcaggaacatccgctaccgcacctgcagcaatgtggactgccccccagaggccggggacttccgggcccagcagtgcagcgcccacaatgatgtgaagcaccacggccagttctatgagtggctgcctgtgtccaatgaccctgacaacccctgcagcctgaagtgccaggccaagggcaccaccctggtggtggagctggcccccaaggtgctggatggcacccgctgctacacagagagcctggacatgtgcatcagcggcctgtgccagatcgtgggctgtgaccaccagctgggcagcacagtgaaggaggacaactgtggggtgtgcaatggagatggcagcacctgccgcctggtgcggggccagtacaagagccagctgagcgccaccaagagtgatgacacagtggtggccatcccctacggcagccgccacatccggctggtgctgaagggccctgaccacctgtacctggagaccaagaccctgcagggcaccaagggggagaacagcctgagcagcacaggcaccttcctggtggacaacagctctgtggacttccagaagttcccagacaaggagatcctgaggatggccggccccctgacagctgacttcatcgtgaagatccggaacagcggcagcgctgacagcacagtgcagttcatcttctaccagcccatcatccaccgctggagggagacagacttcttcccctgcagcgccacctgtggcggcggctaccagctgaccagcgcagaatgttatgacctgcggagcaacagagtggtggccgaccagtactgccactactacccagagaacatcaagcccaagcccaagctgcaggagtgcaacctggacccctgcccagccagtgatggctacaagcagatcatgccctatgacctgtaccaccccctgccccgctgggaggccaccccctggacagcctgcagcagcagctgtggcggcggcatccagagcagagctgtgtcctgtgtggaggaggacatccagggccacgtgacctctgtggaggagtggaagtgcatgtacacccccaagatgcccatcgcccagccctgcaacatctttgactgccccaagtggctggcccaggagtggagcccctgcaccgtgacctgtggccagggcctgcgctacagagtggtgctgtgcatcgaccaccggggcatgcacactggaggctgcagccccaagaccaagccccacatcaaggaggagtgcatcgtgcccaccccctgctacaagcccaaggagaagctgcctgtggaggccaagctgccctggttcaagcaggcccaggagctggaggagggcgctgctgtgtctgaggagcccagcttcatccctgaggcctggagcgcctgcaccgtgacctgtggggtgggcacccaggtgcgcatcgtgcgctgccaggtgctgctgtccttcagccagagcgtggccgacctgcccattgatgaatgtgagggccccaagccagccagccagagggcctgctacgccggcccctgcagcggggagatccctgagttcaacccagatgaaacagatggcctgtttggaggcctgcaggactttgatgagctgtatgactgggagtatgagggcttcaccaagtgcagcgagagctgtggcggcggcgtgcaggaggccgtggtgtcctgcctgaacaagcagacccgggagcctgctgaggagaacctgtgtgtgaccagccggcggcccccccagctgctgaagagctgcaacctggacccctgcccagcccgctgggagatcggcaagtggagcccctgcagcctgacctgtggggtgggcctgcagaccagagatgtgttctgcagccacctgctgagccgggagatgaatgagaccgtcatcctggctgatgagctgtgccggcagcccaagcccagcacagtgcaggcctgcaaccgcttcaactgccccccagcctggtacccagcccagtggcagccctgcagcaggacctgtggcggcggcgtgcagaagcgggaggtgctgtgcaagcagaggatggctgatggcagcttcctggagctgcctgagaccttctgcagcgccagcaagccagcctgccagcaggcctgcaagaaggatgactgccccagcgagtggctgctgagtgactggacagaatgttccaccagctgtggggagggcacccagaccaggtctgccatctgcaggaagatgctgaagacaggcctgagcacagtggtgaacagcaccctgtgcccccccctgcccttcagcagcagcatccggccctgcatgctggccacctgtgcccggcccggccggcccagcaccaagcacagcccccacatcgctgctgccaggaaggtgtacatccagacccggcggcagaggaagctgcactttgtggtgggcggctttgcctacctgctgcccaagacagctgtggtgctgcgctgcccagcccggcgggtgaggaagcccctcatcacctgggagaaggatggccagcacctgatcagcagcacccacgtgacagtggcccccttcggctacctgaagatccaccggctgaagcccagtgatgctggggtgtacacctgcagcgctggccctgcccgggagcacttcgtcatcaagctgattggaggcaacaggaagctggtggcccggcccctgagccccaggtctgaggaggaggtgctggccggcaggaaaggaggccccaaggaggccctgcagacccacaagcaccagaatggcatcttcagcaatggcagcaaggccgagaagaggggcctggccgccaaccctggcagccgctatgatgacctggtgtcccggctgctggagcagggcggctggccaggagagctgctggcctcctgggaggcccaggacagcgctgagaggaacaccaccagcgaggaggaccccggggctgagcaggtgctgctgcacctgcccttcaccatggtgacagagcagaggcggctggatgacatcctgggcaacctgagccagcagcctgaggagctgcgggacctgtacagcaagcacctggtggcccagctggcccaggagatcttccgcagccacctggagcaccaggacaccctgctgaagcccagcgagaggaggaccagccctgtgaccctgagcccccacaagcacgtgtctggcttcagcagcagcctgcggaccagcagcactggagatgctgggggcggcagccggcggccccacaggaagcccaccatcctgaggaagatctctgctgcccagcagctgagcgccagcgaggtggtgacccacctgggccagacagtggccctggccagcggcaccctgtctgtgctgctgcactgtgaggccatcggccacccccggcccaccatctcctgggccagaaatggagaggaggtgcagttcagtgaccgcatcctgctgcagccagatgacagcctgcagatcctggcccctgtggaggctgatgtgggcttctacacctgcaatgccaccaatgccctgggctatgacagcgtgtccattgctgtgaccctggccggcaagcccctggtgaagaccagcaggatgaccgtcatcaacacagagaagccagctgtgacagtggacatcggcagcaccatcaagacagtgcagggcgtgaatgtgaccatcaactgccaggtggccggcgtgcctgaggccgaggtgacctggttcaggaacaagagcaagctgggcagcccccaccacctgcacgagggcagcctgctgctgaccaacgtgagcagcagtgaccagggcctgtacagctgcagagctgccaacctgcatggagagctgacagagagcacccagctgctgatcctggaccccccccaggtgcccacccagctggaggacatccgggccctgctggccgccaccggccccaacctgcccagcgtgctgaccagccccctgggcacccagctggtgctggaccccggcaacagcgccctgctgggctgccccatcaagggccaccctgtgcccaacatcacctggttccacggcggccagcccatcgtgacagccaccggcctgacccaccacatcctggccgccggccagatcctgcaggtggccaacctgagcggcggcagccagggcgagttcagctgcctggcccagaatgaagctggggtgctgatgcagaaggccagcctggtgatccaggactactggtggagcgtggaccggctggccacctgcagcgccagctgtggcaacagaggagtgcagcagccccggctgcgctgcctgctgaacagcacagaggtgaacccagcccactgtgccggcaaggtgcggcctgctgtgcagcccatcgcctgcaacagaagagactgccccagccgctggatggtgacctcctggagcgcctgcaccaggagctgtggcggcggcgtgcagacccggcgggtgacctgccagaagctgaaggccagcggcatcagcacccctgtgtccaatgacatgtgcacccaggtggccaagaggcctgtggacacccaggcctgcaaccagcagctgtgtgtggagtgggccttcagctcctggggccagtgcaatggcccctgcatcggcccccacctggccgtgcagcaccggcaggtgttctgccagaccagagatggcatcaccctgcccagcgagcagtgcagcgccctgcccaggcctgtgtccacccagaactgctggagcgaggcctgcagcgtgcactggagggtgtccctgtggaccctgtgcacagccacctgtggcaactacggcttccagagccggcgggtggagtgtgtgcacgcccggaccaacaaggctgtgcctgagcacctgtgctcctggggccccaggcctgccaactggcagcgctgcaacatcaccccctgtgagaacatggagtgccgggacaccacccgctactgtgagaaggtgaagcagctgaagctgtgccagctgagccagttcaagagccgctgctgcggcacctgtgggaaggcctag

SEQ ID NO: 32800 - DNA, 2052 bp, Artificial Sequence
  derived and/or modified sequence
atggagtgctgccggcgggccacccccggcaccctgctgctgttcctggctttcctccttttgtcctcccgaactgccaggtccgaggaggatcgtgacgggttatgggatgcttggggaccttggagcgagtgcagccgaacctgcggaggaggagctagctacagtcttaggcggtgtctgtcctcaaagagctgcgaaggccgcaatatcagatataggacatgctctaatgttgactgtccacccgaagcgggggactttcgagcccaacaatgttccgcacacaatgacgtaaagcatcatgggcagttttacgagtggctacctgtgtctaatgatcctgacaatccttgctccctcaagtgtcaggcaaagggaactaccctggttgtcgagctcgcacccaaagttctcgacggcacaaggtgttacacggagtccctcgatatgtgcatctccggtttatgccaaattgtgggttgcgaccatcaactaggaagcactgtaaaagaggacaattgtggggtctgtaacggagacggctcaacctgcagactcgttagaggccagtataaatcacagctgtcggcgacaaaaagcgacgacacagtggtggcaattccctacggctctcgacacatcaggctggtgttgaagggtcctgaccatctgtatctggagacaaaaacattgcagggcacaaaaggcgagaattctctttcctctaccggaactttcctggtggataattctagcgttgacttccaaaagttcccagacaaggagattttaaggatggctggccccctaacagccgactttatcgttaagatccgcaattcagggtctgcagatagtactgttcaattcattttctaccaacccatcatccacagatggagggagactgactttttcccctgtagcgcaacctgcggcggcggctaccaactgacaagcgctgagtgttacgacttgcgcagtaatagggtagtggcagatcagtactgccactactatcctgaaaatatcaagcccaagccaaaactccaggagtgtaacctggacccttgccccgcttcagatggttataaacagattatgccatacgacctataccaccctctgccacggtgggaagcgactccctggaccgcttgtagcagttcctgcgggggggggatccaatcacgggccgtgtcatgtgtagaggaagatatccagggacacgtgacctctgtggaggagtggaagtgcatgtacaccccaaagatgcctattgctcaaccatgcaatattttcgactgtcccaaatggctggcacaggaatggagcccatgtacagtgacttgtggccagggcctcagatacagggtagtgctgtgtatcgaccatcggggcatgcatacgggcggctgtagccccaaaaccaaaccacacatcaaagaggagtgcatcgttccgactccctgctacaagcctaaagaaaagctgcccgtggaggcaaaacttccttggttcaagcaggcccaggagctggaagagggagccgccgtgtcagaggaaccaagctttatccccgaagcctggtcggcctgcacagtgacatgtggagtcggtacgcaggtccggatcgtgcgctgccaggttctcctctccttctcccagtcggtcgcagatcttcctattgacgagtgtgagggaccgaagcctgcttctcagagggcctgctacgccggcccttgctcgggtgaaatccctgagttcaatcctgacgagacggacggactgttcggcgggctacaggattttgatgaactgtatgactgggaatacgagggattcacaaaatgtagtgagagctgtggcggcggtgtgcaggaagccgtagtctcttgtctaaacaaacagacccgagagcctgccgaggagaacctctgcgtgacctcccggcggcccccccagctcctgaagagttgtaatctagacccttgcccggcaagatcgagcatcgactccgcttggaacgcctgtaatgttttgtgttag

SEQ ID NO: 32801 - DNA, 1401 bp, Artificial Sequence
  derived and/or modified sequence
atgtgcctgaccgacgagtggggcttcttcttcttcttcttcctgggagtgccggaggctgaagtgacttggttccggaataagtctaagctgggcagcccacaccatctgcacgagggatccctactgttaacaaacgtgtcctcttcagaccagggactgtacagttgtcgagctgctaacctgcacggggagcttactgagagcacccagctgttaattctggaccccccccaagtccccactcagctggaagacatccgagccctcctggccgctactggtcctaacctcccaagcgttttgactagtccattggggacacagttagtgctggaccccggaaattcagcgctcctcggctgccccataaaaggtcacccggtgcccaatatcacctggttccacggcggtcagccaattgtgacagctaccggcttgacgcatcatattcttgccgccggtcaaatcctgcaagtggccaatctgagcggcgggtcccagggcgaattctcatgcttggcacagaacgaggctggggtattgatgcagaaggctagtctagtgatacaggattactggtggtccgtagatcgcctcgccacctgttccgcaagctgcgggaacaggggtgttcagcagcccaggcttaggtgcctcctgaattcgacagaagtgaatcctgcacactgtgccgggaaagttcggcctgcagtgcagcctatagcttgtaacagacgtgactgccccagccgttggatggtgacttcgtggtccgcttgcactcgaagctgtggcggtggtgttcaaacacgacgcgtgacctgccagaagctgaaagcctccggcatttccaccccagtctcaaacgatatgtgtacacaggtagccaaaagacccgttgatacacaagcctgtaaccagcagttgtgcgtagagtgggcctttagcagctgggggcagtgcaacggcccatgtatcggcccccatctggcagtccagcaccgccaggttttctgtcagacaagagacggaatcacgctgcctagtgagcaatgttcagcccttcctagacccgtcagtactcaaaactgctggagcgaagcctgcagtgtgcattggagagttagtctctggaccttgtgtaccgcgacgtgtggtaactacggtttccagtccagacgggtcgagtgtgttcacgctagaaccaataaggcagtgcctgagcacctgtgctcttggggcccccgacccgccaattggcagcggtgtaacatcaccccctgcgaaaacatggagtgtcgagacaccactcggtactgcgagaaggtgaaacagctgaagttgtgtcagcttagccagtttaaatcacgttgctgcggaacttgcggaaaagcatag

SEQ ID NO: 32802 - DNA, 5289 bp, Artificial Sequence
  derived and/or modified sequence
atggagtgctgccggcgggccacccccggcaccctgctgctgttcctggcatttctcctgctgagctctcgaaccgctagaagcgaggaagaccgagatggactgtgggatgcttggggaccatggtcagaatgctccaggacctgcggggggggggcttcctactcacttaggagatgtctgagttctaagagctgcgaaggcagaaacattagatatagaacttgcagcaacgtggactgtccacccgaagctggcgatttcagggcgcaacagtgctcggcacacaatgatgtgaagcaccacgggcagttttatgaatggctgcccgtctccaacgacccggacaatccatgctctctgaagtgccaggccaaaggcacaactttagtcgtggagctcgcacccaaggtgctagacggtacaagatgctacactgaatccctcgacatgtgtatcagcgggctgtgtcagatcgttgggtgtgatcaccaacttggtagtaccgtgaaagaagacaattgtggggtatgtaacggcgatggaagtacatgccggttagtaagaggccagtacaaaagccagttatctgctaccaaatccgacgatacggtggtggccattccttacggatctcgccacattcgactggtgttgaagggacccgaccacctgtatctcgagaccaagacactgcaggggactaagggagaaaattctcttagtagcactggaacatttctcgtggacaactcctccgttgattttcaaaagtttccagacaaagagattctgcgcatggccggtcccctgaccgccgactttatcgtcaaaattagaaatagtggtagtgccgacagcacggttcagtttattttctaccagcctatcatccaccgttggcgcgagacggacttttttccatgcagtgcaacttgtggcggtgggtatcaactgacaagcgccgaatgctacgatctgaggtcaaacagggtagtagccgatcagtattgtcactactaccccgagaacatcaaacccaaaccaaagctgcaagaatgcaatctggacccctgtccagcatctgacggctataaacagataatgccctacgatctataccaccctctgccacgctgggaagctaccccctggactgcctgttcctcttcttgtggaggagggatccaatcgcgggcagtgtcttgtgtcgaagaggatatccagggccatgtcacctctgtcgaggaatggaaatgtatgtacacacccaagatgcccatagcccaaccctgtaacatcttcgactgtccaaaatggttggcacaggagtggagcccatgcactgtcacatgcggccagggcttgcgctaccgagttgtgctttgtattgatcaccgcggcatgcacacaggaggatgttcccctaagacaaaacctcacatcaaggaagagtgtattgtccctacaccttgttacaagcccaaagaaaagttacctgtggaggccaaactgccttggttcaagcaagcacaggagctggaggagggagccgctgtctccgaggaaccgagcttcatccccgaagcctggtctgcatgcacagttacctgtggagtcggcacacaggtccggatcgtgcgctgtcaggtcttgttatccttcagtcagtccgtcgctgatcttccgatcgatgaatgtgagggccctaagcctgcttcacagagggcctgctatgccgggccttgcagcggggaaattcccgaatttaacccagacgagacggacggcctgtttgggggtctccaggatttcgacgagttatatgattgggaatacgaggggttcaccaagtgttctgaaagctgcggggggggcgtgcaggaggctgtagtgagttgtctgaacaagcagacgcgcgaaccggctgaagaaaacttgtgcgtgacctcccgccgacctccacagttactcaaaagttgtaatttggatccatgccctgcccgctgggagataggcaaatggagcccttgcagtctcacttgtggtgtcggtctccagacaagagacgtcttttgttcacacctcttgtctagggagatgaatgaaaccgtaatcctggctgatgaactctgccgccaacctaaaccctctactgtccaggcctgtaaccgcttcaactgtccaccagcctggtaccctgcgcaatggcagccttgtagccgcacttgtgggggtggcgtgcagaaacgagaagtgctgtgtaagcagcgaatggcggatggctcctttttggaactcccagaaacattctgttccgcaagcaagccagcctgtcagcaggcttgtaaaaaggacgattgtccatccgaatggctgttatcagattggaccgaatgctccacctcctgcggtgagggcacgcagacccgatcggccatatgtagaaaaatgctgaaaacaggcctgtctacggtggtcaactcaactttatgccccccattgccgttctcctcctctatcagaccctgcatgctggccacctgtgcaagacctggcaggccttctacaaaacactccccacatatagcagccgctagaaaagtgtatattcagacccgcaggcagcgtaaactgcatttcgttgtcgggggattcgcctatctgctgcccaaaactgcagttgttctcagatgtccagcccgccgagtaagaaaacccctaattacatgggagaaggacggtcagcacctgatttcttctacacacgttacagtggccccattcgggtatttgaagattcataggctgaaaccgtcggacgcaggagtctatacgtgtagcgcagggccagcgagggaacactttgtcatcaaacttatcggaggaaaccgaaaactcgtggcacggcccctgagtcctcggagcgaggaggaagtgctggccggacggaaagggggccctaaagaggccctccagacacacaaacaccaaaatggcatcttctctaatggttccaaggctgagaaacgcggactcgccgccaaccccggctcccgctatgacgacctcgtatcccggcttctcgagcagggggggtggcctggtgagcttttggcgagctgggaagcacaagactccgccgaacggaatacaacaagcgaggaggacccaggggcagaacaagtcctgctgcacctacccttcacaatggtcaccgaacagcgacgacttgacgacatccttgggaacctgtcgcagcaacccgaagagttgagggacctgtacagcaaacaccttgtggcccagctcgctcaggagatctttaggagtcatctcgaacaccaggacaccctgcttaagccctccgaacgtcgcaccagccccgtcaccttatcccctcataagcatgtttctggtttttcatcaagtctcagaacatcatcaacgggtgacgccggggggggcagtcgccgcccccacagaaagcccaccattctgaggaagatcagcgctgctcaacagctgtctgccagcgaggtagtgacacacttggggcaaaccgtcgctctggctagcggcaccctgtctgtcttgttacattgtgaggcaatcgggcacccccggcccaccatcagctgggctagaaacggagaagaggtacagttttccgatcggatcttactgcagcccgacgactccctccagattctggcgcccgtggaggccgacgtgggcttttacacctgtaatgcaactaatgccctggggtatgattccgtcagtattgccgtcactcttgcagggaaacctctcgtgaagacgagccggatgacggtgattaacaccgaaaagcccgccgtgactgttgacatcggtagtactattaaaaccgtgcagggggtgaatgttaccatcaactgtcaggtcgcaggggtcccagaggcagaggttacctggttcaggaacaagtccaagctgggcagtccccaccatcttcacgaaggcagtctgctcttgactaacgtctcctcaagcgaccagggcctgtactcatgcagggccgccaatcttcatggcgaactgacggaaagtactcagcttctgatcttggatcctccgcaggtcccaacccagttggaagatattcgcgcactcctcgccgctacggggccaaatcttcctagtgttcttaccagtcccctgggtacccagctcgtcctggatcccgggaattctgccttgctgggctgcccgattaagggacacccagtgcctaacatcacttggtttcacgggggccagcctatcgttacagcaacagggctcacacaccacattttggcagcgggtcagattttacaggtagccaacctttccggcggttcgcaaggcgagttctcgtgtctggcccaaaatgaagctggcgtcttgatgcagaaagccagtctcgtaattcaggactactggtggagtgtcgatagactggcaacatgctctgcatcctgtggaaatcggggtgtacagcagcctcggctccgttgcctgctgaattcgacagaagtcaatcctgcgcactgcgcgggaaaggtcaggcctgccgtccagcccattgcctgcaaccgacgggactgtccgagccgatggatggtgactagctggtctgcttgcactcgcagctgtggtggaggagtccagaccaggagagtgacctgtcagaaactgaaggcatctggaatctccacccccgtgtccaatgatatgtgtacccaagtggctaagcgccccgttgacacacaagcctgtaatcagcagctctgcgttgaatgggcttttagcagctgggggcaatgcaatggcccgtgcatcggccctcacttggcggtgcagcaccgacaggtgttttgccagacacgggatggcataactcttccaagcgagcagtgctctgcattacctcggcccgtgtctacgcaaaactgttggagtgaggcatgcagcgtgcactggcgagttagtttgtggaccctgtgtacagctacctgcggaaactacggcttccaatctcgccgcgtcgagtgtgtccacgcccgcacaaacaaagctgtgcccgagcatctgtgttcatggggaccgcggccagccaattggcagagatgtaacatcacgccctgtgagaatatggagtgccgggataccaccagatactgcgagaaggtcaagcagctcaaactgtgtcagttgtcccaatttaagtctagatgttgcggtacctgtggcaaagcatag

SEQ ID NO: 32803 - DNA, 2052 bp, Artificial Sequence
  derived and/or modified sequence
atggaatgttgccgcagagccacgccgggtactctgctgctctttcttgcctttttattgcttagttctagaacggctcgatctgaggaggatcgcgatggtctttgggatgcctggggcccttggtcagagtgttcaagaacatgcggcggaggggcttcttattccctgagacgttgtctcagcagtaagtcgtgcgaaggcaggaacatcaggtatcgaacatgcagcaatgtggactgtccacccgaagccggtgacttccgggctcagcagtgttcagcccacaacgatgtgaagcaccacgggcaattttacgagtggctccctgtttccaacgaccctgacaatccgtgcagcttgaaatgccaggctaagggcacaacccttgttgttgagcttgctcccaaggttcttgacgggaccaggtgttacacagaaagcctggatatgtgtatctctggactttgtcagatcgttggctgcgatcaccaactgggcagtactgtcaaagaggacaattgtggcgtgtgtaatggggatggctctacatgtcgcttagtacgcggtcagtacaaaagccagttgagcgccactaagtcagatgacacagtggtcgccattccatacggctccagacacattagactggtgcttaaagggccagatcacctgtacctggagaccaaaactctccaggggactaagggagagaattccctgagctcaaccggaacttttcttgtcgacaactctagcgtagacttccagaaatttccagacaaagagattctgaggatggctggcccacttactgcggatttcatcgttaaaattcgcaattcaggatctgcagactccaccgtgcaattcatcttttaccaacctatcattcacagatggcgtgagacagacttttttccttgttctgcaacctgtggtggaggctaccagctgacatctgctgaatgctacgatctgcgctcaaatcgagttgtggctgaccagtattgccactattacccggaaaatattaagccaaagcctaaactccaggagtgtaacctggatccctgccctgcaagcgacgggtacaagcagatcatgccttatgatctgtatcacccattacctaggtgggaagctaccccctggaccgcatgctcttcgagttgcggcggaggcattcagtcgagagcagtgagctgcgtggaagaggacatccagggccatgttacctccgtcgaggagtggaagtgtatgtacactccgaagatgccaatcgctcaaccttgcaacatatttgattgtcctaaatggcttgctcaggaatggtctccatgtaccgtgacctgcggccagggattgaggtatagagttgtactatgtatcgatcaccgcggaatgcacacgggcggatgctccccaaagacaaagcctcacattaaggaagaatgtatcgtgccaacaccttgttacaagcccaaggagaagttgcccgtggaggccaagcttccatggttcaaacaagcacaggagctcgaagagggagccgcagtgagcgaagagcccagttttatacctgaggcctggagcgcctgtactgtgacctgtggcgtcggaactcaggtacgcattgtgcgctgccaggtgctgctctctttctcacagagtgttgcagacctccctattgatgagtgtgagggaccgaagcccgcaagccaacgcgcttgctatgctggcccatgttccggtgagatccccgaattcaatcctgatgaaacagacgggctgttcggcggtctacaggatttcgatgaactgtacgactgggaatacgagggtttcaccaaatgtagcgagagttgcggtggtggcgtccaggaggccgtggtttcttgcctcaataagcagacccgcgaaccagcggaggagaacctatgtgtaaccagtcgccgacctccccagctgctaaagagctgcaatcttgacccctgcccagcaagaagctcaatcgattcagcatggaacgcttgcaatgttctctgctag

SEQ ID NO: 32804 - DNA, 1401 bp, Artificial Sequence
  derived and/or modified sequence
atgtgtctgacggatgaatggggctttttcttctttttttttctcggcgtgccggaggccgaagtcacatggttccggaataagtccaagctgggatctccgcaccacttgcacgagggcagcctgctgctaactaatgtgtccagtagcgaccagggtttatattcatgccgggcagccaacctccacggtgaactgactgaaagcacgcaactgctcatcttggaccctccacaggtgccaacacaactcgaagacataagggctcttttggcggcaacaggcccaaatctcccctcagttctaacttccccgctgggtacccagctagtgctggaccccggaaacagtgcgctgctcggatgccctattaagggacaccctgtaccaaacatcacttggttccatgggggacagccaattgtgactgctacgggactgacccatcacattttggccgctgggcagatcctgcaggtggctaacctttccgggggatctcaaggggaattctcatgtcttgcccaaaacgaggcaggggtgctgatgcagaaggcttccctggtaatccaggattattggtggtcagtcgacaggctggctacttgctcagctagttgcggcaatcgaggtgttcagcagccgagattaagatgcctgttgaacagtaccgaggttaatcctgcacattgcgctggcaaggtgagaccggctgtccagcccatagcatgtaacagacgtgattgtccctccagatggatggtaacttcttggtctgcgtgcacacgtagctgcggcggaggggttcagacacgaagggtgacatgccagaagctcaaagcctccggaatatctacccccgtcagtaacgatatgtgcactcaggtggcgaagaggccagtggatacccaggcgtgcaaccagcaattgtgtgtggagtgggcattttcctcctggggacagtgcaatggcccatgcattggtccacacctagcagtgcagcacaggcaggtcttctgccagacccgcgatggcatcactctgccgagcgaacagtgcagcgccctgcccagaccagtttccacccagaattgctggagcgaggcctgttcagtgcactggagggtgtccctctggaccctctgcacagccacttgtggcaattatggtttccaaagcagacgggttgagtgcgtccatgccaggaccaataaggctgtgccagaacacttatgtagttggggcccacggcctgctaactggcagcgctgtaacatcaccccttgtgaaaatatggagtgcagggacacgacccgctactgcgaaaaagtgaagcagctgaagttatgtcagctgtctcagttcaagtccagatgctgtgggacttgtggaaaagcctag

SEQ ID NO: 32805 - DNA, 5288 bp, Artificial Sequence
  derived and/or modified sequence
atggagtgctgccgcagagctactcccggaacccttttgctctttctggccttcttgctgttatcctctcgtactgctcggagtgaagaagaccgagatgggctgtgggatgcttggggcccttggtcagaatgcagccggacatgcgggggaggagccagctacagcctgcgtaggtgcctatcatctaaatcctgtgaagggcgaaacatccggtatcggacctgcagcaatgtggactgtccccctgaagccggagactttagagcacagcagtgtagcgcccataacgatgtgaagcaccatggacagttttacgaatggctgccggtcagtaacgaccctgataatccctgttccctcaagtgtcaagcaaaaggcactacacttgtcgtggaattagccccaaaagtcctagatggcaccagatgctacaccgaatccttggatatgtgcatctcaggactgtgccagattgtcgggtgtgaccaccaactgggttccaccgtaaaagaggacaactgcggtgtgtgtaatggggatggttccacatgcagactagttcggggacaatacaagagtcaactgtccgccactaaatcagacgatactgtagtcgcaattccatatggatcgcgccacattcgcctcgtgcttaagggccctgatcacttgtacctcgagaccaagactctgcagggaaccaaaggcgagaactctttgagctccactggaacattcctcgtggataactcctcagtcgatttccagaaattcccagataaggaaatcctgagaatggcaggtccactgacagccgacttcatcgttaagatccggaacagtgggagcgccgatagcacagttcaatttattttttaccagcccattattcataggtggagagagacagatttctttccgtgttctgctacatgcgggggtggttaccaacttacatctgcagaatgctacgatctgcggagcaaccgggttgtggccgaccagtactgccactattatccagagaatatcaaacccaaaccaaagctccaggaatgcaatttagacccatgccctgcctctgacggatataaacagattatgccatatgacttatatcatccgctcccacgatgggaggcaaccccttggactgcttgctcctcctcgtgcggtggcggtattcagagcagggctgtgtcatgtgtggaggaagatattcagggacatgtcacttctgtggaagagtggaagtgtatgtacacccccaagatgcctatcgctcagccatgcaacatcttcgactgccccaagtggctggctcaggagtggtccccttgtactgtgacatgtggtcagggactaaggtaccgcgttgttctctgcatagaccacagagggatgcacacaggcggatgttcgcctaagacgaagcctcatatcaaggaggaatgtatcgtgccaaccccctgttacaaaccaaaggagaagctacccgtagaggcaaaactgccctggttcaagcaggcacaagagctggaggagggggctgctgtgtccgaggagccatcttttattcccgaggcctggtccgcttgcacagtgacttgcggggtgggcacccaggtccggattgttcggtgccaggtactgctgagcttttcacagtccgttgctgaccttcctattgatgagtgtgagggtcccaagccagctagtcagcgagcatgttacgccggaccatgtagtggcgagatccctgaattcaaccccgacgagaccgacggtctcttcggtggtctgcaagattttgacgagctgtacgattgggaatatgagggatttacaaagtgctccgaatcatgtggtgggggagtacaagaggccgtggtgtcgtgtctcaacaagcagacgcgtgaacccgctgaagagaatctgtgtgtgacctctcggagaccccctcaactgttaaagtcctgcaatctggatccttgtcctgctaggtgggagattggcaagtggagtccgtgttctctgacttgcggtgtgggattacagacacgagatgtgttttgttcccacctgctcagcagagaaatgaacgagaccgttatactagccgatgaactttgccgccaacctaaacctagcaccgttcaggcttgcaataggtttaactgtccacccgcttggtaccctgctcagtggcagccttgcagtcgaacctgtgggggtggggttcaaaagcgagaggttctctgcaaacagcgcatggcggacggaagcttcctggagctcccagaaaccttttgttccgcttccaagccagcatgccaacaggcttgcaaaaaagatgattgccctagcgagtggctcctatccgactggacagaatgcagcacctcttgtggtgagggcactcagacccggtccgctatctgcaggaaaatgctcaagacagggctctccacagtagtcaattctactctgtgccctccattgccgttttcgtctagcattcggccatgcatgttggcaacgtgtgccaggcccggtaggccgtcaactaagcactctccccacatcgcagctgctcgtaaggtgtacattcagacccgtcgccagagaaaattacacttcgtcgtgggcggatttgcatatctcctcccgaagaccgcagtcgttcttcgatgccccgcaaggagggtgcgaaaaccgctgattacttgggagaaggacggtcagcatctcatctcgagtactcacgtaaccgtggcgccatttggctatcttaagatccaccggctgaaaccgtccgatgctggcgtgtacacatgcagtgcagggccagcgcgagaacattttgtgataaagttaattggaggaaatagaaaactggtagcccgtccactcagcccgagaagtgaggaggaggtactggccggaagaaagggcggtcctaaagaggcacttcagacacataagcaccaaaacggaatcttctccaatggctctaaggcagaaaagaggggattggccgcaaatcccggaagccgctatgatgatctggtcagtcggttgctggagcaaggcggttggcccggtgagctcttggcaagctgggaagctcaggactcagccgagcgcaatactacctctgaagaggatccgggagccgagcaagtgctgttgcatttaccattcactatggtgaccgagcaacgaaggttggacgacatactcggtaatctcagtcaacaaccagaggagctgagggatctatactccaaacacttggtggcacaactggcccaggaaatattccggagtcacttggaacatcaggacacacttctgaagcccagcgagcggaggacctcccccgtgaccttgtctccacacaaacatgtttctggcttttcgtcgtcattgcggacttcttcgactggcgacgcagggggtggatcccgccgtccacataggaaacctactattctgaggaaaatcagtgcggctcaacagctgtccgcatctgaggtggtgacacacttaggacagactgtcgccctggcttccggtactctgagcgtgcttctccattgtgaagcaatcggccacccaaggcctactattagctgggccagaaacggggaggaagttcagtttagtgaccggatcttgctacagccagacgactccctccagatcctggcccctgtagaagcagacgttggattttacacctgcaatgctaccaatgcgcttgggtatgactctgtgagtattgcagtaacattggccggtaagcctttggtgaaaaccagcagaatgacggtgataaatactgagaagcccgcagttacagtcgacatcgggagcactatcaagacagtccagggcgtgaatgtaacaattaattgtcaggtggccggtgtgcccgaggctgaggtgacatggtttcggaacaaatcaaagcttggctctccgcaccatctgcacgagggttccctgctcctgacgaacgtgagctctagtgaccaaggcctgtactcctgtcgcgcagcgaacctgcatggagaactcaccgaatctacacaacttctgatcttagacccgcctcaggttccaactcagttggaggatatcagggccctactcgccgctaccggcccaaatttgccgtcagtcctcactagcccactgggtactcaactagtactcgatcccggtaatagcgctctgttaggttgtcccattaaagggcatccggtcccaaatatcacttggttccacggcggacagcccatcgtcaccgctactggtttgacccaccacatacttgctgcgggacagattctacaggtagcgaacctgagcggagggagccagggggaattctcttgtctcgcccagaacgaggctggcgtactgatgcagaaagccagtctggtcatccaggactactggtggtctgtcgaccgtcttgctacctgttcggcaagctgtggcaataggggcgtgcaacaacctaggttgcggtgtctgctgaacagtacagaggtgaacccagcccactgtgctggaaaggttcggccagccgtgcagcctatcgcttgcaacaggagagactgcccaagcagatggatggtgacatcatggtcggcgtgcacccggtcatgcgggggaggcgtccaaaccagaagggtcacctgccaaaaactgaaggctagtggcataagcacgccggtgagcaatgacatgtgcacccaagttgccaaaaggccggtggatacacaggcatgcaatcaacagttgtgcgtggaatgggcattcagctcatggggccagtgcaacggaccctgcatcgggcctcaccttgccgtacagcaccggcaagttttttgtcaaaccagagatggcattacattgccctccgaacaatgtagcgccttgcccaggccagtatcaacccagaactgctggagtgaggcttgtagtgtacactggagagtgtccctgtggactctgtgcactgctacatgtggcaattacggttttcaaagccgtagagtggaatgcgtccatgcaaggactaacaaagccgtcccagagcacctttgttcttggggacctcgaccagcaaactggcagcggtgtaatataaccccttgtgaaaacatggagtgcagggatactacaagatactgtgaaaaggtgaagcagctgaaactgtgtcagctgagtcaatttaagtcccggtgctgcggcacttgcggtaaagcata

SEQ ID NO: 32806 - DNA, 2052 bp, Artificial Sequence
  derived and/or modified sequence
atggagtgctgccgaagggccacccccgggaccttgctgcttttcctcgccttcctactcttgtcctctcgcactgctagatctgaggaggatcgcgatggcctgtgggatgcctggggtccatggtccgagtgtagccggacatgtggcgggggcgccagctatagtctcaggcgttgcctcagcagcaagagctgcgaaggacgtaacataaggtaccgcacctgctcaaatgtggattgtccgccagaagctggggattttcgcgctcagcagtgtagcgcccacaatgacgtgaaacaccacggtcagttctacgagtggttgcccgtgagcaacgacccagataatccatgctccttaaagtgtcaggcaaaagggaccacgctggttgtcgagttggccccaaaagttttggacgggaccaggtgctataccgagtccttagacatgtgtatcagtggactctgtcaaatcgtggggtgcgatcatcagctggggagtaccgttaaagaggacaactgcggagtgtgcaacggggatggaagcacttgcagattggtgcgcgggcaatacaagtcccaactcagtgcaactaaaagtgacgacaccgttgtggccatcccatacggctcacggcacatacgcctggtcctgaagggaccggaccatctttacctcgaaaccaaaacacttcagggcacaaaaggagagaattcactcagttctacagggacgttcctcgtcgataacagctcagttgacttccaaaaattccctgacaaggaaattttgaggatggcgggccctctgactgctgattttatagtaaaaattaggaactccggcagtgcagatagtactgtccagttcatattttaccaaccaatcattcatagatggagagaaacggacttctttccctgcagcgccacgtgtggaggcggctaccagctgacgagtgcagagtgttacgacctcagaagcaatcgcgttgtggccgatcagtattgtcactattatcctgagaacattaaacccaagcctaagctgcaggagtgcaacctggatccatgccctgccagcgatggatataaacagatcatgccgtacgacctttaccacccactgccacgatgggaagctactccatggaccgcatgctccagttcatgtggagggggtatacagtcccgtgccgtgagttgtgtggaggaggacattcaaggacatgtaacttccgtagaagagtggaaatgtatgtatacccctaaaatgcctatcgctcagccttgcaacatcttcgactgccccaagtggttagcgcaggagtggagtccctgtacagtgacctgcggtcagggcttaagataccgcgtcgtcctatgcattgaccatagaggaatgcatacaggcggctgttctcctaagaccaagcctcacatcaaagaggaatgcatcgtcccaactccatgttataagcccaaggaaaaattgccagtggaggctaagctgccatggtttaagcaggctcaggaactcgaggagggagcggccgtgtccgaagaacctagtttcattccagaagcctggagcgcatgtaccgtaacctgcggcgtgggaacccaagttaggattgtgaggtgtcaagttctgttaagtttttcacagtcagtggcagacctgcccattgatgagtgtgagggccccaagcccgctagccagagggcctgttacgctggaccctgctctggagaaattccggaatttaaccccgacgaaacggatggcctgttcggaggcttgcaagattttgatgaactttacgactgggaatacgagggattcacaaaatgttctgagtcgtgcggcggaggagtgcaggaggccgtggtttcgtgcctgaacaagcaaacaagagagcctgctgaagagaatctatgcgtaactagccggcggcctcctcagctgctgaagtcttgcaatctcgatccgtgcccagctcggtcaagcatagacagcgcctggaacgcctgcaatgtgctttgttag

SEQ ID NO: 32807 - DNA, 1401 bp, Artificial Sequence
  derived and/or modified sequence
atgtgcctgaccgatgaatggggtttcttcttctttttttttctcggggtccctgaagctgaagtcacctggtttcgcaataaaagcaaacttgggagcccacaccatcttcatgaaggatcattgcttctgacaaacgtctctagttcggaccagggactgtactcatgccgggccgccaacttgcatggtgaattgacggaaagtactcagttactgattttagatcctccacaggtccccacacaactggaagatatccgtgccctgctggctgctaccggccccaacctccctagcgttctaacaagcccactgggcacacagctcgtcttggacccgggtaattctgccctgctcggctgccctatcaagggccaccctgtacctaacattacatggttccacggcggccagccaatagtcactgccaccgggctcactcatcacatcctggcagctggccagatccttcaggtggctaacctgagtggcggttcccagggggagttttcttgtctcgctcagaacgaggctggtgtattaatgcagaaagcttctctggttattcaggactattggtggtccgtagatagactcgccacatgcagcgcatcatgtggaaataggggcgttcagcaaccaaggttgaggtgcttgctcaactccactgaggtaaatcctgcacactgtgccgggaaggtccgacccgcggtccaacctattgcctgtaaccgccgggattgcccctccaggtggatggtgacctcatggagcgcctgcactaggagctgcggcggaggcgttcagacccgcagagtgacttgtcaaaaactgaaagcgtctggcatcagcactccagtgtctaatgatatgtgcacccaagtcgcgaagcgtcctgtcgatacccaggcgtgcaaccagcagttgtgcgtggagtgggctttttcaagttggggccaatgtaatggtccttgcattggtccccacctcgctgtccagcatagacaggtcttttgtcaaacacgagacggtatcacattaccatcagagcagtgttcggctttaccacggcccgtctccacacagaactgttggtccgaagcatgctccgtccactggagggtgtctctctggaccctgtgtaccgccacttgtggcaattacggatttcagtcccgccgcgtggaatgtgtacatgcccgaactaataaggccgtaccagaacacctgtgctcttgggggcccaggcccgccaactggcagcgctgtaatattacaccttgcgagaacatggagtgccgggacactacgagatactgcgagaaagtgaagcagttgaaactctgccagctgagccagttcaagagcaggtgctgtggaacctgtgggaaagcctag

SEQ ID NO: 32808 - DNA, 5289 bp, Artificial Sequence
  derived and/or modified sequence
atggaatgctgtcgccgcgcaacaccgggcacattactgctattcctggctttcctgctgctgtcctctagaaccgctcgaagcgaggaggacagggacggtctctgggatgcgtggggcccttggtccgaatgttctagaacatgtggaggcggcgcatcatactcattgcgtcgttgcttgtcctctaaatcgtgtgaaggcagaaacatacggtacagaacatgttctaacgtagattgtccccctgaagccggtgactttcgtgcccagcagtgctcggcccacaacgacgtcaagcaccatgggcaattttatgagtggctccctgtcagcaacgatccggacaatccgtgctccctgaaatgtcaggcgaagggcaccactcttgtggtcgaattggccccgaaggtgctggatgggacacgctgttacactgaaagtctcgacatgtgcatttccggattgtgtcaaattgtgggttgtgatcatcagttggggagcaccgtaaaagaggataattgtggagtctgcaacggcgacggttcgacatgcaggctagtgcgcggacagtacaaatcacagctcagtgccacaaagagcgatgacactgttgtggccatcccctacggcagccgacatattcggcttgttctcaagggaccggaccatctatacctggaaacaaagaccctacagggaaccaagggggagaacagcctgtcatcgaccggaacgttcctcgtagacaatagctcggtcgattttcagaagttccccgataaggagatactgcgcatggccggccccctcaccgccgactttattgtgaagatcaggaacagcggatcagccgatagcactgtgcagttcattttctaccagccaattatccacagatggagagagacagatttcttcccatgcagcgcaacttgtggcggagggtaccaactgaccagcgccgaatgctatgacctgaggagcaatagagtggtggccgaccagtattgccattattacccagaaaacatcaagcctaagcccaaactccaggaatgcaatctggacccttgtcctgcttccgatggttacaaacagatcatgccatacgacctgtatcaccccctacctcgatgggaggctaccccctggacagcatgctctagttcttgcgggggcggtatccaatcccgagcagtctcctgtgttgaagaagacattcagggtcacgtgacatctgtggaagaatggaaatgtatgtacacgccgaagatgcccatagcacagccatgcaacatcttcgattgtcctaaatggttggcccaggaatggtccccttgtaccgttacttgcgggcagggtctccgctaccgcgttgtcctttgcattgatcaccgaggcatgcacaccggagggtgttctccaaagacaaaaccccacattaaggaggaatgcatcgtgcctactccatgctacaagccgaaagagaaactgcccgtggaagctaagctgccttggttcaagcaggcccaggaactcgaggaaggagcggccgtatccgaagaaccttctttcatccccgaggcatggtcagcttgcactgttacctgcggggtaggcacccaggttcgtattgtcagatgtcaagttctgttgtctttcagccagagcgtcgcagatctgccgatagatgagtgcgagggaccaaagccagcgtcgcagagagcgtgttatgccggtccatgctcaggagagattccagagtttaatcccgacgaaactgatggtctattcgggggccttcaagactttgacgagctctacgactgggagtatgagggattcaccaaatgctctgaatcatgcggagggggcgtccaggaagctgtggtttcgtgtttaaataaacaaacaagagagcccgctgaagaaaacttgtgtgtgaccagccgtcgacccccccagttgttaaaaagctgcaacttggacccttgtcctgcccggtgggagatcggaaaatggtctccatgttctctaacttgcggggttggacttcagacacgggacgttttttgctcccacctcctgtctagagagatgaacgaaacagtgatcctcgctgacgagttgtgtcggcagcctaaaccaagtaccgtgcaggcctgtaaccgctttaattgcccacccgcgtggtaccccgctcagtggcagccttgttctcgaacctgtggcgggggggtgcagaagcgagaggtattgtgtaagcagagaatggccgatggtagcttcctggaactccccgaaaccttttgcagcgcaagcaagccggcatgccaacaggcatgtaaaaaggatgactgcccttctgaatggctactgtctgattggaccgagtgttccacttcctgtggtgaaggcacacagactagatctgctatctgtcggaaaatgcttaagacaggactatcaacggtggtgaattccactctttgccccccactacccttctcctcctcgatcaggccttgtatgctggccacatgtgcaagaccaggaaggccctccaccaagcattcgccccacatcgcggctgctcgaaaagtctacatccaaacaaggcgccagagaaagcttcatttcgtcgtgggcgggttcgcatacctcttgccgaaaaccgcagtcgtactgagatgccctgcacgccgggtgcgaaaaccgctcatcacctgggagaaggatggccagcaccttattagctctacacatgtaacggtcgcgccctttggataccttaagattcaccgccttaaaccttccgatgcaggagtctacacatgtagcgctgggcccgcccgcgaacattttgtcattaagctgatcggaggcaatcgcaagttggttgcccggcctttgtcacctaggtctgaggaagaagtactcgccggtaggaaggggggaccaaaagaggcactccagacgcacaaacaccagaatgggatcttcagcaacgggagtaaagcagagaagaggggattggcagccaaccccggcagccgctacgacgatctggtgtctcgattactggaacagggagggtggccaggcgagctcctcgcgagttgggaggcccaggatagcgcagaacgtaatactacatcagaagaagatcccggtgccgagcaggtgcttctgcatctccccttcacgatggtcactgaacagcgcagattggacgatattctgggaaatctgtcccagcagccagaggaactcagggatctgtactcaaagcaccttgtggctcagctcgcccaggaaatcttcaggagccatttggaacatcaggatacacttctaaagccaagtgaacggagaacgagccctgtcacgctctcccctcacaagcacgtgagcgggttctcctctagcctaagaacctcctctaccggagatgcgggcggcgggagccggaggccccacaggaaacccaccattctcagaaagatttcggctgcccagcagctgagtgcctccgaggtggtcacgcacctgggccaaaccgttgccttggcgagcgggacactttctgttcttctccactgcgaagccattgggcatcccaggcctacaatctcatgggcccgaaatggggaggaagtccagttttcagatcgtatacttctgcaacctgacgatagtttgcagattctggcacccgtagaggccgacgtgggcttttatacatgcaacgccaccaatgctctaggttatgactcggtgtcaatcgctgtcaccctcgccggtaaaccgctcgtaaagacctctagaatgacagtgattaacactgaaaagcccgctgttacagtggacatcggcagtactattaaaaccgtgcagggcgttaacgtcactattaattgccaagtcgccggagtgcccgaagccgaagtcacttggttccggaacaagtcaaagttgggcagcccgcaccacctgcatgaggggtcactgctactgaccaatgtgtcttcctccgatcagggcctgtatagctgcagggcagcgaacttacatggagagctgaccgaatccactcaactccttatcctggatcctcctcaggttcccacgcagctggaagacatccgggctctcctggcagcaaccgggcccaatctgcctagcgtactgacatcacccctaggcactcagctagtgcttgatccaggcaactctgcgctgttggggtgccctatcaagggccatcccgtgcccaatattacatggttccatgggggacagcctattgtgactgctaccggtctgacccaccacatcctggccgctggacagatcctccaggtggcaaacttaagcggggggtcccagggggagttttcatgcttagctcagaatgaagcaggtgtgttaatgcagaaagcctctctggtgatacaggactattggtggtccgtggacaggttggctacttgtagtgcatcctgtgggaatagaggggtgcaacagcctaggttacgttgtctgttaaactccacagaggtcaatcctgcacactgcgctgggaaagtcagaccagcagtgcagccgattgcctgcaatcgaagagactgtccgtccagatggatggtaaccagttggtcagcttgcacaaggtcctgtggagggggggtacagacccgcagggtgacctgtcagaaacttaaggcgtctggaatttcgacacccgtgtcaaacgatatgtgtacccaggttgcaaaaagacccgtagacacccaggcctgcaaccagcaattatgcgtggaatgggcctttagttcctggggccagtgtaacggaccgtgtattggaccgcacctggccgtccaacatcgtcaggtattctgccagactcgagacggtataactctgcccagtgaacagtgctctgcacttcccaggcctgtttccacacagaactgttggtccgaggcttgctctgtgcactggcgggtctccttgtggactctgtgtacagccacatgtggaaattacggctttcagagtcgccgtgtggaatgtgttcacgctaggacgaataaagcagtgccagaacacctgtgttcatggggtccacggcccgctaattggcaaaggtgcaacataacaccttgcgaaaacatggagtgcagagatacaacccgctactgcgaaaaggtgaagcagttaaagctgtgtcagctctcccaattcaagtcccgttgctgcggaacatgcggcaaagcgtag

SEQ ID NO: 32809 - DNA, 2052 bp, Artificial Sequence
  derived and/or modified sequence
atggaatgctgcaggagagcgacaccaggaactctcctgctatttctggccttcctactgctctccagtagaacagccaggagtgaggaagatagagatgggttatgggacgcctggggaccctggtctgaatgctcccggacttgtggaggtggcgctagttattcattacggagatgtctaagttcaaagagttgtgagggcagaaacatccgttatagaacgtgctccaacgttgactgtcccccagaagcaggtgactttagggcccagcaatgctctgcacataacgacgtcaaacaccacggtcagttctatgaatggcttccagtttcaaatgaccccgacaatccatgctcattgaagtgtcaagcaaaaggaaccactctggtggtggaacttgcccccaaggttctggacggtactagatgctatactgaatctttggatatgtgtatctccggtctttgtcaaatagtgggatgtgatcatcagctgggttccaccgtaaaagaagacaattgcggcgtctgcaatggtgacgggtcaacttgtcgcctggtgaggggccagtacaaatcccagctatcagcaactaagtcagatgataccgtcgtcgctattccctacggctccagacacatccgccttgtcctcaagggacctgaccacctatatctcgagaccaaaactcttcagggcacaaagggagaaaacagcctctcaagcactggcacattcctagttgataactcgagcgttgattttcagaagtttcctgataaagaaatcctgagaatggcgggtcctctgacagccgactttatcgttaaaattaggaattctgggtccgctgactccaccgtacagtttatcttttaccaacccatcatacatagatggcgcgagaccgatttttttccttgcagtgctacttgtggcggcgggtaccagttgaccagtgccgaatgctatgatttaaggtccaaccgagtagtcgctgatcaatattgccattactatcccgagaatataaaacctaaacctaaactgcaggagtgtaacctcgacccatgtcctgctagcgatggctataagcagatcatgccctatgacctctatcaccccctacctagatgggaagcgaccccctggaccgcatgctcctcatcttgtggcggaggaattcagagcagggcagtgagttgcgtggaggaggatattcaaggacatgtaaccagcgtagaggaatggaagtgcatgtatacaccaaagatgcctatcgcccagccttgtaacattttcgactgcccaaagtggctggcccaggagtggagcccttgcaccgttacatgtgggcagggcctcagatatagagttgtactgtgcattgatcaccgcgggatgcataccggaggctgtagccctaaaacgaaaccccacattaaggaggagtgcattgttcccaccccctgttataaacccaaagagaagctgcctgtggaagcgaagttaccttggttcaagcaggcacaggagctcgaagaaggcgctgccgtgagtgaagagccgtcctttattcccgaggcttggagtgcttgcacagtgacctgtggcgttggcactcaggtgaggatcgtgagatgtcaggtgttactctcattcagccagagcgttgctgatctcccgattgacgagtgcgaaggaccaaaacctgcctcccaaagagcttgctacgctggcccttgctctggtgagatccctgaattcaatccagacgagacggatggactgttcggcggcttacaggacttcgacgaattgtatgattgggagtatgaaggtttcaccaaatgtagtgagtcctgtggcggaggtgtccaagaggcagtggttagttgcctgaacaaacagacaagagagcccgcggaagagaatctttgcgtgaccagtcgcagacccccccagctgttaaaatcctgtaacctggatccgtgccctgctcgatctagcatcgacagtgcctggaatgcttgtaacgtcttgtgttag

SEQ ID NO: 32810 - DNA, 1401 bp, Artificial Sequence
  derived and/or modified sequence
atgtgtctgactgacgaatggggttttttctttttttttttcctgggggtgcccgaggcagaagtgacatggtttcgtaacaagtcaaagttaggctctcctcaccacctgcacgaaggttctctgctcctgacaaacgtgtcttcttccgaccaggggctatactcatgccgagccgctaatctccatggtgagttgacggaatccacccagctcttaatattagacccaccccaggtgccaactcaattagaagatatccgtgccctgcttgcagccaccgggcccaacctgccatccgttctgacgtcccctctcgggacccagttagttctagatcccggaaatagcgcactactcggatgcccgatcaaaggtcacccggttccgaatatcacctggttccacggaggacaacctatcgtcacagccaccggccttacacatcacatcctcgcagccggccagattctgcaggttgccaatctctccggtggcagccagggagagttttcctgcctcgctcaaaacgaagctggtgtactgatgcaaaaggcctctttagtgatccaggactattggtggtcagtggatcgcctcgccacctgttcggcgtcatgcggcaataggggggtgcagcaaccaaggctccgctgtctactaaactcaacagaggtgaaccccgcccactgcgccggcaaagtgaggcctgccgtccagccaatcgcctgcaataggagagattgcccctcccggtggatggtcactagctggtccgcttgcacgcgctcctgcgggggaggtgtccagacaagacgagtgacatgccaaaaattaaaagcttccggaatctcaactcccgtctcgaacgatatgtgcactcaggttgccaagagacctgtagacacacaagcttgcaatcaacagctctgcgtcgagtgggcgttctcatcatggggccagtgtaatggaccatgcataggaccccatctcgcagtccaacatcgccaggtgttttgtcagacccgtgacggcatcaccctcccctctgagcagtgttcagccttgcccaggcctgtgtcaacccaaaattgctggagtgaagcttgcagtgtacactggagggtctccctatggaccttatgcacagcaacatgtggaaattatggatttcaatcccgccgagtggaatgcgtacatgcacgcaccaacaaagccgttcctgaacatctatgctcttggggacccaggccagcgaattggcagcgttgcaacatcactccttgcgaaaacatggaatgtcgagatactacgcgctattgtgaaaaagtcaagcaactcaagctttgtcagctatcccaatttaagtcccgctgttgtggaacctgcggcaaggcatag

SEQ ID NO: 32811 - DNA, 5289 bp, Artificial Sequence
  derived and/or modified sequence
atggagtgctgtcgaagagctacccctgggacattactgctctttctcgcttttctcctgctgtcaagtaggaccgcaagatcagaagaggatcgcgatggactttgggacgcctggggcccgtggagtgagtgctctagaacgtgtggaggaggtgctagctactccctgaggcggtgcctgagcagtaagagttgcgaagggcgaaacatcaggtatagaacttgttccaatgtggactgtcctcccgaagccggtgatttccgggcacagcaatgctcagctcataacgatgttaaacaccacgggcagttttatgaatggctcccagtgtccaacgatcccgacaacccttgtagcctcaagtgtcaggctaagggcaccaccctagtggttgagcttgccccaaaagtgcttgacgggactaggtgctacacggaatcactagatatgtgtatctctggcctttgccagattgtaggctgcgatcaccagctcggctcgacggtaaaagaggacaattgtggcgtgtgtaacggggacggatccacgtgtagactggttaggggacagtataaaagccaactgagcgctaccaagtcagacgacaccgtggttgctatcccatatggctcaagacatattaggcttgtactcaagggaccagaccacttgtatctcgaaacaaaaacactccaaggcacaaagggggaaaactcactgtccagtactggtaccttcctcgtggataattcttctgttgacttccagaaatttccggataaagagatactgcggatggccggacccctaaccgcagattttatagtgaaaatccgaaacagcgggagcgccgactctacagtacaattcatattttatcagcctatcatccaccgctggcgagagacggatttctttccttgttccgctacatgcggtggaggctatcaacttacttctgccgagtgttatgaccttaggtccaaccgcgttgttgctgaccagtactgccattattatcccgaaaatataaaacccaagcccaagctgcaggagtgcaacctggacccctgccccgcatctgacgggtacaaacaaatcatgccgtatgacctctaccatcccctgcccagatgggaagctactccatggacagcctgttcctctagctgcgggggcggaatccaatccagggcggtcagctgcgtggaagaggatatccagggtcacgttacctctgtagaagaatggaagtgcatgtatacgcccaagatgcccatcgctcagccttgtaatatcttcgattgccccaaatggctcgcccaggaatggagtccgtgcacagtcacatgtggtcaggggcttcgctacagggtcgtcctgtgtatcgatcatcggggaatgcataccggcggctgttcaccaaaaactaaaccgcacatcaaggaagaatgcattgtacctaccccttgctataagcctaaggaaaaattgccggtggaggcgaaattgccctggtttaagcaagcccaagagctggaggagggtgcggctgtatccgaggaaccctcttttatcccagaagcatggagcgcttgtaccgtgacatgtggtgtcggcacacaggttcggattgtccgttgccaggtcctgttatcattctcacaaagcgtagctgatctccccatcgatgaatgcgaagggcccaaacctgcttctcagagagcctgctacgcaggtccatgttccggagagatcccagaatttaatccagacgaaaccgatggcttattcggaggccttcaggacttcgatgaactatatgactgggaatatgaaggctttacaaagtgcagcgaatcttgcggcggtggcgttcaggaagctgtcgtttcttgcctgaacaaacaaactcgggagccggcagaagaaaatctctgtgtcaccagtagacgccccccacagctacttaagtcatgtaacctcgatccatgcccagcaagatgggaaatcgggaaatggtccccctgttcactgacctgcggagtaggcctccaaacacgggacgtgttctgcagccacctcctgtccagggaaatgaacgagacagtcatattggctgacgagctttgcagacagcccaagcccagcactgtccaggcctgtaacaggttcaattgtcctcccgcttggtaccctgcacagtggcagccatgcagcagaacttgcggaggcggcgtgcaaaaacgcgaggtactgtgtaagcagcgcatggcagacggtagctttctggaattgcccgagaccttttgttccgcgagtaaaccggcttgtcagcaggcatgcaaaaaagacgactgcccctccgaatggctactatcagattggactgaatgcagcacaagttgtggcgagggtacacaaacgaggtcagctatttgtaggaagatgctgaaaacaggcctctctaccgtggttaactctaccctttgcccccccctgcctttctcctcatcaatcagaccctgtatgcttgccacctgcgctagaccaggacgcccatcaacaaaacacagtccccatattgcagctgcgcgtaaggtgtacatccaaacgagacgacaacggaaacttcactttgtagtgggtggctttgcatacctgctgcccaagactgccgtagtgctcagatgcccagctcgtagagtgcggaagcccctgattacctgggagaaagatggtcaacacctcatctcctcgacccacgtcaccgtggccccttttggatatctgaagatccatcggttgaagccctccgacgccggcgtgtacacatgcagcgctggtcccgcacgcgaacacttcgtgatcaaactgatcggtggcaatcggaagttagtagctagacccctgtctccccgttcagaagaagaagttttggcaggacgcaagggcggacctaaggaggcattgcagacacataagcatcagaacggaatcttttctaatggaagtaaggctgaaaagagggggctcgccgcaaacccaggatcaaggtacgacgatttggttagcagacttctggaacaagggggttggcctggggagcttctggcctcctgggaagcacaagacagcgctgaacgcaatactacctctgaagaagatcccggcgccgaacaggtactccttcatcttcccttcactatggtgactgaacagcggcgcttagacgatatcctcggtaatttgtcacagcaacccgaagagttacgcgatctgtacagcaagcatctggtcgctcagctggcacaggaaatcttcagatctcacctggagcaccaagataccttgttgaaaccttccgaaagacgtacctcacccgttaccctgtcccctcacaagcacgtttcaggcttctcatctagtttacgcaccagttctacgggagatgcaggcggagggtctcgcaggccacatcggaagcccactatacttcgcaagataagcgccgctcagcagctatccgcgtccgaggtcgttacacaccttggtcagaccgtcgctctggcctctggcacactcagcgtgctgttacactgcgaagcaatcggacaccctcgccccaccatctcctgggcccgtaacggcgaagaggttcagttcagcgatcgaatattacttcaacccgacgattcactgcagatcttggcccctgtagaggcagacgtgggcttctatacgtgtaacgctacaaacgcacttggctatgattctgtttctatcgccgtaactttggccgggaagccccttgtgaagacatccagaatgacagttataaacacagaaaagcccgcagtaaccgtcgatatcggctcaactattaagaccgttcagggagtcaacgtcacaattaactgtcaagttgccggagttcctgaagccgaagttacctggttcagaaacaagagcaagctaggatctccccatcacctgcacgaagggagtttactcctcaccaatgtcagtagttctgaccaaggtttatattcctgtagagccgcaaatctccatggtgagttaactgagtcaacacagctcctgattctcgaccctccacaggtcccaacacagctggaggacatccgcgccctcttagccgccaccggcccaaatctgcccagcgttttgacctcacccctggggacccagctggttcttgaccctggcaacagcgcactgctgggatgcccgattaaaggtcacccagtgcccaatatcacgtggtttcatggcggtcagccaattgtgacagctaccggactgacgcaccatattctggcagcgggccagatcttgcaggtcgctaacttaagcgggggaagccagggtgaattttcatgtctcgcacagaatgaagcgggagttctcatgcaaaaggcctcactggttattcaggactactggtggagtgtggatcgcctcgcaacttgctctgcctcatgcggcaacaggggagttcaacaaccccggctcaggtgtctgcttaactcaacggaagtgaatccagcccactgcgccggaaaagtgcgcccagctgttcaacccatcgcctgtaatagaagagactgcccctcgagatggatggtgacatcttggtcagcgtgcacgcgttcctgcggagggggcgtacaaactcgtagagttacatgccagaagttgaaggcgtccggaattagtaccccagtctcaaatgatatgtgcacccaagttgccaagagacctgtggatacacaagcttgcaaccaacagctctgcgtagaatgggcttttagctcatggggacaatgcaatggcccatgcataggaccccacttggcagtacagcaccggcaggtcttctgccagactagggatgggattacgctaccttctgaacaatgttccgccctcccccggcctgttagcacgcaaaattgttggagcgaggcttgctccgtacactggagagtgagcttgtggacactatgtacagcgacatgcggcaactacgggttccagagtcgaagagtagaatgcgtccatgccaggacgaacaaagcggtgccagaacatctgtgttcatgggggccgagaccagcaaattggcaacggtgcaacattaccccttgcgagaatatggaatgccgtgatacgacacgatactgtgagaaggtcaagcagctgaaattgtgccagctcagccagttcaagtccagatgctgcggaacctgtgggaaggcgtag

SEQ ID NO: 32812 - DNA, 2052 bp, Artificial Sequence
  derived and/or modified sequence
atggagtgctgcagaagagccacccccggcaccctgctgctgttcctggccttcctgctgctgagcagcagaaccgccagaagcgaggaggacagagacggcctgtgggacgcctggggcccctggagcgagtgcagcagaacctgcggcggcggcgccagctacagcctgagaagatgcctgagcagcaagagctgcgagggcagaaacatcagatacagaacctgcagcaacgtggactgcccccccgaggccggcgacttcagagcccagcagtgcagcgcccacaacgacgtgaagcaccacggccagttctacgagtggctgcccgtgagcaacgaccccgacaacccctgcagcctgaagtgccaggccaagggcaccaccctggtggtggagctggcccccaaggtgctggacggcaccagatgctacaccgagagcctggacatgtgcatcagcggcctgtgccagatcgtgggctgcgaccaccagctgggcagcaccgtgaaggaggacaactgcggcgtgtgcaacggcgacggcagcacctgcagactggtgagaggccagtacaagagccagctgagcgccaccaagagcgacgacaccgtggtggccatcccctacggcagcagacacatcagactggtgctgaagggccccgaccacctgtacctggagaccaagaccctgcagggcaccaagggcgagaacagcctgagcagcaccggcaccttcctggtggacaacagcagcgtggacttccagaagttccccgacaaggagatcctgagaatggccggccccctgaccgccgacttcatcgtgaagatcagaaacagcggcagcgccgacagcaccgtgcagttcatcttctaccagcccatcatccacagatggagagagaccgacttcttcccctgcagcgccacctgcggcggcggctaccagctgaccagcgccgagtgctacgacctgagaagcaacagagtggtggccgaccagtactgccactactaccccgagaacatcaagcccaagcccaagctgcaggagtgcaacctggacccctgccccgccagcgacggctacaagcagatcatgccctacgacctgtaccaccccctgcccagatgggaggccaccccctggaccgcctgcagcagcagctgcggcggcggcatccagagcagagccgtgagctgcgtggaggaggacatccagggccacgtgaccagcgtggaggagtggaagtgcatgtacacccccaagatgcccatcgcccagccctgcaacatcttcgactgccccaagtggctggcccaggagtggagcccctgcaccgtgacctgcggccagggcctgagatacagagtggtgctgtgcatcgaccacagaggcatgcacaccggcggctgcagccccaagaccaagccccacatcaaggaggagtgcatcgtgcccaccccctgctacaagcccaaggagaagctgcccgtggaggccaagctgccctggttcaagcaggcccaggagctggaggagggcgccgccgtgagcgaggagcccagcttcatccccgaggcctggagcgcctgcaccgtgacctgcggcgtgggcacccaggtgagaatcgtgagatgccaggtgctgctgagcttcagccagagcgtggccgacctgcccatcgacgagtgcgagggccccaagcccgccagccagagagcctgctacgccggcccctgcagcggcgagatccccgagttcaaccccgacgagaccgacggcctgttcggcggcctgcaggacttcgacgagctgtacgactgggagtacgagggcttcaccaagtgcagcgagagctgcggcggcggcgtgcaggaggccgtggtgagctgcctgaacaagcagaccagagagcccgccgaggagaacctgtgcgtgaccagcagaagacccccccagctgctgaagagctgcaacctggacccctgccccgccagaagcagcatcgacagcgcctggaacgcctgcaacgtgctgtgctag

SEQ ID NO: 32813 - DNA, 1401 bp, Artificial Sequence
  derived and/or modified sequence
atgtgcctgaccgacgagtggggcttcttcttcttcttcttcctgggcgtgcccgaggccgaggtgacctggttcagaaacaagagcaagctgggcagcccccaccacctgcacgagggcagcctgctgctgaccaacgtgagcagcagcgaccagggcctgtacagctgcagagccgccaacctgcacggcgagctgaccgagagcacccagctgctgatcctggaccccccccaggtgcccacccagctggaggacatcagagccctgctggccgccaccggccccaacctgcccagcgtgctgaccagccccctgggcacccagctggtgctggaccccggcaacagcgccctgctgggctgccccatcaagggccaccccgtgcccaacatcacctggttccacggcggccagcccatcgtgaccgccaccggcctgacccaccacatcctggccgccggccagatcctgcaggtggccaacctgagcggcggcagccagggcgagttcagctgcctggcccagaacgaggccggcgtgctgatgcagaaggccagcctggtgatccaggactactggtggagcgtggacagactggccacctgcagcgccagctgcggcaacagaggcgtgcagcagcccagactgagatgcctgctgaacagcaccgaggtgaaccccgcccactgcgccggcaaggtgagacccgccgtgcagcccatcgcctgcaacagaagagactgccccagcagatggatggtgaccagctggagcgcctgcaccagaagctgcggcggcggcgtgcagaccagaagagtgacctgccagaagctgaaggccagcggcatcagcacccccgtgagcaacgacatgtgcacccaggtggccaagagacccgtggacacccaggcctgcaaccagcagctgtgcgtggagtgggccttcagcagctggggccagtgcaacggcccctgcatcggcccccacctggccgtgcagcacagacaggtgttctgccagaccagagacggcatcaccctgcccagcgagcagtgcagcgccctgcccagacccgtgagcacccagaactgctggagcgaggcctgcagcgtgcactggagagtgagcctgtggaccctgtgcaccgccacctgcggcaactacggcttccagagcagaagagtggagtgcgtgcacgccagaaccaacaaggccgtgcccgagcacctgtgcagctggggccccagacccgccaactggcagagatgcaacatcaccccctgcgagaacatggagtgcagagacaccaccagatactgcgagaaggtgaagcagctgaagctgtgccagctgagccagttcaagagcagatgctgcggcacctgcggcaaggcctag

SEQ ID NO: 32814 - DNA, 5289 bp, Artificial Sequence
  derived and/or modified sequence
atggagtgctgcagaagagccacccccggcaccctgctgctgttcctggccttcctgctgctgagcagcagaaccgccagaagcgaggaggacagagacggcctgtgggacgcctggggcccctggagcgagtgcagcagaacctgcggcggcggcgccagctacagcctgagaagatgcctgagcagcaagagctgcgagggcagaaacatcagatacagaacctgcagcaacgtggactgcccccccgaggccggcgacttcagagcccagcagtgcagcgcccacaacgacgtgaagcaccacggccagttctacgagtggctgcccgtgagcaacgaccccgacaacccctgcagcctgaagtgccaggccaagggcaccaccctggtggtggagctggcccccaaggtgctggacggcaccagatgctacaccgagagcctggacatgtgcatcagcggcctgtgccagatcgtgggctgcgaccaccagctgggcagcaccgtgaaggaggacaactgcggcgtgtgcaacggcgacggcagcacctgcagactggtgagaggccagtacaagagccagctgagcgccaccaagagcgacgacaccgtggtggccatcccctacggcagcagacacatcagactggtgctgaagggccccgaccacctgtacctggagaccaagaccctgcagggcaccaagggcgagaacagcctgagcagcaccggcaccttcctggtggacaacagcagcgtggacttccagaagttccccgacaaggagatcctgagaatggccggccccctgaccgccgacttcatcgtgaagatcagaaacagcggcagcgccgacagcaccgtgcagttcatcttctaccagcccatcatccacagatggagagagaccgacttcttcccctgcagcgccacctgcggcggcggctaccagctgaccagcgccgagtgctacgacctgagaagcaacagagtggtggccgaccagtactgccactactaccccgagaacatcaagcccaagcccaagctgcaggagtgcaacctggacccctgccccgccagcgacggctacaagcagatcatgccctacgacctgtaccaccccctgcccagatgggaggccaccccctggaccgcctgcagcagcagctgcggcggcggcatccagagcagagccgtgagctgcgtggaggaggacatccagggccacgtgaccagcgtggaggagtggaagtgcatgtacacccccaagatgcccatcgcccagccctgcaacatcttcgactgccccaagtggctggcccaggagtggagcccctgcaccgtgacctgcggccagggcctgagatacagagtggtgctgtgcatcgaccacagaggcatgcacaccggcggctgcagccccaagaccaagccccacatcaaggaggagtgcatcgtgcccaccccctgctacaagcccaaggagaagctgcccgtggaggccaagctgccctggttcaagcaggcccaggagctggaggagggcgccgccgtgagcgaggagcccagcttcatccccgaggcctggagcgcctgcaccgtgacctgcggcgtgggcacccaggtgagaatcgtgagatgccaggtgctgctgagcttcagccagagcgtggccgacctgcccatcgacgagtgcgagggccccaagcccgccagccagagagcctgctacgccggcccctgcagcggcgagatccccgagttcaaccccgacgagaccgacggcctgttcggcggcctgcaggacttcgacgagctgtacgactgggagtacgagggcttcaccaagtgcagcgagagctgcggcggcggcgtgcaggaggccgtggtgagctgcctgaacaagcagaccagagagcccgccgaggagaacctgtgcgtgaccagcagaagacccccccagctgctgaagagctgcaacctggacccctgccccgccagatgggagatcggcaagtggagcccctgcagcctgacctgcggcgtgggcctgcagaccagagacgtgttctgcagccacctgctgagcagagagatgaacgagaccgtgatcctggccgacgagctgtgcagacagcccaagcccagcaccgtgcaggcctgcaacagattcaactgcccccccgcctggtaccccgcccagtggcagccctgcagcagaacctgcggcggcggcgtgcagaagagagaggtgctgtgcaagcagagaatggccgacggcagcttcctggagctgcccgagaccttctgcagcgccagcaagcccgcctgccagcaggcctgcaagaaggacgactgccccagcgagtggctgctgagcgactggaccgagtgcagcaccagctgcggcgagggcacccagaccagaagcgccatctgcagaaagatgctgaagaccggcctgagcaccgtggtgaacagcaccctgtgcccccccctgcccttcagcagcagcatcagaccctgcatgctggccacctgcgccagacccggcagacccagcaccaagcacagcccccacatcgccgccgccagaaaggtgtacatccagaccagaagacagagaaagctgcacttcgtggtgggcggcttcgcctacctgctgcccaagaccgccgtggtgctgagatgccccgccagaagagtgagaaagcccctgatcacctgggagaaggacggccagcacctgatcagcagcacccacgtgaccgtggcccccttcggctacctgaagatccacagactgaagcccagcgacgccggcgtgtacacctgcagcgccggccccgccagagagcacttcgtgatcaagctgatcggcggcaacagaaagctggtggccagacccctgagccccagaagcgaggaggaggtgctggccggcagaaagggcggccccaaggaggccctgcagacccacaagcaccagaacggcatcttcagcaacggcagcaaggccgagaagagaggcctggccgccaaccccggcagcagatacgacgacctggtgagcagactgctggagcagggcggctggcccggcgagctgctggccagctgggaggcccaggacagcgccgagagaaacaccaccagcgaggaggaccccggcgccgagcaggtgctgctgcacctgcccttcaccatggtgaccgagcagagaagactggacgacatcctgggcaacctgagccagcagcccgaggagctgagagacctgtacagcaagcacctggtggcccagctggcccaggagatcttcagaagccacctggagcaccaggacaccctgctgaagcccagcgagagaagaaccagccccgtgaccctgagcccccacaagcacgtgagcggcttcagcagcagcctgagaaccagcagcaccggcgacgccggcggcggcagcagaagaccccacagaaagcccaccatcctgagaaagatcagcgccgcccagcagctgagcgccagcgaggtggtgacccacctgggccagaccgtggccctggccagcggcaccctgagcgtgctgctgcactgcgaggccatcggccaccccagacccaccatcagctgggccagaaacggcgaggaggtgcagttcagcgacagaatcctgctgcagcccgacgacagcctgcagatcctggcccccgtggaggccgacgtgggcttctacacctgcaacgccaccaacgccctgggctacgacagcgtgagcatcgccgtgaccctggccggcaagcccctggtgaagaccagcagaatgaccgtgatcaacaccgagaagcccgccgtgaccgtggacatcggcagcaccatcaagaccgtgcagggcgtgaacgtgaccatcaactgccaggtggccggcgtgcccgaggccgaggtgacctggttcagaaacaagagcaagctgggcagcccccaccacctgcacgagggcagcctgctgctgaccaacgtgagcagcagcgaccagggcctgtacagctgcagagccgccaacctgcacggcgagctgaccgagagcacccagctgctgatcctggaccccccccaggtgcccacccagctggaggacatcagagccctgctggccgccaccggccccaacctgcccagcgtgctgaccagccccctgggcacccagctggtgctggaccccggcaacagcgccctgctgggctgccccatcaagggccaccccgtgcccaacatcacctggttccacggcggccagcccatcgtgaccgccaccggcctgacccaccacatcctggccgccggccagatcctgcaggtggccaacctgagcggcggcagccagggcgagttcagctgcctggcccagaacgaggccggcgtgctgatgcagaaggccagcctggtgatccaggactactggtggagcgtggacagactggccacctgcagcgccagctgcggcaacagaggcgtgcagcagcccagactgagatgcctgctgaacagcaccgaggtgaaccccgcccactgcgccggcaaggtgagacccgccgtgcagcccatcgcctgcaacagaagagactgccccagcagatggatggtgaccagctggagcgcctgcaccagaagctgcggcggcggcgtgcagaccagaagagtgacctgccagaagctgaaggccagcggcatcagcacccccgtgagcaacgacatgtgcacccaggtggccaagagacccgtggacacccaggcctgcaaccagcagctgtgcgtggagtgggccttcagcagctggggccagtgcaacggcccctgcatcggcccccacctggccgtgcagcacagacaggtgttctgccagaccagagacggcatcaccctgcccagcgagcagtgcagcgccctgcccagacccgtgagcacccagaactgctggagcgaggcctgcagcgtgcactggagagtgagcctgtggaccctgtgcaccgccacctgcggcaactacggcttccagagcagaagagtggagtgcgtgcacgccagaaccaacaaggccgtgcccgagcacctgtgcagctggggccccagacccgccaactggcagagatgcaacatcaccccctgcgagaacatggagtgcagagacaccaccagatactgcgagaaggtgaagcagctgaagctgtgccagctgagccagttcaagagcagatgctgcggcacctgcggcaaggcctag

SEQ ID NO: 32815 - protein, 398 aa, Artificial Sequence
  derived and/or modified sequence
MRRQWGSAMRAAEQAGCMVSASRAGQPEAGPWSCSGVILSRSPGLVLCHGGIFVPFLRAGSEVLTAAGAVFLPGDSCRDDLRLHVQWAPTAAGPGGGAERGRPGLCTPQCASLEPGPPAPSRGRPLQPRLPAELLLLLSCPAFWAHFARLFGDEAAEQWRFSSAARDDEVSEDEEADQLRALGWFALLGVRLGQEEVEEERGPAMAVSPLGAVPKGAPLLVCGSPFGAFCPDIFLNTLSCGVLSNVAGPLLLTDARCLPGTEGGGVFTARPAGALVALVVAPLCWKAGEWVGFTLLCAAAPLFRAARDALHRLPHSTAALAALLPPEVGVPWGLPLRDSGPLWAAAAVLVECGTVWGSGVAVAPRLVVTCRHVSPREAARVLVRSTTPKHNHQQHPGQ

SEQ ID NO: 32816 - DNA, 177 bp, Artificial Sequence
  derived and/or modified sequence
atgcccaaccggcacaagaccaaggaccagaccctgctgcccgcccagcagtacatttggttactgaacagccacacgcagatgaccgctcctgtgccccagttcaagctctcagagactgcctctctcctgtgtaaaaggaagattagcaccgccatgtctagcacatgcctgtag

SEQ ID NO: 32817 - DNA, 1197 bp, Artificial Sequence
  derived and/or modified sequence
atgagaagacagtggggcagcgccatgagagccgccgagcaggccggctgcatggtgagcgccagcagagccggccagcccgaggccggcccctggagctgcagcggcgtgatcctgagcagaagccccggcctggtgctgtgccacggcggcatcttcgtgcccttcctgagagccggcagcgaggtgctgaccgccgccggcgccgtgttcctgcccggcgacagctgcagagacgacctgagactgcacgtgcagtgggcccccaccgccgccggccccggcggcggcgccgagagaggcagacccggcctgtgcaccccccagtgcgccagcctggagcccggcccccccgcccccagcagaggcagacccctgcagcccagactgcccgccgagctgctgctgctgctgagctgccccgccttctgggcccacttcgccagactgttcggcgacgaggccgccgagcagtggagattcagcagcgccgccagagacgacgaggtgagcgaggacgaggaggccgaccagctgagagccctgggctggttcgccctgctgggcgtgagactgggccaggaggaggtggaggaggagagaggccccgccatggccgtgagccccctgggcgccgtgcccaagggcgcccccctgctggtgtgcggcagccccttcggcgccttctgccccgacatcttcctgaacaccctgagctgcggcgtgctgagcaacgtggccggccccctgctgctgaccgacgccagatgcctgcccggcaccgagggcggcggcgtgttcaccgccagacccgccggcgccctggtggccctggtggtggcccccctgtgctggaaggccggcgagtgggtgggcttcaccctgctgtgcgccgccgcccccctgttcagagccgccagagacgccctgcacagactgccccacagcaccgccgccctggccgccctgctgccccccgaggtgggcgtgccctggggcctgcccctgagagacagcggccccctgtgggccgccgccgccgtgctggtggagtgcggcaccgtgtggggcagcggcgtggccgtggcccccagactggtggtgacctgcagacacgtgagccccagagaggccgccagagtgctggtgagaagcaccacccccaagcacaaccaccagcagcaccccggccagtag

SEQ ID NO: 32818 - DNA, 1197 bp, Artificial Sequence
  derived and/or modified sequence
atgcgacggcagtggggctccgccatgcgagcggcggagcaagctggatgcatggtttccgcatcccgggccggccagcctgaagcgggaccatggagttgctccggcgttattctcagtaggtcaccggggctggttttatgtcatggaggcatattcgtgccgtttctgcgtgcaggtagcgaggttctgacagccgcaggcgctgtgttcctccctggagattcttgcagagacgacctgcgacttcatgtgcaatgggccccgactgccgccggacctggaggcggagccgaacggggccgtcctggtctgtgtacaccacaatgcgccagcctggagcctggcccccccgccccctctcggggacgcccgctccagccacgtctgcccgccgaattgttgctgttactatcatgtcctgctttctgggctcactttgccaggctgttcggagacgaagctgccgagcaatggcggtttagctcagcggcgagggacgatgaggtgagtgaggacgaggaggccgatcagctccgggcactggggtggttcgctctcttgggtgttaggctcgggcaagaagaggtagaagaagaacgggggcccgccatggcggtatcccccctcggagcagtacctaagggtgcccctctgctcgtgtgcggatccccctttggagccttttgtccagacatttttttgaatacgctctcctgcggcgtgttgtcaaatgtggccgggccactcttgcttaccgacgccaggtgtctgccagggacggagggcgggggagtcttcaccgctcgcccagcaggagccttggtagcccttgtcgtcgccccactgtgttggaaagcaggagagtgggtcggtttcacgttactgtgtgccgctgcacctcttttcagggcagcacgcgatgcccttcatcggctcccacactccaccgccgccctcgccgctcttctcccccccgaggttggggttccatggggtcttcccctccgcgacagtggcccgttgtgggctgcagctgcggtgctcgtcgagtgtggcaccgtctggggctccggggtagcagtggcaccacgactggttgtcacttgtcggcacgtttcacctcgggaagccgctcgggttttagtgcgttccaccacccccaagcacaatcatcaacagcaccctggccagtag

SEQ ID NO: 32819 - DNA, 1197 bp, Artificial Sequence
  derived and/or modified sequence
atgaggcggcagtggggcagcgccatgagagctgctgagcaggccggctgcatggtgtctgccagccgggccggccagcctgaggccggcccctggagctgcagcggggtcatcctgagccgcagccctggcctggtgctgtgccacggcggcatctttgtgcccttcctgcgggccggcagcgaggtgctgacagctgctggagctgtgttcctgcccggggacagctgcagagatgacctgcggctgcacgtgcagtgggcccccacagctgctggccctgggggcggcgctgagcggggccggcccggcctgtgcaccccccagtgtgccagcctggagcccggccccccagcccccagccggggccggcccctgcagccccggctgcctgctgagctgctgctgctgctgagctgcccagccttctgggcccactttgcccggctgtttggagatgaagctgctgagcagtggaggttcagcagcgctgccagagatgatgaggtgtctgaagatgaggaggccgaccagctgcgggccctgggctggtttgccctgctgggcgtgcggctgggccaggaggaggtggaggaggagcggggccctgccatggctgtgagccccctgggcgctgtgcccaagggggcccccctgctggtgtgtggcagcccctttggagccttctgcccagacatcttcctgaacaccctgagctgtggggtgctgagcaatgtggccggccccctgctgctgacagatgcccgctgcctgcctggaacagaaggaggaggagtcttcaccgcccggcctgctggggccctggtggccctggtggtggcccccctgtgctggaaggccggggagtgggtgggcttcaccctgctgtgtgccgccgcccccctcttccgggccgccagagatgccctgcaccggctgccccacagcacagctgccctggccgccctgctgcccccagaggtgggcgtgccctggggcctgcccctgcgggacagcggccccctgtgggccgctgctgctgtgctggtggagtgtggcaccgtgtggggcagcggcgtggccgtggccccccggctggtggtgacctgccgccacgtgagcccccgggaggccgcccgggtgctggtgcgcagcaccacccccaagcacaaccaccagcagcaccctggccagtag

SEQ ID NO: 32820 - DNA, 1197 bp, Artificial Sequence
  derived and/or modified sequence
atgcggcggcagtggggcagcgccatgcgggccgccgagcaggccggttgcatggttagcgcatctcgcgctggccaacctgaggcaggaccctggtcttgctccggcgtcattctgagtcggtctcccggtctcgttctgtgtcacggcggtatttttgtgccttttctgcgggctggaagcgaggtcctgacagccgccggcgcggtgtttctgcccggcgacagctgccgggatgacctgcgcctgcacgtccagtgggctcccaccgctgcaggtcccggcggtggggccgagaggggaaggcccggcttgtgtacccctcagtgtgcctccctcgaacccggtcccccggctccaagtcggggccggcccctccagccgcgtttaccagctgagctgcttctcttgctctcttgccccgctttctgggctcacttcgccaggttgtttggcgatgaagccgctgaacagtggagattcagcagcgccgccagagatgatgaggtttccgaggacgaggaggccgatcaattgcgagctctgggttggtttgcactcctgggagtccggctgggccaagaggaagtggaagaagagcgaggacctgctatggccgtgtccccgcttggggcagttcccaagggcgctcccctgctcgtttgcggtagcccttttggcgccttttgtcccgatatcttcctcaacaccctgagttgcggggttctgtcaaatgttgcagggccgctcctgttaaccgacgccaggtgccttcctggcacagaaggcggcggtgtgtttaccgctcggccagcgggcgctcttgtggccctcgtggtagcgcccctctgctggaaagcaggagaatgggtgggattcactctgttgtgcgccgcagccccgctgtttcgggctgcgagagacgctcttcatcggttaccacactctactgccgccctggcggccctgctgccccctgaagttggagtgccatggggactccctttgagagattcgggcccgttgtgggcggcggccgccgtcctggtagaatgtgggacagtgtggggctccggggttgcagtagcaccaaggcttgtggttacttgccgccacgtctcacctcgggaggcagcccgcgtgttggtgcgaagcacaactcctaagcacaatcaccagcagcaccctggtcagtag

SEQ ID NO: 32821 - DNA, 1197 bp, Artificial Sequence
  derived and/or modified sequence
atgagacggcagtgggggtccgcgatgcgggctgccgagcaggctgggtgcatggtttcagcctcaagggcaggccagcctgaagcaggcccatggagctgcagcggagtcatcctgtcaaggagtccaggcctagttctctgccatgggggtatctttgtccctttcctcagggctgggagtgaggtcctcacagccgctggtgcagtcttcctacccggtgactcctgtcgggatgacctgagacttcacgttcagtgggcccctaccgcagcagggcctggtggaggagcagaacgaggaaggcctggcctctgtactccccagtgtgctagcctggagcccggacctccagctccctcaagggggagaccccttcagccgcgactccccgctgagctgctgctacttctttcctgccctgccttttgggcccattttgctcgcctgtttggggatgaggcagctgagcaatggaggtttagtagtgctgctcgggatgacgaagttagcgaggatgaagaggctgatcagctaagagctctgggctggttcgctctgctgggcgttcgcctcggccaagaggaggtcgaagaggagcgcggtccagccatggctgtatccccactgggagcggtcccaaaaggtgcccctcttttggtgtgtgggagccccttcggggctttctgccccgacatctttttaaataccctgagctgcggagtgctgagcaatgtcgctggacccctactcctaacagatgcccgatgcctgccaggcactgaaggtgggggtgtttttactgcaaggcctgctggggcactggtcgcacttgtagtggctcccttgtgttggaaagcaggtgagtgggtcggatttaccctgctctgtgccgctgccccattatttagagccgcacgcgacgctttgcaccgactgccacatagtaccgcggctttggccgcattactaccccctgaggtgggcgttccttggggtctgcctcttcgcgactccggcccactctgggctgccgcagcagtcctggttgaatgcgggactgtgtggggcagtggtgttgccgtggctccaagactggtggtaacctgcaggcacgtgtctcccagagaggccgctagagtcctcgtccggtcaacaactccgaaacacaatcatcagcagcatcctggtcagtag

SEQ ID NO: 32822 - DNA, 3397 bp, Artificial Sequence
  derived and/or modified sequence
ccgggtaggggtcctcgctcgctagcttgctgtttctcggagaagctcccgagtgtccggcctagaggccatgagaaggcagtgggggtctgccatgagggcggccgagcaggcgggctgcatggtgagcgcctcccgggccggacagcccgaggcgggcccgtggagctgcagcggggtaatcctgagccgtagcccgggcctggtgctttgccacgggggcatcttcgtccccttcctgcgagctggcagcgaagtcctgaccgcggccggcgccgtcttcctgcctggcgacagttgcagggacgacctgcgcctgcacgtgcagtgggccccaacggccgcgggtcccgggggcggcgcggagcggggccgcccagggctgtgcacgccccagtgcgcgagcctcgagcccggcccacctgccccgtcccgcgggcgtcccctgcagccccggcttcctgctgagctgctgctgctgctgagctgcccggccttctgggcccacttcgcgcgcctcttcggggacgaggcagcggaacagtggcgcttctcgagcgcggcgcgggatgacgaagtgtcggaggacgaggaggcggatcaactgagagcgctgggctggtttgcgctgctgggcgtgcggctaggccaggaggaggtggaggaggagcgcgggccagccatggcggtgtcgcctctcggggccgtgcccaagggtgcgccattgctggtctgcggctcccctttcggcgccttctgccccgacatctttctcaacacgctgagctgcggggtgctcagcaacgtggccggcccactgctgcttaccgacgcacgctgcctgcccggcaccgagggcggcggcgtgttcaccgcgcggcccgcgggggcgctggtggcgctggtggtggcgccgctctgttggaaggccggcgaatgggtgggcttcacgctgctctgcgccgccgccccccttttccgcgccgcccgcgacgcgcttcaccgcctgccgcacagcaccgctgccctggccgcccttctgccgccagaggtgggcgtcccgtggggtctgcccctccgagactccgggcccctgtgggcagccgcggcagtgttggtggagtgcggcaccgtatggggctccggagtggctgtggcaccccgccttgtagtgacctgtcggcacgtgtcccctcgggaagcagccagggtcctggtgcgctccaccacccccaagcataatcaccagcaacacccgggacaataatacgggggccacctacccccacctgaacttcagcattcccatcacggtgctccagccggccctgcagcagtacagccagacccaagacctaggtggcctccgtgagctggaccgcgctgctgagccagtcagggtggtgtggcggttgcagcggcccctggcagaggccccgcggagcaagctctgaggctgtgttaccacctttggaaagaagagtgacctttttctgctgtaggaagtgatgttgaggtgacggtggcctcaggattcagggcccagcccctgcaggggcccaggctgcctctcatctccacccactgactgcagactgggctttgggctctggggcaaacttctcttcagccccatggatccttaacctggcagcccgttttggggtgctttcttgagcccccagttctctgtcccctagcactagactcagctgtattgtttttccttctggggagcccactccaactgcacagaagttctgggcctgacaggtagattccagctggaaggcaggcccgtgcctggttttgcgtctgttcccctgagggccatcgtcatcctggagcttcaatggggccttggctcctgtctgcctctcagtcagagtcagggctgacaaaggactcagcttccttagcatctcagcagaaaccttgctctgaagaccagagacagaagggacagaaacaggagtgcctcctgctgtgccaggcccatgggcagtgcaggcagatccctgaaggtcagcactcctgggtcttcatatgccaacaggggcgctcttgacactgtgccttcattttccagcccacagcctgggtctcagggatcttgaggggtagaacatgtctggttggggcttgggaataaacatgatctattgaaaaacctctgtatttatatatcaaattgtttctttttttcaggagttgaactgggaataggcaagtaccaggcaaagaaacacaccctttccttttttttttttttttttctttagagctgtggtcttgctctctcacccaggctggagtgcagtgttgcgatcacagctcactgcagcctcaaactcctgggctccaggagacctcctgcctcagcctcctgaatagctgggactacagtcgcgcaccaccacgcctggctaattttttatttttgtagaaatggggtattgctttgttgcccgtgctggcttcagccttctggtttcaagcagtcctcctgcctcagcttcccaaagtgctgggattacaggtgtgagccactgtgcccaacccagaaatacaccctttctgtgctgttttctcagcagggtgtgagctcacgggatacggtcctgccagactggccctcatagctggtcatgtgccagtcagagctgggtggggcttgcaggtcccggaaggtggtggtcttgacctggcagcagatgcttaaagaatgcctaaggtgggtggcagttggggagttcaagggtgaatgaggccagggcagcccccaggagctgaggccaactctttgagtcaggactgtgccgtgtgcccagggccttgcatgtgtgggccctcgagtgatttctactggcaggctgaaagccctgtgaggggcggctgtgggcggaggccacgcaggaagagtgcttaggagtaacttgtttctaacacctgtgtgctgagtgccaatgctgggtgtggtgttatgatatatattggttttcatccagcattcctgactcgtaactctcatagtccttgttccagtctttgttagaatactgggtatgttagggcttgggacaggcctctgacctctgggtatcctttcactaatgttcgcccacctttttcacagtgggtcctaaagaccttcccatgagagggtctcaatcctaggggaaggaatgttgatgtcatgaaccttccataaaaacccaagaggacagggttcagagagcttctggatagctgaacacctggcacttcctggagtgtggcgtgcccagggagggcacggaagctctgcactccttccccttccctcattccttgctctatgtgcatctcttcatctgtatcctttgcgatatcctttataataaaccggtaaacataa

SEQ ID NO: 32823 - protein, 812 aa, Artificial Sequence [sequence omitted]

SEQ ID NO: 32824 - protein, 288 aa, Artificial Sequence
  derived and/or modified sequence
MLDSFLLSLGFLVTEKTVNHLLQQEGLKTFNCILHAVPREERKKFPLSEGMCHLMKDLARTLLTVGDYDQQVAISEALCRLTIKKSRDELVHKWFDDEVIAEAFKEIKDREFETDSRRFLNHLNNRLGDQRRVYSFPCIAAFADEHEMRKPADEKLEKFWIDFNLGSQSVTFYIDNAENTLWDSVTLPKEAVMNFSITETEKIKIFIIYLKKPMIISYKEVMKIEIHFDLQFNISQVSIQALGEDKQMLPDQTKISSELFSKSDKEDRESPSGLERETEVSLQKTSLL

SEQ ID NO: 32825 - DNA, 2439 bp, Artificial Sequence
  derived and/or modified sequence
atgcaagcaaagaacaaagatgccctgcagcctattaaagaggacaggactggaaaagcccaggatgacgcattttggttgcagagcctgattactgacgcttttcatgataaaggatttcagaagatcaaggaatatttccagcagaaagaatctcatttccctcagaagtataataggttgctcctatacagattagaccggtctatcaataaagagctcgacaagaacgagtttcagtcagtgagcctgctgctgaaatgtatacagcgattcctggtggacgggctgaaagaagatgagcctctgcttataaggcagggacttattcctaaactggtcagttggttcgagaggacaaccggcatcctcacatctgaaggattagcatcagacacatcactcatatgtgttatcgaggacttttttgacaccgccttgataatcagcagatctagctctgaaggaaaaattcagatgcttgatagctttctgctatcactcggtttcctggtgaccgagaaaacggtaaatcacttgctgcagcaagagggactaaaaacttttaattgcatactgcacgccgtcccacgcgaggaacgaaagaagttcccgctgtctgagggaatgtgccatttaatgaaagaccttgctaggacgttactaaccgtgggcgactatgaccagcaggtggcaatttctgaagcactgtgcaggctaacaattaagaagagtcgagatgagctggttcataagtggtttgacgacgaggtgattgctgaggcgttcaaggaaattaaggatagggaattcgaaacagatagtcgtagattccttaatcacctgaataatagactcggggatcaaagaagagtctactccttcccttgtattgcagctttcgcagatgaacacgagatgcgaaagccagctgacgagaaactcgaaaagttttggattgattttaatttgggatcccagagtgtcactttttatattgacaacgccgagaacactttgtgggattctgtgaccctgccaaaggaggccgttatgaattttagcattactgaaaccgaaaaaatcaagatttttattatttatctcaagaaaccaatgatcatctcttacaaggaagtgatgaaaatcgagatacactttgaccttcagttcaacatctcacaggtttcgattcaggccctgggcgaagacaagcagatgttacctgatcagacaaagatttccagcgagctgttttccaaatctgacaaagaagaccgcgagagcccaagcgggctagagcgtgaaacagagcaagctgaagagtccaccaacatggtggaatttatgagcgctgaagacgatagatgcctaattacgttacacctcaacgatcagtctgagccacccgtgatcggagaacctgcttcagactcccaccttcaaccagtcccaccttttggggtccctgattttcctcaacagccaaaaagccactaccgcaaacatttatttagcgagtctaatcaggactccagcacatccgagttatcctggacatcaaaccagaagaagaaaagtttaaaatcatacagcagtcggaaaaagaccaggactcggtcaaacctgaggattctgcccgtgtttcccccgtcctccgggtcagggcacgagaaagatcaggcgaaattactgagcccttctgagaaggagattccggagcagaacaatactacttcaccgaagacatccgaacagaagtttcaggactctttcgcatttctgactgccgaggactccgcccagaagacagagctgcaagatccccacagcctgtctgagcttagttccctgaagcactcagaagatgaggaaaaaccaaaaatagtcaaccaagaaagtttaaccgagtcgacaagtctgaagcataaactgaggaatttagaggacaaggatatccctgagggtagcttcgcaaaatctcagcagagcagactggaggaggaggtggccccagggagtcctttttctattacagaagaaagggaattgcctgaagggatttcaacatcctcactcgaagtggtgcccgaaaacctcaatggtagtgcaatcctaccaacttttgagaacttcacaaaaaagaggaagagaaaatatgagctacggtatcggaaaaggccattcaacagcgagaatgctaaaaaggcaccggactgtttgatcaaactgctgaaccagatgcagctgttcaggctcaacaagttggagcggttccagaatctggtactgcaggaactgtccagcctcaaacaggacattcaggctctggagcatctggagaaggaggttctggagttttggggcaagcagagtgcagacctgcagtccttctgtgacctccaagtcctgcgcttcaacagcactcagaccagctag

SEQ ID NO: 32826 - DNA, 867 bp, Artificial Sequence
  derived and/or modified sequence
atgctggattcttttttactctccctgggatttctggttaccgaaaagaccgtgaaccaccttctccagcaagaggggctaaaaacttttaactgtatactccatgccgtgcctcgtgaggagagaaaaaaatttccccttagtgaaggtatgtgccatctaatgaaggacttggctaggacactgctaacagtgggtgactatgaccagcaagtggccatttctgaggcattgtgtcggctgactataaagaaatcaagggacgagcttgtccataagtggtttgatgacgaggtcatcgccgaagcttttaaggaaatcaaagatagggagttcgaaaccgattctcgtcggttcctcaaccacctgaataaccggcttggagaccaacgtcgggtgtattctttcccttgcatcgctgccttcgctgacgagcacgaaatgagaaaaccagcagatgaaaaacttgagaagttctggattgacttcaacctcgggtcccagtccgtaaccttttatatcgacaatgccgaaaacacgttgtgggactctgtaactctccccaaggaggccgtcatgaattttagtattactgaaacagagaaaatcaaaattttcattatttatttgaaaaagccgatgatcatttcatacaaggaggtgatgaagattgagattcactttgatctgcagtttaacatttctcaggttagcattcaggctctcggcgaagacaaacaaatgctgccagatcagacgaaaattagctctgaactgttctccaagagtgacaaggaggaccgggagtccccatctggactggagagagagaccgaagttagcctacagaagacatctcttctgtag

SEQ ID NO: 32827 - DNA, 2439 bp, Artificial Sequence
  derived and/or modified sequence
atgcaggccaagaacaaggatgccctgcagcccatcaaggaggacagaacaggcaaggcccaggatgatgccttctggctgcagagcctcatcacagatgccttccatgacaagggcttccagaagatcaaggagtacttccagcagaaggagagccacttcccccagaagtacaaccggctgctgctgtaccgcctggacaggagcatcaacaaggagctggacaagaatgagttccagagcgtgtccctgctgctgaagtgcatccagcgcttcctggtggatggcctgaaggaggatgagcccctgctgatccggcagggcctcatccccaagctggtgtcctggtttgagaggaccaccggcatcctgaccagcgagggcctggccagtgacaccagcctcatctgtgtgattgaggacttctttgacacagccctgatcatcagccgcagcagcagcgagggcaagatccagatgctggacagcttcctgctgagcctgggcttcctggtgacagagaagacagtgaaccacctgctgcagcaggagggcctgaagaccttcaactgcatcctgcatgctgtgccccgggaggagaggaagaagttccccctgtctgagggcatgtgccacctgatgaaggacctggcccggaccctgctgactgtgggggactatgaccagcaggtggccatcagcgaggccctgtgccgcctgaccatcaagaagagcagagatgagctggtgcacaagtggtttgatgatgaggtgattgctgaggccttcaaggagatcaaggaccgggagtttgaaacagacagccgccgcttcctgaaccacctgaacaaccggctgggggaccagaggagagtgtacagcttcccctgcatcgccgcctttgctgatgaacatgagatgaggaagccagcagatgagaagctggagaagttctggattgacttcaacctgggcagccagagcgtgaccttctacatcgacaatgctgagaacaccctgtgggacagcgtgaccctgcccaaggaggccgtgatgaacttcagcatcacagaaacagagaagatcaagatcttcatcatctacctgaagaagcccatgatcatctcctacaaggaggtgatgaagattgagatccactttgacctgcagttcaacatcagccaggtgtccatccaggccctgggggaggacaagcagatgctgcctgaccagaccaagatcagcagcgagctgttcagcaagagtgacaaggaggaccgggagagccccagcggcctggagcgggagacagagcaggccgaggagagcaccaacatggtggagttcatgtctgcagaagatgaccgctgcctgatcaccctgcacctgaatgaccagagcgagccccctgtgattggagagcccgccagtgacagccacctgcagcctgtgcccccatttggagtgcctgacttcccccagcagcccaagagccactacaggaagcacctgttcagcgagagcaaccaggacagcagcaccagcgagctgtcctggaccagcaaccagaagaagaagagcctgaagagctacagcagcaggaagaagaccaggaccaggagcaacctgcgcatcctgcctgtgttcccccccagcagcggcagcggccacgagaaggaccaggccaagctgctgagccccagcgagaaggagatccctgagcagaacaacaccaccagccccaagaccagcgagcagaagttccaggacagctttgccttcctgacagctgaggacagcgcccagaagacagagctgcaggacccccacagcctgtctgagctgagcagcctgaagcacagtgaagatgaggagaagcccaagatcgtgaaccaggagagcctgacagagagcaccagcctgaagcacaagctgaggaacctggaggacaaggacatccctgagggcagctttgccaagagccagcagagccggctggaggaggaggtggcccctggcagccccttcagcatcacagaggagcgggagctgcctgagggcatcagcaccagcagcctggaggtggtgcctgagaacctgaatggaagtgccatcctgcccacctttgagaacttcaccaagaagaggaagaggaaatatgagctgcgctacaggaagaggcccttcaacagtgaaaatgccaagaaggccccagactgcctgatcaagctgctgaaccagatgcagctgttccggctgaacaagctggagcgcttccagaacctggtgctgcaggagctgagcagcctgaagcaggacatccaggccctggagcacctggagaaggaggtgctggagttctggggcaagcagagcgctgacctgcagagcttctgtgacctgcaggtgctgcgcttcaacagcacccagaccagctag

SEQ ID NO: 32828 - DNA, 867 bp, Artificial Sequence
  derived and/or modified sequence
atgctggacagcttcctgctgagcctgggcttcctggtgacagagaagacagtgaaccacctgctgcagcaggagggcctgaagaccttcaactgcatcctgcatgctgtgccccgggaggagaggaagaagttccccctgtctgagggcatgtgccacctgatgaaggacctggcccggaccctgctgactgtgggggactatgaccagcaggtggccatcagcgaggccctgtgccgcctgaccatcaagaagagcagagatgagctggtgcacaagtggtttgatgatgaggtgattgctgaggccttcaaggagatcaaggaccgggagtttgaaacagacagccgccgcttcctgaaccacctgaacaaccggctgggggaccagaggagagtgtacagcttcccctgcatcgccgcctttgctgatgagcacgagatgaggaagccagcagatgagaagctggagaagttctggattgacttcaacctgggcagccagagcgtgaccttctacatcgacaatgctgagaacaccctgtgggacagcgtgaccctgcccaaggaggccgtgatgaacttcagcatcacagaaacagagaagatcaagatcttcatcatctacctgaagaagcccatgatcatctcctacaaggaggtgatgaagattgagatccactttgacctgcagttcaacatcagccaggtgtccatccaggccctgggggaggacaagcagatgctgcctgaccagaccaagatcagcagcgagctgttcagcaagagtgacaaggaggaccgggagagccccagcggcctggagcgggagacagaggtgtccctgcagaagaccagcctgctgtag

SEQ ID NO: 32829 - DNA, 2439 bp, Artificial Sequence
  derived and/or modified sequence
atgcaggccaagaacaaggacgccctgcagcccatcaaggaggaccgcactggcaaagcccaggacgacgctttttggcttcagtctctgattaccgacgcctttcatgataaaggctttcaaaagattaaggagtattttcagcaaaaggaatcccacttcccacagaagtacaatcggctgctgctgtacaggctcgaccgcagtatcaacaaggagcttgacaaaaatgagtttcagagcgttagtctgctgctcaaatgtatacaacgcttcctggtggatgggctgaaggaagatgagcctcttctaattcgtcagggacttattcccaaactagtcagctggttcgaaaggacgaccggaatattaacatccgaaggactggcctcagacacaagcctaatctgcgtgatcgaggattttttcgacactgctttgatcatcagccggagctcttcagaggggaagatccaaatgttggactcttttctgttgtctctggggtttctcgtgaccgagaagaccgtgaatcacctgctgcagcaggagggtttgaagactttcaactgtatactgcacgctgtcccacgtgaagagagaaagaagtttccgctgtctgaggggatgtgtcacctgatgaaggatttggctcgaacacttttgacagtcggggactacgaccaacaggtagctattagcgaggctctctgcaggcttaccatcaagaaatccagagacgagcttgtgcataagtggttcgatgatgaggtgattgccgaggcatttaaggagataaaggatcgggagttcgagacagattctagacgctttctcaatcatttgaataatagactcggcgatcagcggcgcgtttatagcttcccttgcatagcagcttttgccgacgagcatgagatgagaaaaccagccgacgagaaacttgagaagttttggattgattttaatctgggatcccaaagcgtcaccttctatattgacaatgcagagaacaccctctgggactccgtcaccctcccaaaggaagccgtcatgaacttttctataactgagaccgaaaagattaagattttcatcatttatcttaagaaaccgatgatcatcagttacaaggaggtcatgaagatcgagattcacttcgatcttcaatttaacattagtcaggtgtccattcaggccctgggcgaagataagcagatgctcccagaccagacaaagatttcctctgagctcttctccaaatctgacaaagaggatagggaatctccaagcggtcttgagcgcgaaacagagcaagccgaggagtcaacaaacatggtggagtttatgagtgccgaggatgatcgctgcttaattaccctccacctgaacgatcagtctgagcctcccgtgataggggagccagcctctgactcacatctccagcctgttcctccctttggcgtaccggatttcccacagcagccaaaatcacactacagaaagcacctattctctgagagtaatcaggatagctcaacttctgagttgtcctggacctctaatcaaaagaagaaaagcctcaagagttattcttcaagaaagaagacgcgcacaagaagcaatctccgtatcttacccgtcttccccccaagctccggcagcggccacgagaaggatcaggctaaactgttaagcccatccgagaaagagatcccagaacagaataacaccacatcccccaagacttcagagcagaaatttcaagatagttttgcttttctaaccgccgaagactctgcacagaagacagagttacaggacccacactcacttagcgagctcagttcccttaagcactccgaggatgaagagaaacccaagatcgtgaaccaggagtctctgacagaaagtacctcgttaaagcataaactccgaaacctggaggacaaggatatcccagagggaagttttgccaaatcccagcaatcacgattagaggaggaggtcgcaccggggagccctttctctataacagaggagcgggaactgcccgagggcatctccactagctctctcgaagttgtccccgagaatctgaacggctctgctatcctgccgaccttcgagaacttcacaaagaaacgaaaaaggaagtatgaactgagataccgaaaacgcccatttaatagcgagaatgccaagaaagccccagattgcctgatcaaactgctgaatcagatgcagctctttagattaaataaactggagcggtttcagaacctggtgctgcaggagctatctagcctaaagcaagatatccaggccctggagcacttggagaaagaagtgctcgaattctggggaaagcaatccgccgatctgcagagtttttgtgatctgcaggtgctacgatttaactcgacacagacttcctag

SEQ ID NO: 32830 - DNA, 867 bp, Artificial Sequence
  derived and/or modified sequence
atgctggacagcttcctgctgagcctgggcttcctggtgaccgagaagaccgtgaatcatctcttgcaacaggaggggctgaaaaccttcaattgcattttacacgccgtgcctagagaggagagaaaaaaatttcccctgagcgaaggaatgtgtcacctgatgaaagacctggcaaggaccctactgacggtcggcgattatgatcaacaggtcgcaatctcagaggccttatgtagattaaccataaagaagtcgagagatgaacttgtgcacaaatggttcgatgacgaggtgattgctgaagcttttaaagaaatcaaagatcgcgagttcgagaccgactctagaagatttctcaaccatttaaacaaccgtctgggggaccaacgtcgtgtgtacagcttcccctgcatcgccgcgttcgctgatgagcatgagatgaggaaacccgccgacgaaaagttagagaagttttggatagatttcaatctagggagccagagtgttaccttttacatcgacaacgccgaaaataccctgtgggacagtgttaccctaccgaaagaggctgtgatgaatttttctataacagagaccgagaagatcaagatcttcattatctatctgaaaaagccaatgattatttcctacaaggaagtgatgaaaatcgagatccacttcgacctgcagtttaacatatcccaggtgtccatccaggcccttggggaagataaacaaatgcttccggatcagacgaagatatcatccgaattgttcagtaagagcgacaaggaggatcgggagtcacccagtggcctggaaagagagacagaggtctccctccagaagacaagtctcctgtag

SEQ ID NO: 32831 - DNA, 3130 bp, Artificial Sequence
  derived and/or modified sequence
gagtgctggctttctcttaaagggtgagtgcgtgcgcccaggtggtttggcctgtgtgcgctagttacttgcacgcgcttcttgagtctcaaaacacagagctctagtaaacttcagggggcggattcgtcaattacagttgcggaagaagactcgactcgaagagcggtccgccaccagggctctttcggcagcgcccccagcgggcggggctcttgggcggggaagcaggagagggccgaccgagcgcaacaaagctgagcggcgcgtcgcttcaggaacgaagaagcctcgttatgcaagcgaaaaacaaagatgctttgcagcctattaaggaagacaggactgggaaggcccaggatgatgctttctggcttcaatcacttattacggatgcattccatgataaaggatttcagaaaataaaagaatactttcaacagaaagagagccactttcctcaaaaatataatcgtcttctattataccgtcttgacagatcaataaataaggaactagataaaaatgaatttcagtctgtgtcactgttgctgaaatgtattcagcgattcctcgtagatggcctgaaagaagatgaacctctgctaattcggcagggactgatcccaaagctagtttcctggtttgaaagaacaacaggaattctgacctcggaaggcctagcctcagacacgtcgctgatttgtgttatagaagatttctttgacactgcattgattatttccaggagtagtagtgaagggaaaattcagatgttggattccttcctacttagcttaggattcctggtgacagaaaagactgtaaatcatttgcttcaacaggagggcttgaagacttttaactgcattttgcacgctgtccctcgagaagagagaaaaaaattccctttgtcagaaggcatgtgtcatcttatgaaagaccttgcaaggacactcttgactgtgggtgattatgaccagcaggttgctatttctgaagcgctgtgtagactgacgattaaaaaatcaagggatgaacttgtccataaatggtttgatgatgaagtcattgctgaagctttcaaagaaattaaggatcgagaatttgagacggacagtagacgttttctcaatcacctaaacaacagacttggtgaccaaagaagggtgtattcatttccgtgtattgctgcttttgctgatgagcatgagatgagaaaaccagcggatgaaaaattagagaaattttggatcgacttcaacctaggaagtcagagtgtcactttttatatagacaatgctgagaatactctatgggactcagtgacacttccgaaggaagcggtgatgaatttcagcataacagaaacggagaagataaagatatttatcatttacctgaagaagcccatgattatcagctacaaagaagtcatgaaaatagaaatccattttgatttgcagttcaacatatcacaagtttccattcaagctttaggagaagacaaacagatgttgcctgaccagacgaaaatctcctcagaactttttagtaagtctgataaagaagacagggagagtcccagtggccttgaaagagaaacagagcaggcagaagaatccactaacatggtggagtttatgagtgctgaagatgaccgctgcctaataactctccacttaaatgaccaatctgagccacctgttattggggaacctgcctctgatagtcaccttcagccggtccctccgttcggggtccctgacttcccgcaacaacctaagtctcattacagaaaacatctcttctctgagagtaatcaagattcaagtaccagtgaactatcttggaccagtaaccagaaaaagaaatccctaaaatcatattccagtagaaagaagacaagaaccagaagtaatttgagaatcttgccagttttccctcccagtagtggcagtggccatgagaaagaccaagctaagcttctatcaccatcagagaaagaaatacccgagcaaaataacaccacatctccaaagacttctgaacaaaaattccaagatagttttgcttttttgactgctgaagattctgcccagaaaacagagcttcaagatcctcactcactgagtgagctctcttccttgaagcactcagaagatgaagaaaaacctaagattgtgaaccaagaatcactaacagaaagtactagcttgaaacataagctgagaaacttggaagacaaagacataccagaaggtagttttgctaagtcacaacaatcaagattggaagaagaggttgctccgggatcccctttctcaataacagaagaaagagagttgccagaaggaatttccacttcatccctagaagttgtgccagagaacttgaacggttctgccattctcccaacctttgaaaacttcactaaaaaacggaaaagaaaatatgagcttaggtacagaaagcgtccgtttaattcagaaaatgcaaagaaagcaccggattgcctaataaaacttttaaaccagatgcaactgttcagactcaataaactagagcgctttcaaaatttggttcttcaagagttgagcagtcttaagcaggatattcaggccctggaacaccttgagaaggaggttctggaattctgggggaaacagtctgctgatctgcaatctttctgtgatctgcaagtgctgaggttcaattcaactcagacttcataagaaagccaaagcctggttttatgattgcagccctcagcctgggctgcctgaagacgaagagaaagagcaaggttattgttggctcaggccttgttagccagacttcgtgctctgtacgcattcaatttcctcccctccaaacatcatccctgggaactgctgagttcagatagaatatatgttggtagtttgcagttgggttattatccatttgttcataaaaattaaccttttgtattaaaatttggtcagatagtattaatagaaagttcaggatgttaaacaacttggagtggtgttgctttttttttataaaagtaaaatggacttttttttgtttgagaaatgtcttcaagttttgtgtgaataaaacactttagcagcatctgtataaa

SEQ ID NO: 32832 - DNA, 1589 bp, Artificial Sequence
  derived and/or modified sequence
agcgcgcacgcaatcgcgtttccggagagacctggctgctgtgtcccgcggcttgcgctccgtagtggactccgcgggccttcggcagatgcaggcctggggtagtctcctttctggactgagaagagaagaatggagaagcccctcttcccattagtgcctttgcattggtttggctttggctacacagcactggttgtttctggtgggatcgttggctatgtaaaaacagaaaaacaaagatgctttgcagcctattaaggaagacaggactgggaaggcccaggatgatgctttctggcttcaatcacttattacggatgcattccatgataaaggatttcagaaaataaaagaatactttcaacagaaagagagccactttcctcaaaaatataatcgtcttctattataccgtcttgacagatcaataaataaggaactagataaaaatgaatttcagtctgtgtcactgttgctgaaatgtattcagcgattcctcgtagatggcctgaaagaagatgaacctctgctaattcggcagggactgatcccaaagctagtttcctggtttgaaagaacaacaggaattctgacctcggaaggcctagcctcagacacgtcgctgatttgtgttatagaagatttctttgacactgcattgattatttccaggagtagtagtgaagggaaaattcagatgttggattccttcctacttagcttaggattcctggtgacagaaaagactgtaaatcatttgcttcaacaggagggcttgaagacttttaactgcattttgcacgctgtccctcgagaagagagaaaaaaattccctttgtcagaaggcatgtgtcatcttatgaaagaccttgcaaggacactcttgactgtgggtgattatgaccagcaggttgctatttctgaagcgctgtgtagactgacgattaaaaaatcaagggatgaacttgtccataaatggtttgatgatgaagtcattgctgaagctttcaaagaaattaaggatcgagaatttgagacggacagtagacgttttctcaatcacctaaacaacagacttggtgaccaaagaagggtgtattcatttccgtgtattgctgcttttgctgatgagcatgagatgagaaaaccagcggatgaaaaattagagaaattttggatcgacttcaacctaggaagtcagagtgtcactttttatatagacaatgctgagaatactctatgggactcagtgacacttccgaaggaagcggtgatgaatttcagcataacagaaacggagaagataaagatatttatcatttacctgaagaagcccatgattatcagctacaaagaagtcatgaaaatagaaatccattttgatttgcagttcaacatatcacaagtttccattcaagctttaggagaagacaaacagatgttgcctgaccagacgaaaatctcctcagaactttttagtaagtctgataaagaagacagggagagtcccagtggccttgaaagagaaacagaagtctcattacagaaaacatctcttctctgagagtaatcaagattcaagtacc

SEQ ID NO: 32833 - DNA, 2439 bp, Artificial Sequence
  derived and/or modified sequence
atgcaagcaaagaacaaagatgcacttcagccgataaaggaagaccggactgggaaagcacaggatgatgcgttttggctacagtcactgattactgacgccttccacgataaaggcttccaaaagatcaaggaatactttcagcagaaagaaagtcatttccctcaaaaatacaatcggctgctcctttacagattagaccgaagcataaacaaagaactggacaagaacgagtttcagtctgtgagtctgctgctgaagtgcatccagcggtttttagtcgacgggttaaaggaagatgaacccctgttaattagacagggcctgattccgaagcttgtgagctggttcgaacggaccaccggaatcctgacatccgaaggactcgcttctgatacgtcgttgatctgtgtgatcgaagacttttttgatactgctctcattatttccagaagttcatcggaaggaaaaatccagatgcttgactcttttctcctgtctttaggttttctggtgaccgaaaagaccgtcaaccacctgctgcagcaggagggcctaaagactttcaactgcattcttcatgccgttcctcgcgaagagcgcaaaaagttccccctgtcggaaggaatgtgccaccttatgaaggatctggccaggactctcctgaccgtgggtgactacgaccaacaggtcgccatcagcgaggccctctgtcggctgaccatcaaaaagtctcgggatgaattagtacataaatggtttgacgatgaagttatcgctgaagcgtttaaggaaatcaaggacagggaattcgaaaccgactcacggaggtttttaaatcaccttaacaacaggctcggcgatcaacgacgggtctactcctttccatgcatcgctgcctttgccgatgagcatgaaatgagaaagcccgcagatgaaaagcttgagaagttttggatcgatttcaatttgggatcacagtccgttactttctacatagacaacgccgaaaataccctttgggactctgttacactgcctaaagaagcggtcatgaatttttcaattactgagacagagaaaataaagatttttatcatctatctgaagaaacctatgatcatctcctacaaagaagtgatgaaaattgagattcactttgatctgcagtttaatattagtcaggtgtctatccaagcgttgggagaggacaagcagatgctccccgaccaaacaaaaatcagcagcgagctcttcagcaaatctgataaagaggaccgggaatccccctcagggttagagagagaaacagaacaggcagaagagagcacaaatatggtggagttcatgtccgccgaagatgaccgttgtttgattactctccaccttaatgaccagtccgaacccccagtcatcggcgaaccagcctccgattcccacttgcaacctgtgcctccttttggagtgcctgatttcccacagcagcccaagtctcattaccgtaaacaccttttcagtgaaagcaaccaggatagcagtacatccgaactgagctggacgagcaaccagaagaaaaagtccctgaaatcatattcttccagaaaaaagactcgcaccagatctaacttgcggatattgccagttttccccccatctagcggctctggccatgaaaaagaccaggcaaaacttctgtctccatctgagaaggagatccccgaacagaacaatacaacaagccccaagacatcggaacaaaagttccaagactccttcgccttcctgaccgccgaggacagtgcccaaaagaccgagctccaggacccccactccctctcagagttgagctccctgaagcatagcgaggatgaagagaagcctaagattgtcaaccaagagtctctcactgaatcaacttctctgaagcataaattacggaatctagaagacaaggacattccggagggatccttcgccaagtctcagcagtcccgcctggaggaggaagtggctcctggctcaccattttctatcaccgaggaacgagagctgcccgaggggatctctacatctagcctggaagttgttcctgagaatctgaacggatctgcaattctccccaccttcgaaaactttaccaaaaaacggaaacggaagtatgaactacgctacagaaagcgccctttcaacagtgaaaacgctaagaaagcccctgattgcctcatcaaactcctgaatcagatgcaactcttcaggctgaataaattagaacggttccagaatctagtactccaggaactctccagcttgaaacaggatatccaagccctcgagcatctcgaaaaggaggtgttagaattttgggggaagcagtctgccgacttgcaatcattttgtgacttgcaggtgcttaggtttaactccacccaaacaagctag

SEQ ID NO: 32834 - DNA, 867 bp, Artificial Sequence
  derived and/or modified sequence
atgctcgatagtttcctcctctccctcggctttttagtgacggaaaagaccgttaaccatctgctgcaacaagagggcttgaaaacattcaactgcatccttcacgcagtgccacgggaagagcgtaaaaaatttcctctgtcagaaggcatgtgccacctgatgaaggatctggccaggacactcctcacggtgggcgactacgatcagcaggtggccatatctgaagccctatgcagactcacaattaaaaaatccagggatgagttagttcacaaatggtttgacgacgaggtcatcgcagaggcgtttaaggagattaaagaccgcgaatttgaaaccgattctcgaaggtttctgaaccatcttaataacaggctgggtgatcaaaggagagtatacagtttcccatgtatcgcagctttcgctgatgagcacgagatgcgtaaaccagccgacgaaaaattggagaaattttggatcgatttcaatttgggttcccagagcgtgacattctacattgacaacgctgagaataccctatgggactccgttacgttacctaaagaagctgtgatgaatttctctatcactgagactgaaaaaattaagattttcataatctatttgaaaaagcctatgatcatatcatacaaggaagttatgaagattgaaatccacttcgacctccagtttaatatcagccaggtttccattcaggccttgggagaggacaagcagatgttacccgatcagaccaagataagttctgagctgtttagtaagtctgacaaggaggatcgggagagtccgtcaggcctggagagggagaccgaggtctccctgcagaagactagtcttctatag

SEQ ID NO: 32835 - DNA, 2439 bp, Artificial Sequence
  derived and/or modified sequence
atgcaggccaagaacaaggacgccctgcagcccatcaaggaggacagaaccggcaaggcccaggacgacgccttctggctgcagagcctgatcaccgacgccttccacgacaagggcttccagaagatcaaggagtacttccagcagaaggagagccacttcccccagaagtacaacagactgctgctgtacagactggacagaagcatcaacaaggagctggacaagaacgagttccagagcgtgagcctgctgctgaagtgcatccagagattcctggtggacggcctgaaggaggacgagcccctgctgatcagacagggcctgatccccaagctggtgagctggttcgagagaaccaccggcatcctgaccagcgagggcctggccagcgacaccagcctgatctgcgtgatcgaggacttcttcgacaccgccctgatcatcagcagaagcagcagcgagggcaagatccagatgctggacagcttcctgctgagcctgggcttcctggtgaccgagaagaccgtgaaccacctgctgcagcaggagggcctgaagaccttcaactgcatcctgcacgccgtgcccagagaggagagaaagaagttccccctgagcgagggcatgtgccacctgatgaaggacctggccagaaccctgctgaccgtgggcgactacgaccagcaggtggccatcagcgaggccctgtgcagactgaccatcaagaagagcagagacgagctggtgcacaagtggttcgacgacgaggtgatcgccgaggccttcaaggagatcaaggacagagagttcgagaccgacagcagaagattcctgaaccacctgaacaacagactgggcgaccagagaagagtgtacagcttcccctgcatcgccgccttcgccgacgagcacgagatgagaaagcccgccgacgagaagctggagaagttctggatcgacttcaacctgggcagccagagcgtgaccttctacatcgacaacgccgagaacaccctgtgggacagcgtgaccctgcccaaggaggccgtgatgaacttcagcatcaccgagaccgagaagatcaagatcttcatcatctacctgaagaagcccatgatcatcagctacaaggaggtgatgaagatcgagatccacttcgacctgcagttcaacatcagccaggtgagcatccaggccctgggcgaggacaagcagatgctgcccgaccagaccaagatcagcagcgagctgttcagcaagagcgacaaggaggacagagagagccccagcggcctggagagagagaccgagcaggccgaggagagcaccaacatggtggagttcatgagcgccgaggacgacagatgcctgatcaccctgcacctgaacgaccagagcgagccccccgtgatcggcgagcccgccagcgacagccacctgcagcccgtgccccccttcggcgtgcccgacttcccccagcagcccaagagccactacagaaagcacctgttcagcgagagcaaccaggacagcagcaccagcgagctgagctggaccagcaaccagaagaagaagagcctgaagagctacagcagcagaaagaagaccagaaccagaagcaacctgagaatcctgcccgtgttcccccccagcagcggcagcggccacgagaaggaccaggccaagctgctgagccccagcgagaaggagatccccgagcagaacaacaccaccagccccaagaccagcgagcagaagttccaggacagcttcgccttcctgaccgccgaggacagcgcccagaagaccgagctgcaggacccccacagcctgagcgagctgagcagcctgaagcacagcgaggacgaggagaagcccaagatcgtgaaccaggagagcctgaccgagagcaccagcctgaagcacaagctgagaaacctggaggacaaggacatccccgagggcagcttcgccaagagccagcagagcagactggaggaggaggtggcccccggcagccccttcagcatcaccgaggagagagagctgcccgagggcatcagcaccagcagcctggaggtggtgcccgagaacctgaacggcagcgccatcctgcccaccttcgagaacttcaccaagaagagaaagagaaagtacgagctgagatacagaaagagacccttcaacagcgagaacgccaagaaggcccccgactgcctgatcaagctgctgaaccagatgcagctgttcagactgaacaagctggagagattccagaacctggtgctgcaggagctgagcagcctgaagcaggacatccaggccctggagcacctggagaaggaggtgctggagttctggggcaagcagagcgccgacctgcagagcttctgcgacctgcaggtgctgagattcaacagcacccagaccagctag

SEQ ID NO: 32836 - DNA, 867 bp, Artificial Sequence
  derived and/or modified sequence
atgctggacagcttcctgctgagcctgggcttcctggtgaccgagaagaccgtgaaccacctgctgcagcaggagggcctgaagaccttcaactgcatcctgcacgccgtgcccagagaggagagaaagaagttccccctgagcgagggcatgtgccacctgatgaaggacctggccagaaccctgctgaccgtgggcgactacgaccagcaggtggccatcagcgaggccctgtgcagactgaccatcaagaagagcagagacgagctggtgcacaagtggttcgacgacgaggtgatcgccgaggccttcaaggagatcaaggacagagagttcgagaccgacagcagaagattcctgaaccacctgaacaacagactgggcgaccagagaagagtgtacagcttcccctgcatcgccgccttcgccgacgagcacgagatgagaaagcccgccgacgagaagctggagaagttctggatcgacttcaacctgggcagccagagcgtgaccttctacatcgacaacgccgagaacaccctgtgggacagcgtgaccctgcccaaggaggccgtgatgaacttcagcatcaccgagaccgagaagatcaagatcttcatcatctacctgaagaagcccatgatcatcagctacaaggaggtgatgaagatcgagatccacttcgacctgcagttcaacatcagccaggtgagcatccaggccctgggcgaggacaagcagatgctgcccgaccagaccaagatcagcagcgagctgttcagcaagagcgacaaggaggacagagagagccccagcggcctggagagagagaccgaggtgagcctgcagaagaccagcctgctgtag

SEQ ID NO: 32837 - DNA, 783 bp, Artificial Sequence
  derived and/or modified sequence
atgaaggtggaagtgttgccagctctaaccgacaactacatgtatctggttattgatgacgagaccaaagaagccgccattgtggaccctgtgcagccccaaaaagtggtcgatgctgcgcgcaagcatggggtgaaactgacaaccgtgctgaccacacaccatcactgggaccacgctggcggtaatgaaaagctcgtgaagctcgagagtgggctgaaagtttacggcggcgacgatagaatcggcgccctcacccacaaaatcactcacctgagcaccctacaggtgggttccttgaatgttaaatgtttagcaacaccatgccacactagcggtcatatttgctactttgtcagtaagcctggcggcagcgaacctcctgcagtgtttaccggagatactttatttgttgccggttgtggcaagttttatgagggtactgccgacgaaatgtgcaaggcattgcttgaagtactggggaggcttccgccggatactcgggtgtactgcggacacgagtatactatcaacaacctgaagtttgcaagacacgtggaacctggcaatgccgccattcgcgaaaagctagcctgggccaaggaaaagtatagcataggcgagcctacagtcccctcaactttggctgaagagttcacctacaacccgtttatgcgggttagggaaaaaacagtacagcaacatgccggcgaaacggacccagtcactacgatgcgggcggtgcgtcgcgaaaaggatcagttcaagatgcctcgggattag

SEQ ID NO: 32838 - DNA, 783 bp, Artificial Sequence
  derived and/or modified sequence
atgaaggtggaggtgctgcctgccctgacagacaactacatgtacctggtgattgatgatgagaccaaggaggccgccatcgtggaccctgtgcagccccagaaggtggtggatgctgccaggaagcatggagtgaagctgaccaccgtgctgaccacccaccaccactgggaccacgccggcggcaatgagaagctggtgaagctggagagcggcctgaaggtgtatggaggagatgaccgcatcggggccctgacccacaagatcacccacctgagcaccctgcaggtgggcagcctgaatgtgaagtgcctggccaccccctgccacaccagcggccacatctgctactttgtgtccaagccaggcggcagcgagcccccagctgtgttcaccggggacaccctgtttgtggccggctgcggcaagttctatgagggcacagcagatgagatgtgcaaggccctgctggaggtgctgggccgcctgcccccagacaccagggtgtactgcggccacgagtacaccatcaacaacctgaagtttgcccggcacgtggagcctggaaatgctgccatccgggagaagctggcctgggccaaggagaagtacagcatcggggagcccaccgtgcccagcaccctggccgaggagttcacctacaaccccttcatgagggtgcgggagaagacagtgcagcagcacgccggggagacagatcctgtgaccaccatgagagctgtgagaagagagaaggaccagttcaagatgccccgggactag

SEQ ID NO: 32839 - DNA, 783 bp, Artificial Sequence
  derived and/or modified sequence
atgaaggtggaggtgctgcccgccctgaccgacaactacatgtacctcgttattgacgatgaaacaaaggaggctgcaatcgtcgatcccgtgcagccccagaaggtagtcgatgccgcccgcaaacacggcgtgaagctgacaaccgtccttaccacccaccatcactgggatcacgctggtggaaatgaaaagctggtcaagctcgaatcaggtctgaaggtctatgggggcgacgatcggattggcgcattgacacacaagatcacccacctgagtacactccaggtcggatccctaaacgtgaaatgtctcgctacaccctgccatacctccggacacatttgctattttgtatcaaagccgggtggctctgagcccccagccgtctttactggagatacattgtttgtggcgggctgcggaaaattttacgaaggtaccgctgacgagatgtgtaaagctctcctggaagtgctgggccgcctcccccccgatacaagggtgtattgtggacacgaatataccatcaataatctcaagtttgcgagacatgtggagccaggcaatgccgcgataagggagaagctggcatgggctaaggagaagtattccatcggcgagccaaccgttccttctacactggcagaggagttcacctataacccattcatgcgggtgcgcgagaagactgtgcagcagcacgcaggggaaaccgaccccgtgaccactatgagggcggtgaggcgggaaaaagatcaatttaagatgcctcgggactag

SEQ ID NO: 32840 - DNA, 783 bp, Artificial Sequence
  derived and/or modified sequence
atgaaggtagaggtgctgcctgcactcaccgataactacatgtatctcgtgatagatgatgaaactaaagaggctgctattgtcgatccagtgcagccccagaaggtagtggacgcagccagaaaacatggtgtcaagctgactaccgtgttgacaacacatcaccactgggatcatgcaggtggcaatgaaaagctcgtcaagttggagtcaggcttaaaagtgtatgggggagatgataggattggagcactgacacacaagatcacacacctgagtacattacaggtcgggagtctaaacgtcaagtgcctggccaccccctgtcacaccagcggacacatctgctactttgttagcaagcccggaggaagtgaacctcccgctgtcttcactggtgacacgctgtttgtggccggatgcggcaaattctacgaagggacagccgacgagatgtgcaaggctcttttggaagtcctgggcaggctgcctcccgatacccgggtgtactgcggtcatgaatataccatcaataacttaaaattcgctcggcatgtcgaacccggaaacgcggctatcagagagaagttggcttgggcaaaggagaagtactccatcggggaacctactgttccaagtaccctggcggaagaattcacttacaaccccttcatgcgtgtgagagaaaagaccgtgcagcagcatgctggagagacggaccctgtgactacaatgagggccgtgcgcagagaaaaagaccagttcaagatgcctcgcgactag

SEQ ID NO: 32841 - DNA, 783 bp, Artificial Sequence
  derived and/or modified sequence
atgaaggtggaggtgctgcccgccctgaccgacaactacatgtacctggtgatcgacgacgagaccaaggaggccgccatcgtggaccccgtgcagccccagaaggtggtggacgccgccagaaagcacggcgtgaagctgaccaccgtgctgaccacccaccaccactgggaccacgccggcggcaacgagaagctggtgaagctggagagcggcctgaaggtgtacggcggcgacgacagaatcggcgccctgacccacaagatcacccacctgagcaccctgcaggtgggcagcctgaacgtgaagtgcctggccaccccctgccacaccagcggccacatctgctacttcgtgagcaagcccggcggcagcgagccccccgccgtgttcaccggcgacaccctgttcgtggccggctgcggcaagttctacgagggcaccgccgacgagatgtgcaaggccctgctggaggtgctgggcagactgccccccgacaccagagtgtactgcggccacgagtacaccatcaacaacctgaagttcgccagacacgtggagcccggcaacgccgccatcagagagaagctggcctgggccaaggagaagtacagcatcggcgagcccaccgtgcccagcaccctggccgaggagttcacctacaaccccttcatgagagtgagagagaagaccgtgcagcagcacgccggcgagaccgaccccgtgaccaccatgagagccgtgagaagagagaaggaccagttcaagatgcccagagactag

SEQ ID NO: 32842 - protein, 567 aa, Artificial Sequence
  derived and/or modified sequence
MDGSRRVRATSVLPRYGPPCLFKGHLSTKSNAAVDCSVPVSVSTSIKYADQQRREKLKKELAQCEKEFKLTKTAMRANYKNNSKSLFNTLQKPSGEPQIEDDMLKEEMNGFSSFARSLVPSSERLHLSLHKSSKVITNGPEKNSSSSPSSVDYAASGPRKLSSGALYGRRPRSTFPNSHRFQLVISKAPSGDLLDKHSELFSNKQLPFTPRTLKTEAKSFLSQYRYYTPAKRKKDFTDQRIEAETQTELSFKSELGTAETKNMTDSEMNIKQASNCVTYDAKEKIAPLPLEGHDSTWDEIKDDALQHSSPRAMCQYSLKPPSTRKIYSDEEELLYLSFIEDVTDEILKLGLFSNRFLERLFERHIKQNKHLEEEKMRHLLHVLKVDLGCTSEENSVKQNDVDMLNVFDFEKAGNSEPNELKNESEVTIQQERQQYQKALDMLLSAPKDENEIFPSPTEFFMPIYKSKHSEGVIIQQVNDETNLETSTLDENHPSISDSLTDRETSVNVIEGDSDPEKVEISNGLCGLNTSPSQSVQFSSVKGDNNHDMELSTLKIMEMSIEDCPLDV

SEQ ID NO: 32843 - DNA, 1704 bp, Artificial Sequence
  derived and/or modified sequence
atggacggcagcagaagagtgagagccaccagcgtgctgcccagatacggccccccctgcctgttcaagggccacctgagcaccaagagcaacgccgccgtggactgcagcgtgcccgtgagcgtgagcaccagcatcaagtacgccgaccagcagagaagagagaagctgaagaaggagctggcccagtgcgagaaggagttcaagctgaccaagaccgccatgagagccaactacaagaacaacagcaagagcctgttcaacaccctgcagaagcccagcggcgagccccagatcgaggacgacatgctgaaggaggagatgaacggcttcagcagcttcgccagaagcctggtgcccagcagcgagagactgcacctgagcctgcacaagagcagcaaggtgatcaccaacggccccgagaagaacagcagcagcagccccagcagcgtggactacgccgccagcggccccagaaagctgagcagcggcgccctgtacggcagaagacccagaagcaccttccccaacagccacagattccagctggtgatcagcaaggcccccagcggcgacctgctggacaagcacagcgagctgttcagcaacaagcagctgcccttcacccccagaaccctgaagaccgaggccaagagcttcctgagccagtacagatactacacccccgccaagagaaagaaggacttcaccgaccagagaatcgaggccgagacccagaccgagctgagcttcaagagcgagctgggcaccgccgagaccaagaacatgaccgacagcgagatgaacatcaagcaggccagcaactgcgtgacctacgacgccaaggagaagatcgcccccctgcccctggagggccacgacagcacctgggacgagatcaaggacgacgccctgcagcacagcagccccagagccatgtgccagtacagcctgaagccccccagcaccagaaagatctacagcgacgaggaggagctgctgtacctgagcttcatcgaggacgtgaccgacgagatcctgaagctgggcctgttcagcaacagattcctggagagactgttcgagagacacatcaagcagaacaagcacctggaggaggagaagatgagacacctgctgcacgtgctgaaggtggacctgggctgcaccagcgaggagaacagcgtgaagcagaacgacgtggacatgctgaacgtgttcgacttcgagaaggccggcaacagcgagcccaacgagctgaagaacgagagcgaggtgaccatccagcaggagagacagcagtaccagaaggccctggacatgctgctgagcgcccccaaggacgagaacgagatcttccccagccccaccgagttcttcatgcccatctacaagagcaagcacagcgagggcgtgatcatccagcaggtgaacgacgagaccaacctggagaccagcaccctggacgagaaccaccccagcatcagcgacagcctgaccgacagagagaccagcgtgaacgtgatcgagggcgacagcgaccccgagaaggtggagatcagcaacggcctgtgcggcctgaacaccagccccagccagagcgtgcagttcagcagcgtgaagggcgacaacaaccacgacatggagctgagcaccctgaagatcatggagatgagcatcgaggactgccccctggacgtgtag

SEQ ID NO: 32844 - DNA, 1704 bp, Artificial Sequence
  derived and/or modified sequence
atggacggctcaaggagagtgagagcaacgtctgttctacccaggtacggccccccctgtttatttaagggccatttgtctacaaaatctaacgcagctgtggactgtagtgtgccagtatccgtcagcacgagtatcaagtatgcagaccagcaacggagggagaagctgaaaaaggagctcgctcagtgtgagaaggagtttaagttgacaaagactgcaatgcgagccaactacaagaacaactcgaaaagcctgttcaacactcttcagaagccttctggagaaccccaaattgaagatgacatgctcaaggaagaaatgaacggcttctcaagttttgcccgatcattagtcccaagttctgaacgcctgcacctgtcactccacaagtctagcaaggtcatcacaaacgggcccgagaaaaactcctcttcttctcccagcagcgtcgattatgctgcgagcgggcccagaaaactgtccagcggtgccttatacgggcgacggcctcgttccacattccccaattcccatcggtttcaacttgtgatctcaaaagctccctcaggagacctgctggacaagcacagcgagctgttttcaaataaacaactgccatttacaccgcgtactctgaagacggaggccaagtcattccttagccagtaccgctattatacgcctgccaagcggaagaaagactttacagaccagaggatagaggccgaaacacaaaccgagttgtcattcaaaagcgaacttggaactgctgagactaaaaatatgaccgattcggagatgaatataaaacaagccagcaattgtgtcacctacgacgctaaagagaagatcgccccacttccactggaagggcatgactcaacgtgggatgagataaaagacgatgccctccagcatagttctcctcgggctatgtgccagtattcccttaagccaccttctacccgcaaaatttactccgacgaggaagagctcctgtacctatcttttattgaggacgtgactgatgagatcctgaaactgggacttttctctaatcgctttctggagagactcttcgagagacacatcaagcagaacaagcatttagaggaagagaagatgaggcacttgctccatgtgctcaaggtggacctcgggtgcaccagcgaggagaactccgtaaagcaaaatgatgtcgatatgctgaatgtattcgacttcgaaaaggcaggcaactctgaacctaacgagctgaagaatgagtctgaggtcaccatccagcaagaaagacagcagtaccagaaggccctggacatgctactgagcgccccaaaagatgagaacgaaatatttccgagtccaacggagttcttcatgcccatatacaagtcaaaacacagtgagggtgttataatccagcaagtcaatgacgagacaaatcttgagacttcaactttggacgagaaccatccatctatctcggacagtctcaccgatcgcgagaccagcgtgaatgtgatcgagggtgactcggatcctgagaaggttgagatttcaaatggcctctgcgggctaaatacctcgccaagccaaagtgtgcagttctcatccgtcaaaggagacaataatcacgacatggagctttctacactcaaaataatggagatgtccattgaggactgccctttggatgtttag

SEQ ID NO: 32845 - DNA, 1704 bp, Artificial Sequence
  derived and/or modified sequence
atggacggcagtcgaagggtgagggcaaccagtgtgttaccgcgctacgggcctccttgtctgtttaaaggccacctttccaccaagtcaaatgcggctgtggactgctctgtgcctgtcagcgtctctacaagtattaaatatgcagaccagcagcgtcgagagaagctgaagaaagagctcgcgcagtgcgagaaagagttcaagctgactaaaacagcgatgcgcgcaaattataaaaataactccaaatcacttttcaatacactgcaaaaaccttccggagaaccacaaatcgaggacgatatgctcaaggaagaaatgaacggatttagctcattcgctcgcagtctggtgccgtcttcagagaggttacacctgtcactccataagtcctcaaaagtgataaccaacggtcccgaaaagaattccagttcctccccctcatctgtggattatgcggccagcggtccacgaaaactgtcatctggggccttgtatggccgcagaccacggtctaccttcccaaacagccatcgatttcagttggtaattagtaaggccccttcaggcgacctgctcgacaagcactctgagttattttcaaacaaacagctgccattcacccctcggaccctaaagaccgaggctaaatcctttctgtcacagtaccgctactacacccctgctaagaggaaaaaggactttaccgaccagagaatcgaggccgaaacacagaccgagctgtcttttaagtcagagcttggaaccgccgagacgaagaatatgaccgattccgaaatgaacataaagcaggcctccaactgtgtcacctacgatgcgaaggagaagatcgccccgctgcctctcgaaggccacgacagcacctgggacgaaatcaaagacgacgccctccaacacagctcccctagggctatgtgccaatatagtctgaagccgccatctacgaggaagatctactccgacgaagaggagctgttgtacctctcttttatagaggatgtcacagacgagatattgaaactagggctgtttagtaacagattcttggaaagactcttcgagcggcacatcaaacagaacaaacacctcgaagaggagaaaatgcgacatctgttgcacgtgttaaaggtggatctggggtgcactagcgaggagaacagcgtgaaacagaacgatgtggatatgctgaatgtgtttgacttcgaaaaggcaggcaatagcgaaccgaacgagctgaaaaacgaaagtgaggtgaccatccagcaggagaggcagcagtaccaaaaagctctggatatgcttctgtctgctccgaaggacgaaaatgaaatattcccaagtcccaccgagttttttatgccaatctacaagtcaaaacactccgagggtgtaatcatccagcaggtaaacgacgagacaaatcttgagactagcactttggatgagaaccacccctctatctccgattccctaactgaccgtgagacgtcagttaatgtcattgagggtgactctgaccctgagaaggttgagatttccaatggattatgcggtctgaatacctctcctagtcagtccgtgcaattttctagcgtcaaaggcgacaacaaccatgatatggagctctccacccttaaaataatggagatgagtatcgaagactgtccactggacgtgtag

SEQ ID NO: 32846 - DNA, 1704 bp, Artificial Sequence
  derived and/or modified sequence
atggatggcagcagaagagtgcgggccacctctgtgctgcccaggtatggccccccctgcctcttcaagggccacctgagcaccaagagcaatgctgctgtggactgcagcgtgcctgtgtctgtgtccaccagcatcaagtatgctgaccagcagaggcgggagaagctgaagaaggagctggcccagtgtgagaaggagttcaagctgaccaagacagccatgagggccaactacaagaacaacagcaagagcctcttcaacaccctgcagaagcccagcggggagccccagattgaagatgacatgctgaaggaggagatgaatggcttcagcagctttgcccggagcctggtgcccagcagcgagcggctgcacctgagcctgcacaagagcagcaaggtgatcaccaacggccctgagaagaacagcagcagcagccccagctctgtggactatgctgccagcggccccaggaagctgagcagcggggccctgtatggaagaagacccaggagcaccttccccaacagccaccgcttccagctggtgatcagcaaggcccccagcggggacctgctggacaagcacagcgagctgttcagcaacaagcagctgcccttcacccccaggaccctgaagacagaggccaagagcttcctgagccagtaccgctactacaccccagccaagaggaagaaggacttcacagaccagagaattgaagctgagacccagacagagctgtccttcaagtctgagctgggcacagctgagaccaagaacatgacagacagcgagatgaacatcaagcaggccagcaactgtgtgacctatgatgccaaggagaagatcgcccccctgcccctggagggccatgacagcacctgggatgagatcaaggatgatgccctgcagcacagcagcccccgggccatgtgccagtacagcctgaagccacccagcaccaggaagatctacagtgatgaggaggagctgctgtacctgtccttcattgaagatgtgacagatgagatcctgaagctgggcctcttcagcaaccgcttcctggagcggctgtttgagcggcacatcaagcagaacaagcacctggaggaggagaagatgaggcacctgctgcacgtgctgaaggtggacctgggctgcaccagtgaagaaaattctgtgaagcagaatgatgtggacatgctgaatgtgtttgattttgagaaggccggcaacagcgagcccaatgagctgaagaatgaaagtgaggtgaccatccagcaggagcggcagcagtaccagaaggccctggacatgctgctgagcgcccccaaggatgaaaatgagatcttccccagccccacagagttcttcatgcccatctacaagagcaagcacagcgagggcgtcatcatccagcaggtgaatgatgagaccaacctggagaccagcaccctggatgagaaccaccccagcatcagtgacagcctgacagaccgggagacctctgtgaatgtgattgaaggagacagcgaccctgagaaggtggagatcagcaatggcctgtgtggcctgaacaccagccccagccagagcgtgcagttcagctctgtgaagggggacaacaaccacgacatggagctgagcaccctgaagatcatggagatgagcattgaggactgccccctggatgtgtag

SEQ ID NO: 32847 - DNA, 1704 bp, Artificial Sequence
  derived and/or modified sequence
atggacggcagccggcgggtgcgggccaccagcgtgctgccccggtacggccctccctgcctctttaaaggccacctctccaccaagtcaaacgctgccgtggattgcagcgtgcccgtgtccgtctctacctcaataaaatacgcggaccagcagaggcgagaaaaactaaaaaaggaactcgcccagtgcgagaaggagtttaagctgactaagacagctatgcgggcaaattataaaaataatagcaaatcacttttcaacacactgcagaagccttccggcgagccccaaatcgaggacgatatgttgaaggaggaaatgaatggttttagcagcttcgcacggagcttggtacccagctctgagaggctgcaccttagcctgcataaaagcagtaaagtcattaccaacgggccagagaaaaattcaagctcgagtccatcctccgttgactacgctgcctccggaccccgcaagctgtcatcaggtgccctgtacggccggagacccaggtccaccttccccaacagccatagattccagctggtgatttccaaggctcccagcggggacctcttggataagcacagcgagctgttcagtaataagcagctgccatttactccacgcacactgaaaaccgaggcaaagagcttcctatcccagtaccggtattataccccagctaaaagaaagaaagactttaccgaccaacgtatagaggctgagacccagacagagttgtctttcaagtccgagttaggcacggccgagaccaaaaatatgactgacagcgagatgaatattaagcaggcatcgaactgcgtgacctatgacgcaaaggagaagattgcgccactgccgctggaaggccacgattcgacatgggacgagatcaaggacgatgcattacagcacagtagtcccagggctatgtgtcagtacagcttaaaaccacccagcacaaggaagatctattccgatgaagaggagctactttacctgtctttcatcgaagatgttactgacgaaatcctcaaactgggtttattcagcaaccgattcctagaaagactgttcgaaaggcatattaagcaaaataagcatctagaggaggagaagatgaggcatcttcttcatgtgctgaaggttgatttggggtgtacaagtgaggaaaattctgtgaagcaaaacgatgtggatatgttgaatgttttcgattttgagaaggccgggaattctgagcccaacgagttaaagaacgagagcgaggttactatccagcaggagagacaacagtaccaaaaagcactagatatgttgctctcagctccaaaggacgagaacgaaatttttcccagcccaaccgagttctttatgccgatttacaagtctaagcactctgagggagtaattatacaacaggtcaatgacgaaaccaacttagaaacatcgaccctggacgaaaaccacccgagtatctccgactctctcacagatagagaaacctcggtgaacgttattgagggcgattcagaccctgagaaggtcgaaatcagcaacggcctgtgcggtcttaatacaagccctagtcaatcggtgcagttcagttcagttaagggcgacaacaaccacgacatggagctgtccactctcaagattatggagatgtctatcgaagattgccctttggatgtgtag

SEQ ID NO: 32848 - DNA, 1704 bp, Artificial Sequence
  derived and/or modified sequence
atggacggcagccggcgggtgcgggccaccagcgtgctgccccggtacggccccccctgcctgttcaaaggacatctctccaccaaatccaatgctgcggttgactgttctgtgcccgtcagtgtgagtacctccattaaatacgccgatcagcaaagaagagagaagctgaaaaaggaactggcccagtgcgagaaagagtttaagctgactaagacagcaatgagagccaactataaaaacaatagtaaatcactattcaacacactacagaaaccctctggcgagccccagattgaagatgacatgctcaaggaggaaatgaatgggttttcatccttcgcacgtagtctagtcccgtcgtcagagcgtctgcacctgagcctgcataagtcctcaaaggtcatcacaaacggtccagaaaagaattcatcatcctcaccctctagcgtggactatgccgctagtggtccccgaaaactcagctcaggggccttgtatggaaggcgaccaagatcaacatttccaaactcccatcggttccagctggtgatatcaaaagcacccagcggcgacctgctcgataagcactctgaactcttctctaacaaacagttgcccttcacacctagaacactgaagacggaagcgaagagcttcctgtcccagtaccgttattacacacccgccaagaggaaaaaagatttcaccgaccagaggattgaagcagagacccaaacagagttgtcattcaaaagcgagttgggtacagccgaaaccaagaatatgactgatagcgaaatgaacattaaacaggcgagcaattgtgtgacctacgacgccaaggagaaaatcgcccccctgcccctggagggccatgattcaacctgggacgaaatcaaagatgatgcgctgcagcacagtagcccaagggccatgtgccaatatagccttaaaccaccgagcacccggaagatttactctgacgaggaggaactcctctacttgtcgttcatcgaagacgtgacggacgaaattcttaaattgggactgttttctaatcgatttttagaacgcctgtttgagcgacatatcaagcagaataaacatctggaggaggaaaagatgagacatttgctgcatgtactaaaggtcgatctgggttgcacttctgaggagaactcggtgaagcagaatgatgtagacatgctcaatgtttttgattttgagaaggccggaaatagcgagcccaacgagctgaagaatgaatctgaggttacaatccagcaggagcgacagcagtatcagaaggccctggatatgctgttatctgctccaaaagatgaaaatgaaattttccccagtcctactgagttcttcatgcccatatataaatcaaagcacagtgaaggggtgattatccagcaggtgaacgacgaaacaaacctggagacttccacgcttgacgagaaccacccaagtataagtgatagccttaccgaccgcgaaaccagcgtgaacgtaatcgaaggagattcagatcctgagaaggtggagattagcaatggactgtgcgggttgaatacatcccctagtcagtcagtacagttctcgagcgtgaaaggtgataacaaccacgatatggaactgtctaccctcaagatcatggagatgtccatcgaggattgcccgctcgatgtgtag

SEQ ID NO: 32849 - DNA, 1704 bp, Artificial Sequence
  derived and/or modified sequence
atggatggaagtcggagggtcagggccactagcgtcctccctcgctatggaccaccatgccttttcaagggacatctgagcacgaagtccaatgctgccgtcgactgcagtgtacctgtcagcgtgtctacaagcataaagtatgctgatcaacagagaagagaaaaactgaagaaagaactcgcccagtgtgagaaggaattcaaattgactaagacggccatgcgagcgaactataaaaacaactccaagagcttgtttaatacactgcagaagccgagcggggagccccaaatagaagacgacatgctgaaggaagagatgaatgggttctcctcatttgcgagaagcctggtaccttcttctgaacggttgcatctctcactccacaaaagctcaaaagtgatcaccaacgggcctgaaaagaacagctcatcatcaccatcatccgtcgactacgctgcttctgggcctaggaagctctcttccggggctctctacggcaggcgtcctagaagtactttccccaatagtcatcggttccagctcgttatcagtaaggccccatccggcgacttactcgacaaacacagcgagcttttttccaataagcaattgccattcacaccaagaactttgaaaacagaggccaaatcttttctgtcacagtaccgctactacacaccagctaagagaaagaaagactttaccgaccagcggatcgaggctgagacacagacagagctttcctttaagtcagagctgggcactgcagagactaagaacatgaccgatagtgagatgaatatcaagcaggcttcaaattgcgtcacctacgatgccaaagaaaaaatcgcacccctgcctcttgagggccatgatagtacctgggacgaaattaaggacgatgccttgcagcactcttcaccccgtgccatgtgtcagtacagcctaaaacccccaagtaccaggaagatctatagtgacgaagaagaattgctttatctctcattcattgaggacgtgacggatgagattctgaagctgggactgttctctaaccgattcttagagagactctttgaacggcacataaaacagaataaacatctggaggaggaaaaaatgcggcacttgttgcacgtgctgaaggttgatctgggatgtaccagcgaagagaattctgtcaagcagaatgacgtggatatgctcaacgtctttgacttcgaaaaggctgggaactctgaaccaaacgagcttaagaacgagagcgaggtcaccattcagcaagaacgacagcagtatcagaaggcccttgatatgctgctctctgcccctaaagatgaaaacgagatttttccatccccaaccgaattttttatgccaatctacaagagcaagcatagcgaaggtgtgatcatccagcaggtgaacgatgagacaaatctggagacttcaactctggatgagaatcacccatccatcagtgactctctgacagacagagagacatcagtcaacgtgatcgagggagatagcgatcctgaaaaggttgagatctccaacggcctgtgcggtctcaatacttctccatctcaatccgtgcagttttcatccgtcaagggggataacaaccatgatatggaacttagcaccctgaaaattatggaaatgagcatcgaggattgcccgctggacgtgtag

SEQ ID NO: 32850 - DNA, 1704 bp, Artificial Sequence
  derived and/or modified sequence
atggacgggtcacgacgggtgcgcgctacctccgtcctgccgcgatatggcccaccttgtctattcaagggacatctgtcaactaagtcaaatgccgcagtagattgcagcgtgcctgtctcagtgtcaacttcgatcaagtatgccgaccagcaacggagagagaagctgaagaaggaactggcgcagtgtgaaaaggagtttaaactgaccaaaactgctatgcgcgcaaactataagaacaattccaagtcacttttcaatacactccagaagccgtcaggagagccgcagatcgaagacgacatgttgaaggaagagatgaacggcttttcttcattcgccagatccctggtcccctcctctgaaaggttgcatctttccctgcataagtcttctaaggttattacaaacggcccagagaaaaactcctcaagcagcccgtctagtgttgactatgcggcatctggcccacgaaaattgagtagcggcgctctttatggccgtcggccacgcagcaccttcccaaactcccaccgcttccaactggtgatctccaaggcaccttctggcgacctgctagataaacacagcgagctgtttagcaataagcagttgccctttacacctagaactttgaagactgaggcaaagagctttctatcacaatataggtactacaccccggctaagcggaagaaggatttcactgatcaaagaatagaggcagaaacccagaccgaactttcattcaagagcgaactgggtactgctgaaaccaagaacatgacagattcagaaatgaatataaagcaagccagcaactgcgtcacctacgacgctaaagaaaaaatcgctccactgccgctggaaggacacgacagtacatgggatgagataaaggatgacgctcttcagcattcatcaccaagagccatgtgccagtatagtttaaagcctccttccacgcgtaagatctatagcgatgaggaagagctgctttacctttcttttatcgaggatgtgacggatgaaatactgaagttaggcctctttagtaacagattcctggagagactttttgagcgccacattaaacagaacaagcacctggaagaagaaaaaatgcgccatctcttgcacgtgctgaaagtagacctcgggtgcacttctgaggaaaactccgtgaaacagaatgacgtggatatgttgaatgtttttgactttgagaaagcaggtaacagcgagccaaatgagttgaaaaacgagtcagaggtgaccatacaacaggagcgccagcaataccagaaggcactggatatgctccttagcgctcctaaggacgaaaacgaaatcttcccttctccaacagagttctttatgcctatctacaaaagcaaacattccgagggcgttattattcaacaagtcaacgatgaaactaatttagaaacttctactctggatgaaaaccacccttctatcagcgacagccttactgacagagagacaagtgtgaatgtgattgagggtgactcggaccctgagaaggtagaaataagcaatggattgtgtggcctgaacactagtccaagccagtccgtgcaattcagctctgtgaagggtgataataaccacgacatggaactcagtaccctcaagatcatggaaatgtctatcgaggactgccccctggacgtctag

SEQ ID NO: 32851 - DNA, 1915 bp, Artificial Sequence
  derived and/or modified sequence
acaatagcgactcactggacccagcccttagcaacggcctggcaacggtttccctgctgctgcagcccccgtcggctcctcttttccagtcctccactgccggggctgggcccggccgcgggaaggaccgaaggggatacagcgtgtccctgcggcggctgcaagaggactaagcatggatggcagccggagagtcagagcaacctctgtccttcccagatatggtccaccgtgcctatttaaaggacacttgagcaccaaaagtaatgctgcagtagactgctcggttccagtaagcgtgagtaccagcataaagtatgcagaccaacaacgaagagagaaactcaaaaaggaattagcacaatgtgaaaaagagttcaaattaactaaaactgcaatgcgagccaattataaaaataattccaagtcactttttaataccttacaaaagccctcaggcgaaccgcaaattgaggatgacatgttaaaagaagaaatgaatggattttcatcctttgcaaggtcactagtaccctcttcagagagactacacctaagtctacataaatccagtaaagtcatcacaaatggtcctgagaagaactccagttcctccccgtccagtgtggattatgcagcctccgggccccggaaactgagctctggagccctgtatggcagaaggcccagaagcacattcccaaattcccaccggtttcagttagtcatttcgaaagcacccagtggggatcttttggataaacattctgaactcttttctaacaaacaattgccattcactcctcgcactttaaaaacagaagcaaaatctttcctgtcacagtatcgctattatacacctgccaaaagaaaaaaggattttacagatcaacggatagaagctgaaacccagactgaattaagctttaaatctgagttggggacagctgagactaaaaacatgacagattcagaaatgaacataaagcaggcatctaattgtgtgacatatgatgccaaagaaaaaatagctcctttacctttagaagggcatgactcaacatgggatgagattaaggatgatgctcttcagcattcctcaccaagggcaatgtgtcagtattccctgaagcccccttcaactcgtaaaatctactctgatgaagaagaactgttgtatctgagtttcattgaagatgtaacagatgaaattttgaaacttggtttattttcaaacaggtttttagaacgactgttcgagcgacatataaaacaaaataaacatttggaggaggaaaaaatgcgccacctgctgcatgtcctgaaagtagacttaggctgcacatcggaggaaaactcggtaaagcaaaatgatgttgatatgttgaatgtatttgattttgaaaaggctgggaattcagaaccaaatgaattaaaaaatgaaagtgaagtaacaattcagcaggaacgtcaacaataccaaaaggctttggatatgttattgtcggcaccaaaggatgagaacgagatattcccttcaccaactgaatttttcatgcctatttataaatcaaagcattcagaaggggttataattcaacaggtgaatgatgaaacaaatcttgaaacttcaactttggatgaaaatcatccaagtatttcagacagtttaacagatcgggaaacttctgtgaatgtcattgaaggtgatagtgaccctgaaaaggttgagatttcaaatggattatgtggtcttaacacatcaccctcccaatctgttcagttctccagtgtcaaaggcgacaataatcatgacatggagttatcaactcttaaaatcatggaaatgagcattgaggactgccctttggatgtttaatcttcattaataaatacctcaaatggccagtaactc

SEQ ID NO: 32852 - DNA, 2301 bp, Artificial Sequence
  derived and/or modified sequence
aacagttcatagggacagcacccccacaacagagaattatacaaccagcccaaaatgtcaatggacatttgggctgagaagtcttacatgacagaatgcttcctaccctgatctgacgttatttccaaggattcaaaggggacgtggatgccagatgagtccacctcctctccctgctcttcccgcagggacagagcctgccaggtgctggtgactcggatcctgacaggaggtcgctctgcggaagactggcaggatcccagagcaacagactggggctcgatgccccttccccgccaggtctctccgtccgcaactgtcctcctagtaccgggtatcccgcaggcggggctgcggaacgcacgtcccctgcgccgtgacgtcacaatagcgactcactggacccagcccttagcaacggcctggcaacggtttccctgctgctgcagcccccgtcggctcctcttttccagtcctccactgccggggctgggcccggccgcgggaaggaccgaaggggatacagcgtgtccctgcggcggctgcaagaggactaagcatggatggcagccggagagtcagagcaacctctgtccttcccagatatggtccaccgtgcctatttaaaggacacttgagcaccaaaagtaatgctgcagtagactgctcggttccagtaagcgtgagtaccagcataaagtatgcagaccaacaacgaagagagaaactcaaaaaggaattagcacaatgtgaaaaagagttcaaattaactaaaactgcaatgcgagccaattataaaaataattccaagtcactttttaataccttacaaaagccctcaggcgaaccgcaaattgaggatgacatgttaaaagaagaaatgaatggattttcatcctttgcaaggtcactagtaccctcttcagagagactacacctaagtctacataaatccagtaaagtcatcacaaatggtcctgagaagaactccagttcctccccgtccagtgtggattatgcagcctccgggccccggaaactgagctctggagccctgtatggcagaaggcccagaagcacattcccaaattcccaccggtttcagttagtcatttcgaaagcacccagtggggatcttttggataaacattctgaactcttttctaacaaacaattgccattcactcctcgcactttaaaaacagaagcaaaatctttcctgtcacagtatcgctattatacacctgccaaaagaaaaaaggattttacagatcaacggatagaagctgaaacccagactgaattaagctttaaatctgagttggggacagctgagactaaaaacatgacagattcagaaatgaacataaagcaggcatctaattgtgtgacatatgatgccaaagaaaaaatagctcctttacctttagaagggcatgactcaacatgggatgagattaaggatgatgctcttcagcattcctcaccaagggcaatgtgtcagtattccctgaagcccccttcaactcgtaaaatctactctgatgaagaagaactgttgtatctgagtttcattgaagatgtaacagatgaaattttgaaacttggtttattttcaaacaggtttttagaacgactgttcgagcgacatataaaacaaaataaacatttggaggaggaaaaaatgcgccacctgctgcatgtcctgaaagtagacttaggctgcacatcggaggaaaactcggtaaagcaaaatgatgttgatatgttgaatgtatttgattttgaaaaggctgggaattcagaaccaaatgaattaaaaaatgaaagtgaagtaacaattcagcaggaacgtcaacaataccaaaaggctttggatatgttattgtcggcaccaaaggatgagaacgagatattcccttcaccaactgaatttttcatgcctatttataaatcaaagcattcagaaggggttataattcaacaggtgaatgatgaaacaaatcttgaaacttcaactttggatgaaaatcatccaagtatttcagacagtttaacagatcgggaaacttctgtgaatgtcattgaaggtgatagtgaccctgaaaaggttgagatttcaaatggattatgtggtcttaacacatcaccctcccaatctgttcagttctccagtgtcaaaggcgacaataatcatgacatggagttatcaactcttaaaatcatggaaatgagcattgaggactgccctttggatgtttaatcttcattaataaatacctcaaatggccagtaactcaa

SEQ ID NO: 32853 - protein, 477 aa, Artificial Sequence
  derived and/or modified sequence
MAAPILRSFSWGRWSGTLNLSVLLPLGLRKAHSGAQGLLAAQKARGLFKDFFPETGTKIELPELFDRGTASFPQTIYCGFDPTADSLHVGHLLALLGLFHLQRAGHNVIALVGGATARLGDPSGRTKEREALETERVRANARALRLGLEALAANHQQLFTDGRSWGSFTVLDNSAWYQKQHLVDFLAAVGGHFRMGTLLSRQSVQLRLKSPEGMSLAEFFYQVLQAYDFYYLFQRYGCRVQLGGSDQLGNIMSGYEFINKLTGEDVFGITVPLITSTTGAKLGKSAGNAVWLNRDKTSPFELYQFFVRQPDDSVERYLKLFTFLPLPEIDHIMQLHVKEPERRGPQKRLAAEVTKLVHGREGLDSAKRCTQALYHSSIDALEVMSDQELKELFKEAPFSEFFLDPGTSVLDTCRKANAIPDGPRGYRMITEGGVSINHQQVTNPESVLIVGQHILKNGLSLLKIGKRNFYIIKWLQL

SEQ ID NO: 32854 - DNA, 1434 bp, Artificial Sequence
  derived and/or modified sequence
atggccgcccccatcctgagaagcttcagctggggcagatggagcggcaccctgaacctgagcgtgctgctgcccctgggcctgagaaaggcccacagcggcgcccagggcctgctggccgcccagaaggccagaggcctgttcaaggacttcttccccgagaccggcaccaagatcgagctgcccgagctgttcgacagaggcaccgccagcttcccccagaccatctactgcggcttcgaccccaccgccgacagcctgcacgtgggccacctgctggccctgctgggcctgttccacctgcagagagccggccacaacgtgatcgccctggtgggcggcgccaccgccagactgggcgaccccagcggcagaaccaaggagagagaggccctggagaccgagagagtgagagccaacgccagagccctgagactgggcctggaggccctggccgccaaccaccagcagctgttcaccgacggcagaagctggggcagcttcaccgtgctggacaacagcgcctggtaccagaagcagcacctggtggacttcctggccgccgtgggcggccacttcagaatgggcaccctgctgagcagacagagcgtgcagctgagactgaagagccccgagggcatgagcctggccgagttcttctaccaggtgctgcaggcctacgacttctactacctgttccagagatacggctgcagagtgcagctgggcggcagcgaccagctgggcaacatcatgagcggctacgagttcatcaacaagctgaccggcgaggacgtgttcggcatcaccgtgcccctgatcaccagcaccaccggcgccaagctgggcaagagcgccggcaacgccgtgtggctgaacagagacaagaccagccccttcgagctgtaccagttcttcgtgagacagcccgacgacagcgtggagagatacctgaagctgttcaccttcctgcccctgcccgagatcgaccacatcatgcagctgcacgtgaaggagcccgagagaagaggcccccagaagagactggccgccgaggtgaccaagctggtgcacggcagagagggcctggacagcgccaagagatgcacccaggccctgtaccacagcagcatcgacgccctggaggtgatgagcgaccaggagctgaaggagctgttcaaggaggcccccttcagcgagttcttcctggaccccggcaccagcgtgctggacacctgcagaaaggccaacgccatccccgacggccccagaggctacagaatgatcaccgagggcggcgtgagcatcaaccaccagcaggtgaccaaccccgagagcgtgctgatcgtgggccagcacatcctgaagaacggcctgagcctgctgaagatcggcaagagaaacttctacatcatcaagtggctgcagctgtag

SEQ ID NO: 32855 - DNA, 1434 bp, Artificial Sequence
  derived and/or modified sequence
atggctgctcctattctgcgtagcttttcttgggggagatggtctggaactctcaacctgagcgtgctccttccgctggggttgagaaaggctcattccggcgctcaaggcctgctggccgcacaaaaagcgagggggttgttcaaggactttttcccggaaaccggcaccaaaattgagctccctgagttgttcgacagaggtaccgctagctttcctcagacaatctattgtggcttcgacccaacggccgacagtctgcacgtcggccacctgctagccctcctggggctcttccatttgcagagagcaggacataatgtgatcgcgctcgtcggaggcgccaccgcccggctgggggatccctctgggagaactaaagaacgcgaggcgttagagaccgagagggtgagagcgaacgctagggctctgagactgggtttagaggcattagctgccaatcaccagcaactctttaccgatggacgttcctggggatcgtttaccgttctcgacaactccgcctggtaccaaaagcagcatttggtcgactttctggctgcagtgggtggccacttcagaatgggcacgctgttaagtagacagagcgtacagctgcgtctgaaatccccagaaggtatgagtcttgccgaatttttctatcaggtcctccaggcgtacgacttttactatctttttcagcgttatgggtgcagggttcaactcggcgggtccgaccagttaggcaacatcatgagtggatatgagttcataaataagctcacaggtgaagacgtgttcggcattactgtgccattgattactagcactacaggggccaagcttggcaaaagtgctgggaatgcagtatggctaaacagagataagacgtctccatttgaactgtaccaattcttcgtccgccaacccgatgatagcgtcgagaggtacctcaagctgttcacctttctcccactccccgagattgaccatatcatgcagttgcatgtcaaggagcccgagcgacgaggaccacagaagagacttgccgccgaggtcaccaagcttgtacacggccgtgagggactggactccgctaaacgatgcacgcaagctctgtaccacagtagtatcgatgctctggaggtgatgtctgatcaggagctaaaggagcttttcaaagaggcccctttctctgagtttttcttggacccagggactagcgtcctggatacctgcagaaaagccaacgctattcctgacggccctaggggataccgtatgatcaccgagggaggcgtgagcataaaccatcaacaggtcaccaatcccgagtccgttctgattgtggggcagcacatcctcaagaacggcctgtcactactcaaaattggaaagcggaacttttatatcattaagtggttgcagttgtag

SEQ ID NO: 32856 - DNA, 1434 bp, Artificial Sequence
  derived and/or modified sequence
atggccgcccccatcctgcggagcttctcctggggccgctggagcggcaccctgaacctgtctgtgctgctgcccctgggcctgaggaaggcccacagcggggcccagggcctgctggccgcccagaaggcccggggcctcttcaaggacttcttccctgagaccggcaccaagattgagctgcctgagctgtttgaccggggcacagccagcttcccccagaccatctactgcggctttgaccccacagctgacagcctgcacgtgggccacctgctggccctgctgggcctcttccacctgcagagagctggccacaacgtgattgccctggtgggcggggccacagcccggctgggggaccccagcggccgcaccaaggagcgggaggccctggagacagagcgggtgcgggccaatgcccgggccctgcggctgggcctggaggccctggccgccaaccaccagcagctgttcacagatggccgctcctggggcagcttcaccgtgctggacaacagcgcctggtaccagaagcagcacctggtggacttcctggccgctgtgggcggccacttcaggatgggcaccctgctgagccggcagagcgtgcagctgcggctgaagagccctgagggcatgagcctggccgagttcttctaccaggtgctgcaggcctatgacttctactacctgttccagagatatggctgccgggtgcagctgggcggcagtgaccagctgggcaacatcatgagcggctatgagttcatcaacaagctgaccggggaggatgtgtttggcatcaccgtgcccctcatcaccagcaccaccggggccaagctgggcaagtctgctggaaatgctgtgtggctgaacagagacaagaccagcccctttgagctgtaccagttctttgtgcggcagccagatgattctgtggagcgctacctgaagctgttcaccttcctgcccctgcctgagattgaccacatcatgcagctgcacgtgaaggagcctgagcggcggggcccccagaagaggctggccgctgaggtgaccaagctggtgcacggccgggagggcctggacagcgccaagcgctgcacccaggccctgtaccacagcagcattgatgccctggaggtgatgtctgaccaggagctgaaggagctgttcaaggaggcccccttcagcgagttcttcctggaccccggcacctctgtgctggacacctgcaggaaggccaatgccatcccagatggcccccggggctacaggatgatcacagagggcggcgtgtccatcaaccaccagcaggtgaccaaccctgagagcgtgctgattgtgggccagcacatcctgaagaatggcctgagcctgctgaagattggcaagaggaacttctacatcatcaagtggctgcagctgtag

SEQ ID NO: 32857 - DNA, 1434 bp, Artificial Sequence
  derived and/or modified sequence
atggccgcccccatcctgcggagcttcagctggggccggtggagcggaacattaaacttatccgtgctgctgcccctcggcctgaggaaggcacacagcggggcgcagggcctgcttgctgcccagaaagctaggggactcttcaaagatttttttcctgagaccggaacaaaaatagaattgccagagctgtttgaccgcggaaccgcgagttttccccagacaatttactgtgggtttgacccaaccgccgatagcctgcatgtagggcacctgttggcgctacttggcctttttcacctgcaacgcgctggacacaatgtgatcgccctagtgggaggcgccactgcaagattgggagatcccagcggacgcaccaaagagcgcgaggctctggagaccgagcgggtcagagctaatgctagagccctgcgtttgggactcgaggctcttgcagcaaatcaccagcagctctttaccgacggcaggtcctgggggagctttaccgtactggataacagcgcatggtatcagaagcagcacctggtggattttctggccgccgtgggcggacatttcaggatgggcactctcctgtctagacagtccgtgcagctccggcttaagagccctgagggcatgagtctcgccgagttcttctaccaggttttgcaggcctacgacttctattacctcttccagcgatacgggtgcagggtccagttaggcggtagtgaccagttgggtaatatcatgagcggctatgagttcattaataaactgaccggtgaagacgtcttcgggattaccgttcccctgatcactagcacgaccggggcaaaactcggcaagagcgccggcaatgcggtctggttgaatcgcgataaaacgagtccatttgagctgtaccagttctttgttagacagccggatgattctgttgagcggtacctgaagctgttcacctttctgcctctccccgagatcgatcatatcatgcaacttcacgtgaaagaaccggagcggaggggcccacagaagagacttgctgcagaggtaacaaaactggtacacgggcgcgaaggcctggattctgcaaaacgttgtacccaggctctctatcattcatcaatagacgcgcttgaagtgatgtccgaccaggaactgaaagagctatttaaggaagctcccttcagcgaatttttcctggaccccgggacgagcgtgcttgatacctgtcgaaaggctaatgccattccggatgggccacgcggctatcggatgattacagaaggcggagtgtcaatcaaccatcagcaggttaccaacccagaaagtgtcctcatcgtaggacagcacattcttaaaaatggtttgagcctcctgaaaatcggcaaaaggaatttctatattattaagtggctgcaactgtag

SEQ ID NO: 32858 - DNA, 1434 bp, Artificial Sequence
  derived and/or modified sequence
atggcagcccctattctgaggtccttttcttggggcagatggtctgggaccttaaaccttagcgtactcctaccactcggcctgcgcaaggctcattccggcgctcaggggctgctggccgctcagaaagcacgcggtcttttcaaggatttcttccctgagactggcaccaagatcgagcttcccgagttgttcgacaggggtacggcgtcatttccacagaccatctactgtgggttcgaccctacagctgattcactgcacgtgggccatttactagctcttttaggactgtttcaccttcagagggctgggcacaatgtcattgccctggtgggtggggctacagcccgactcggagacccaagtgggagaactaaggaacgtgaagctctggaaaccgaaagagtcagggcaaatgccagagcccttcgcctcgggctcgaggcactggcagctaatcaccaacagttatttaccgacggtcgcagttgggggtcatttactgtgctggacaactccgcatggtaccaaaagcagcatctagtggactttctggccgctgtcggtgggcactttaggatggggaccctgctgagccgacagtccgtccagctccgactcaagtctccagagggtatgagcctggccgagtttttttaccaggtgctgcaggcctatgatttctactacttgtttcagcggtatggctgtcgggtgcaactgggtgggtcagaccaacttggtaatataatgagcggttacgaattcatcaacaagttgacgggagaggatgtctttggaatcacagtccctcttataacaagcactactggggcaaagctcggtaaatcagccggaaacgctgtctggctgaaccgcgacaagacatcaccatttgagctctaccagtttttcgttcgtcaaccggatgactccgtggaaagatacctgaaactgttcaccttccttccactgccggagatcgaccatataatgcagcttcacgtgaaagaacccgagcgcagaggaccgcagaaacggctggctgcagaagtgacaaaactggttcacgggcgtgagggactcgatagtgctaagcgttgcacacaagctttgtatcattcttccattgatgcactcgaggtcatgtcagaccaggagctcaaggagctcttcaaagaggcacctttcagtgaattttttctagaccctggaacctccgtgctcgacacatgtcgaaaggcgaacgccatccctgacggtccgagaggttaccgaatgataacagaagggggtgtgtccataaaccaccagcaggtcactaatcctgagagtgtcctgatcgtcggccagcacatcctgaaaaacgggctgagtctactcaaaattggcaaacgaaacttttacatcatcaaatggctgcagttatag

SEQ ID NO: 32859 - DNA, 2122 bp, Artificial Sequence
  derived and/or modified sequence
ccagcattcccttcgtgccgctaccaagatggcggcgcccatcttgcggtccttttcctggggccggtggtctggtaccctaaatctctcagtattgttgcccttggggctgcgtaaggcccactcgggcgctcaggggttactggcagcgcagaaggctcgaggtctgttcaaggacttcttcccggagacggggacgaaaatagagctcccagagctcttcgaccgtggcacggcgagttttccccaaaccatttactgtggcttcgaccccacggcagactcgcttcatgtgggtcatctacttgcgctgctgggcctgtttcatttgcagcgagcgggccacaacgtgatcgcgctggtgggaggcgccacggcgcgcctgggagacccgagcggccgtaccaaggaacgcgaggcgctggagacagagcgcgtgcgagccaacgcgcgagctctgcgcctagggcttgaggccctggcggctaatcaccagcagcttttcactgatgggcgctcctggggcagcttcactgtgctggacaactcggcctggtaccagaagcagcacctggtggacttcctggcggcagtggggggtcacttccgcatggggacgctgctgagccggcagagcgtgcagctgcggctcaagagccccgagggcatgagcttggccgagttcttttaccaggtgctccaggcctatgacttctattacctcttccagcgttatggatgcagggtccagctgggcggatctgatcaactaggcaacatcatgtccggatatgagttcatcaacaagttgactggagaagatgtatttggaatcaccgttcctctaattacaagtacaactggagcaaagctgggaaagtctgctggcaacgctgtttggctaaacagagataagacatctccatttgaattgtatcaattctttgtcaggcaaccggacgattcagtggaaaggtacctgaagctgttcactttcctgccccttccagagattgatcatatcatgcagctgcatgtcaaagagccagaaaggcggggtcctcagaaacgactggcagcagaagtaacaaagcttgttcatggacgagaaggattggattctgctaaaaggtgtacacaagccctttatcacagtagcatagatgcactggaggtcatgtctgatcaggagttaaaagagttgtttaaagaagctccattttctgaattttttctcgatcctggaacaagtgtcctagatacttgccgcaaagcaaatgccattccagatggtccccgagggtatcgaatgataacagaaggcggagtcagcataaatcaccaacaagtaacaaatcctgagagtgttttaattgttggacaacatattctcaagaatggactttccttacttaaaataggaaaaagaaatttctacattataaaatggcttcagttgtgatgaaaagtccttctggttgtccaaataaacttacccatcattcattctcaagacctctgaagggttggctccagaacttagacctttgcttatgcaaatcagaaaaacagaatggactaggactcagtgtgagtaacttcattatttttatgggccggttaataaatatttgtttaataatgggatgttttattttctgatgtacaaagcttgattaccatagaaaaccatgattttcagggttaatctctttttaaaattatacttcagaagagaaagaaatgctgctttcctatcttacccttcctgctctcctttttgtagtgatgaggaacaatgaaaaagaggtagtgtaaggaattgtgaggctgggcatggtggctcacacctgtaatcccagcacttcgggaggccaaggtgggcaaatcgcttgaggccaggagtttgagaccagcctggccaacagggcgaaaccccgtctctactgaaaatataaaaattagccagatgtggttgcaggcacctgtaaccccagctactcaagaggctgagctgcgagaatcacttgaacccaggagatggaggttgcagtgagctgagatcacgccactgcactccagcctgggagacagcatgagtagtgagtgaaactctgtctca

SEQ ID NO: 32860 - protein, 1330 aa, Artificial Sequence
  derived and/or modified sequence
MMEIQMDEGGGVVVYQDDYCSGSVMSERVSGLAGSIYREFERLIHCYDEEVVKELMPLVVNVLENLDSVLSENQEHEVELELLREDNEQLLTQYEREKALRRQAEEKFIEFEDALEQEKKELQIQVEHYEFQTRQLELKAKNYADQISRLEERESEMKKEYNALHQRHTEMIQTYVEHIERSKMQQVGGNSQTESSLPGRRKERPTSLNVFPLADGTVRAQIGGKLVPAGDHWHLSDLGQLQSSSSYQCPQDEMSESGQSSAAATPSTTGTKSNTPTSSVPSAAVTPLNESLQPLGDYGVGSKNSKRAREKRDSRNMEVQVTQEMRNVSIGMGSSDEWSDVQDIIDSTPELDMCPETRLDRTGSSPTQGIVNKAFGINTDSLYHELSTAGSEVIGDVDEGADLLGEFSGMGKEVGNLLLENSQLLETKNALNVVKNDLIAKVDQLSGEQEVLRGELEAAKQAKVKLENRIKELEEELKRVKSEAIIARREPKEEAEDVSSYLCTESDKIPMAQRRRFTRVEMARVLMERNQYKERLMELQEAVRWTEMIRASREHPSVQEKKKSTIWQFFSRLFSSSSSPPPAKRPYPSVNIHYKSPTTAGFSQRRNHAMCPISAGSRPLEFFPDDDCTSSARREQKREQYRQVREHVRNDDGRLQACGWSLPAKYKQLSPNGGQEDTRMKNVPVPVYCRPLVEKDPTMKLWCAAGVNLSGWRPNEDDAGNGVKPAPGRDPLTCDREGDGEPKSAHTSPEKKKAKELPEMDATSSRVWILTSTLTTSKVVIIDANQPGTVVDQFTVCNAHVLCISSIPAASDSDYPPGEMFLDSDVNPEDPGADGVLAGITLVGCATRCNVPRSNCSSRGDTPVLDKGQGEVATIANGKVNPSQSTEEATEATEVPDPGPSEPETATLRPGPLTEHVFTDPAPTPSSGPQPGSENGPEPDSSSTRPEPEPSGDPTGAGSSAAPTMWLGAQNGWLYVHSAVANWKKCLHSIKLKDSVLSLVHVKGRVLVALADGTLAIFHRGEDGQWDLSNYHLMDLGHPHHSIRCMAVVYDRVWCGYKNKVHVIQPKTMQIEKSFDAHPRRESQVRQLAWIGDGVWVSIRLDSTLRLYHAHTHQHLQDVDIEPYVSKMLGTGKLGFSFVRITALLVAGSRLWVGTGNGVVISIPLTETVVLHRGQLLGLRANKTSPTSGEGARPGGIIHVYGDDSSDRAASSFIPYCSMAQAQLCFHGHRDAVKFFVSVPGNVLATLNGSVLDSPAEGPGPAAPASEVEGQKLRNVLVLSGGEGYIDFRIGDGEDDETEEGAGDMSQVKPVLSKAERSHIIVWQVSYTPE

SEQ ID NO: 32861 - DNA, 3993 bp, Artificial Sequence
  derived and/or modified sequence
atgatggagatccagatggacgagggcggcggcgtggtggtgtaccaggacgactactgcagcggcagcgtgatgagcgagagagtgagcggcctggccggcagcatctacagagagttcgagagactgatccactgctacgacgaggaggtggtgaaggagctgatgcccctggtggtgaacgtgctggagaacctggacagcgtgctgagcgagaaccaggagcacgaggtggagctggagctgctgagagaggacaacgagcagctgctgacccagtacgagagagagaaggccctgagaagacaggccgaggagaagttcatcgagttcgaggacgccctggagcaggagaagaaggagctgcagatccaggtggagcactacgagttccagaccagacagctggagctgaaggccaagaactacgccgaccagatcagcagactggaggagagagagagcgagatgaagaaggagtacaacgccctgcaccagagacacaccgagatgatccagacctacgtggagcacatcgagagaagcaagatgcagcaggtgggcggcaacagccagaccgagagcagcctgcccggcagaagaaaggagagacccaccagcctgaacgtgttccccctggccgacggcaccgtgagagcccagatcggcggcaagctggtgcccgccggcgaccactggcacctgagcgacctgggccagctgcagagcagcagcagctaccagtgcccccaggacgagatgagcgagagcggccagagcagcgccgccgccacccccagcaccaccggcaccaagagcaacacccccaccagcagcgtgcccagcgccgccgtgacccccctgaacgagagcctgcagcccctgggcgactacggcgtgggcagcaagaacagcaagagagccagagagaagagagacagcagaaacatggaggtgcaggtgacccaggagatgagaaacgtgagcatcggcatgggcagcagcgacgagtggagcgacgtgcaggacatcatcgacagcacccccgagctggacatgtgccccgagaccagactggacagaaccggcagcagccccacccagggcatcgtgaacaaggccttcggcatcaacaccgacagcctgtaccacgagctgagcaccgccggcagcgaggtgatcggcgacgtggacgagggcgccgacctgctgggcgagttcagcggcatgggcaaggaggtgggcaacctgctgctggagaacagccagctgctggagaccaagaacgccctgaacgtggtgaagaacgacctgatcgccaaggtggaccagctgagcggcgagcaggaggtgctgagaggcgagctggaggccgccaagcaggccaaggtgaagctggagaacagaatcaaggagctggaggaggagctgaagagagtgaagagcgaggccatcatcgccagaagagagcccaaggaggaggccgaggacgtgagcagctacctgtgcaccgagagcgacaagatccccatggcccagagaagaagattcaccagagtggagatggccagagtgctgatggagagaaaccagtacaaggagagactgatggagctgcaggaggccgtgagatggaccgagatgatcagagccagcagagagcaccccagcgtgcaggagaagaagaagagcaccatctggcagttcttcagcagactgttcagcagcagcagcagccccccccccgccaagagaccctaccccagcgtgaacatccactacaagagccccaccaccgccggcttcagccagagaagaaaccacgccatgtgccccatcagcgccggcagcagacccctggagttcttccccgacgacgactgcaccagcagcgccagaagagagcagaagagagagcagtacagacaggtgagagagcacgtgagaaacgacgacggcagactgcaggcctgcggctggagcctgcccgccaagtacaagcagctgagccccaacggcggccaggaggacaccagaatgaagaacgtgcccgtgcccgtgtactgcagacccctggtggagaaggaccccaccatgaagctgtggtgcgccgccggcgtgaacctgagcggctggagacccaacgaggacgacgccggcaacggcgtgaagcccgcccccggcagagaccccctgacctgcgacagagagggcgacggcgagcccaagagcgcccacaccagccccgagaagaagaaggccaaggagctgcccgagatggacgccaccagcagcagagtgtggatcctgaccagcaccctgaccaccagcaaggtggtgatcatcgacgccaaccagcccggcaccgtggtggaccagttcaccgtgtgcaacgcccacgtgctgtgcatcagcagcatccccgccgccagcgacagcgactacccccccggcgagatgttcctggacagcgacgtgaaccccgaggaccccggcgccgacggcgtgctggccggcatcaccctggtgggctgcgccaccagatgcaacgtgcccagaagcaactgcagcagcagaggcgacacccccgtgctggacaagggccagggcgaggtggccaccatcgccaacggcaaggtgaaccccagccagagcaccgaggaggccaccgaggccaccgaggtgcccgaccccggccccagcgagcccgagaccgccaccctgagacccggccccctgaccgagcacgtgttcaccgaccccgcccccacccccagcagcggcccccagcccggcagcgagaacggccccgagcccgacagcagcagcaccagacccgagcccgagcccagcggcgaccccaccggcgccggcagcagcgccgcccccaccatgtggctgggcgcccagaacggctggctgtacgtgcacagcgccgtggccaactggaagaagtgcctgcacagcatcaagctgaaggacagcgtgctgagcctggtgcacgtgaagggcagagtgctggtggccctggccgacggcaccctggccatcttccacagaggcgaggacggccagtgggacctgagcaactaccacctgatggacctgggccacccccaccacagcatcagatgcatggccgtggtgtacgacagagtgtggtgcggctacaagaacaaggtgcacgtgatccagcccaagaccatgcagatcgagaagagcttcgacgcccaccccagaagagagagccaggtgagacagctggcctggatcggcgacggcgtgtgggtgagcatcagactggacagcaccctgagactgtaccacgcccacacccaccagcacctgcaggacgtggacatcgagccctacgtgagcaagatgctgggcaccggcaagctgggcttcagcttcgtgagaatcaccgccctgctggtggccggcagcagactgtgggtgggcaccggcaacggcgtggtgatcagcatccccctgaccgagaccgtggtgctgcacagaggccagctgctgggcctgagagccaacaagaccagccccaccagcggcgagggcgccagacccggcggcatcatccacgtgtacggcgacgacagcagcgacagagccgccagcagcttcatcccctactgcagcatggcccaggcccagctgtgcttccacggccacagagacgccgtgaagttcttcgtgagcgtgcccggcaacgtgctggccaccctgaacggcagcgtgctggacagccccgccgagggccccggccccgccgcccccgccagcgaggtggagggccagaagctgagaaacgtgctggtgctgagcggcggcgagggctacatcgacttcagaatcggcgacggcgaggacgacgagaccgaggagggcgccggcgacatgagccaggtgaagcccgtgctgagcaaggccgagagaagccacatcatcgtgtggcaggtgagctacacccccgagtag

SEQ ID NO: 32862 - DNA, 3993 bp, Artificial Sequence
  derived and/or modified sequence
atgatggagatccaaatggatgaaggcggcggcgtggtagtatatcaggatgattactgctccggctctgtgatgagcgagagagtgtccgggctggcaggaagtatctatcgcgaatttgagcgactgattcactgttacgacgaagaagttgtcaaagagttaatgccgcttgttgtgaacgtgctagagaacttggatagcgtactcagcgagaaccaagagcatgaagtcgaacttgaactcctacgggaggacaacgagcaactgctcacacagtatgagagggaaaaggcactgaggcgccaagccgaggagaagtttatcgaatttgaggatgccctggaacaagagaaaaaggaacttcagattcaagtcgaacactacgaattccagactagacagttggagctgaaggctaaaaactacgccgatcagattagccgcctcgaggagagggaaagtgagatgaagaaagaatacaacgctctgcaccagcggcataccgaaatgatccagacatatgttgaacacatcgaaaggagcaagatgcagcaggttgggggcaactcccagaccgagtcttctctgccaggccgccgcaaggagagaccaactagcctaaatgtcttccctttggccgatggtaccgtgagggcccagattggaggtaaacttgtccctgctggggatcactggcacttgagtgacctgggccagctgcaatcttcgtccagctaccagtgcccccaggatgagatgtcagagtcagggcagtcctccgcagcggccacaccatccaccacaggaacaaaaagtaatacacctacatcaagtgtgccgtccgcagccgtgactccccttaacgagtcacttcaaccccttggcgattatggtgtggggtccaaaaatagcaagcgcgcgagggagaagcgggatagtcgcaatatggaggtccaagttacacaggaaatgaggaacgtgtccatcggcatgggaagctcagatgagtggtctgatgtccaagacataattgattccactcccgagctggatatgtgcccagaaacacgcctggatcggacaggctcgtcaccaacccaggggatcgtgaataaggcctttggcattaacactgattccctgtatcatgagctcagcaccgctggatcggaggtcatcggcgacgtcgatgaaggcgctgaccttctcggtgaatttagcggtatgggaaaagaagtcggcaacctccttctggaaaactcccagctgttagaaaccaaaaacgccctgaacgttgtgaagaatgacctgattgcaaaggtcgaccagctgtccggggagcaggaagtcctgcgcggggaactggaggccgccaagcaggctaaagtaaaactcgagaatcggatcaaagagctcgaagaggaactcaaacgagtaaaatccgaagctatcatcgccaggcgcgagcctaaagaggaagccgaggacgtgagtagctatctttgtaccgaaagtgacaaaattcccatggcccagcgccgaagattcacacgagtggaaatggcccgggttctgatggaacgaaatcaatacaaggaaagacttatggagttgcaagaggccgtgcggtggacggagatgatccgtgcatcgcgggaacacccaagcgtgcaggagaaaaaaaagtcaacgatatggcagttcttctctaggttgttttcatcctcctcgagccctccaccggccaaacggccttatccatccgtgaacattcattacaagagccctaccaccgcaggtttctcacaaaggcgcaaccacgctatgtgtcccatcagcgccggctcccggcccttggagttcttccccgacgatgattgcacgtcaagcgcgcggcgcgaacaaaagcgcgaacaatacaggcaggtgagggagcacgtccggaacgatgatggtcggctgcaagcttgtgggtggtctctgcccgccaaatacaagcagctgagtcctaatggagggcaggaagataccagaatgaaaaacgtgccggtgcccgtgtattgtaggcccctcgtcgagaaagaccctacgatgaagctctggtgtgccgccggtgtgaatctgagcggctggcgtcctaacgaggatgatgcaggtaatggagtgaaacccgctcctggtagggacccgctgacatgcgacagagagggggatggggagcctaagagtgcacatactagccccgagaaaaagaaggcgaaagagctcccagaaatggacgcaacaagctcacgggtgtggattctgacatccacgctcacgacatctaaggtcgtgattattgatgccaatcagcccgggacggttgtggaccagttcactgtttgtaatgctcatgttctctgcattagctccattcctgcagccagcgacagcgattacccccccggggaaatgttcctagattctgacgttaaccctgaggaccccggcgccgacggtgttctggccgggatcaccctagtaggttgtgcgacgaggtgcaacgttccccgaagcaattgtagtagccgcggcgacacccctgtgcttgataagggtcagggcgaggtcgctactattgccaacggcaaagtaaaccctagtcaatcaaccgaggaagccacagaggccacagaggtccccgaccctgggcctagcgagccagagacagcaaccctgagaccaggtcctttaacagagcatgtattcacagatcctgctcctacaccctccagcggaccacagcccgggtcagagaacggcccggagcctgactctagctcaaccaggccggagccggagccaagcggagatccaacgggcgcgggaagctctgctgctcccaccatgtggctgggagcccagaacggttggctctacgttcactccgcggtggctaactggaaaaaatgtctccatagtatcaaactaaaagactccgtcctgtctctggtgcatgtgaaagggcgggtcctggtcgccctcgccgatggcactctggcaattttccatcgcggagaagacggtcagtgggacctgtctaattaccacctaatggatctgggccatcctcatcacagtatacgctgcatggccgtggtgtatgaccgtgtctggtgtggctataagaataaagtccatgttatccagcccaagactatgcaaatcgaaaaaagcttcgacgctcatccacggcgtgaatctcaggtgcgccagcttgcatggataggggatggggtgtgggtgagcataaggctggattcaacactcaggctgtaccacgcacacacacaccagcacttacaggatgtggatattgagccttatgtttccaagatgcttggcacgggtaaactgggctttagcttcgtgcgcattactgctctgttggttgcagggtcaaggttatgggtcggcacaggaaatggtgtggtcatctcgatcccacttacggagactgtggtgctccacagggggcaactgctcggcctacgggcaaataagacaagtcccacctctggggaaggggcaaggccagggggaataatccatgtgtatggcgacgattcgtcggatcgggctgccagcagcttcattccatactgctccatggcccaggctcagctttgcttccacggccacagggatgccgtgaaattcttcgtttcagtgcccggcaatgtgctagcgacactgaatggcagcgtgctggattcccctgctgaaggccctggcccagccgcccctgcctccgaagtggaaggacaaaagctgaggaacgttctggtgctttcgggaggggaggggtatatcgacttcaggatcggagacggagaggacgatgaaaccgaagagggtgcaggggatatgtcccaggtgaaacctgttctcagcaaggctgaaaggtcgcatatcatagtttggcaggtgtcatacacgcctgagtag

SEQ ID NO: 32863 - DNA, 3993 bp, Artificial Sequence
  derived and/or modified sequence
atgatggagatccagatggatgaaggaggaggagtggtggtgtaccaggatgactactgcagcggctctgtgatgtctgagcgggtgtctggcctggccggcagcatctaccgggagtttgagcggctcatccactgctatgatgaggaggtggtgaaggagctgatgcccctggtggtgaatgtgctggagaacctggacagcgtgctgtctgagaaccaggagcacgaggtggagctggagctgctgagagaagataatgagcagctgctgacccagtatgaaagagagaaggccctgcggcggcaggccgaggagaagttcattgaatttgaagatgccctggagcaggagaagaaggagctgcagatccaggtggagcactatgagttccagacccggcagctggagctgaaggccaagaactatgctgaccagatcagccggctggaggagcgggagagcgagatgaagaaggagtacaatgccctgcaccagaggcacacagagatgatccagacctacgtggagcacatcgagaggagcaagatgcagcaggtgggcggcaacagccagacagagagcagcctgcccggccgcaggaaggagcggcccaccagcctgaatgtgttccccctggctgatggcaccgtgcgggcccagatcggcggcaagctggtgcctgctggggaccactggcacctgagtgacctgggccagctgcagagcagcagcagctaccagtgcccccaggatgagatgtctgagagcggccagagcagcgctgctgccacccccagcaccaccggcaccaagagcaacacccccaccagctctgtgcccagcgctgctgtgacccccctgaatgaaagcctgcagcccctgggggactatggagtgggcagcaagaacagcaagagggcccgggagaagagggacagcaggaacatggaggtgcaggtgacccaggagatgagaaatgtgtccatcggcatgggcagcagtgatgagtggagcgatgtgcaggacatcatcgacagcaccccagagctggacatgtgcccagagacccggctggacagaacaggcagcagccccacccagggcatcgtgaacaaggccttcggcatcaacacagacagcctgtaccacgagctgagcacagctggcagcgaggtgattggagatgtggatgagggcgctgacctgctgggggagttcagcggcatgggcaaggaggtgggcaacctgctgctggagaacagccagctgctggagaccaagaatgccctgaatgtggtgaagaatgacctgattgccaaggtggaccagctgagcggggagcaggaggtgctgcggggggagctggaggccgccaagcaggccaaggtgaagctggagaaccgcatcaaggagctggaggaggagctgaagagggtgaagtctgaggccatcatcgcccggcgggagcccaaggaggaggccgaggatgtgagcagctacctgtgcacagaaagtgacaagatccccatggcccagaggcggcgcttcaccagggtggagatggcccgggtgctgatggagaggaaccagtacaaggagcggctgatggagctgcaggaggccgtgcgctggacagagatgatccgggccagccgggagcaccccagcgtgcaggagaagaagaagagcaccatctggcagttcttcagccgcctcttcagcagcagcagcagccccccaccagccaagaggccctaccccagcgtgaacatccactacaagagccccaccacagctggcttcagccagaggaggaaccacgccatgtgccccatctctgctggcagccggcccctggagttcttcccagatgatgactgcaccagcagcgcccggcgggagcagaagcgggagcagtaccggcaggtgcgggagcacgtgagaaatgatgatggccgcctgcaggcctgtggctggagcctgcctgccaagtacaagcagctgagccccaacggcggccaggaggacaccaggatgaagaatgtgcctgtgcctgtgtactgccggcccctggtggagaaggaccccaccatgaagctgtggtgtgccgccggcgtgaacctgagcggctggaggcccaatgaagatgatgctggaaatggagtgaagccagcccctggccgggaccccctgacctgtgaccgggagggagatggagagcccaagagcgcccacaccagccctgagaagaagaaggccaaggagctgcctgagatggatgccaccagcagccgggtgtggatcctgaccagcaccctgaccaccagcaaggtggtgatcattgatgccaaccagcccggcaccgtggtggaccagttcaccgtgtgcaatgcccacgtgctgtgcatcagcagcatcccagctgccagtgacagcgactacccacctggagagatgttcctggacagtgatgtgaacccagaagatcctggagcagatggagtgctggccggcatcaccctggtgggctgtgccacccgctgcaatgtgcccaggagcaactgcagcagcagaggagacacccctgtgctggacaagggccagggcgaggtggccaccatcgccaacgggaaggtgaaccccagccagagcacagaggaggccacagaggccacagaggtgcctgaccccggccccagcgagcctgagacagccaccctgcggcccggccccctgacagagcacgtgttcacagatcctgcccccacccccagcagcggcccccagcccggctctgaaaatggacctgagccagacagcagcagcaccaggcctgagcctgagcccagcggggaccccactggagctggcagcagcgctgcccccaccatgtggctgggcgcccagaatggctggctgtatgtgcacagcgctgtggccaactggaagaagtgcctgcacagcatcaagctgaaggacagcgtgctgagcctggtgcacgtgaagggccgggtgctggtggccctggctgatggcaccctggccatcttccacagaggagaagatggccagtgggacctgagcaactaccacctgatggacctgggccacccccaccacagcatccgctgcatggctgtggtgtatgacagagtgtggtgtggctacaagaacaaggtgcacgtgatccagcccaagaccatgcagatcgagaagagctttgatgcccacccccggcgggagagccaggtgcggcagctggcctggattggagatggagtgtgggtgtccatccggctggacagcaccctgcggctgtaccacgcccacacccaccagcacctgcaggatgtggacatcgagccctacgtgtccaagatgctgggcaccgggaagctgggcttctcctttgtgcgcatcacagccctgctggtggccggcagccggctgtgggtgggcactggaaatggagtggtgatcagcatccccctgacagagaccgtggtgctgcaccggggccagctgctgggcctgcgggccaacaagaccagccccaccagcggggagggcgcccggcctgggggcatcatccacgtgtatggagatgacagcagtgacagagctgccagcagcttcatcccctactgcagcatggcccaggcccagctgtgcttccacggccacagagatgctgtgaagttctttgtgtctgtgcctggaaatgtgctggccaccctgaatggatctgtgctggacagccctgctgagggccctggccctgctgccccagccagcgaggtggagggccagaagctgagaaatgtgctggtgctgagcggcggggagggctacatcgacttcagaattggagatggagaagatgatgaaacagaggagggcgctggggacatgagccaggtgaagcctgtgctgagcaaggccgagaggagccacatcatcgtgtggcaggtgtcctacaccccagagtag

SEQ ID NO: 32864 - DNA, 5605 bp, Artificial Sequence
  derived and/or modified sequence
ccctgaggcgacagcagctgcgggaggcgacgggctgcggcctgcggaacctgaggcagctggggagggccgggcgcgccggccggatagcgagccgcgctggcggcggcggtggccgcgatgatggagatccagatggacgagggcggcggcgtggtggtgtaccaggacgactactgctccggctcggtgatgtcggagcgggtgtcgggcctggcgggctccatctaccgcgagttcgagcgcctcatccactgctacgacgaggaggtggtcaaggagctcatgccgctggtggtgaacgtgctggagaacctagactcggtgctcagcgagaaccaggagcacgaggtggagctggagctgctgcgcgaggacaacgagcagctgctcacccagtacgagcgtgagaaggcgctgcgcaggcaggcggaggagaaattcattgagtttgaagatgctctggaacaagagaagaaagagctgcaaatccaggtggagcactacgagttccagacgcgccagctggagctgaaggccaagaactatgccgatcagatttcccggttggaggagcgggagtcggagatgaagaaggagtacaatgccctgcaccagcggcacacagagatgatacagacctacgtggagcacattgagaggtccaagatgcagcaggtcggaggaaacagccagaccgagagcagcctgccggggcggaggaaggagcgccccacctccctgaacgtgttccccctggctgacggcacggtacgtgcacagatcgggggcaagctcgtgcctgcgggggaccactggcacctgagtgacctcggccagctgcagtccagctccagctaccagtgtccacaggatgaaatgtccgagtcaggccagtcctcggcggccgccacacccagcaccacaggcaccaagtccaacacgcccacatcctccgtgccctcggccgccgtcacacccctcaacgagagcctgcagcccctgggggactatggcgtgggctccaagaacagcaagcgtgcccgggagaagcgcgacagccgcaacatggaagtacaggtcacccaggagatgcgcaacgtcagtataggcatgggcagcagtgacgagtggtctgatgttcaagacattattgactccacgccagagctggacatgtgtccagagacccgcctggaccgcacaggaagcagcccaacccagggcatcgtgaacaaagctttcggcatcaacaccgactccctgtaccatgagctgtcgacggcagggtctgaggtcatcggggatgtggacgaaggggccgacctcctaggggagttctcaggaatgggcaaagaagtggggaatctgctactggaaaactcacagcttctggaaaccaaaaacgccttgaatgtggtgaagaatgacctgattgccaaggtcgaccagctgtccggggagcaggaggtgctgaggggcgagttggaggctgctaagcaggccaaagtcaagctggaaaaccgtatcaaggagctggaagaggaactgaaaagagtgaagtccgaggccatcatcgcccgccgtgaacccaaagaagaggcggaggatgtaagcagctatctctgtacagaatcggacaaaatccccatggcccagcgccgccgcttcacgcgggtggagatggcccgtgtgctcatggagcggaaccagtacaaggagcggctgatggagctgcaggaggctgtgcggtggactgagatgatcagagcgtcccgagagcacccatccgtccaggagaagaagaagtcgaccatctggcagttcttcagccgcctcttcagctcttcctccagcccccctccggccaagcgcccctatccctcggtgaacatccactacaagtcacccaccactgccggcttcagccagcgccgcaaccatgccatgtgcccgatctcggcaggcagccggcccctggaattcttccctgacgacgactgcacgtcctccgcccgtcgagagcagaagcgcgagcagtaccgccaggtgcgtgagcacgtgcgtaacgacgacggccgtctgcaggcctgcggctggagcctgcccgccaagtacaagcagctgagtcccaacgggggccaggaggacacgcggatgaagaacgtgccggtgccggtgtactgccgccctctggtggagaaggaccccaccatgaagctgtggtgtgccgcgggcgtcaacctgagcgggtggaggcccaatgaggacgacgctgggaatggagtcaagccagcgccaggccgcgatcccctgacctgcgaccgcgaaggagacggcgagcccaagagcgcccacacgtctcccgagaagaagaaggccaaggagctccctgaaatggacgccacctccagccgggtgtggatcctgaccagcaccctgaccaccagcaaggtggtgatcatcgacgccaaccagccgggcacggtggtggaccagttcaccgtctgcaacgcgcacgtgctgtgcatctccagcatccccgcggccagcgacagcgactaccctcccggggagatgttcctggacagcgacgtgaacccagaggacccgggcgcagatggcgtgctggccggtatcaccctggtgggctgtgccacccgctgcaacgtgccgcggagcaactgctcctcccgaggggacaccccagtgctagacaaggggcagggggaggtggccaccatcgccaacgggaaggtcaacccgtcccagtccacagaggaggccacagaggccacggaggtgccagaccctgggcccagcgagccagagacagccacattgcggcccgggcctctcacagagcacgtcttcactgacccagccccgaccccgtcctctggcccccagcctggcagcgagaacgggccagagcctgacagcagcagcacacggccagagccagagcccagcggggaccccacgggagcaggcagcagtgctgcacccaccatgtggctgggagcccagaacggctggctctatgtgcactcggctgtggccaactggaagaagtgcctgcactccatcaagctgaaggattctgtgctgagcctggtgcatgtcaaaggccgtgtgctggtggctctggcggacgggaccctggccatcttccaccgtggtgaagatggccagtgggatctgagcaactatcacctaatggacctgggccacccgcaccactccatccgctgcatggctgttgtgtacgaccgcgtgtggtgtggctacaagaacaaggtgcacgtcatccagcccaagaccatgcagatagagaagtcatttgacgcccacccgcggcgggagagccaggtgcggcagctggcgtggatcggcgatggcgtatgggtgtccatccgcctggactccaccctgaggctctaccatgcacacacgcaccagcatctacaggacgtggacattgagccctacgtcagcaagatgctaggcactggcaagctgggtttctccttcgtacgcatcacggccctgcttgtcgcgggcagccggctctgggtgggcaccggcaacggagtggtcatctccatccccctgacagagactgtggtcctgcaccgaggccagctcctggggctccgagccaataagacatcccccacctctggggagggcgcccgtcccgggggcatcatccacgtgtatggcgatgacagcagtgacagggcggccagcagcttcatcccctactgctccatggcccaggcccagctatgcttccatgggcaccgcgatgccgtgaagttctttgtctcggtgccagggaacgtgctggccaccctgaatgggagtgtgctggacagcccagccgagggccctgggccagctgcccctgcctcggaggtcgagggccagaagctgcggaacgtgctggtgctgagcggcggggagggctacatcgacttccgcattggagacggagaggacgacgagacggaggagggcgcaggggacatgagccaggtgaagcccgtgctgtccaaggcagagcgcagtcacatcatcgtgtggcaggtgtcctacacccccgagtgaagctgctgccctgcctggcccgacctgtacataggacccccgaccacctgacccccgcccggcccgcggggtagccagccaggcgccgccgcccctcttctaacctctcaacctgcagctttcacctgagtctggcccctccagcgggcagggagtgcggggatgcggatcagctgggaggaggaggggaggggaacttccacccgaggggaagatgctctcgggacagtttcccgggcagctcctggccagcttccagcccagagtcctcaagtccagggcaccttgggcccagcgcaggcagaatccgaggtggtcctggctctaccctgggcctcctactccccagcacccctggaggaggcaggggctccccgccgccgaggctgcctgccctgggcccacctctgcatgctgctcatggggccaccctgcctcctgggccctcactctgcctaggggagctgggccaggcactagcctttgcccagggaggtgggcctcaggctgcccaggtgcctgcaccccagccggccttctctggggcctccccgtcgtcaagcctctatcctgtctgtccccaccccagctgtcccctgcccagggagctggcataaaagcacgaggcccggctccctggggcagctgcttgagaacagagactgctaccccatcctgcccatgcaggcaggctcttgccagccccgttctgacccgtgtccccccaggctctgcctgggcagaagactcaccttggaggagtgggccctggagtcctgtccctcccagaagcccccagggtgggatttctcaggctgccagggcaggcccaggcctcaggaagaaggggaggcccctggcctctccgggatcagtcctaggacacaggctcagcctcaggttgatgggggatgatgtgctcccggggcctgcctcctgcacggggctccacggagcccagctcccagacacgctactaagtgcctagggttgcccgctgtggcctgcttccagggagcaacagagaggccaccaagcagaggcccgtggggctgaggatggagccgcccccagccgactccaagcccgcagagggcagacgccaccctggactgctctccctgcccagctgggcctctctggcctattcctaccttccaggcccactgcactcctgtctgggaggcccttatgagggcagcccagcccccgcacccacccccaaccagagaagcacagatcttggggagctgccccacaagccccgctggccaccgagggctgcagccgctgcgctgccggcttctccccaccaccctgccacctccactgtgatgtatgtccgctccctcgtctgttcccccaggatctcgaagtgactccgggctgagcagtggggcggctgggggaggggtgacgattctcctcaggctttggccctgcaagcaaacccacatatctgctctgtatgtaataaatgtcttaacgtcgt

SEQ ID NO: 32865 - DNA, 3993 bp, Artificial Sequence
  derived and/or modified sequence
atgatggagatccagatggacgagggcggcggcgtggtggtgtaccaggacgattattgtagtggatctgtaatgtctgagcgagtaagcggacttgctggatcaatctatagggagtttgagcgcttgatacactgttatgatgaggaagttgtgaaggagttgatgccacttgtggtgaacgtactggaaaacctggattcagttctgtctgagaatcaggagcacgaagttgagctcgagttactgcgcgaggataacgaacagctgctcactcagtatgagcgggaaaaagcactcagacgccaggccgaagagaagttcatcgagttcgaggacgccctggagcaggaaaagaaggagcttcagatccaggtggaacactatgagttccaaacccgccagcttgaactcaaggcgaagaactacgcagaccagatcagccgactggaggagagagagtctgagatgaagaaagaatacaacgcactgcatcaaagacacaccgagatgattcagacttacgtcgaacatatcgaaagatccaagatgcaacaagtgggaggcaacagccaaaccgagagctcactccctggacggcgtaaagagaggccaacatccctgaacgtttttcccctggccgatggcaccgtccgggcacagatcggaggcaaactcgtgcctgccggggaccactggcaccttagcgacctgggccagttgcagtctagcagcagctaccagtgtcctcaggacgaaatgtctgagtcaggtcaatcctccgcagcggccacccctagtacaacagggaccaaaagcaatacgcctacatcatctgtgccatccgcagccgtgacacccttgaatgaaagcctccagccactgggggactatggtgtcggttccaagaactcaaaaagagcacgggaaaaaagagatagtcggaatatggaggttcaggttactcaggaaatgcggaacgttagtattggaatgggcagttcagatgagtggagtgatgtgcaggacattatcgattccacacccgagctcgatatgtgccccgagacaaggcttgatcggaccggatcgagccctacacagggaatcgtaaataaagccttcgggattaacacggactcgctctatcacgagctgtcaactgccggctcagaggtgataggcgatgtcgatgagggggcagacttactcggtgaattctctggaatgggaaaggaggttggaaatctgctgttggagaatagccagctgcttgagactaagaacgcgctgaatgtggtcaaaaacgacctcatagcaaaagtggaccagttgtctggtgaacaagaggttctcaggggggagcttgaggcggcaaagcaggctaaagttaagcttgagaataggattaaggagctggaggaggaactgaagcgcgtgaagtcagaagcaatcattgcgcgccgtgagccgaaggaggaggcagaggatgtgtcctcttacctctgcactgagagcgataagatacctatggcccagcgacggaggtttacgcgggtggaaatggcgcgcgttctgatggagagaaaccagtacaaagagaggctgatggagctccaggaagcagttaggtggactgagatgatccgagctagccgagaacacccatccgtccaagagaagaaaaagagcaccatttggcaattcttcagccgcctgtttagcagttcttcatctcctcctccagcaaaaagaccctatccttccgttaacattcattataagagccccactaccgccgggttctcccagcggcgaaaccatgctatgtgtccaatttccgcagggagcagacccctcgagttcttccccgatgatgactgcacaagttcggcaagacgtgaacaaaaaagggagcagtacagacaggtgagggaacatgtgcgtaatgacgatggccgactccaagcatgcgggtggtcgctgcccgctaaatacaagcagttgtctcctaacggagggcaagaagataccagaatgaaaaacgtgcccgttcctgtctattgcagacctttagtggagaaagaccctaccatgaagctgtggtgtgcagccggtgtcaacctatctggctggaggcctaatgaggatgatgctggcaatggtgtgaagcccgcccctggcagggaccccttaacttgtgaccgagagggagacggcgaaccaaagtccgcccatacctctccagagaagaaaaaggcaaaggagctgcctgaaatggacgcaacttcgtctcgggtctggatccttacgtccacactgacgacatcaaaggtagtcattattgacgcgaaccagccaggaaccgtggtcgaccagttcactgtttgcaatgcccacgttctttgcattagcagtattcccgcagctagcgattcggactacccaccaggcgagatgttcctggactccgatgtgaaccccgaggatcccggagcggacggggttttggcgggcattacccttgttgggtgtgcgaccaggtgtaatgtcccccgcagcaactgctcttccagaggcgacacaccagttctcgataagggccagggggaagtcgccactatcgctaatggcaaagtaaatccaagccagagcaccgaggaggctacagaggccacggaggtgcccgatcccgggcctagcgaacccgagactgccaccctccggccgggcccactgaccgagcacgtgttcactgacccagctcctacaccatcttccgggcctcagccaggtagcgaaaacggaccagaacccgatagtagctccacccggcccgagccagagccctcgggggatccgactggggctgggagtagcgcagctcccaccatgtggttaggtgcacagaatgggtggctgtacgtgcatagcgcagttgccaactggaagaagtgcctccactctattaagttgaaggattcagtgctgtccctggtacacgtgaaaggcagagtgttagtggctcttgcggatggaacactcgccatatttcacagaggggaggacggacagtgggacttgtccaactaccatctgatggacttgggccatccccaccattcgatccgatgcatggcagtcgtgtatgatagagtttggtgtggttacaagaataaggttcacgtcattcaacccaagaccatgcagatcgagaagagcttcgacgcacatccaagaagagagagtcaagtccgccagctggcctggattggcgatggagtgtgggtcagtataagactggactccaccttgcggctatatcacgcccacacccatcagcacctgcaggacgtcgacatagaaccctacgtgagcaagatgctcgggactggcaaacttgggttcagtttcgtgcgcataactgctttgctggtcgcaggtagcaggctctgggttgggacaggtaacggagtggtgatatcaataccactgaccgaaaccgtggtgctccaccgcggacagctcctgggcctcagagctaataagacctctcccacatctggcgaaggcgccaggcctgggggtataatccatgtctacggtgatgattccagtgatcgtgctgcgagctcctttatcccttactgttcaatggcccaagctcagttgtgctttcatggacaccgtgatgctgtgaaattcttcgtgtctgtcccgggcaacgttttagccactttgaatggctccgttctcgacagcccggctgaagggcctggccccgccgcccccgcctcagaagtggaaggtcagaagctcagaaatgtcctggtactttccggcggggagggatatattgatttccggattggcgacggcgaagatgatgaaactgaagagggcgctggcgatatgtctcaggtgaaacccgtactgtcgaaagcagagcggagtcacataattgtttggcaggtatcttatacacccgagtag

SEQ ID NO: 32866 - DNA, 3993 bp, Artificial Sequence
  derived and/or modified sequence
atgatggaaatccagatggatgaaggtggaggggtggtggtctatcaagatgattactgctccggaagcgtgatgagcgaacgtgtttcgggactggcgggtagcatatatagggagttcgagcgcctgatacactgctatgatgaagaggtggtgaaagaactcatgccacttgtggttaacgtgctggagaacctggattctgtccttagtgaaaatcaggaacatgaggtcgagctggagcttctcagggaggacaatgaacagctcctgacccaatatgaacgcgagaaagcactccgacgccaggccgaagagaagtttatcgagtttgaggatgctctggagcaggaaaaaaaggagctgcagattcaggtggaacactatgagttccaaacccgacagctggagctcaaagcaaagaattacgcagatcaaatctcacggctggaggaacgcgaaagcgaaatgaaaaaagagtacaacgcactccaccagcggcatacagaaatgatccaaacctacgtggagcatattgagaggagcaaaatgcagcaggttggtggtaacagtcagaccgaatcctcgctgcccggacggagaaaagaacgtcccaccagcctgaacgtgtttccactcgctgatgggactgtgcgtgctcagattggcggtaagctcgtcccagccggagaccactggcatctgtcagacctcggccagcttcagagcagctcatcctaccagtgcccccaggacgaaatgagcgagtctggccagagcagcgcagcagctactcctagcacaaccgggacaaagtccaatactcctactagtagcgtcccatctgccgctgttacccccctaaacgagtctctgcagcctctgggggattacggcgtgggatctaagaattccaagagggcacgtgagaagcgggactcacggaatatggaagttcaagtcactcaagaaatgcgcaatgttagtataggcatggggagctccgatgagtggagtgacgtacaggacatcatcgacagtacaccagagctggacatgtgcccagaaactcgtctagatcgaacaggttcctcccccacacagggtatcgtcaataaggcattcgggatcaatactgatagtctttaccacgagctgagcacggcagggtctgaggtgatcggggatgtggatgaaggagcggaccttctgggtgagttctccggcatggggaaagaagtgggtaatctattgctggagaattcccagctactggaaaccaaaaacgcgttaaacgttgtgaagaacgacctgattgcaaaggtggaccagctttccggagagcaggaggtactgagaggagagctcgaggctgctaagcaggctaaggttaagctcgaaaacaggatcaaagaactcgaggaggaactcaagagagtgaagagtgaggccatcatcgccagacgtgagccaaaggaagaggctgaggacgtctctagctacctgtgcactgaaagtgacaagatccctatggcgcagcgacggagatttacccgggtggagatggccagagtcctcatggagcggaaccagtacaaagagcggctgatggagttgcaggaggctgtgcggtggaccgagatgattcgtgcctcccgtgaacatcctagcgttcaggaaaagaaaaaaagtaccatatggcagtttttcagcaggctgttttcttcctcctcatcccctcctcctgccaagcggccatatccttcagtgaacattcactacaaatctccaacgactgccggattttcccagcgacgcaatcatgccatgtgtccgatttccgccggtagcaggccactcgagttttttcccgatgacgattgtacaagctcagcacgtagagagcagaaacgcgaacagtaccgccaggtccgagaacacgtccggaacgacgacggcagactgcaggcatgcggatggtctctaccagccaaatataagcagctcagcccaaacggcggtcaggaggacacacggatgaaaaatgtgcccgtgcctgtctactgtcgccctctggtagagaaggatcccaccatgaagctctggtgcgcagcaggcgtgaatctttccgggtggcggccaaatgaggatgatgctggcaatggagtgaaacccgctccaggcagagatccgcttacatgcgatcgcgagggtgatggagaaccgaagtcagcccacactagccccgagaagaaaaaagcgaaagaactgcctgaaatggacgccacatcttccagggtgtggattctgacctctaccttaaccacttccaaagtagtgattatcgatgctaaccagcccggtactgtggtcgatcagtttactgtatgtaatgcccacgtgctgtgcatttcttccatacccgcagcaagtgacagcgactaccctcccggagagatgtttcttgattccgacgtaaatcctgaagacccaggcgctgatggcgtgttggcaggcataacccttgtcggatgtgctacgcgttgcaacgtgccacggtcaaactgcagctctcgcggtgatactccagtgctggacaaagggcagggcgaggtggcaaccatcgctaacggcaaggtgaacccatcccagtccacagaggaggctaccgaagcaaccgaggtcccagacccgggaccaagtgagccagaaactgctaccctcaggcctggtcctctgactgaacacgtattcaccgatcctgctccaactccctcctcgggcccacaacctgggtccgagaacgggcctgaacctgattcctccagtacaaggccagagcccgaaccatcgggcgatccgaccggggctgggtccagtgcggctcctaccatgtggctcggagcccaaaatggctggctctatgtgcactctgctgtggccaattggaaaaaatgtctccattccatcaaactgaaagacagcgttctgtccctggtacacgtaaaggggagagtactggtggctctcgcagatgggaccttggctatctttcatagaggagaagatgggcagtgggacttgagtaattatcacctgatggacttaggccacccgcaccactcaattcgatgcatggccgtggtgtacgacagagtttggtgcgggtacaaaaacaaggttcatgtgattcagcccaaaacaatgcagattgagaagagttttgatgctcatccccgaagagaatcacaggtccgacagctagcctggatcggggatggggtgtgggtatctatccgcctggattctaccctgcggctttatcacgcccacactcaccagcacctccaagacgtagacatcgagccctacgtctcaaaaatgttaggtactggaaagctcgggttctctttcgtcagaatcactgcacttctggtcgcgggaagcaggctgtgggtgggaactggaaatggagtggtgataagcattcccttgacggaaacagttgtcctgcacagaggacagctacttggcttgagagcgaataaaacgtctccaacaagcggggagggggcacgccctgggggaattattcatgtgtacggagatgatagctctgatcgggctgcatcctccttcataccctattgttcgatggcccaggcgcaattgtgctttcacggtcatagagacgccgtaaagttttttgtgagtgttccgggtaacgtcctggccacgctgaatggcagcgtgctagatagccccgcagaggggcctggacccgctgcaccagcctccgaggtagagggacagaagttgagaaatgtgctcgttctgtccggaggcgagggatacattgacttcagaatcggggatggtgaagacgacgagaccgaggagggcgcaggcgacatgtctcaggttaaacccgtgctaagtaaggccgaacgctcacatattattgtatggcaggtgtcatatacccccgaatag

SEQ ID NO: 32867 - protein, 292 aa, Artificial Sequence
  derived and/or modified sequence
MEKRTCALCPKDVEYNVLYFAQSENIAAHENCLLYSSGLVECEDQDPLNPDRSFDVESVKKEIQRGRKLKCKFCHKRGATVGCDLKNCNKNYHFFCAKKDDAVPQSDGVRGIYKLLCQQHAQFPIIAQSAKFSGVKRKRGRKKPLSGNHVQPPETMKCNTFIRQVKEEHGRHTDATVKVPFLKKCKEAGLLNYLLEEILDKVHSIPEKLMDETTSESDYEEIGSALFDCRLFEDTFVNFQAAIEKKIHASQQRWQQLKEEIELLQDLKQTLCSFQENRDLMSSSTSISSLSY

SEQ ID NO: 32868 - protein, 331 aa, Artificial Sequence
  derived and/or modified sequence
MAQASPPRPERVLGASSPEARPAQEALLLPTGVFQVAEKMEKRTCALCPKDVEYNVLYFAQSENIAAHENCLLYSSGLVECEDQDPLNPDRSFDVESVKKEIQRGRKLKCKFCHKRGATVGCDLKNCNKNYHFFCAKKDDAVPQSDGVRGIYKLLCQQHAQFPIIAQSAKFSGVKRKRGRKKPLSGNHVQPPETMKCNTFIRQVKEEHGRHTDATVKVPFLKKCKEAGLLNYLLEEILDKVHSIPEKLMDETTSESDYEEIGSALFDCRLFEDTFVNFQAAIEKKIHASQQRWQQLKEEIELLQDLKQTLCSFQENRDLMSSSTSISSLSY

SEQ ID NO: 32869 - protein, 286 aa, Artificial Sequence
  derived and/or modified sequence
  misc_feature (1)..(1): Xaa can be any naturally occurring amino acid
XRPGPRGCSAPAARRPGPRRRRSSFPPLYSSGLVECEDQDPLNPDRSFDVESVKKEIQRGRKLKCKFCHKRGATVGCDLKNCNKNYHFFCAKKDDAVPQSDGVRGIYKLLCQQHAQFPIIAQSAKFSGVKRKRGRKKPLSGNHVQPPETMKCNTFIRQVKEEHGRHTDATVKVPFLKKCKEAGLLNYLLEEILDKVHSIPEKLMDETTSESDYEEIGSALFDCRLFEDTFVNFQAAIEKKIHASQQRWQQLKEEIELLQDLKQTLCSFQENRDLMSSSTSISSLSY

SEQ ID NO: 32870 - protein, 168 aa, Artificial Sequence
  derived and/or modified sequence
MEKRTCALCPKDVEYNVLYFAQSENIAAHENCLLYSSGLVECEDQDPLNPDRSFDVESVKKEIQRGRKLKCKFCHKRGATVGCDLKNCNKNYHFFCAKKDDAVPQSDGVRGIYKLLCQQHAQFPIIAQSAKFSGVKRKRGRKKPLSGNHVQPPETMKCNTFIRQVKEE

SEQ ID NO: 32871 - protein, 98 aa, Artificial Sequence
  derived and/or modified sequence
MEKRTCALCPKDVEYNVLYFAQSENIAAHENCLLYSSGLVECEDQDPLNPDRSFDVESVKKEIQRGRKLKCKFCHKRGATVGCDLKNCNKNYHFFCAK

SEQ ID NO: 32872 - DNA, 996 bp, Artificial Sequence
  derived and/or modified sequence
atggctcaggcttcaccaccgagacccgagcgggttttgggagccagcagtcctgaggctcgccctgcccaagaagccctgctgttgcccaccggggtgttccaggtggcggagaagatggagaagcggacgtgcgcgctgtgcccaaaagacgtggagtataatgtgctttactttgcacaatcagagaatatcgccgcacacgaaaactgtttactttactcttcgggactggtggagtgtgaggatcaggatcctctcaaccccgaccgcagtttcgacgttgaatctgttaaaaaagaaatacagcggggcaggaagctgaaatgtaagttctgtcacaagcgaggcgcgacagtgggctgcgacctgaaaaattgtaataagaactatcactttttctgtgccaagaaagacgatgccgtgccccagtctgatggcgtgagaggcatttataaactcctctgtcagcaacatgcccagttccccatcatcgcccagtcagcaaaatttagcggtgtgaagcgaaagagagggaggaaaaaaccactgtcagggaaccacgtgcagcctccagaaacgatgaagtgtaatacgtttatcagacaggtcaaagaagagcacgggagacatactgacgctactgtgaaagtgcctttcctgaaaaagtgtaaagaggccgggctactgaattatctgctggaagagatccttgataaggtccactccattcccgagaaactgatggatgaaactacctctgaaagtgactatgaggagatcggatcagccctcttcgattgccgcctttttgaggatacattcgtaaattttcaagccgcgatcgagaagaaaatccacgcctcacagcagagatggcagcagctgaaggaggaaattgaattactccaggacctcaagcaaacactatgttcgttccaagagaacagggatttaatgtcatcatctacatctatctcgtccctctcttattag

SEQ ID NO: 32873 - DNA, 996 bp, Artificial Sequence
  derived and/or modified sequence
atggcccaggccagcccccccaggcctgagcgggtgctgggcgccagcagccctgaggcccggcctgcccaggaggccctgctgctgcccactggagtcttccaggtggccgagaagatggagaagaggacctgtgccctgtgccccaaggatgtggagtacaacgtgctgtactttgcccagagtgaaaatattgctgcccacgagaactgcctgctgtacagcagcggcctggtggagtgtgaggaccaggaccccctgaacccagacaggagctttgatgtggagagcgtgaagaaggagatccagaggggcaggaagctgaagtgcaagttctgccacaagagaggagccaccgtgggctgtgacctgaagaactgcaacaagaactaccacttcttctgtgccaagaaggatgatgctgtgccccagagtgatggagtgcggggcatctacaagctgctgtgccagcagcacgcccagttccccatcatcgcccagagcgccaagttcagcggcgtgaagaggaagaggggcaggaagaagcccctgagcggcaaccacgtgcagcccccagagaccatgaagtgcaacaccttcatccggcaggtgaaggaggagcacggccgccacacagatgccaccgtgaaggtgcccttcctgaagaagtgcaaggaggccggcctgctgaactacctgctggaggagatcctggacaaggtgcacagcatccctgagaagctgatggatgagaccaccagcgagagtgactatgaggagatcggcagcgccctgtttgactgccgcctgtttgaggacacctttgtgaacttccaggccgccatcgagaagaagatccacgccagccagcagcgctggcagcagctgaaggaggagattgagctgctgcaggacctgaagcagaccctgtgcagcttccaggagaacagagacctgatgagcagcagcaccagcatcagcagcctgagctactag

SEQ ID NO: 32874 - DNA, 996 bp, Artificial Sequence
  derived and/or modified sequence
atggcccaggccagccccccccggcccgagcgggtgctgggcgcctcctctccagaggcgaggcccgcccaggaggccttgctactgcctaccggcgtttttcaggtggccgagaagatggaaaagcgcacgtgcgctctttgtcccaaagacgtagaatacaacgtcctgtattttgcacagagcgagaatattgccgctcatgaaaactgcttactgtactcctcgggcctggtggagtgtgaggatcaggatccactgaaccccgatcggagcttcgacgtggagtcagttaaaaaagagattcagagagggcgaaaactcaagtgtaagttttgtcacaaacggggggctacggtcggctgtgatctcaagaattgtaacaaaaattaccatttcttttgcgcaaagaaagatgatgctgtgccgcagagcgatggcgtccgtggaatttacaagctcttgtgtcaacagcacgcacagtttcccataatcgcccagtctgccaaatttagcggcgtgaaaagaaagcgcgggaggaagaaacctctctctggaaaccacgtgcaacctcccgagacaatgaagtgtaacaccttcattagacaggtcaaggaagaacatggtaggcatacagacgccactgtaaaggtgccctttctgaaaaaatgtaaggaagctggccttctgaactaccttctggaggagatcttagataaagtccactccattcccgaaaaactgatggacgagactacgtctgaatcagactacgaggaaattggtagcgccctctttgattgcaggctcttcgaagacacattcgtaaactttcaagcggctatcgagaagaaaatccacgcttcccagcaacgttggcagcaactgaaagaagagatcgaattgctgcaggatctgaagcagaccctgtgcagtttccaagagaatagagacctcatgtcgagctcaacaagcatatcctctctcagctactag

SEQ ID NO: 32875 - DNA, 1471 bp, Artificial Sequence
  derived and/or modified sequence
agcccagtgcttccaccacaaccgatgtcaactctcctagcgcccctccgctcaccggtaaaccaggacagtggaggggcgccctgatgcgggcaagactcagccaaaggtggaaaagttgaaggggtgttcccagcagagaggatgacacaaaggcaccaaaccacaaaacgtcacacgtaaacatcatacgtggcaaccacaagccaatcagttggatatttcattcattggtatacatatggactgtaaggtgtctttcaggttgcagaaaagatggaaaaaaggacatgtgcactctgccccaaagatgtcgaatataatgtcctatactttgcacaatcagagaatatagctgctcatgagaattgtttgctgtattcttcaggacttgtggaatgtgaggatcaggatccacttaatcctgatagaagttttgatgtggaatcagtaaagaaagaaatccagagaggaaggaagttgaaatgcaaattttgtcataaaagaggagccaccgtgggatgtgatttaaaaaactgtaacaagaattaccactttttctgtgccaagaaggacgacgcagttccacagtctgatggagttcgaggaatttataaactgctttgccagcaacatgctcaattcccgatcatcgctcaaagtgctaaattttcaggagtgaaaagaaaaagaggaaggaagaaacccctctcaggcaatcatgtacagccacccgaaacaatgaaatgtaatacattcataagacaagtgaaagaagagcatggcagacacacagatgcaactgtgaaagttccttttcttaagaaatgcaaggaagcaggacttcttaattacttacttgaagaaatattagacaaagttcattcaattccagaaaaactcatggatgagactacttcagaatcagactatgaagaaatcgggagtgcactttttgactgtagattgttcgaagacacatttgtaaattttcaagcagcaatagagaaaaaaattcatgcatctcaacaaaggtggcagcagttgaaggaagagattgagctacttcaggacttaaaacaaaccttgtgctcttttcaagaaaatagagatcttatgtcaagttctacatcaatatcatccctgtcttattagggattaccgtttcctaagccaagagtcatgtcaaattgcaatcaggctcaaaaccagagaccaggctgtgaaatccacacatctttagaactagtcgtctcctcttggcctcagcagctcttccctgttcttactggttgacattttgatcactctttgcacactcttgtgttttttgctcactgtcacattcccagcacctagtatgctcagtaaatgtttgtggaataagtgcataaaatgttcttaacctttgattctacttacagcccatgatagcctcttagatataataaatttggattatactacttta

SEQ ID NO: 32876 - DNA, 1359 bp, Artificial Sequence
  derived and/or modified sequence
gatctcgctatccggccgccacccgcagctgcagcacagtcatggcccaggcgtcgccgccccggcccgagagggtgctcggcgccagcagcccggaggcccggcccgcgcaggaggcgctcctccttcccaccggtgtctttcaggttgcagaaaagatggaaaaaaggacatgtgcactctgccccaaagatgtcgaatataatgtcctatactttgcacaatcagagaatatagctgctcatgagaattgtttgctgtattcttcaggacttgtggaatgtgaggatcaggatccacttaatcctgatagaagttttgatgtggaatcagtaaagaaagaaatccagagaggaaggaagttgaaatgcaaattttgtcataaaagaggagccaccgtgggatgtgatttaaaaaactgtaacaagaattaccactttttctgtgccaagaaggacgacgcagttccacagtctgatggagttcgaggaatttataaactgctttgccagcaacatgctcaattcccgatcatcgctcaaagtgctaaattttcaggagtgaaaagaaaaagaggaaggaagaaacccctctcaggcaatcatgtacagccacccgaaacaatgaaatgtaatacattcataagacaagtgaaagaagagcatggcagacacacagatgcaactgtgaaagttccttttcttaagaaatgcaaggaagcaggacttcttaattacttacttgaagaaatattagacaaagttcattcaattccagaaaaactcatggatgagactacttcagaatcagactatgaagaaatcgggagtgcactttttgactgtagattgttcgaagacacatttgtaaattttcaagcagcaatagagaaaaaaattcatgcatctcaacaaaggtggcagcagttgaaggaagagattgagctacttcaggacttaaaacaaaccttgtgctcttttcaagaaaatagagatcttatgtcaagttctacatcaatatcatccctgtcttattagggattaccgtttcctaagccaagagtcatgtcaaattgcaatcaggctcaaaaccagagaccaggctgtgaaatccacacatctttagaactagtcgtctcctcttggcctcagcagctcttccctgttcttactggttgacattttgatcactctttgcacactcttgtgttttttgctcactgtcacattcccagcacctagtatgctcagtaaatgtttgtggaataagtgcataaaatgttcttaacctttgattctacttacagcccatgatagcctcttagatataataaatttggattatactactttacttgta

SEQ ID NO: 32877 - DNA, 1318 bp, Artificial Sequence
  derived and/or modified sequence
cacaaaggcaccaaaccacaaaacgtcacacgtaaacatcatacgtggcaaccacaagccaatcagttggatatttcattcattggtatacatatggactgtaaggtgtctttcaggttgcagaaaagatggaaaaaaggacatgtgcactctgccccaaagatgtcgaatataatgtcctatactttgcacaatcagagaatatagctgctcatgagaattgtttgctgtattcttcaggacttgtggaatgtgaggatcaggatccacttaatcctgatagaagttttgatgtggaatcagtaaagaaagaaatccagagaggaaggaagttgaaatgcaaattttgtcataaaagaggagccaccgtgggatgtgatttaaaaaactgtaacaagaattaccactttttctgtgccaagaaggacgacgcagttccacagtctgatggagttcgaggaatttataaactgctttgccagcaacatgctcaattcccgatcatcgctcaaagtgctaaattttcaggagtgaaaagaaaaagaggaaggaagaaacccctctcaggcaatcatgtacagccacccgaaacaatgaaatgtaatacattcataagacaagtgaaagaagagcatggcagacacacagatgcaactgtgaaagttccttttcttaagaaatgcaaggaagcaggacttcttaattacttacttgaagaaatattagacaaagttcattcaattccagaaaaactcatggatgagactacttcagaatcagactatgaagaaatcgggagtgcactttttgactgtagattgttcgaagacacatttgtaaattttcaagcagcaatagagaaaaaaattcatgcatctcaacaaaggtggcagcagttgaaggaagagattgagctacttcaggacttaaaacaaaccttgtgctcttttcaagaaaatagagatcttatgtcaagttctacatcaatatcatccctgtcttattagggattaccgtttcctaagccaagagtcatgtcaaattgcaatcaggctcaaaaccagagaccaggctgtgaaatccacacatctttagaactagtcgtctcctcttggcctcagcagctcttccctgttcttactggttgacattttgatcactctttgcacactcttgtgttttttgctcactgtcacattcccagcacctagtatgctcagtaaatgtttgtggaataagtgcataaaatgttcttaacctttgattctacttacagcccatgatagcctcttagatataataaatttggattatacta

SEQ ID NO: 32878 - DNA, 996 bp, Artificial Sequence
  derived and/or modified sequence
atggcccaggctagtcccccaaggcccgagcgggtcctgggcgcaagcagtccagaggcacggccagctcaggaggcactgctcctgcccaccggcgtcttccaagttgccgagaagatggagaagcgtacatgcgccctctgtccaaaagatgtcgaatacaatgtcctgtactttgcgcagtcagagaatatcgctgcacacgaaaattgtctgctgtacagcagtggcctggttgagtgcgaggatcaggaccccctcaacccagacaggtcatttgacgtcgagtctgtgaagaaagagatacagagaggaaggaaactaaagtgtaagttttgtcacaagagaggcgctaccgtgggatgcgatctcaagaactgcaacaaaaattatcatttcttttgtgctaagaaagacgatgctgtcccacagtctgacggcgttcgcggaatctacaagctactttgtcagcagcacgcgcagttccctataatcgcccagagtgctaagtttagtggagtgaaacggaagcgaggacgcaagaaaccgctgtccggtaaccatgtacagccccctgagactatgaaatgcaataccttcataaggcaggtaaaggaagaacatggccgtcacaccgacgccactgtcaaagtgccctttctgaaaaaatgtaaggaggcagggttattgaactatttgctggaggagatcctcgacaaggtgcattctatccccgagaagctgatggatgagacaacttcagagagtgactacgaagaaatcgggtccgccttgtttgactgccgcctcttcgaagatacctttgtgaacttccaagccgctatcgaaaagaaaatccatgcttcccagcagcgatggcagcagctaaaagaagaaattgagctactgcaggacttaaaacagacactttgttcattccaggagaatcgtgacctgatgtcatcctctacctccatttcttctttatcttattag

SEQ ID NO: 32879 - DNA, 996 bp, Artificial Sequence
  derived and/or modified sequence
atggcccaggccagcccccccagacccgagagagtgctgggcgccagcagccccgaggccagacccgcccaggaggccctgctgctgcccaccggcgtgttccaggtggccgagaagatggagaagagaacctgcgccctgtgccccaaggacgtggagtacaacgtgctgtacttcgcccagagcgagaacatcgccgcccacgagaactgcctgctgtacagcagcggcctggtggagtgcgaggaccaggaccccctgaaccccgacagaagcttcgacgtggagagcgtgaagaaggagatccagagaggcagaaagctgaagtgcaagttctgccacaagagaggcgccaccgtgggctgcgacctgaagaactgcaacaagaactaccacttcttctgcgccaagaaggacgacgccgtgccccagagcgacggcgtgagaggcatctacaagctgctgtgccagcagcacgcccagttccccatcatcgcccagagcgccaagttcagcggcgtgaagagaaagagaggcagaaagaagcccctgagcggcaaccacgtgcagccccccgagaccatgaagtgcaacaccttcatcagacaggtgaaggaggagcacggcagacacaccgacgccaccgtgaaggtgcccttcctgaagaagtgcaaggaggccggcctgctgaactacctgctggaggagatcctggacaaggtgcacagcatccccgagaagctgatggacgagaccaccagcgagagcgactacgaggagatcggcagcgccctgttcgactgcagactgttcgaggacaccttcgtgaacttccaggccgccatcgagaagaagatccacgccagccagcagagatggcagcagctgaaggaggagatcgagctgctgcaggacctgaagcagaccctgtgcagcttccaggagaacagagacctgatgagcagcagcaccagcatcagcagcctgagctactag

SEQ ID NO: 32880 - protein, 335 aa, Artificial Sequence
  derived and/or modified sequence
MAEGGSPDGRAGPGSAGRNLKEWLREQFCDHPLEHCEDTRLHDAAYVGDLQTLRSLLQEESYRSRINEKSVWCCGWLPCTPLRIAATAGHGSCVDFLIRKGAEVDLVDVKGQTALYVAVVNGHLESTQILLEAGADPNGSRHHRSTPVYHASRVGRADILKALIRYGADVDVNHHLTPDVQPRFSRRLTSLVVCPLYISAAYHNLQCFRLLLLAGANPDFNCNGPVNTQGFYRGSPGCVMDAVLRHGCEAAFVSLLVEFGANLNLVKWESLGPESRGRRKVDPEALQVFKEARSVPRTLLCLCRVAVRRALGKHRLHLIPSLPLPDPIKKFLLHE

SEQ ID NO: 32881 - DNA, 1008 bp, Artificial Sequence
  derived and/or modified sequence
atggctgaggggggctcacccgacggacgggccgggcctgggtctgctggcaggaatttgaaagaatggcttcgggaacaattttgcgaccacccactcgagcattgcgaggatacacgtttgcacgacgctgcctatgtaggagacttgcagacactgcggtctttgttgcaggaagagtcgtatcgctcaaggattaacgagaaatccgtttggtgttgtggctggttaccctgtactcccttgaggatagccgcaacggctggacacggttcctgtgtcgacttccttattcgaaaaggagcagaggtagatctagtcgacgttaaggggcagacagcgttgtatgtagccgtcgtgaatggtcatcttgaatccactcaaattctactggaggctggagccgatccgaatggatccagacatcaccgtagtaccccagtataccacgccagccgagtgggcagagccgacatcctgaaggcgctgataagatacggcgcggatgtagacgtgaaccatcacctcactcccgacgtacagccccgattttcccgacgactgacatctctggtcgtgtgtccactctatatttcggcagcttatcataacttgcagtgctttcggcttctgctccttgctggcgcgaacccagatttcaattgcaatgggccagtgaatacccagggcttttatcgggggtcccctgggtgtgtcatggacgccgttctgcgacacggctgtgaagcagcttttgttagcctcttggtggaatttggcgcaaatctgaatttggttaagtgggagagccttggtcccgaatctagggggagaaggaaggtggatccagaagcactgcaggtttttaaggaggccaggtctgttcccagaaccctcttatgtctgtgtagggtagcagtgcggagagccctgggcaagcaccgcctccacctgattccctctttgcccctgccagatccaataaagaagtttttgctgcacgaatag

SEQ ID NO: 32882 - DNA, 1008 bp, Artificial Sequence
  derived and/or modified sequence
atggccgagggcggcagcccagatggccgggccggccctggcagcgctggcaggaacctgaaggagtggctgcgggagcagttctgtgaccaccccctggagcactgtgaggacacccggctgcatgatgctgcctacgtgggggacctgcagaccctgcggagcctgctgcaggaggagagctaccgcagccgcatcaatgagaagtctgtgtggtgctgcggctggctgccctgcacccccctgagaattgctgccacagctggccacggcagctgtgtggacttcctgatcagaaaaggagctgaggtggacctggtggatgtgaagggccagacagccctgtatgtggccgtggtgaatggccacctggagagcacccagatcctgctggaggccggggctgaccccaacggcagccgccaccacaggagcacccctgtgtaccacgccagccgggtgggccgggctgacatcctgaaggccctgatccgctacggggctgatgtggatgtgaaccaccacctgaccccagatgtgcagccccgcttcagccggcggctgaccagcctggtggtgtgccccctgtacatctctgctgcctaccacaacctgcagtgcttccggctgctgctgctggccggggccaacccagacttcaactgcaatggacctgtgaacacccagggcttctaccggggcagccctggctgtgtgatggatgctgtgctgcggcacggctgtgaggccgcctttgtgtccctgctggtggagtttggagccaacctgaacctggtgaagtgggagagcctgggccctgagagccggggccgcaggaaggtggaccctgaggccctgcaggtgttcaaggaggcccggtctgtgcccaggaccctgctgtgcctgtgccgggtggccgtgcggcgggccctgggcaagcaccggctgcacctgatccccagcctgcccctgcctgaccccatcaagaagttcctgctgcacgagtag

SEQ ID NO: 32883 - DNA, 1008 bp, Artificial Sequence
  derived and/or modified sequence
atggccgagggcggcagccccgacggccgggccggccccggcagcgccgggagaaatctgaaagaatggctgcgcgagcaattttgtgaccacccgctggaacactgcgaagacacccgtttacacgatgccgcctatgttggagatctccagaccctgcggtctttgctgcaggaagagtcgtacaggtcccggattaacgagaaaagtgtgtggtgctgcggatggttaccatgcacccccttgaggatagccgccacagccggccacggctcttgcgttgactttttgatccgcaaaggcgccgaagttgatttggtggacgtgaagggtcaaacagctctttacgtggccgttgtgaacgggcaccttgaatctacccaaatccttctggaggcaggtgctgacccaaatgggtcacggcaccaccgctctacacccgtatatcacgcttctagagtggggcgagcagacatacttaaagcactgatccggtacggggccgacgttgacgtcaatcatcatctaaccccggatgtgcaaccgagatttagtcgccggcttacatcactggtcgtctgtccgctatatatttctgcggcctaccataacctgcagtgtttcagattgctgcttctggccggagcaaacccagatttcaactgcaatggcccagtgaatacgcagggcttttatcgtggctctcccggttgcgtaatggacgcggttctccggcacgggtgtgaggccgcgtttgtgtcattgctggtagagttcggggcaaaccttaatctagtcaaatgggaatccctgggacctgaatcgcggggcaggcgtaaggtggaccccgaggcgttgcaagtgtttaaggaggcgcggagcgtgccccggacccttctgtgtctgtgccgcgtggccgtgaggcgcgctctgggcaagcacagattgcatttgattccgagtctccctctgccagatcctatcaagaagtttctgctccatgagtag

SEQ ID NO: 32884 - DNA, 6994 bp, Artificial Sequence
  derived and/or modified sequence
tcggttagccgcgaagttcccgccggacgaagggaccagccagcgccctgctagacagcgaggccggaagcggaggcgtggcccctgcgcggccccggaaaccagtgaggccggcgcgcgcccgccggaagccgcgaccccgacgcgccccccattgccctcggcgccggaagtggtcgcgggtcgttctgcttcctgcccgaggggcgtgcgcgggtcaggggcggccgcggaggcggaagcatccatggcggagggcggcagcccagacgggcgggcagggccgggctccgcaggtcgtaatctgaaggagtggctgagggagcaattttgtgatcatccgctggagcactgtgaggacacgaggctccatgatgcagcttacgtcggggacctccagaccctcaggagcctattgcaagaggagagctaccggagccgcatcaacgagaagtctgtctggtgctgtggctggctcccctgcacaccgttgcgaatcgcggccactgcaggccatgggagctgtgtggacttcctcatccggaagggggccgaggtggatctggtggacgtaaaaggacagacggccctgtatgtggctgtggtgaacgggcacctagagagtacccagatccttctcgaagctggcgcggaccccaacggaagccggcaccatcgcagcacccctgtctaccacgcctctcgcgtgggccgggcagacatcctgaaggccctcatcaggtacggggctgatgttgacgtcaaccaccacctgactcctgatgtccagcctcgattctcccggcggctcacctccttggtggtctgccccttgtacatcagcgcagcctaccacaacctccagtgcttccggctgctcctcctggctggcgcgaaccctgacttcaactgcaatggtcctgtcaacacacagggattctacaggggctcccctgggtgcgtcatggatgctgttctgcgccacggctgtgaggcagccttcgtgagcctgctggtagaatttggagccaacctgaatctagtgaagtgggaatcgctgggcccagagtcgagaggaagaagaaaagtggaccctgaggccttgcaggtctttaaagaggccagaagtgttcccagaaccttgctgtgtctgtgccgtgtggctgtgagaagagctcttggcaaacaccggcttcatctgattccttcgctgcctctgccagaccccataaagaagtttctactccatgagtagactccaagtgctgcggttgattccagtgagggagaaagtgatctgcagggaggtggacaccgagccctgagtgctgtgctgctgctggtctcctgatggctgttgctgcagaagatgtcctcgtagactgtcattgctcctcaggtgcctgggccgctgaacagtccttgggtcattgtcagctgagaggcttatactaaagttattattgtttttcccaagttctctgttctggattttcagttgcatattaatgtaacgggccatggggtatgtacatgtaggggctgaggttggaggcctactaatttccctgtagggaagactcccagcacttctggaactgtgcttctctttatttttctacttctcaatttgatggttcgattaaagccttctagtatctcaatgaaaagggagtttcgtaagcaaaatagaggacagaaatgcagttcatgaacttgctggttggtttttcctgctcctggggtaacacatgcgcttgtcatacacgccccttccttgccccttcagtattctctctttgcgatggaggtctcatagtgagtgtcttcactcaagggtggtttcctggctgcacggcacctgttccaacacctactgtgcctctcatcaggtgtcacgatttttctgccacttcaccttagggagcttccagtgattgattttaggaggcccacaccaaactccccaggaaatgactgccttccttgggaccaaggaccgttccaacagcattcactgccagttctaataggcgaggaaaatgcccgaggcgctgtcttctgtcccccacacgtaccagaaagtgaaaaatgcagcgagtcctctgggtggttatgagcctccaggcgcatgctgtccagtggacagaacatctggcggttggttgattgctctcttttgtcttggtcgctgcttctagaatctatgcaggggatagcagtgaggtcagaagtctttcccgggagagagatggcctgggttatcattgctgatagctttggctgcatgagttgggcttccccttacccagggctgcacagccaggtgtgagggtcaccggcaggtgggctggtggctgcagcctcagagccctcccaggttgctgctgtttccagtgaatcacatttcgtcatttgaagcccatgaggaccattgtgtggatccatggtgattctagacttcagatatatttaggaaggcgcagatttcaaatctgtgtttgattttctgtaataagagaaatccaatttgtaaaacttgaacaatgataccgttttatttacttagtagcatcactgtgtgtcttagcaggcaggcagtgtctggccattattgcgttctacagccagaggatagaattctatacccccaaccccttgtgtcacaaatgggctctgtgtgggtcaccccagctgacccgtgtatgtgcagatgcagttccgaagggaagaacagtcctcgggtgattcagaggggaaaatgcaatccgggaggtgtttcctcagctgaggtgacactgttagaagctgtgatggttgtgtaaatgtgggctgtgtgctgttcccgaggggagcttgggattgggtcctgctgaagccaggagggtcttcccaagataggagaggaaccgcaggtggtgagcggctggggagggccaggacagccggggctgggtgctgcaggggcttcagcccgggagagggggtgggcgtgttctttgtggtaccaaagtgggactaggacaaaaattgggctgtggctggggcaggagctatagggagttaaggaatgatgatacggaagttggagccaccaccgtggactgggccttgtcactggaggtcgtaggcagtggctcatcaccctggtagggctgataggggctttcagggaggctggttagctccctgcactctggctctttactggcttactgtttagctcctcccacctcgaggctcttcttcctgccaccctttgggctcagaggagggtggcttttttcgaggtgagccatgttgtagacacatgatacgctctgcgtctgctctactgagtactttctgcaggggcctgttaaggacgaggcctccccagccctgcccggtgcaggaggtggctcagttattgaaccttttgggaagcagcacctgggaatgctgcctcgtgggagtcccatgcgtgagtgtggtggtgtgaccttcaggctgcacagaggcaaggacccagatgtggcagcatgggcgtcatgctcctttgcacagcccagggcctgttttggagggaccaggtcactgcccctggtctctctaggaggagtggactgaatggatcgttgcagagaagactcacccagacctggccagggaatgatgtatctggggagagaatgagctggaggagggggcctctcatggcccttccctggcctgtggcccagcctggctggcctgcaggtgtctagggtctcagcttttcatttgcagaggacatgttcaacttcctctctgttcaagccagcctttgccaattttttcagaatccaaacaatttggaggtttggtatcttgtttcatagctgccaaatatgaatctgaaaacagggtgggtagctaaggtcattcctcctgggttttagtggcattgccttccttcactaaagctcccttttttttctgttggcaaggacaggttacagaataggaagagtagcactttccgcctaagcactttaggaaatcacctttctaagccctggggcgcccaagtcccatgggacagggaaacgtggtcctcagtgaggctgctgcctggctggcccggagtcctccctaggagaggggctcgatgggctgggggaaggagcctgaaggttgcccctggttgcatcccagaagcatctgactgtcaccactgccagtggctgtggaacagtcctgggccctgggccttggctgctgtcaacagatgggctgggctgggctgtggtggggtgggggacaacgttggtaactctgagaattcagctttggagtcccgggtgaggggttttagataaacccatcaatatcacccacattctgtgactctttgcatcactcgtgttatttatttatttatttatattctgccttgttccagaaaagtgtttaaggcaacaatgcttgttttttggtgttttcttttgacatttgaaaatttagtacattgttaaaatgtacttgttaaacaggtaattttaaagagaaggaacaattgtttttagtaagttttctttttcctttttcaatgaattgattcttcaaattaaaagttcttgagagaaggagaggaagatacagcagacataggactgagccaaggaagagtctgcctgagagagacgcttggcctgtgctttgctgccatccgtgcggccttggccacatccctattaacagaggcagctccacttcagacagggacaaggcttcctgctgtgcctttctggcagggttttgtggggtcacatgggaagcaatgtgttacgcaagcagtctccatgtgtgtgtaaactgctgtcctggtgacttgtccctcttcttagtggaaatgcatttgagatggtgacagggctggatgaacgtgtgaccctgggagatccgggctggactgtggaccccgatgggccagagtccttgtggcccacagcatagcactggggacagagcgctctatgcaggtgaggcgtatgagaacagcatggtaaataattgatgaagtcacatttgttcaacttaaaggattgttctttattctgaagttattttcttccttatttggatgataaaatttccttttatgtaatgaaggtaaaagtagagggcaatatttttgctttttgaaatgctcttggttgcaaaacaaaatgttggttgctgtttgtcagccccagaatttcttcttaagttcgcctgtctctgaaatcccaaagtcacggaaccgcagtctagctgtggtgcatgtttacgtattggtgagaaattcctcttgggttcttgaacagcctgtacgctggcaggcagcactgcagcatttctgctgctcatggccaagaacgagtctggagatcgctgcgtgcggttttaggaagtgccaacacccgtggtgatgggcctctggccacccctggatccatgggacacactcacaggaagctgatgtggccttctcggtgaggactgcaccttaacctgggcactgggagcctgtggcccccctgtatgttggtgatgacactagtgtgggtcttctggctctggggctacagcttctgcctcctcacctggccgtcggtactcggcaagcaggcctggcctcccggggcctggatccctaccggctgggattggcctcctggaagtacctgtttgggccatgtgacctcctttctcacttatgcctcactcccctcctcccgctccaaacccgaacctctcagtgtggaatgaacgctccaaacccgaacctctcagtgtggaatgaacgctccaaacccgaacctctcagtgtggaatgaaacagtttagatgtgtacatgatgcacgtgggtgggattcacatcccaggagaattccacggagaggaatgtgcagattttgaagtgtacagtgatgtgtggaataaatactagaaattctcagcagacagtgggatggagaagtgagtgggggcaggagggggatttctgttgccttgacatgtcgttgctcagtgcctggattgcaggcgagtctctcttttttatgttgctttgatttcaagatctcttagatatactaggtagtgtatgaatgtgcataaatccagtttgagaatggtgtttatgaagaagctgtttcgtgtgtacagttgctgctgtaatttagccagcagtgccctgccctgccctgcagtgtctgctcagctcccactgcttctctttgctgttgggcatgtgaggcatgacttggaggggggcctggtgcctggggacctgctgaagagaatgctcaccaccagctctctgtttccctttctgctttggtaatcaacacgtgtttgcctgcagtggccgggaccgtgactgtttctgcccttgtgcctagttaagagccttcaaaagcataatgaacacttttgatatgatattgtaactttagtaaatgctttacttccctctaattgcccccaaatgccttaattttgtggactgtttatttcaacaggtggaagtgttggtcgtgcgaaatcttggtattcgcatttcaagaagggagttcttttttctttcttctttctatggaacgtttcaagtgattggatagaaagaagggctctgaagcaggagttttcacctgctctgagggaacttggggctccagggacgtaccccaaatgttgcccaggttgaaactccctgacagcctgttctacgtagtggctcgtggtttccagtttgaagagagttgtgcccctaaaagtgtttgaaacctgtggctttcaagcaaggtaccgttgtccccacagtgttccgtggggtagggggtgatggagactgtgggcaagcctgttgtttttggccccctgttgttacatgggacctgttttgacggtgggagggtgagatgtgaagatgtgggatgaacctggaatgaacgaattaaataaagacatgcatccatctgtcagcga

SEQ ID NO: 32885 - DNA, 1008 bp, Artificial Sequence
  derived and/or modified sequence
atggctgaaggaggcagtccagacggaagggccggaccaggatcagccggtcgtaatctcaaggagtggctacgcgagcagttctgcgaccaccccctggaacattgtgaggatacccggttgcacgacgccgcatacgtcggcgatctgcaaaccctccgctctctgctgcaggaggagagttacaggtcccgcattaatgagaagtctgtgtggtgctgtggctggctcccatgcacacctctccgtatcgccgctacagccggtcatggcagctgcgtggacttcctgattcgaaaaggcgctgaggtggatctggtcgacgttaaagggcagaccgctttgtatgtcgctgttgtcaatgggcaccttgagtcaactcaaatcctgctcgaggcgggtgcagatcccaacggcagtcgacaccaccgcagcaccccagtgtaccatgctagcagagtcggcagggccgacattcttaaggcacttatccggtatggcgctgatgtggacgtcaaccaccacctgacccctgatgtacaaccacgcttctcccggcgtctcacgtcactggttgtgtgtcctttgtacatttctgccgcttatcataacctccagtgtttcaggttgctccttctcgctggtgccaaccctgacttcaattgcaatggacccgtcaatacccagggcttctaccgaggctcccctggctgtgtcatggacgctgtgctacgtcatggctgcgaggctgccttcgtgagtctgctagtcgagttcggggcaaatttgaacctcgtgaaatgggagtcactggggcctgaatcacgcggacgacgcaaggtggaccctgaggccctgcaggtattcaaggaggctcggtccgtgccacgcaccctgctgtgcctgtgccgtgtggcagtacgcagagccttgggaaagcacagactccacttaatcccaagcctgcccctgcccgatcccatcaaaaaattcctccttcacgaatag

SEQ ID NO: 32886 - DNA, 1008 bp, Artificial Sequence
  derived and/or modified sequence
atggccgagggcggcagccccgacggcagagccggccccggcagcgccggcagaaacctgaaggagtggctgagagagcagttctgcgaccaccccctggagcactgcgaggacaccagactgcacgacgccgcctacgtgggcgacctgcagaccctgagaagcctgctgcaggaggagagctacagaagcagaatcaacgagaagagcgtgtggtgctgcggctggctgccctgcacccccctgagaatcgccgccaccgccggccacggcagctgcgtggacttcctgatcagaaagggcgccgaggtggacctggtggacgtgaagggccagaccgccctgtacgtggccgtggtgaacggccacctggagagcacccagatcctgctggaggccggcgccgaccccaacggcagcagacaccacagaagcacccccgtgtaccacgccagcagagtgggcagagccgacatcctgaaggccctgatcagatacggcgccgacgtggacgtgaaccaccacctgacccccgacgtgcagcccagattcagcagaagactgaccagcctggtggtgtgccccctgtacatcagcgccgcctaccacaacctgcagtgcttcagactgctgctgctggccggcgccaaccccgacttcaactgcaacggccccgtgaacacccagggcttctacagaggcagccccggctgcgtgatggacgccgtgctgagacacggctgcgaggccgccttcgtgagcctgctggtggagttcggcgccaacctgaacctggtgaagtgggagagcctgggccccgagagcagaggcagaagaaaggtggaccccgaggccctgcaggtgttcaaggaggccagaagcgtgcccagaaccctgctgtgcctgtgcagagtggccgtgagaagagccctgggcaagcacagactgcacctgatccccagcctgcccctgcccgaccccatcaagaagttcctgctgcacgagtag

SEQ ID NO: 32887 - protein, 747 aa, Artificial Sequence
  derived and/or modified sequence
MLGKGVVGGGGGTKAPKPSFVSYVRPEEIHTNEKEVTEKEVTLHLLPGEQLLCEASTVLKYVQEDSCQHGVYGRLVCTDFKIAFLGDDESALDNDETQFKNKVIGENDITLHCVDQIYGVFDEKKKTLFGQLKKYPEKLIIHCKDLRVFQFCLRYTKEEEVKRIVSGIIHHTQAPKLLKRLFLFSYATAAQNNTVTDPKNHTVMFDTLKDWCWELERTKGNMKYKAVSVNEGYKVCERLPAYFVVPTPLPEENVQRFQGHGIPIWCWSCHNGSALLKMSALPKEQDDGILQIQKSFLDGIYKTIHRPPYEIVKTEDLSSNFLSLQEIQTAYSKFKQLFLIDNSTEFWDTDIKWFSLLESSSWLDIIRRCLKKAIEITECMEAQNMNVLLLEENASDLCCLISSLVQLMMDPHCRTRIGFQSLIQKEWVMGGHCFLDRCNHLRQNDKEEVPVFLLFLDCVWQLVHQHPPAFEFTETYLTVLSDSLYIPIFSTFFFNSPHQKDTNMGREGQDTQSKPLNLLTVWDWSVQFEPKAQTLLKNPLYVEKPKLDKGQRKGMRFKHQRQLSLPLTQSKSSPKRGFFREETDHLIKNLLGKRISKLINSSDELQDNFREFYDSWHSKSTDYHGLLLPHIEGPEIKVWAQRYLRWIPEAQILGGGQVATLSKLLEMMEEVQSLQEKIDERHHSQQAPQAEAPCLLRNSARLSSLFPFALLQRHSSKPVLPTSGWKALGDEDDLAKREDEFVDLGDV

SEQ ID NO: 32888 - DNA, 2244 bp, Artificial Sequence
  derived and/or modified sequence
atgcttggaaagggtgttgtgggagggggagggggtacaaaggcaccaaaaccaagttttgtgtcctacgtgcggccagaagaaatccacacaaacgagaaggaggtcacagaaaaggaagtgaccctgcacttgctacccggcgagcagctcctgtgtgaggcatccacagtgcttaagtacgtgcaagaggattcttgccaacacggggtgtatggtaggctggtgtgtaccgacttcaaaatcgccttcttaggggacgacgagtcagcccttgacaacgacgagacccagttcaagaataaagtgatcggcgagaacgacatcacccttcattgcgtcgaccaaatttacggagtattcgatgaaaaaaagaagacactgtttggccaacttaaaaaatacccagagaaattgattatccattgcaaagacctgcgcgtgtttcaattctgcctgaggtatactaaggaggaggaggtaaagagaatcgtctctgggattatccatcacacacaggcccccaaattgcttaaacgactcttcttgttcagctacgccacagcggctcagaataatacagtgacagaccccaaaaatcacacggtgatgttcgacacgctcaaagattggtgctgggagctggaaagaacaaagggaaacatgaagtataaggcggtgtcagtgaatgaaggttataaggtgtgcgagcggttgccagcatactttgtagtgcctactcctcttcccgaagagaacgttcagcgatttcaagggcacggcattcctatatggtgttggagctgccataatggctctgccctgctgaagatgagcgccctccccaaagagcaggatgatggaatcctccagatccagaaatccttcctcgatggtatctacaaaacaatccaccggcctccctatgaaatcgtgaagaccgaggatcttagttctaacttcctgtctcttcaggagatccaaacagcctattcgaagttcaagcagcttttcctgattgacaacagtacagaattctgggataccgacataaaatggttctctttattggagtcctccagttggcttgacattatccgaaggtgcctcaaaaaggctatcgaaatcactgaatgtatggaagctcagaacatgaacgtgctgttgctggaagagaatgccagtgacctgtgctgtctcatctcatcgcttgttcagcttatgatggatccacactgtagaacaaggatcggattccaatccctgattcaaaaggagtgggtaatgggcgggcattgttttcttgatcggtgtaaccacttaaggcaaaacgataaggaggaggtgcccgttttcctgttattcctggattgcgtatggcaactcgtccatcaacaccccccggcttttgaattcacagaaacctacctcactgtcctttcagattccctttacatccccattttctcaacctttttttttaacagtccccaccagaaggataccaatatgggccgggagggccaggatacccaatccaagccacttaatctgctgaccgtgtgggactggtctgttcagtttgaaccaaaggcacagacgttgttgaaaaatccactgtacgtcgagaaaccaaagttggataagggacagaggaaggggatgcgtttcaaacatcagagacaactgtctcttcccttaacacagtccaagtcctcaccaaagcggggatttttcagagaggaaacagatcacctcattaaaaatctcttgggcaagagaatttctaaactgatcaacagttctgacgagctgcaggataattttagagagttctacgacagctggcactccaaatccactgattaccacggcctattattgcctcatattgagggtcctgaaattaaagtgtgggcccagcgctatttgcggtggattcccgaggctcagatcctcggcggggggcaggtggccacattatcgaagctgcttgagatgatggaagaggtgcagtccttacaggagaaaattgacgaaagacatcacagccagcaagccccacaggcagaggccccgtgcctgctgagaaatagtgcccgcctgagcagcctctttccattcgccctgctgcaacgtcactcttcgaagcctgtgctacctacgtccggctggaaggccctgggagacgaggacgatctggccaagcgggaggatgaattcgtggacctgggtgatgtatag

SEQ ID NO: 32889 - DNA, 2244 bp, Artificial Sequence
  derived and/or modified sequence
atgctgggcaagggcgtggtgggcggcggcggcggcaccaaggcccccaagcccagctttgtgtcctatgtgcggcctgaggagatccacaccaatgagaaggaggtgacagagaaggaggtgaccctgcacctgctgcctggagagcagctgctgtgtgaggccagcacagtgctgaagtatgtgcaggaggacagctgccagcacggcgtgtatggccgcctggtgtgcacagacttcaagatcgccttcctgggagatgatgagagcgccctggacaatgatgagacccagttcaagaacaaggtgattggagaaaatgacatcaccctgcactgtgtggaccagatctacggcgtgtttgatgagaagaagaagaccctgtttggccagctgaagaagtacccagagaagctgatcatccactgcaaggacctgcgggtcttccagttctgcctgcgctacaccaaggaggaggaggtgaagagaattgtgtctggcatcatccaccacacccaggcccccaagctgctgaagaggctcttcctgttctcctatgccacagctgcccagaacaacacagtgacagaccccaagaaccacacagtgatgtttgacaccctgaaggactggtgctgggagctggagaggaccaagggcaacatgaagtacaaggctgtgtctgtgaatgaaggctacaaggtgtgtgagcggctgcctgcctactttgtggtgcccacccccctgcctgaggagaatgtgcagcgcttccagggccacggcatccccatctggtgctggagctgccacaatggaagtgccctgctgaagatgtctgccctgcccaaggagcaggatgatggcatcctgcagatccagaagagcttcctggatggcatctacaagaccatccacaggcctccctatgaaattgtgaagacagaggacctgagcagcaacttcctgagcctgcaggagatccagacagcctacagcaagttcaagcagctgttcctgattgacaacagcacagagttctgggacacagacatcaagtggttcagcctgctggagagcagctcctggctggacatcatccgccgctgcctgaagaaggccatcgagatcacagagtgcatggaggcccagaacatgaatgtgctgctgctggaggagaatgccagtgacctgtgctgcctgatcagcagcctggtgcagctgatgatggacccccactgcaggaccagaattggcttccagagcctcatccagaaggagtgggtgatgggcggccactgcttcctggaccgctgcaaccacctgcggcagaatgacaaggaggaggtgcctgtgttcctgctcttcctggactgtgtgtggcagctggtgcaccagcaccccccagcctttgagttcacagagacctacctgactgtgctgagtgacagcctgtacatccccatcttcagcaccttcttcttcaacagcccccaccagaaggacaccaacatgggccgggagggccaggacacccagagcaagcccctgaacctgctgactgtgtgggactggagcgtgcagtttgagcccaaggcccagaccctgctgaagaaccccctgtatgtggagaagcccaagctggacaagggccagaggaagggcatgaggttcaagcaccagaggcagctgagcctgcccctgacccagagcaagagcagccccaagaggggcttcttccgggaggagacagaccacctgatcaagaacctgctgggcaagaggatcagcaagctgatcaacagcagtgatgagctgcaggacaacttccgggagttctatgacagctggcacagcaagagcacagactaccacggcctgctgctgccccacatcgagggccctgagatcaaggtgtgggcccagcgctacctgcgctggatccctgaggcccagatcctgggcggcggccaggtggccaccctgagcaagctgctggagatgatggaggaggtgcagagcctgcaggagaagattgatgagcggcaccacagccagcaggccccccaggccgaggccccctgcctgctgagaaattctgcccggctgagcagcctcttcccctttgccctgctgcagaggcacagcagcaagcctgtgctgcccaccagcggctggaaggccctgggagatgaagatgacctggccaagcgggaggatgaatttgtggacctgggagatgtgtag

SEQ ID NO: 32890 - DNA, 5187 bp, Artificial Sequence
  derived and/or modified sequence
ggggcgagcggtgtcagcggcggagccggatgcgggcggcatcgcggcggtcgcggccttggggatgggcggagccccagccgctagtgctggtggccgccgctgctgccccagctggagcccgagccgccgcctctgcgtccgcgcgtcgctgcttcccagggcggcggtatgctggggaaaggagtagtcggcggtggcggcggcaccaaggcccccaagccctccttcgtgtcgtacgtacgccctgaggaaattcacacaaacgaaaaggaagtaacagagaaggaagtaactcttcacttgttgccaggtgaacagctgctttgtgaagccagcacagtactgaagtatgtccaggaagattcctgtcagcatggggtctatgggaggcttgtctgcacagacttcaagattgccttcttgggtgatgatgaatctgcattggataatgatgaaactcaatttaagaataaggttataggagaaaatgacattacactccactgtgttgatcagatttatggagtgtttgatgagaaaaagaaaactctctttggacaactgaagaaataccctgagaagctcatcatccactgcaaagaccttcgagtgttccagttttgtctgaggtacacaaaggaagaggaagtcaaaaggattgtcagtggcataattcatcatacccaggctcctaaactgcttaaacgattatttctgttttcctatgcgactgctgcacaaaacaatacagtcactgatcccaagaaccataccgtaatgtttgacacacttaaggactggtgttgggaactggaacggaccaaaggcaacatgaagtacaaagcagtgagtgtcaacgaaggctataaagtctgtgagagattgccagcatactttgttgtccccacccctcttcctgaagagaatgtgcagcgctttcagggtcatggcataccaatatggtgttggtcctgccacaatggaagtgcccttttgaaaatgtcagcactgcccaaagaacaggatgacggcattttacaaatccaaaagagcttcttagatggaatttacaagaccatccacaggccaccctatgaaattgttaaaacggaagacctgtcaagcaacttcctgtccctgcaggaaatccagactgcatactctaaatttaaacagctatttctgatagataacagtactgaattttgggacacagatataaaatggttttctctgttggaaagtagcagctggcttgacataatcagacgttgcctgaaaaaagcaatagagattacagaatgtatggaagcacaaaacatgaatgttcttcttttagaggagaatgcatccgacctctgctgtctcatttcctctctggtgcaactgatgatggacccccactgcagaaccagaattggtttccagagcctcatccaaaaggagtgggtcatgggtggccactgtttcttggatcgctgcaaccatctccgccagaacgacaaagaggaggttcctgtgttcctgcttttcctagattgtgtctggcagctggtgcaccagcatcccccggcatttgaattcacagagacttacctgactgttttgtcagatagcctgtatatacctatttttagcaccttcttcttcaattcacctcatcaaaaagatactaacatgggtagagaaggccaggatacacaaagcaagcctttgaatctgctcaccgtgtgggattggtcggtgcagtttgaacccaaagcccagacattgctcaaaaaccctctttatgtggaaaagccaaaactggacaaaggccaacggaaaggaatgcgcttcaaacatcaacgacaactttctttgccacttacacaatctaagtcatctcccaaaagaggatttttcagggaagaaacagatcatttaattaaaaaccttctgggcaagagaattagcaaacttattaattcttctgatgagctccaagacaactttcgagagttctatgacagctggcatagcaagtccactgactaccatggtttgttgttaccgcatatcgaggggcccgaaatcaaagtctgggcccagcgctacctacgttggattccagaagcccaaatcctaggtggtggccaagtggccactctgagcaaactcttggaaatgatggaggaagtccagagtttacaagagaagatcgacgagagacaccacagccagcaggccccccaggctgaggccccctgcctgctgaggaactctgcccgcctctcgtctttgtttcctttcgctctgctccagcgacattcctctaagcccgtcttacccaccagtggctggaaagctttgggagatgaagacgatttggccaaacgagaagatgagttcgtggacctaggggatgtgtgacctgtttgttgagtgattgtgaaagaggaatgtgggagattgggacagctgatccctggatttgtgtcacgctacagctcatgctggctgggtccttagcccggcactccgttagaataaacctgggccttcgggaaaagaggtggctctcattatttttcatgattctaaaagactatgcaattaaaaccgcatctgtagtattactaattggaaggaattattacttgacccgtaatagggttgtggccgttttctgatgcctaagtattatacagagcccacaatggccagtttactaccagaaagggcttcagtaagatattcttggacttgatactttcttcagatcctctttgtgccaagataatttatccagtcattgggaatagtaagtttctgtgtaacccatctcaattatagaagcaagttcagctttatgtatttgtatggggagttgaagattcagatagaggtattaagatgtgtggcatttacttaaaccatcacatttttttctttctacgcccccttgcctgtaaaacacctgggaagttccactggtgtcatccatcctgatgcttcagaccaccctcccttcttcacagaccgtgtcactttgcctgtgggtgggggctagccagccaccaccctcttttctgtgctgccagccccaggtcttcctccgcctgctccacaccactcgccgctgtccctctgcactccctgccttggtgcgtgtagtcccagtgtctcactgccaaacctcttggttacgctgcggggatctgtttctttgcctgagatccttcctgaggagcgtccattcctctggagtctctccttgtttggaacaaatcgcttcgcctttttctacttgcctgctgaagctttggagcacttgtgattgcagttttctgccgcaacccctgagccgagttcctcacattcttttacctttatggactgatgggattgggtcacttttgaatgtggctttcataggaaagcagcttaaacataaatatcagaagtgatgattatcatatgatacctcagtgattttaaaagccatagaagaaacttgactatgcctggtcaccttcttggatctgctgtctaaatgatatatatatgatatatatgtgatatatatatatcatatatatgatatatatatatatatcacatatatatgatatatatatgatatatatatatcacatatatatgatatatatatcatatatatgatatatattttttttaatgcaggaaagtatactttgtaaggagcagatttttttgttctcagtggaaccctgtcaaatcgcataaaagaggaaaaaaacaaaactcattagaatgttttaaattgaatgttcgccttttacatatatttgctcttcagtatggatcccaatttgaatgttacatgttcggaaaaactttcagttgctcaagggcaataagaaaatttgaggccgggtgtggtggctcacgcctgtaatcccagcactttgggaggctcaggtgggcgaattgcttgagcccaggagttcgagaccagccggggcaacatggcaaaaccctgtctctactaaaaatacaaaaattagctgggtgtggtggtgcatgcctgtagtcccagctactcgggaggctgaggtgggaggatcccgtgagcctgggaggtggagtttgcagtgagctaagatcgtgccactgcactccggcctgggtgatggagcaagacctcgtctcagaaaattggaaactattgactaagagaagtttctaggtttgcactgaattgtcttttgtacatacagtgaattgttttgctgttctccccactccatattaatgcaggagccaggttggtctgttaggatgaacaaaggttgaggggagggcaggattcgtgcatctgggggccaaacacatgttccgtcttgattgccttaagagttactagcgaggtcagtgttaggcttgcaatagggattttaaaatacactaactagttccttagctaccttcacatacattctataggccttcttaaattagcactaacctccacttccttctctgccccattgcctcccaaatatgctatggagctatttttgttaccacgttataacgtgaatatttatacagtagcctcttcaggctttgtaattttcattccaaaaatgcccggtgtgatgctttacactctacaaagtatggtttaaaggcacaaggtcatggcctttgtcatagcagttgaatgtgcattgacatatttttctatgattttttaaaattacaatagaaaaataagctgttgtaacgtgtaaggtcatgacaatttttgtatttatatttgaaatcagatttctataactcgtatttgtgtacagaattctcaatggatttatatattgtgaaatttttatctgagattgggatgtggattatgcttaacagtgagagctgaaatgagaccatttactttgtttaaaatgctgtactgtgcaagtttggaaatgtaaattaatttactgtatataatatcttgagtttgtttatacctccaagtttttacactgaagataaactagctttaattcaaaactttttttttctttataagggaataagctgttgagctaaacctgtatacttgtgctttttattttctggatgcacaatgaaagtttatacttgtatctcactgcatcatatctgattgcagaaattaaagcacaatttacaagcaat

SEQ ID NO: 32891 - DNA, 2244 bp, Artificial Sequence
  derived and/or modified sequence
atgctgggcaagggcgtggtgggcggcggcggcggcaccaaggccccaaaacccagctttgtgtcttacgtcagacctgaggagatccatacaaacgaaaaggaggtgactgagaaagaggtcacactgcacctgctgcccggcgagcaattgctgtgtgaggcttctacggtgctcaagtacgtgcaggaggattcatgccaacatggcgtttatggccggctggtttgcacagacttcaaaatcgcatttctgggcgacgatgagtccgctctggataatgacgaaacacaattcaaaaacaaagtgatcggcgagaacgacattactttgcactgtgtggaccagatatacggagtctttgatgagaagaaaaagacactctttggccagctcaaaaaataccccgagaaattaatcattcattgcaaggacctccgagtgttccagttttgcttgcggtataccaaagaggaggaagtgaaacggatcgtgagtgggataattcaccatacccaggcccccaaactcctcaaaaggttatttcttttttcttatgccactgctgcccaaaacaacaccgtcacagatcctaagaatcacaccgtgatgttcgacacactgaaggactggtgttgggagctggaacggacaaagggaaacatgaagtataaggccgtcagcgtcaacgaaggctacaaagtatgtgagaggctaccggcttacttcgtggttcctaccccactcccagaagaaaacgtgcagcgcttccagggtcacggcatccctatctggtgctggtcctgccataacggatccgcactgctaaagatgtctgctctgcctaaggagcaggatgacggcatcctgcaaattcagaagagcttcttggatggcatctacaagactatccatcgccctccctacgagattgtgaaaacagaagacttgtctagtaattttttgagtctccaagaaatccagacggcatatagtaagtttaagcagctattccttattgacaactctacagagttctgggatacagacataaagtggttttcgctgctggagtcctcttcttggcttgacatcatccggaggtgtttgaagaaggccattgaaatcacagagtgcatggaggcacaaaatatgaatgtcctcctgctggaagagaatgcctctgatctgtgctgtctcatctcctctctcgtccaacttatgatggacccccactgtcgcacacgcatcggattccagtctttgattcagaaagaatgggtcatgggaggccattgtttcctcgatcgctgtaatcacctccgccagaacgacaaggaagaggtaccagtctttctgcttttcctagactgcgtctggcagttagtacatcagcacccccctgcctttgagttcaccgagacctacttgaccgtgctttctgattccctatacatccccatcttttctacatttttcttcaattcccctcaccaaaaagacaccaacatgggccgggaaggccaggacacccaatccaagcccttaaatctattaacagtttgggactggtctgtccagtttgagcccaaggcacagaccttactgaagaacccactgtacgtggaaaagccaaaactcgataagggacagcgaaaaggcatgcgatttaagcaccagaggcagttatccctgccactcacccagtcgaagtccagccctaagcgcggcttctttagagaagaaaccgaccacctgatcaagaacctgctcggaaagcggattagcaagctcattaatagcagcgatgagttgcaagacaatttcagagaattctatgattcatggcacagcaaatcaacagattaccatggtcttttgctacctcacattgagggcccggagataaaggtgtgggcacagagatatcttcggtggattcccgaggctcagatcctgggtggaggacaagtcgctactttaagcaagctgctggaaatgatggaagaggtgcaatcactccaggagaagatcgatgaacgacatcactctcagcaggcccctcaggccgaggctccatgtctgttgcgcaacagcgcgcgcctcagctccttattcccttttgctctgctgcagcggcactccagcaaacctgtgctgcctacatcggggtggaaagctcttggcgatgaggatgacctcgccaagagagaagatgagtttgtcgacttaggagatgtatag

SEQ ID NO: 32892 - DNA, 2244 bp, Artificial Sequence
  derived and/or modified sequence
atgctcggaaagggggtggtgggcggtgggggtggtactaaagcgccaaagccttccttcgtctcttatgtacgccctgaggaaatacacactaatgagaaagaggtcactgaaaaggaagtcaccctgcatctcttgccaggagaacagctcctgtgtgaggctagtacggtactgaagtatgtccaggaggacagttgtcagcatggcgtttacggaaggctggtgtgtaccgatttcaaaatcgccttcctgggcgacgatgaatctgcccttgataacgacgagactcagtttaaaaacaaggtgattggagagaatgatattaccttacactgcgttgaccagatttatggagtctttgacgaaaagaagaagacgctcttcggccagctgaaaaagtatcccgagaagctgattatacactgcaaggatctccgtgtgttccagttctgccttcgctacacaaaagaagaagaagtcaaaagaattgtttctggcatcattcaccacacccaggctcccaagcttctcaagcgtctcttcctgttctcatacgcaacagcggctcaaaacaacactgtcacagaccctaaaaatcacacggtgatgttcgacacccttaaagattggtgctgggagctcgagcggaccaaagggaacatgaaatacaaagccgtgagcgtaaatgaaggttacaaggtttgcgaacggctgcctgcttatttcgttgtccctacaccgcttcctgaagagaatgtgcagagatttcaggggcatgggattccaatttggtgttggtcttgtcacaatggttctgcccttctgaaaatgagtgcattacctaaggagcaggacgatggcatcctccagatccaaaagagctttctcgacggaatttataagaccattcaccggccaccttatgaaattgtaaagaccgaagatctgtcatccaactttctttcactgcaagagatacagacggcatattccaagttcaaacagctctttcttatagacaacagtacggaattctgggacacggacattaaatggtttagcttgctggaaagttctagctggttagatataattaggaggtgtcttaagaaggccattgaaatcacagaatgtatggaagcgcagaatatgaacgttctcctgcttgaggagaacgcgtccgatctctgttgcctaatcagctctctggtgcagctcatgatggatcctcattgcaggaccagaattggattccaatccttaattcaaaaggagtgggtgatggggggtcattgttttctcgatagatgcaaccatttacgacagaacgacaaggaggaggtgccggtatttctgctcttcctggattgtgtgtggcagctggtacaccaacacccccctgcgtttgaattcaccgagacatatctgacggtgctgtccgatagtctctacattccaatttttagcacgtttttcttcaatagccctcaccagaaagacaccaacatgggtagagagggccaggatactcagtccaagcctctgaacctactcacagtgtgggactggtcagtccagtttgagcccaaagcccaaaccctattgaaaaatcccctttacgtcgagaagccaaaactggacaaaggacagagaaaaggcatgcggtttaagcatcagaggcaactaagcctgcctcttacccagagcaagtcctccccgaaacgaggattctttagggaagaaaccgaccacttaatcaagaacctgctggggaagaggatcagcaaactgatcaattcctcagatgaactacaagacaacttccgcgaattctacgacagttggcactccaagtcaacagactaccacggcctactccttccccatatagaggggccagaaataaaagtctgggcccagcgctatcttcgctggatcccggaggctcaaatcctaggaggaggccaagtcgctactctctctaaacttctcgaaatgatggaggaagtgcagtccttgcaggagaaaattgacgaaagacatcactcacaacaggctcctcaggctgaggccccatgcctcctgagaaactccgctaggctctcttcactgtttcctttcgccctgctgcaacgtcattcctctaagcctgtgctgcctacctccgggtggaaggcactgggggatgaggacgacctcgctaagcgtgaggacgagttcgtcgatctgggtgacgtgtag

SEQ ID NO: 32893 - DNA, 2244 bp, Artificial Sequence
  derived and/or modified sequence
atgctgggcaagggcgtggtgggcggcggcggcggcaccaaggcccccaagcccagcttcgtgagctacgtgagacccgaggagatccacaccaacgagaaggaggtgaccgagaaggaggtgaccctgcacctgctgcccggcgagcagctgctgtgcgaggccagcaccgtgctgaagtacgtgcaggaggacagctgccagcacggcgtgtacggcagactggtgtgcaccgacttcaagatcgccttcctgggcgacgacgagagcgccctggacaacgacgagacccagttcaagaacaaggtgatcggcgagaacgacatcaccctgcactgcgtggaccagatctacggcgtgttcgacgagaagaagaagaccctgttcggccagctgaagaagtaccccgagaagctgatcatccactgcaaggacctgagagtgttccagttctgcctgagatacaccaaggaggaggaggtgaagagaatcgtgagcggcatcatccaccacacccaggcccccaagctgctgaagagactgttcctgttcagctacgccaccgccgcccagaacaacaccgtgaccgaccccaagaaccacaccgtgatgttcgacaccctgaaggactggtgctgggagctggagagaaccaagggcaacatgaagtacaaggccgtgagcgtgaacgagggctacaaggtgtgcgagagactgcccgcctacttcgtggtgcccacccccctgcccgaggagaacgtgcagagattccagggccacggcatccccatctggtgctggagctgccacaacggcagcgccctgctgaagatgagcgccctgcccaaggagcaggacgacggcatcctgcagatccagaagagcttcctggacggcatctacaagaccatccacagacccccctacgagatcgtgaagaccgaggacctgagcagcaacttcctgagcctgcaggagatccagaccgcctacagcaagttcaagcagctgttcctgatcgacaacagcaccgagttctgggacaccgacatcaagtggttcagcctgctggagagcagcagctggctggacatcatcagaagatgcctgaagaaggccatcgagatcaccgagtgcatggaggcccagaacatgaacgtgctgctgctggaggagaacgccagcgacctgtgctgcctgatcagcagcctggtgcagctgatgatggacccccactgcagaaccagaatcggcttccagagcctgatccagaaggagtgggtgatgggcggccactgcttcctggacagatgcaaccacctgagacagaacgacaaggaggaggtgcccgtgttcctgctgttcctggactgcgtgtggcagctggtgcaccagcacccccccgccttcgagttcaccgagacctacctgaccgtgctgagcgacagcctgtacatccccatcttcagcaccttcttcttcaacagcccccaccagaaggacaccaacatgggcagagagggccaggacacccagagcaagcccctgaacctgctgaccgtgtgggactggagcgtgcagttcgagcccaaggcccagaccctgctgaagaaccccctgtacgtggagaagcccaagctggacaagggccagagaaagggcatgagattcaagcaccagagacagctgagcctgcccctgacccagagcaagagcagccccaagagaggcttcttcagagaggagaccgaccacctgatcaagaacctgctgggcaagagaatcagcaagctgatcaacagcagcgacgagctgcaggacaacttcagagagttctacgacagctggcacagcaagagcaccgactaccacggcctgctgctgccccacatcgagggccccgagatcaaggtgtgggcccagagatacctgagatggatccccgaggcccagatcctgggcggcggccaggtggccaccctgagcaagctgctggagatgatggaggaggtgcagagcctgcaggagaagatcgacgagagacaccacagccagcaggccccccaggccgaggccccctgcctgctgagaaacagcgccagactgagcagcctgttccccttcgccctgctgcagagacacagcagcaagcccgtgctgcccaccagcggctggaaggccctgggcgacgaggacgacctggccaagagagaggacgagttcgtggacctgggcgacgtgtag

SEQ ID NO: 32894 - protein, 621 aa, Artificial Sequence
  derived and/or modified sequence
MESSPESLQPLEHGVAAGPASGTGSSQEGLQETRLAAGDGPGVWAAETSGGNGLGAAAARRSLPDSASPAGSPEVPGPCSSSAGLDLKDSGLESPAAAEAPLRGQYKVTASPETAVAGVGHELGTAGDAGARPDLAGTCQAELTAAGSEEPSSAGGLSSSCSDPSPPGESPSLDSLESFSNLHSFPSSCEFNSEEGAENRVPEEEEGAAVLPGAVPLCKEEEGEETAQVLAASKERFPGQSVYHIKWIQWKEENTPIITQNENGPCPLLAILNVLLLAWKVKLPPMMEIITAEQLMEYLGDYMLDAKPKEISEIQRLNYEQNMSDAMAILHKLQTGLDVNVRFTGVRVFEYTPECIVFDLLDIPLYHGWLVDPQIDDIVKAVGNCSYNQLVEKIISCKQSDNSELVSEGFVAEQFLNNTATQLTYHGLCELTSTVQEGELCVFFRNNHFSTMTKYKGQLYLLVTDQGFLTEEKVVWESLHNVDGDGNFCDSEFHLRPPSDPETVYKGQQDQIDQDYLMALSLQQEQQSQEINWEQIPEGISDLELAKKLQEEEDRRASQYYQEQEQAAAAAAAASTQAQQGQPAQASPSSGRQSGNSERKRKEPREKDKEKEKEKNSCVIL

SEQ ID NO: 32895 - DNA, 1866 bp, Artificial Sequence
  derived and/or modified sequence
atggagagcagccccgagagcctgcagcccctggagcacggcgtggccgccggccccgccagcggcaccggcagcagccaggagggcctgcaggagaccagactggccgccggcgacggccccggcgtgtgggccgccgagaccagcggcggcaacggcctgggcgccgccgccgccagaagaagcctgcccgacagcgccagccccgccggcagccccgaggtgcccggcccctgcagcagcagcgccggcctggacctgaaggacagcggcctggagagccccgccgccgccgaggcccccctgagaggccagtacaaggtgaccgccagccccgagaccgccgtggccggcgtgggccacgagctgggcaccgccggcgacgccggcgccagacccgacctggccggcacctgccaggccgagctgaccgccgccggcagcgaggagcccagcagcgccggcggcctgagcagcagctgcagcgaccccagcccccccggcgagagccccagcctggacagcctggagagcttcagcaacctgcacagcttccccagcagctgcgagttcaacagcgaggagggcgccgagaacagagtgcccgaggaggaggagggcgccgccgtgctgcccggcgccgtgcccctgtgcaaggaggaggagggcgaggagaccgcccaggtgctggccgccagcaaggagagattccccggccagagcgtgtaccacatcaagtggatccagtggaaggaggagaacacccccatcatcacccagaacgagaacggcccctgccccctgctggccatcctgaacgtgctgctgctggcctggaaggtgaagctgccccccatgatggagatcatcaccgccgagcagctgatggagtacctgggcgactacatgctggacgccaagcccaaggagatcagcgagatccagagactgaactacgagcagaacatgagcgacgccatggccatcctgcacaagctgcagaccggcctggacgtgaacgtgagattcaccggcgtgagagtgttcgagtacacccccgagtgcatcgtgttcgacctgctggacatccccctgtaccacggctggctggtggacccccagatcgacgacatcgtgaaggccgtgggcaactgcagctacaaccagctggtggagaagatcatcagctgcaagcagagcgacaacagcgagctggtgagcgagggcttcgtggccgagcagttcctgaacaacaccgccacccagctgacctaccacggcctgtgcgagctgaccagcaccgtgcaggagggcgagctgtgcgtgttcttcagaaacaaccacttcagcaccatgaccaagtacaagggccagctgtacctgctggtgaccgaccagggcttcctgaccgaggagaaggtggtgtgggagagcctgcacaacgtggacggcgacggcaacttctgcgacagcgagttccacctgagaccccccagcgaccccgagaccgtgtacaagggccagcaggaccagatcgaccaggactacctgatggccctgagcctgcagcaggagcagcagagccaggagatcaactgggagcagatccccgagggcatcagcgacctggagctggccaagaagctgcaggaggaggaggacagaagagccagccagtactaccaggagcaggagcaggccgccgccgccgccgccgccgccagcacccaggcccagcagggccagcccgcccaggccagccccagcagcggcagacagagcggcaacagcgagagaaagagaaaggagcccagagagaaggacaaggagaaggagaaggagaagaacagctgcgtgatcctgtag

SEQ ID NO: 32896 - DNA, 1866 bp, Artificial Sequence
  derived and/or modified sequence
atggaaagcagcccagaatccctgcagccactggagcatggcgtggccgcgggccctgcaagcggaaccggtagcagtcaagagggcctgcaggagacccgcctcgccgctggagatggacctggcgtgtgggccgcagaaacatccggtggtaacggactgggcgccgctgctgctaggagatctctcccggatagtgcaagccccgccggttctccggaggtgcccgggccttgttcctcctcagctgggctggatctgaaggacagcggactggagtccccagctgcagcggaggcacctctccgtgggcagtacaaggtgaccgcttcacctgaaaccgccgtggccggggtgggtcacgaactcgggaccgctggtgacgccggagcgaggccggatctagcgggtacttgccaagccgagcttaccgccgcggggtccgaggagccaagcagcgctggtggactgagcagttcgtgttcggatccctctcctccaggcgagagccccagcctcgacagtctcgagtcattttccaatcttcactctttccccagctcgtgtgaatttaacagcgaggagggagctgaaaaccgagtgcctgaagaggaagaaggagctgctgtgcttccaggcgccgtgccgttgtgcaaggaagaagagggtgaggaaacagctcaggtcctcgctgcttccaaggaacgcttccctggccagagtgtttaccatataaaatggattcaatggaaggaggagaatacacctattatcacccaaaacgaaaacggcccctgtccccttctggcaatcctgaacgtgctgctgttggcctggaaggttaagctaccaccgatgatggaaataataacggcagaacagctcatggaatacctcggggactatatgctggatgccaagcctaaagagatctccgagattcagaggctcaattacgaacagaacatgtccgatgctatggctatcctccacaaactgcagaccgggctggatgtgaacgttaggtttaccggagtcagagtgttcgagtatacgcccgagtgcatagtatttgatttgctggacattcctctgtatcacggttggctcgtcgatcctcagatcgacgacatcgtgaaagctgtggggaactgttcatacaatcagctggtggagaagatcatctcatgtaagcagtccgacaacagtgaattggtctcggagggcttcgtggctgagcagttcctaaacaatacggccactcagctgacatatcacggactgtgcgaactcacatcaaccgtgcaagaaggggagctttgtgtctttttcaggaacaatcacttctcaactatgaccaagtacaagggccagctgtacctgctcgtcaccgatcaggggttcctgaccgaggagaaggtggtttgggagtcattgcacaacgttgatggtgatggcaacttttgcgacagcgagtttcatctacggccaccttccgaccccgagactgtctataaaggtcagcaagaccagatcgaccaggactatctgatggccttgagcctacagcaagagcagcaaagccaggaaatcaactgggaacaaatccctgaggggatcagtgacctggagcttgccaaaaaactgcaagaggaggaagatcgccgcgctagtcagtactaccaggaacaggagcaagccgccgccgcagccgccgccgccagtacccaggcacagcaaggacagcccgcccaggccagcccaagttccggaaggcagagtggcaacagtgaaagaaagcgtaaggaacctagggaaaaagacaaggaaaaggaaaaggaaaagaacagttgtgtcatattgtag

SEQ ID NO: 32897 - DNA, 9238 bp, Artificial Sequence
  derived and/or modified sequence
aatacagctgtcatggcgtccaaggcgctggctgcggagaagtggccgcggtctccatagagctgggggcgggcggcccggtatggagagcagccccgagagcctgcagccgctagaacacggggtggcggccgggccagcgtcagggacaggttcttcgcaggaagggctacaggagaccaggctcgccgctggtgatggtcctggggtatgggcggcggagaccagcggcgggaatgggctgggggcggcggccgccaggaggagcctcccggactcggcttctcccgcgggctctcctgaggttcccggaccctgcagctcctccgcgggtttggacttgaaggacagtggtttggagagtcctgctgccgccgaggcgcctctgagagggcagtacaaggtgaccgcctccccggagacagccgtggccggagtgggtcatgagttgggtaccgccggagacgcgggagcccgcccggatctcgccggcacctgccaagcagaactgaccgccgccggctccgaagagcccagcagcgccggcggcctcagcagcagttgcagcgacccgagccctcctggggaatctccgagcctggactctctggagtcgttctctaacctgcattcttttcccagtagctgcgagttcaatagtgaggagggagcggagaacagggtccctgaggaggaggagggcgcggcggtgttgcccggggctgttcctctgtgcaaggaggaggagggggaggagaccgctcaggtgctggcggcctccaaggaacgcttcccgggacaatctgtgtatcacatcaagtggatccagtggaaggaagagaacacacccatcatcacccagaatgagaacggaccctgccccttgctggccatcctcaatgttttgctcctggcctggaaggtgaaacttccaccgatgatggaaatcataactgctgagcagctgatggaatatttaggagattacatgcttgatgcaaagccaaaagaaatttcagaaattcaacgtttaaattatgaacagaatatgagtgatgccatggcaattttgcacaaactacagacaggcctggatgtaaatgtaagattcactggtgttcgagtgtttgaatatacaccagaatgcatagtatttgatcttcttgatattcctttgtaccatgggtggttagtagaccctcagattgatgacattgtaaaagctgttggtaactgcagctacaaccaactagtggagaagatcatctcttgtaaacagtcagacaatagtgagctggttagtgaaggctttgtagctgagcagtttctaaataacacagccactcaactgacataccatggattatgtgaactaacttcaacggttcaggaaggagaactttgtgtgttctttcggaataatcattttagcaccatgaccaaatacaagggtcaactgtatttgttggtaacggaccaggggtttcttactgaagagaaagttgtttgggaaagcctacacaacgtagatggtgatggaaatttctgtgactcagaatttcatcttcgacctccttcagatcctgaaactgtatacaaaggacaacaagatcagatagatcaggattatcttatggcattatctctacaacaagaacagcagagccaagagatcaattgggaacaaatcccggaaggaatcagtgatttggaactagcaaagaaactccaagaggaagaggacagacgggcttctcaatactatcaggaacaggaacaagcagcagctgctgctgctgctgcttctacacaggctcagcagggccagccagcacaagcctctccatcaagtggaagacaatctgggaatagtgaacgtaaacggaaggaaccacgagaaaaagataaagaaaaagaaaaggaaaaaaatagctgtgttattttgtaacaagtgttggcttctgttggaaccacctatatgtcttgagaaacaaaaccacaggaggaaaggaagaaaaaccgatcaataccgtctgtgcctgatttcctaatggattttgttcgttttttcaggggaacggttgttacttagttacaatcagactttttcaagtcacacaatacactctttatgagctggagtttcatgttacaagttggaaatgctgtgtgttgacattcatgaaaaatactgcacttgtagccagattagcaaatcacagcaaattttgtgtcatagtgacattcataactcatatcagttagtaagctattatatcttctgttctaacaatgaatggaggtaattgatttagtctgattccttcctgaaatctaaatattagcacaatagtttctgaaattttacaatgttaaattatgatctaattcatgagaaaccacgggtttaacatagggattcaaaaaaacaaaaacaaaagaataggaataaataacccttaattgtatattggactagttcagcccttaaacagctttacctttatttaggaatgtacattttaggtattatcttgatcatggagcttagttttaatttagatagcaaaaataaagatttgtatttcttttccaatagcaaaaagttacataacactaatacttataacctatcaatatcagatattaatgactttgtagtgttgtaaaattttgaggaattttggagtctttatcataggtaacctggaccacagttactatttattgacaatgtgattgagtgtatggaggaaagcacagtggatgctaggctttgtaaatatggggatgtagaaaagcagatagttcagtgtctacctttttctagaactaccttgaaccttaaattttaagtcatgttcattgctagaaaattaaatgtacttattaaaaccaatgaaaaagcacatttctgaaatgaagttagagataatctctgtgtcttataaaaagacattaataaaaatctgaaagggccgggcgcagtggctcacgcctgtaatcccaacattttgggaggccaaggtgggcggatcatctgaggccaggagttcgagaccagcctggccagcatggtgaaaccctgtctctactaaaaatacaaaaaatcagcctggcatggtggtgcgtgcctgtagtcccagctactcagggctgaggcaggagaattgcttgaacccggcaggcagaggttgcagtgagccgagatcgccctgctgcactccagcctgggtgacagagggagactccgtctcaaaaaaaaaaaagtctgagagtagctaagaatttatgtaaaagcaatcagagtttttaatttatgggaaccaaataaaactataacctcatagtgtttataagaactcagaaataatatttatttaactttattatgaggccacacatattttcctgtgtttctatatatagtttggaaaactatccttaatagtctgttttatatgccttatatttaaaagtttgttttagttattttgaaagactattgctgctgcaaatagttgtgtgctttacattctaagcttcagtacatttatttaagagcatcataatctgacctgagcatccacttggagagtgttttttttgtgtgtggtctggggtgacaaaagaccacaaaaatgtgtggtctggattttttcaactatgtcattaactttatgatccaagaccagttataggatgaatctgtatgtaaaaatagagtcttatttatggaaggaattattctaagggaaaaatccagggtcaagctgtatcttttatgtcctttatattgcatgtctatttctgttacacaatttgttatttcttcaaatttcctatggtagcatgataaatcatcaaagaacctgtttgggatataaaactctgatagaaaatatttaatgagtatcttgattataacctagaatatgtatacgttagtaaaataaccagatatactacagaactctctattggctcaaacaggttgacctcaatccaagtttactcttgatatcactctgttggctgaaggaggtaactcaaacctcagggtttgtttttcccgggacagatagtagtgatagtgcattatatttgaataagaaaaacaaaccagtataccttgagaaattttaaaaagcatagttgaggcatattttttcataattatatacttatctgtttattgcccatggaaaatatatgtgtagaagtatttcttctgttatttgttactatcttcttaatttgttccaaagaaaatgctgccatactgcattccctctggaaggaaacaaaacaaaacaaaactcactcaaaaccagcagtgctgctatcagataagtagatgtcaatgtatacttacaaggaaaaactaaaaaatgtaatgtgttaattcagcctttttctatgtaatatttccaagtcagactttcttacattcctggaatttactttgatataccaagaataataatgataaaatgtttgctttgattactgtggggggaaagatgaaatgttcaattgtattaaaacaaacaagcttttcagagatactggtttcctgcccttgaagggtataaagaatttagatcatgcctgtaatcccagtactttgggaggccgaggcaggtggatcacctgagatcaggagttcgagaccagcctggccaacatggcaaaaccctgtctctactaaaaatacaataattagccaggcatggtggcgggcacctgtcatcccagctacttgggaggctgaggcaggagaatcgcttgaacccaggaggcagtgattgcagtgagctgagatagcaccactgcatgcaagcctgggcaatagagcgagactccgtctcaaaaaaaaaaaaaaaaaaaaaattagagctattgtgtctttattttcttaaattttgcccaaggtaacgttatatatcccaccacttcattgctggtttgggtacataggattttgaaagtggtatattaaagtctttccttccaagtattttgtaatacttgaaaattcttagatgtatactgctaacaaaagttagaacttaaacatttttgtttttatcatttatagcctagattagggacatatttgcatcaaccaaatcatcattagatttgaaaataggcagatgaatgaacaaatatggtcattgcactttccttttactttcagagtctaagtatattccttaaggttagtaaccagtctttattaaaaatataaaatttttcttcatgtctaatcccattgcatccacaatgctgtgatttatagtacatgatcaacacttaaaagtactttacatatgtgtgtttctgaagcaagttttcatgacctctgttagattctcaaaagaattcagaacttcaatttaagaatcaccattttaagaatacatgtgtacatatacacattaagcagtataaagcagctaaaattggcattggttttacactggtgcagtgtgcttaggtaaagtaacttcttccatgtttcaaggtcaggttcagagttgaatgaagtgtagatttaaatttaggattaggctttggaatatatcttgtttttattgtctcacatttctgatattgactacttatcccatattctgtttcaaattctttatcatatttcaagttctttctcatacttcttgatcttggcttaactaagcaagttagtatcagagactagttgactgaacccaagattaaacattttgcacttgcacaaaaccttcttagcattttgctttcaatgaatcagaaagtcaattcactaagagacagatcatgagaggaaagagaactagaggccaataaataaaataattgttcatatattaatgttcacatgtgaactacatatctaaaatcttggagaaaaatcaaggcaagaatttccagaactgtcctcaaatagctcatttatttaagttttgttaaaaagcaaaagcgaattgattacatttgattaacttttcctattccatgcacaagttaccttaaaacatgataaaaaccttatgggcattacctatcacacagtacttatgcataaacttataatagtaaaattactaatgtttgataaaataagatggaggcattacaaatagtctacagtttgtattttaaggaattggacatgaagaattctagatcattttgtgtctataaacccgactttctatcttgccttgggcaaactttctgtgcctcaatgtactctttaaatatgtgaaggatgctctttttgattaagtgttttgcactcctgaataaagggcatagtataagcacaaagtatgacttaatttatcacaaatattacacatcctatgttcttgaatgtgcacacttttttctcaataacaaaatatatcttaagtcagtttttttaatgctgtcaaaatttgtagaattttctttgagtatggcgtgatctcttcccaaatgcattttacagttttttgtgtgttctatagactatagagtcaaaatcaagagtattttgagaggatcagaagcatttaaaaatctatttttttctagtatctttcacagatctaaatatttagattctctttgcctttttctccatggaatacggtggtatcaaattactaatacagtatataaacttcgtttgcattggtggaattcatttagatctctcaagtaatattattttagggctatataaattgtgtttttagtgtaaaatgttatttgataatgtgaagttaaatcccttttagaaagtgactgaaaatggtaaaggaactcatcagaatcttagcgttcttaagttctctgataatttagtatattttattaatgatgtccaacacctctaagattgttgagaaaacatgaagaattgaggttactcttctcaggtgacactttaaatattaaaatcagaggcttcctgaacaaaacaaattgcaaaatagcgataatggcatgggagaggccagatgcaggactctggtaaatttaacttactttgaatatctatctaaattttagttcatgcatgttcttacttaatcctggtgtttttgctcttagatgttagagtttaataaattgtgatacgcatatatttttttacatgaaggattctactttctaattttacttttctgatctcaagaaaattaaacttgaaaaacggggtaaaattcttcaactattgcctcaagttcagttttgtcctattgtcctgagaaaggagatttagacttgtctgcctaacacaggtattttttagggcatcgtactatcccagagaaagtgttgagataccatggcagaaatataaaacctaagctttgaaccccagtagacttcttcttctgccattaagtctctctttatctgatattctaaggatttcttcaaactacttaataatttgtcaccattaactttaatatccagttttaatctgcactgtaatatcctgctttgagaagaaagaatgcctcataaattagagaaggacaaaacaaaatgttttggaaggtgatcctggctcctttggctctcataattgttttatagctgaaaataaaaagtcaggaaactggcccggtgcggtggctcatgcctgtaatcccagcactttgggaggctgaggtgggtggatcacctgaagtcaggagttcgagaccagcctggccaacatggtgaaaccctgtctctactaaaaatacaaaaaaaattagctgggtgtggtggcacatgcctgtaatcccagccactggggaggttgaggcgcaagaatcgcttgaacccggaaggcagaggttgcagtgagccaagattgccccactgcactccagcctgggcgactgagcgagactcttatatctcaaaaaaaaaaaaaaaaaaaagtcaagaaactgaaattcccatttaagttctcaaatcagtgatctgtcaaaataggccttgtaactgaaataccttacaaagcagttctaactaatgcaatgtgttttttaaaaatttttaatgaaccttacattgtgaacataattgcaacatgttttaagacaaacagtatttaatccttgaagacctgtcttgtatgtctctcaattttgtcagaatttttattattgtttttcacatatgtgaaataagcagttttttcagggtacatagggtatctttgttttacagatttttaaagatgaggttttgaaaagccctcagaggtttttgttaaaagactatcttgcttaataaatgacagcttgttacagattcacacattacaagtaggacagtataacaggagattggtgtgtgaatgctacaaaacagtcagcaaaaggaatcatgtttgcttgtgaaacttcagaggtaccctgaaagtcatttcctaaagctagtgcgtgtgaatcttttccttgaattgtgcagaataattggattgaggcacatattttgaggagtagcaagtggaatggtataatgactacagagaaaattatcttgaaatatagcaaggaagagaaacaagttttctttctccactttattgttggactaattgggtcaatttgctgtgacatatcaaagatctctttgtgccaggccaagactggctactgagttctcaaagcgttttaatatatagattacgtatgagtgcctattttttcctcctcctttcattttttatcttaatacccattttacttctgaaataattcatctgttttgctttatgaccagctttaatttcaattgaggaataataacaaccctagagattcataggaaagagcattgaaatacattttttgcataaagatacctaaaaccatctacccagcttagggttgaactgaatttctgtgaaataaatttgttttaaatactaattattttaaaactacttaattcttaaaaacaatgtcatcagtttcaaaactttcactttgggaggatattccttaaaaggcatacatagatggtaaagtataaaatatttctgacagaattattcagtattattcaacatttactttcatgtttgttattgtaccacaaagatagtgtcattgttgggttaaaatgttggctgtttttgttaatatacttaaaactgtaaccagtgaataacacctgtagtattttttattatagattatattttatttcaataaactttgatatttagaccaaa

SEQ ID NO: 32898 - DNA, 1866 bp, Artificial Sequence
  derived and/or modified sequence
atggagagcagccctgagagcctgcagcccctggagcacggcgtggccgccggccctgccagcggcaccggcagcagccaggagggcctgcaggagacccggctggccgctggagatggccctggggtgtgggccgctgagaccagcggcggcaatggcctgggcgctgctgctgcccggcgcagcctgcctgacagcgccagccctgctggcagccctgaggtgcccggcccctgcagcagcagcgctggcctggacctgaaggacagcggcctggagagccctgctgctgctgaggcccccctgcggggccagtacaaggtgacagccagccctgagacagctgtggccggcgtgggccacgagctgggcacagctggagatgctggggcccggccagacctggccggcacctgccaggccgagctgacagctgctggcagcgaggagcccagcagcgctgggggcctgagcagcagctgcagcgaccccagccccccaggagagagccccagcctggacagcctggagagcttcagcaacctgcacagcttccccagcagctgtgagttcaacagcgaggagggcgctgagaacagagtgcctgaggaggaggagggcgctgctgtgctgcccggggctgtgcccctgtgcaaggaggaggagggggaggagacagcccaggtgctggccgccagcaaggagcgcttccctggccagagcgtgtaccacatcaagtggatccagtggaaggaggagaacacccccatcatcacccagaatgaaaatggcccctgccccctgctggccatcctgaatgtgctgctgctggcctggaaggtgaagctgccccccatgatggagatcatcacagctgagcagctgatggagtacctgggggactacatgctggatgccaagcccaaggagatcagcgagatccagaggctgaactatgagcagaacatgtctgatgccatggccatcctgcacaagctgcagacaggcctggatgtgaatgtgcgcttcaccggggtgcgggtgtttgagtacaccccagagtgcatcgtgtttgacctgctggacatccccctgtaccacggctggctggtggacccccagattgatgacatcgtgaaggctgtgggcaactgcagctacaaccagctggtggagaagatcatcagctgcaagcagagcgacaacagcgagctggtgtctgagggctttgtggccgagcagttcctgaacaacacagccacccagctgacctaccacggcctgtgtgagctgaccagcacagtgcaggagggggagctgtgtgtgttcttcaggaacaaccacttcagcaccatgaccaagtacaagggccagctgtacctgctggtgacagaccagggcttcctgacagaggagaaggtggtgtgggagagcctgcacaacgtggatggagatggcaacttctgtgacagcgagttccacctgcggcccccaagtgaccctgagaccgtgtacaagggccagcaggaccagattgaccaggactacctgatggccctgagcctgcagcaggagcagcagagccaggagatcaactgggagcagatccctgagggcatcagtgacctggagctggccaagaagctgcaggaggaggaggacagaagagccagccagtactaccaggagcaggagcaggccgctgctgctgctgctgctgccagcacccaggcccagcagggccagcctgcccaggccagccccagcagcggccggcagagcggcaacagcgagaggaagaggaaggagccccgggagaaggacaaggagaaggagaaggagaagaacagctgtgtgatcctgtag

SEQ ID NO: 32899 - DNA, 1866 bp, Artificial Sequence
  derived and/or modified sequence
atggagagcagccccgagagcctgcagcccctggagcacggcgtggcggcaggcccagcgtcaggtacagggtccagccaagaaggcttacaagagacaagattagccgcgggcgatggccccggcgtgtgggcagcggaaacatccggcggaaatggtctgggggccgccgccgctcggcggagtctgcccgacagcgcgagccccgctggcagccctgaagtgcccggcccatgctcaagctcggctggactggacctgaaggacagcggcctggaatcaccggccgctgcggaagcccccctcagggggcagtacaaggtcaccgctagtcccgagaccgcagtcgccggagttggccacgagctcggaactgccggcgacgccggagctaggccggatctcgccggcacctgtcaagcagaactgaccgctgccgggtccgaggaaccgtcttctgctggcggcctttcctcaagttgcagtgatcctagtcctcccggcgaaagccccagtctggacagcctggaaagctttagcaatctgcacagctttccctcctcttgcgagtttaattcagaagaaggagctgaaaatagagtgccagaggaagaggagggtgcagctgtgcttcccggggcagtgcccctctgtaaggaagaggagggagaggagaccgcccaggtcctggctgcctcgaaagaaaggtttcctggccagagcgtgtaccatatcaaatggatccaatggaaggaggaaaatacccccataattacccagaacgagaatggcccctgccccctgcttgctatcctcaacgttctcctgttagcatggaaggtgaagcttcctcccatgatggagattataactgctgagcaactcatggagtatctgggggattacatgctcgatgcaaagcctaaggagatctctgagatccagaggctcaattatgaacagaatatgagcgatgctatggccatcctacacaaactgcagacgggccttgatgtgaacgttagatttaccggagtacgcgtgttcgaatatactcctgagtgtatcgtgtttgacttactcgacatccctctgtatcacggatggctggtggacccccagatagatgatatcgtgaaggcagttgggaactgttcatacaatcaactggtcgagaagataattagctgtaaacagagcgacaactcagagctagtatcagagggcttcgtggcagagcagttcttgaataatactgccactcaactgacctatcatgggctgtgtgagctgacttctacggtgcaagaaggagaactgtgcgtctttttccgaaacaaccacttttccaccatgacaaaatataagggacagctttatctgcttgtgacggatcaggggttcttgaccgaagagaaagtcgtgtgggaatcgcttcacaatgtggatggcgacggcaacttttgtgactcagagttccacctccgacccccatcagatcctgagacagtttacaaaggccagcaggatcagatcgaccaggactatctgatggctctctcactgcagcaagagcagcaatctcaggagataaactgggagcaaatcccagagggtatatccgacctcgagctggctaagaagctccaggaggaggaggataggcgggcttcccagtactaccaggagcaggagcaagctgctgctgcagccgcagctgcatctacacaagctcagcagggccaacctgcccaggcttcaccctcatctggcaggcagtcggggaatagcgagagaaaaaggaaggagccacgcgagaaagacaaagagaaggagaaggagaaaaacagctgcgtcattctgtag

SEQ ID NO: 32900 - DNA, 1866 bp, Artificial Sequence
  derived and/or modified sequence
atggaatctagtcccgagagcctccagcccctcgagcacggagtcgccgctggcccagcaagcgggaccgggtcctctcaggagggtctccaggagacacgtttggcggcaggagacggcccaggcgtttgggcagcagaaacttctggaggtaacggcttaggagcggctgcagccaggaggagtctacccgacagcgcatctccagccggatcccctgaagttcccggaccttgttcgtccagtgctgggcttgatctgaaggacagcggcctggagagtcctgccgctgctgaggcaccccttaggggccagtacaaggtgacagccagccccgaaactgcagttgccggagtgggccacgagctgggcactgccggtgatgccggagcacgacctgatctggccggaacatgtcaagccgagctaacagccgctggcagcgaggaaccatccagtgccggaggattgtcatccagctgctccgacccatcacctcccggtgaatcgccttccctggattcgttggaaagtttttctaacttgcattcctttccctctagctgcgagtttaacagcgaagaaggcgctgaaaacagggtgcccgaggaggaggaaggggctgcagtccttcccggagctgtaccactgtgcaaagaggaggaaggcgaagagaccgcccaggtgctggcagcttccaaagagcgcttccccggacaaagcgtgtaccacatcaagtggatacaatggaaggaggagaatacccctatcatcacccagaacgagaatggcccatgtcctctcctcgcgattttaaatgtgctgctgttagcctggaaagttaaactcccccctatgatggaaataatcaccgccgagcagctgatggagtatcttggagattacatgctggatgccaagccgaaggagatcagtgagatccagcgcttaaactacgagcagaacatgagcgacgcaatggccattctgcacaagctgcagacaggcctggacgtgaacgtcaggtttactggagttcgggtgtttgagtacacgcccgaatgcatcgtgttcgatctgctggacattcctctatatcacggatggctggtcgatccacaaattgacgacattgtaaaagcagtggggaattgtagttacaaccaactcgtggaaaaaattatcagctgtaagcagtccgacaacagcgaattggtcagcgagggcttcgttgccgaacagttcttgaacaacacagcaacccagcttacataccatggactgtgtgaattgacatccaccgtccaagagggcgagctctgcgtcttcttcaggaacaaccattttagcaccatgaccaagtataaaggacaactgtatctactcgtaacagatcagggatttctgacggaggaaaaggtggtgtgggagtctctccacaacgtcgacggagatggaaatttctgcgattcagaattccacctgaggcctccctctgatccagaaaccgtgtacaaggggcagcaggatcagattgaccaggactaccttatggctctgtctcttcagcaggagcaacagagtcaggaaattaattgggaacagatcccagaaggcattagcgacttggagctagctaaaaagctgcaggaggaagaggataggcgagcatctcaatattaccaggagcaagaacaggccgcagcggcagccgctgccgcttccacccaggcgcagcagggccagccagctcaagcttctccatccagtgggagacagtcaggcaactcagaaaggaagcgaaaggaaccaagagagaaggacaaggagaaagaaaaggaaaaaaactcttgtgtgatactgtag

SEQ ID NO: 32901 - protein, 310 aa, Artificial Sequence
  derived and/or modified sequence
MYSDVWKQLKEEKKVRLELEKELELQIGMKTEMEIAMKLLEKDTHEKQDTLVALRQQLEEVKAINLQMFHKAQNAESSLQQKNEAITSFEGKTNQVMSSMKQMEERLQHSERARQGAEERSHKLQQELGGRIGALQLQLSQLHEQCSSLEKELKSEKEQRQALQRELQHEKDTSSLLRMELQQVEGLKKELRELQDEKAELQKICEEQEQALQEMGLHLSQSKLKMEDIKEVNQALKGHAWLKDDEATHCRQCEKEFSISRRKHHCRNCGHIFCNTCSSNELALPSYPKPVRVCDSCHTLLLQRCSSTAS

SEQ ID NO: 32902 - protein, 600 aa, Artificial Sequence
  derived and/or modified sequence
MMEERANLMHMMKLSIKVLLQSALSLGRSLDADHAPLQQFFVVMEHCLKHGLKVKKSFIGQNKSFFGPLELVEKLCPEASDIATSVRNLPELKTAVGRGRAWLYLALMQKKLADYLKVLIDNKHLLSEFYEPEALMMEEEGMVIVGLLVGLNVLDANLCLKGEDLDSQVGVIDFSLYLKDVQDLDGGKEHERITDVLDQKNYVEELNRHLSCTVGDLQTKIDGLEKTNSKLQEELSAATDRICSLQEEQQQLREQNELIRERSEKSVEITKQDTKVELETYKQTRQGLDEMYSDVWKQLKEEKKVRLELEKELELQIGMKTEMEIAMKLLEKDTHEKQDTLVALRQQLEEVKAINLQMFHKAQNAESSLQQKNEAITSFEGKTNQVMSSMKQMEERLQHSERARQGAEERSHKLQQELGGRIGALQLQLSQLHEQCSSLEKELKSEKEQRQALQRELQHEKDTSSLLRMELQQVEGLKKELRELQDEKAELQKICEEQEQALQEMGLHLSQSKLKMEDIKEVNQALKGHAWLKDDEATHCRQCEKEFSISRRKHHCRNCGHIFCNTCSSNELALPSYPKPVRVCDSCHTLLLQRCSSTAS

SEQ ID NO: 32903 - protein, 620 aa, Artificial Sequence
  derived and/or modified sequence
MESSPESLQPLEHGVAAGPASGTGSSQEGLQETRLAAGDGPGVWAAETSGGNGLGAAAARRSLPDSASPAGSPEVPGPCSSSAGLDLKDSGLESPAAAEAPLRGQYKVTASPETAVAGVGHELGTAGDAGARPDLAGTCQAELTAAGSEEPSSAGGLSSSCSDPSPPGESPSLDSLESFSNLHSFPSSCEFNSEEGAENRVPEEEEGAAVLPGAVPLCKEEEGEETAQVLAASKERFPGQSVYHIKWIQWKEENTPIITQNENGPCPLLAILNVLLLAWKVKLPPMMEIITAEQLMEYLGDYMLDAKPKEISEIQRLNYEQNMSDAMAILHKLQTGLDVNVRFTGVRVFEYTPECIVFDLLDIPLYHGWLVDPQIDDIVKAVGNCSYNQLVEKIISCKQSDNSELVSEGFVAEQFLNNTATQLTYHGLCELTSTVQEGELCVFFRNNHFSTMTKYKGQLYLLVTDQGFLTEEKVVWESLHNVDGDGNFCDSEFHLRPPSDPETVYKGQQDQIDQDYLMALSLQQEQQSQEINWEQIPEGISDLELAKKLQEEEDRRASQYYQEQEQAAAAAAAASTQAQGQPAQASPSSGRQSGNSERKRKEPREKDKEKEKEKNSCVIL

SEQ ID NO: 32904 - DNA, 1863 bp, Artificial Sequence
  derived and/or modified sequence
atggagagcagccccgagagcctgcagcccctggagcacggcgtggccgccggccccgccagcggcaccggcagcagccaggagggcctgcaggagaccagactggccgccggcgacggccccggcgtgtgggccgccgagaccagcggcggcaacggcctgggcgccgccgccgccagaagaagcctgcccgacagcgccagccccgccggcagccccgaggtgcccggcccctgcagcagcagcgccggcctggacctgaaggacagcggcctggagagccccgccgccgccgaggcccccctgagaggccagtacaaggtgaccgccagccccgagaccgccgtggccggcgtgggccacgagctgggcaccgccggcgacgccggcgccagacccgacctggccggcacctgccaggccgagctgaccgccgccggcagcgaggagcccagcagcgccggcggcctgagcagcagctgcagcgaccccagcccccccggcgagagccccagcctggacagcctggagagcttcagcaacctgcacagcttccccagcagctgcgagttcaacagcgaggagggcgccgagaacagagtgcccgaggaggaggagggcgccgccgtgctgcccggcgccgtgcccctgtgcaaggaggaggagggcgaggagaccgcccaggtgctggccgccagcaaggagagattccccggccagagcgtgtaccacatcaagtggatccagtggaaggaggagaacacccccatcatcacccagaacgagaacggcccctgccccctgctggccatcctgaacgtgctgctgctggcctggaaggtgaagctgccccccatgatggagatcatcaccgccgagcagctgatggagtacctgggcgactacatgctggacgccaagcccaaggagatcagcgagatccagagactgaactacgagcagaacatgagcgacgccatggccatcctgcacaagctgcagaccggcctggacgtgaacgtgagattcaccggcgtgagagtgttcgagtacacccccgagtgcatcgtgttcgacctgctggacatccccctgtaccacggctggctggtggacccccagatcgacgacatcgtgaaggccgtgggcaactgcagctacaaccagctggtggagaagatcatcagctgcaagcagagcgacaacagcgagctggtgagcgagggcttcgtggccgagcagttcctgaacaacaccgccacccagctgacctaccacggcctgtgcgagctgaccagcaccgtgcaggagggcgagctgtgcgtgttcttcagaaacaaccacttcagcaccatgaccaagtacaagggccagctgtacctgctggtgaccgaccagggcttcctgaccgaggagaaggtggtgtgggagagcctgcacaacgtggacggcgacggcaacttctgcgacagcgagttccacctgagaccccccagcgaccccgagaccgtgtacaagggccagcaggaccagatcgaccaggactacctgatggccctgagcctgcagcaggagcagcagagccaggagatcaactgggagcagatccccgagggcatcagcgacctggagctggccaagaagctgcaggaggaggaggacagaagagccagccagtactaccaggagcaggagcaggccgccgccgccgccgccgccgccagcacccaggcccagggccagcccgcccaggccagccccagcagcggcagacagagcggcaacagcgagagaaagagaaaggagcccagagagaaggacaaggagaaggagaaggagaagaacagctgcgtgatcctgtag

SEQ ID NO: 32905 - DNA, 132 bp, Artificial Sequence
  derived and/or modified sequence
accgacttcctgagaacccagcccaccagaaccagagtgaacaagcagcccctgctgctgaccctgagcctgttcaagctgagcctgcagctggacgccagaatcaccttcggcgccgagagccccggctag

SEQ ID NO: 32906 - DNA, 1863 bp, Artificial Sequence
  derived and/or modified sequence
atggaatcatctccggaaagtctgcagcctctcgagcacggggtcgccgcgggccccgcctccggtacagggagcagccaggaaggcctgcaagagacgcgcctggcagcaggggacgggccaggagtttgggccgcagagacatccgggggtaatggccttggggctgccgccgccaggcgcagtctaccggattcggcgtcgcccgccgggagcccagaggttccgggcccctgctcgtccagcgcagggttggatctgaaggattctggcctcgagtcacccgccgccgcagaagcacccctaaggggacagtacaaggtcactgctagccctgagaccgcggtggctggggtgggtcatgaacttggaaccgcaggtgatgccggcgccaggccggatctggccggcacatgccaagcagagctgacagccgccggctcagaggaaccgtcttcagctggcggcctctcgtcttcctgctcggatccatcaccgcctggcgaatcaccttctctcgatagcctcgaatctttttcaaacctacactcattccccagcagttgtgaatttaattccgaggaaggtgccgaaaacagggtccccgaggaggaagaaggcgccgcagtgttgccaggtgctgtcccgctgtgtaaggaggaagaaggggaagagacggcccaggtgctcgctgcaagcaaggaacgatttccagggcagtctgtctatcacatcaagtggatccagtggaaggaagagaacaccccaataattacccaaaacgagaacggtccttgtccactactggccatcctgaatgtgctcctgctggcatggaaagtcaagttgcctcccatgatggagatcatcaccgcggagcaactcatggaatacctcggggattatatgttagatgcaaagcccaaggaaattagtgagatccagaggctcaactacgagcagaacatgagtgatgctatggctattctacacaaactgcagaccggccttgatgtgaatgtgaggtttacaggagtgagagtgtttgaatacactcctgagtgcattgtattcgacctgttggacatccccctgtatcacggatggctggtggacccccagatcgatgatattgtgaaagccgtcggcaattgttcgtataaccagctggttgagaaaatcatctcgtgcaaacagagtgacaactccgagcttgtcagtgaaggattcgtcgcagagcagttcctaaacaataccgccacccagttgacataccacggcctctgtgagctaacgagcacagtgcaggagggggagctgtgcgtgttcttccgtaataatcactttagtacaatgaccaagtacaaggggcagctgtacctgcttgtaacagaccaaggctttctgaccgaggaaaaagttgtctgggaatctttacataacgtcgatggcgacgggaatttctgcgacagcgagtttcatttaaggccacctagtgacccggagacagtctacaagggccagcaggaccagatcgatcaggattacttgatggccttgtccctccagcaggaacagcagtctcaggagatcaattgggagcagataccagagggcatcagcgacctcgagttagccaagaaactgcaggaggaagaggatcggcgtgccagccaatactatcaagagcaggagcaggcggccgcggcagcagcagccgctagtacccaggcccagggccagcccgcccaggcaagcccatccagtggacgacaatctgggaatagtgagagaaagcgcaaagagccaagggagaaagacaaggaaaaggagaaagagaaaaacagttgcgtgatactgtag

SEQ ID NO: 32907 - DNA, 4820 bp, Artificial Sequence
  derived and/or modified sequence
cggtctccatagagctgggggcgggcggcccggtatggagagcagccccgagagcctgcagccgctagaacacggggtggcggccgggccagcgtcagggacaggttcttcgcaggaagggctacaggagaccaggctcgccgctggtgatggtcctggggtatgggcggcggagaccagcggcgggaatgggctgggggcggcggccgccaggaggagcctcccggactcggcttctcccgcgggctctcctgaggttcccggaccctgcagctcctccgcgggtttggacttgaaggacagtggtttggagagtcctgctgccgccgaggcgcctctgagagggcagtacaaggtgaccgcctccccggagacagccgtggccggagtgggtcatgagttgggtaccgccggagacgcgggagcccgcccggatctcgccggcacctgccaagcagaactgaccgccgccggctccgaagagcccagcagcgccggcggcctcagcagcagttgcagcgacccgagccctcctggggaatctccgagcctggactctctggagtcgttctctaacctgcattcttttcccagtagctgcgagttcaatagtgaggagggagcggagaacagggtccctgaggaggaggagggcgcggcggtgttgcccggggctgttcctctgtgcaaggaggaggagggggaggagaccgctcaggtgctggcggcctccaaggaacgcttcccgggacaatctgtgtatcacatcaagtggatccagtggaaggaagagaacacacccatcatcacccagaatgagaacggaccctgccccttgctggccatcctcaatgttttgctcctggcctggaaggtgaaacttccaccgatgatggaaatcataactgctgagcagctgatggaatatttaggagattacatgcttgatgcaaagccaaaagaaatttcagaaattcaacgtttaaattatgaacagaatatgagtgatgccatggcaattttgcacaaactacagacaggcctggatgtaaatgtaagattcactggtgttcgagtgtttgaatatacaccagaatgcatagtatttgatcttcttgatattcctttgtaccatgggtggttagtagaccctcagattgatgacattgtaaaagctgttggtaactgcagctacaaccaactagtggagaagatcatctcttgtaaacagtcagacaatagtgagctggttagtgaaggctttgtagctgagcagtttctaaataacacagccactcaactgacataccatggattatgtgaactaacttcaacggttcaggaaggagaactttgtgtgttctttcggaataatcattttagcaccatgaccaaatacaagggtcaactgtatttgttggtaacggaccaggggtttcttactgaagagaaagttgtttgggaaagcctacacaacgtagatggtgatggaaatttctgtgactcagaatttcatcttcgacctccttcagatcctgaaactgtatacaaaggacaacaagatcagatagatcaggattatcttatggcattatctctacaacaagaacagcagagccaagagatcaattgggaacaaatcccggaaggaatcagtgatttggaactagcaaagaaactccaagaggaagaggacagacgggcttctcaatactatcaggaacaggaacaagcagcagctgctgctgctgctgcttctacacaggctcagggccagccagcacaagcctctccatcaagtggaagacaatctgggaatagtgaacgtaaacggaaggaaccacgagaaaaagataaagaaaaagaaaaggaaaaaaatagctgtgttattttgtaacaagtgttggcttctgttggaaccacctatatgtcttgagaaacaaaaccacaggaggaaaggaagaaaaaccgatcaataccgtctgtgcctgatttcctaatggattttgttcgttttttcaggggaacggttgttacttagttacaatcagactttttcaagtcacacaatacactctttatgagctggagtttcatgttacaagttggaaatgctgtgtgttgacattcatgaaaaatactgcacttgtagccagattagcaaatcacagcaaattttgtgtcatagtgacattcataactcatatcagttagtaagctattatatcttctgttctaacaatgaatggaggtaattgatttagtctgattccttcctgaaatctaaatattagcacaatagtttctgaaattttacaatgttaaattatgatctaattcatgagaaaccacgggtttaacatagggattcaaaaaaacaaaaacaaaagaataggaataaataacccttaattgtatattggactagttcagcccttaaacagctttacctttatttaggaatgtacattttaggtattatcttgatcatggagcttagttttaatttagatagcaaaaataaagatttgtatttcttttccaatagcaaaaagttacataacactaatacttataacctatcaatatcagatattaatgactttgtagtgttgtaaaattttgaggaattttggagtctttatcataggtaacctggaccacagttactatttattgacaatgtgattgagtgtatggaggaaagcacagtggatgctaggctttgtaaatatggggatgtagaaaagcagatagttcagtgtctacctttttctagaactaccttgaaccttaaattttaagtcatgttcattgctagaaaattaaatgtacttattaaaaccaatgaaaaagcacatttctgaaatgaagttagagataatctctgtgtcttataaaaagacattaataaaaatctgaaagggccgggcgcagtggctcacgcctgtaatcccaacattttgggaggccaaggtgggcggatcatctgaggccaggagttcgagaccagcctggccagcatggtgaaaccctgtctctactaaaaatacaaaaaatcagcctggcatggtggtgcgtgcctgtagtcccagctactcagggctgaggcaggagaattgcttgaacccggcaggcagaggttgcagtgagccgagatcgccctgctgcactccagcctgggtgacagagggagactccgtctcaaaaaaaaaaaagtctgagagtagctaagaatttatgtaaaagcaatcagagtttttaatttatgggaaccaaataaaactataacctcatagtgtttataagaactcagaaataatatttatttaactttattatgaggccacacatattttcctgtgtttctatatatagtttggaaaactatccttaatagtctgttttatatgccttatatttaaaagtttgttttagttattttgaaagactattgctgctgcaaatagttgtgtgctttacattctaagcttcagtacatttatttaagagcatcataatctgacctgagcatccacttggagagtgttttttttgtgtgtggtctggggtgacaaaagaccacaaaaatgtgtggtctggattttttcaactatgtcattaactttatgatccaagaccagttataggatgaatctgtatgtaaaaatagagtcttatttatggaaggaattattctaagggaaaaatccagggtcaagctgtatcttttatgtcctttatattgcatgtctatttctgttacacaatttgttatttcttcaaatttcctatggtagcatgataaatcatcaaagaacctgtttgggatataaaactctgatagaaaatatttaatgagtatcttgattataacctagaatatgtatacgttagtaaaataaccagatatactacagaactctctattggctcaaacaggttgacctcaatccaagtttactcttgatatcactctgttggctgaaggaggtaactcaaacctcagggtttgtttttcccgggacagatagtagtgatagtgcattatatttgaataagaaaaacaaaccagtataccttgagaaattttaaaaagcatagttgaggcatattttttcataattatatacttatctgtttattgcccatggaaaatatatgtgtagaagtatttcttctgttatttgttactatcttcttaatttgttccaaagaaaatgctgccatactgcattccctctggaaggaaacaaaacaaaacaaaactcactcaaaaccagcagtgctgctatcagataagtagatgtcaatgtatacttacaaggaaaaactaaaaaatgtaatgtgttaattcagcctttttctatgtaatatttccaagtcagactttcttacattcctggaatttactttgatataccaagaataataatgataaaatgtttgctttgattactgtggggggaaagatgaaatgttcaattgtattaaaacaaacaagcttttcagagatactggtttcctgcccttgaagggtataaagaatttagatcatgcctgtaatcccagtactttgggaggccgaggcaggtggatcacctgagatcaggagttcgagaccagcctggccaacatggcaaaaccctgtctctactaaaaatacaataattagccaggcatggtggcgggcacctgtcatcccagctacttgggaggctgaggcaggagaatcgcttgaacccaggaggcagtgattgcagtgagctgagatagcaccactgcatgcaagcctgggcaatagagcgagactccgtctc

SEQ ID NO: 32908 - DNA, 1863 bp, Artificial Sequence
  derived and/or modified sequence
atggagagcagccctgagagcctgcagcccctggagcacggcgtggccgccggccctgccagcggcaccggcagcagccaggagggcctgcaggagacccggctggccgctggagatggccctggggtgtgggccgctgagaccagcggcggcaatggcctgggcgctgctgctgcccggcgcagcctgcctgacagcgccagccctgctggcagccctgaggtgcccggcccctgcagcagcagcgctggcctggacctgaaggacagcggcctggagagccctgctgctgctgaggcccccctgcggggccagtacaaggtgacagccagccctgagacagctgtggccggcgtgggccacgagctgggcacagctggagatgctggggcccggccagacctggccggcacctgccaggccgagctgacagctgctggcagcgaggagcccagcagcgctgggggcctgagcagcagctgcagcgaccccagccccccaggagagagccccagcctggacagcctggagagcttcagcaacctgcacagcttccccagcagctgtgagttcaacagcgaggagggcgctgagaacagagtgcctgaggaggaggagggcgctgctgtgctgcccggggctgtgcccctgtgcaaggaggaggagggggaggagacagcccaggtgctggccgccagcaaggagcgcttccctggccagagcgtgtaccacatcaagtggatccagtggaaggaggagaacacccccatcatcacccagaatgaaaatggcccctgccccctgctggccatcctgaatgtgctgctgctggcctggaaggtgaagctgccccccatgatggagatcatcacagctgagcagctgatggagtacctgggggactacatgctggatgccaagcccaaggagatcagcgagatccagaggctgaactatgagcagaacatgtctgatgccatggccatcctgcacaagctgcagacaggcctggatgtgaatgtgcgcttcaccggggtgcgggtgtttgagtacaccccagagtgcatcgtgtttgacctgctggacatccccctgtaccacggctggctggtggacccccagattgatgacatcgtgaaggctgtgggcaactgcagctacaaccagctggtggagaagatcatcagctgcaagcagagcgacaacagcgagctggtgtctgagggctttgtggccgagcagttcctgaacaacacagccacccagctgacctaccacggcctgtgtgagctgaccagcacagtgcaggagggggagctgtgtgtgttcttcaggaacaaccacttcagcaccatgaccaagtacaagggccagctgtacctgctggtgacagaccagggcttcctgacagaggagaaggtggtgtgggagagcctgcacaacgtggatggagatggcaacttctgtgacagcgagttccacctgcggcccccaagtgaccctgagaccgtgtacaagggccagcaggaccagattgaccaggactacctgatggccctgagcctgcagcaggagcagcagagccaggagatcaactgggagcagatccctgagggcatcagtgacctggagctggccaagaagctgcaggaggaggaggacagaagagccagccagtactaccaggagcaggagcaggccgctgctgctgctgctgctgccagcacccaggcccagggccagcctgcccaggccagccccagcagcggccggcagagcggcaacagcgagaggaagaggaaggagccccgggagaaggacaaggagaaggagaaggagaagaacagctgtgtgatcctgtag

SEQ ID NO: 32909 - DNA, 1863 bp, Artificial Sequence
  derived and/or modified sequence
atggagagcagccccgagagcctgcagcccctggagcacggcgtggcagcaggcccagcctccggcaccggatcatcacaggagggattacaagagacgcgcctggctgccggtgatggcccaggggtctgggctgctgaaacgtccggaggcaatggactcggagccgccgcagccaggcggtctctgcctgacagtgcctcccctgccggcagccctgaagtgcccgggccttgtagctccagtgccggcctggacctgaaggactccggactcgaaagtccagccgctgcagaggctcctttgaggggtcagtacaaggtcacagcctcacccgagaccgctgtagcaggcgtgggccacgagctcggaactgctggggacgcaggagcccgaccagatctggctggaacatgccaggcagaactcacagccgccggaagtgaagagcctagctctgcaggtggactttcgagttcttgtagcgacccctctccacccggtgaaagtccttccctggactctctcgagagttttagtaacctccacagtttcccctcttcctgcgagtttaattccgaagaaggcgccgaaaatcgggtgccagaagaagaggagggtgccgccgtgctccctggcgctgtcccattgtgcaaagaggaagagggggaggaaactgcgcaggttctagccgcctcaaaagaacggttcccaggtcagagcgtgtaccacattaagtggatccagtggaaggaagagaacacccctatcatcactcagaatgaaaacggtccttgtcctctcctggctatcctaaatgttctcctgctggcctggaaagtcaagttgccgcccatgatggagattatcacagccgagcagctgatggagtacctcggagactatatgctggacgcgaagcccaaggagatcagcgaaatccaacgtctaaactacgagcaaaatatgagtgatgctatggctattttgcacaagctgcagacaggtctggacgtgaacgtacggtttactggggtccgagtgtttgaatatacccctgagtgcatcgtgttcgaccttctggatattcctttgtaccacggctggctggtagatccccaaatcgacgacatcgtgaaggctgtgggtaattgcagctacaaccagctcgtggagaaaatcatcagctgtaagcagagcgacaacagtgaactcgtcagcgaaggttttgtagctgagcagttcctgaataacacagccacacaactcacatatcacggcctttgcgagttaacttccacggtccaggagggagagttgtgtgtgttcttccgaaataatcacttctccacaatgaccaagtacaaaggccagctgtatttgttggtcaccgaccagggattcctaaccgaagaaaaagttgtgtgggagtcactgcacaacgtggacggtgatggaaacttttgtgatagcgagtttcatctgcggcccccatcggaccctgagactgtgtacaaaggccaacaggaccagatcgaccaagattatttaatggctctgtccctacagcaagagcagcagtctcaggagattaattgggagcagattccggagggtatctccgacctggagctcgccaaaaagttacaagaggaggaagatcggcgcgcctcccagtactatcaggagcaggaacaagccgccgctgcggccgccgctgccagtacacaagctcaaggacagccggcgcaggcatccccatcgtctgggcgccaaagcggaaactcagagagaaagcgaaaagaaccccgggaaaaagataaagaaaaggaaaaagagaagaattcttgcgtcatactttag

SEQ ID NO: 32910 - DNA, 1863 bp, Artificial Sequence
  derived and/or modified sequence
atggaatcatccccagaatcattgcaaccgctcgaacatggagtggctgcgggtcctgcgtccggtaccgggagctctcaggaaggtctgcaggaaaccaggcttgcagcaggcgatggtcctggcgtttgggcagctgagacctcggggggtaacggactgggggctgcagctgctaggcgctccctcccagattccgcctcccccgctggatctcccgaggtgccaggcccttgcagcagctccgctggtttggacttgaaggattcaggacttgagtctccggctgctgcagaagcccctttacgtgggcagtacaaagtgacagcttcccccgagactgctgttgcaggtgtgggtcatgagctgggtacagccggtgacgctggggctaggcccgatctcgcagggacctgtcaggcagagttaaccgccgctggcagcgaggagccctcctccgctggaggattgtcatcgtcttgctcggatccaagtccgccaggcgaatctccttccctagatagcctggagtccttttccaatttgcattctttccccagctcatgtgagtttaacagcgaagagggagcagagaatagagtgcccgaagaggaagagggcgctgccgtcctgcctggagctgtgccactgtgcaaagaggaggagggcgaggaaacagcacaagtgctggccgctagcaaggaaagattccctggccagtctgtttatcatattaaatggatacaatggaaggaggagaacacccctatcattacccagaatgaaaacggcccatgtccacttcttgctatcttgaatgtactgcttctagcctggaaagttaagcttccgccaatgatggagataatcacagccgaacagctgatggaatatctaggagattacatgctggacgccaagccaaaagaaatcagtgagatccaaaggcttaattatgagcagaatatgtcagacgccatggccatactgcataaacttcagaccgggctcgatgtcaacgtgaggtttactggagtccgtgtgtttgagtacacccctgaatgcatcgtatttgaccttcttgatatccccctatatcacggctggctcgttgacccccaaatagatgatatagtaaaagcagtcgggaactgttcatacaaccagcttgtcgagaaaataatttcctgtaaacagagcgacaattccgagttagtctctgaaggattcgtagcagaacagttcttgaataatacagctactcagctgacctaccacgggctgtgtgagctgacctcgaccgttcaggagggagaactgtgtgtgttttttcgaaataaccacttctccaccatgaccaaatacaaaggtcaattatacctcctggtgaccgaccaggggtttctcaccgaggagaaggtggtgtgggaatctctacataacgtagacggagacggcaatttctgtgacagcgaattccatcttcgtcctccgtccgatccagaaaccgtttataagggccagcaggatcaaatcgatcaggattacctgatggcgttgagtctacagcaggagcagcagtcccaagaaataaactgggagcagatccctgagggcatctcagacctggagctagccaagaaacttcaggaagaagaggatcggcgtgcctcacagtactatcaggagcaggagcaggctgcagccgctgctgccgctgcctccacccaagcccagggccagcctgcccaggcctccccttcttctgggagacagagtggaaactccgagcggaagaggaaggagccacgtgaaaaggataaggaaaaggaaaaggaaaagaattcatgcgtgattctgtag

SEQ ID NO: 32911 - DNA, 2217 bp, Artificial Sequence
  derived and/or modified sequence
atggatctgcgtcgacgcgattaccacatggaacgcccattgcttaaccaagagcatctggaagagctcggccgttggggctctgcccctcgcacgcatcagtggcgaacctggctgcagtgctcaagggccagagcctacgctctgctactgcaacatctcccagtgctcgtttggctccccagatacccagttagggattggctgttgggtgatctactgagcggcctgtccgtggcaattatgcaactgcctcagggactggcctacgcattgctagctgggctcccgcccgtttttgggttgtatagctcattttaccctgtattcatttattttctctttggaacatctcgccatataagcgtcggcaccttcgcagtgatgtccgtgatggtcggttcggtcaccgaaagtctggccccacaggcgcttaacgactctatgatcaacgagaccgccagagatgccgctcgtgtccaggtggcgtcaacattgagcgtgttagtcggtctttttcaggtcgggttgggcctgatccatttcggatttgtcgtaacatacctgtctgagccattggtgaggggctacactacagcggccgccgtccaggtgttcgtctcgcagttaaagtacgtgtttggattgcacctgtctagccatagtggtccactttccttgatttacaccgtcctggaggtgtgttggaaacttcctcagtccaaggtggggaccgtggttaccgctgcagtcgccggagtggtgctggtggtcgtaaagctgctcaatgacaaactgcagcagcaattaccgatgcctattccgggcgagcttctgaccctaattggagcaactggaatctcttacggtatgggactgaagcataggtttgaagtcgacgtggttggcaatatccccgcaggcctggtcccgccagtagcaccgaatacccagctcttcagcaagttagtgggctccgcgtttacgatcgccgtggtgggatttgcaatcgcaatctcccttggaaaaattttcgcactgcgccacggctaccgagtggatagcaaccaggaactcgtggcattagggttgagcaatttaattggcggaatttttcagtgtttcccagtgtcctgtagtatgtcccgatctttagttcaggaaagcaccgggggtaactcacaggttgcaggggcaatttcatcccttttcattctgcttatcattgtgaagttaggggagctcttccacgatctaccaaaggctgttcttgcagccatcatcatagttaacctgaaggggatgcttagacagctgtcggacatgcgctcactctggaaagccaatcgcgccgatctgctgatctggctagtgacattcacggccaccatactgttgaatctcgatcttggtctcgtggttgccgtgatattttctctgctgctggtcgtagtgcggacgcagatgccccactactcagttctggggcaggtgcccgataccgatatatatcgggacgttgctgaatatagcgaagccaaggaggtccgtggggtgaaagtgtttcgtagctctgccaccgtttatttcgcaaatgcagagttttacagtgatgcattaaaacagaggtgtggggttgatgttgactttcttatttcacagaagaaaaagctgttaaagaagcaggaacaactcaagctcaaacagctccaaaaagaagagaagctgagaaagcaagccgctagcccaaagggggccagcgtgagtatcaacgtcaacacctctctggaagatatgaggtcaaacaacgtcgaggattgtaaaatgatgcaggtctcctccggggataaaatggaggacgccaccgccaacggacaagaagattctaaggcaccagacggaagtactcttaaggctttgggcttgcctcagcccgatttccacagtctgatcctggacttaggcgccctgtcttttgtcgatactgtatgtctgaagtctctgaagaacatctttcacgattttcgcgaaattgaggtggaagtatatatggcagcatgtcactcaccagtggtctcgcagctggaagcagggcacttcttcgacgcctctattacaaagaagcatttgtttgcctcagttcacgatgctgtgacgttcgcactgcagcacccaaggcctgtgcccgactcccccgtcagcgtgacccggctgtag

SEQ ID NO: 32912 - DNA, 2217 bp, Artificial Sequence
  derived and/or modified sequence
atggacctgcggcggcgggactaccacatggagcggcccctgctgaaccaggagcacctggaggagctgggccgctggggcagcgcccccaggacccaccagtggaggacctggctgcagtgcagccgggcccgggcctatgccctgctgctgcagcacctgcctgtgctggtgtggctgccccgctaccctgtgcgggactggctgctgggggacctgctgagcggcctgtctgtggccatcatgcagctgccccagggcctggcctatgccctgctggccggcctgccccctgtgtttggcctgtacagcagcttctaccctgtgttcatctacttcctgtttggcaccagccgccacatctctgtgggcacctttgctgtgatgtctgtgatggtgggctctgtgacagagagcctggccccccaggccctgaatgacagcatgatcaatgaaacagccagagatgctgcccgggtgcaggtggccagcaccctgtctgtgctggtgggcctcttccaggtgggcctgggcctcatccacttcggctttgtggtgacctacctgtctgagcccctggtgcggggctacaccacagctgctgctgtgcaggtgtttgtgtcccagctgaagtatgtgtttggcctgcacctgagcagccacagcggccccctgagcctcatctacacagtgctggaggtgtgctggaagctgccccagagcaaggtgggcaccgtggtgacagctgctgtggccggcgtggtgctggtggtggtgaagctgctgaatgacaagctgcagcagcagctgcccatgcccatccctggagagctgctgaccctcatcggggccaccggcatctcctatggcatgggcctgaagcacagatttgaggtggatgtggtgggcaacatcccagctggcctggtgccccctgtggcccccaacacccagctgttcagcaagctggtgggcagcgccttcaccatcgctgtggtgggctttgccatcgccatcagcctgggcaagatctttgccctgcggcacggctacagagtggacagcaaccaggagctggtggccctgggcctgagcaacctgattggaggcatcttccagtgcttccctgtgtcctgcagcatgagccgcagcctggtgcaggagagcactggaggcaacagccaggtggccggggccatcagcagcctcttcatcctgctgatcatcgtgaagctgggggagctgttccatgacctgcccaaggctgtgctggccgccatcatcatcgtgaacctgaagggcatgctgcggcagctgagtgacatgaggagcctgtggaaggccaacagagctgacctgctgatctggctggtgaccttcaccgccaccatcctgctgaacctggacctgggcctggtggtggccgtcatcttcagcctgctgctggtggtggtgaggacccagatgccccactacagcgtgctgggccaggtgcctgacacagacatctacagagatgtggccgagtacagcgaggccaaggaggtgcggggcgtgaaggtgttccgcagcagcgccaccgtgtactttgccaatgctgagttctacagtgatgccctgaagcagagatgtggggtggatgtggacttcctgatcagccagaagaagaagctgctgaagaagcaggagcagctgaagctgaagcagctgcagaaggaggagaagctgaggaagcaggccgccagccccaagggggcctctgtgtccatcaacgtgaacaccagcctggaggacatgaggagcaacaacgtggaggactgcaagatgatgcaggtgagcagcggggacaagatggaggatgccacagccaacggccaggaggacagcaaggccccagatggcagcaccctgaaggccctgggcctgccccagcctgacttccacagcctcatcctggacctgggcgccctgagctttgtggacacagtgtgcctgaagagcctgaagaacatcttccatgacttccgggagattgaggtggaggtgtacatggccgcctgccacagccctgtggtgtcccagctggaggccggccacttctttgatgccagcatcaccaagaagcacctgtttgcctctgtgcatgatgctgtgacctttgccctgcagcaccccaggcctgtgcctgacagccctgtgtctgtgacccggctgtag

SEQ ID NO: 32913 - DNA, 2217 bp, Artificial Sequence
  derived and/or modified sequence
atggacctgcggcggcgggactaccacatggagcggcccctgctgaaccaggagcacctcgaagaactaggccggtgggggtctgccccccgcacacatcagtggcgtacctggctccaatgtagtcgagctcgggcctatgcgttactgctgcagcatctgcccgtgctcgtctggctcccccgatacccagtccgggattggcttctcggcgatctgttgagcggcctaagtgtcgccatcatgcaactcccacagggattagcgtatgccctgttggcgggcctgccacctgtctttgggttgtacagcagcttctaccctgtttttatttatttcctgtttggcacctcccggcatatctctgtgggcaccttcgccgtcatgtcagtcatggtcgggtctgttactgaatccctggccccgcaggctttgaatgactcaatgatcaatgaaacggctagggatgctgcccgcgtccaggtggcctctacattaagcgttttggtgggactcttccaggtaggactaggccttattcatttcgggttcgtggtcacctacctcagcgaacccctggttcggggttacactaccgcagccgctgtccaggtcttcgtgtctcaattaaagtacgtgtttggcttacatttatcttcacattcaggcccgctctcgctgatctacaccgtgcttgaagtctgctggaaactgcctcagagtaaggttggaacagtagttaccgcggccgtggccggtgtggtgctcgtggtcgtaaagctgctgaatgacaagctccaacagcaattaccaatgccaatccccggcgaactgctcacgctaattggagcaaccggcattagctacggaatgggccttaaacatcgctttgaagtggacgtggtgggcaacatccccgcaggtttggtacctcctgtcgccccgaatacacagctcttttctaagctggtggggagtgccttcaccattgctgttgttggcttcgccatagcaattagcttgggtaaaatcttcgctctgcgccacggatatagagttgactccaatcaagaactcgtggcactcggcctcagcaatcttataggcggcatctttcagtgctttcccgtctcctgctctatgagccggtctctggttcaggagtccactggcggtaactcccaagtggctggggccatctccagtctgttcatactcctaattattgttaaactgggggagctgtttcatgacctgcccaaggcagttctggcagcgatcattattgtgaatctgaaaggaatgttacgtcagctttctgacatgcgcagcctgtggaaggctaaccgggcagatctattgatttggcttgtgaccttcacggctaccatcctgctaaatttggatttagggctggtggtcgccgttattttttctctcctacttgtggtggtcagaacccagatgccccattacagtgtgctcggacaggtcccggacactgacatttacagggacgtcgccgaatactctgaggccaaggaggttcggggggtcaaagtgttccgctccagcgctacggtgtactttgcaaacgctgaattctatagcgacgccctgaagcagcgctgcggagttgatgttgacttccttatctcacagaagaaaaagttattgaaaaagcaggagcagctgaagttaaaacagctccagaaagaagaaaagttgcgtaaacaggcggcctcccctaagggcgcctcggtgtcaataaatgtgaatacctcgctggaggatatgcgaagtaataacgtggaggattgcaagatgatgcaagtatcaagtggggacaaaatggaggatgctacagcaaatggccaggaagactccaaagctcccgatggttccaccttaaaggcactcgggctccctcagccggattttcatagtctaatcctcgacttaggggctctgtccttcgtcgataccgtctgtctgaaaagtttaaaaaacatcttccacgacttcagggaaatcgaagtagaggtgtacatggccgcgtgccatagtccagtggtctctcagctggaggccggccatttttttgatgcctccataacaaagaagcatctttttgctagcgtacatgatgctgtgacctttgcccttcagcacccccgccctgttccggactccccagtgtccgtcacacgattatag

SEQ ID NO: 32914 - DNA, 2217 bp, Artificial Sequence
  derived and/or modified sequence
atggacctgagacggagagattatcacatggagcgccctcttctcaaccaggagcatctagaggagcttggtcgttggggatctgcccctaggacacatcagtggaggacgtggctgcagtgttctagagcccgagcttacgctctgctcctgcagcacctacctgtcctcgtttggctgcctcgctatcctgtgcgggactggctactcggggatctcctgtctggactctccgtcgccatcatgcagctacctcagggactagcctacgctctactggctgggctcccccctgtattcgggctgtatagcagcttctatcccgtttttatttatttcttgtttggaacctcgagacacatcagtgttggaacatttgcagttatgagtgtaatggtgggatcggtaaccgaatcactggccccacaggccctgaatgattcaatgattaacgagaccgcccgtgacgctgcccgagtacaggtggccagcaccctatccgtccttgtgggcctgtttcaggtcggcttggggctcattcatttcggattcgtggtgacttacctgtccgagcccctggtccgcggatacaccactgctgctgctgtccaggtatttgtatcccagcttaagtatgttttcggattacatctctctagccactcgggtcccctgtctctcatctacacagttctggaagtttgctggaagctgccacaatccaaagtggggaccgtcgttacagccgctgtggcaggagtagtcctggtcgtggtgaagctgctgaatgataagcttcagcagcagctgcctatgcccatccctggcgaactgctcaccctaataggcgctaccggcattagttatggaatgggactgaaacacagattcgaagtggacgtcgtgggcaatatacctgctggcctggtcccccctgtcgcacccaatactcaactgttctctaaattagttggatctgcgttcacaatagccgtcgtaggattcgcaatagccatatccttgggcaagatttttgctctgagacacgggtaccgggtggacagcaaccaggaattggttgccctcggtctttcgaatttgatcgggggtattttccaatgcttccccgtctcctgtagcatgagcaggtctctggtccaggagtcaacaggaggaaattcacaggtggctggggctatcagctctctttttatcctgcttatcatcgttaaactgggagagctgttccatgacctcccaaaagctgtcctcgccgctattatcattgtcaatctgaagggaatgctgcgtcagttgagtgacatgaggtccctgtggaaagccaatagggccgacctgctgatctggctggtgacatttactgccacgatcctgttaaacctcgatttagggcttgtggtcgcagtaatcttctcactgctattagtggtggtgaggacccaaatgccacattacagtgtgcttggccaggtccccgataccgacatttatcgtgacgttgccgaatattccgaagcaaaggaggtgcggggtgtcaaggtgttccgaagcagcgctaccgtgtattttgccaacgcagagttttacagtgacgctcttaagcagcgttgcggagttgatgtggattttctaatatctcagaagaagaagctcttaaagaaacaggagcaactgaaacttaagcagttacagaaggaagagaaactgcgaaagcaggctgctagcccaaagggggcaagtgttagcattaatgtgaatacttctcttgaggacatgagaagcaataatgttgaggactgcaagatgatgcaggtgagctcgggtgataaaatggaggacgcaacagctaacgggcaggaggactccaaggcccctgatggttccaccctcaaggccctaggccttcctcaacctgattttcattccctcattctggacctgggtgctctctccttcgtggacaccgtctgcctgaaatctctcaagaatatcttccatgacttcagagaaattgaggtcgaggtctatatggccgcttgtcatagtccagtcgtctctcagttggaagccggtcacttctttgatgcttcaatcaccaaaaaacacctcttcgcctccgtccatgacgcggtgacatttgccctgcagcacccacgtcccgtaccagactcaccggtctcagttacacgtctttag

SEQ ID NO: 32915 - DNA, 2217 bp, Artificial Sequence
  derived and/or modified sequence
atggacctgagaagaagagactaccacatggagagacccctgctgaaccaggagcacctggaggagctgggcagatggggcagcgcccccagaacccaccagtggagaacctggctgcagtgcagcagagccagagcctacgccctgctgctgcagcacctgcccgtgctggtgtggctgcccagataccccgtgagagactggctgctgggcgacctgctgagcggcctgagcgtggccatcatgcagctgccccagggcctggcctacgccctgctggccggcctgccccccgtgttcggcctgtacagcagcttctaccccgtgttcatctacttcctgttcggcaccagcagacacatcagcgtgggcaccttcgccgtgatgagcgtgatggtgggcagcgtgaccgagagcctggccccccaggccctgaacgacagcatgatcaacgagaccgccagagacgccgccagagtgcaggtggccagcaccctgagcgtgctggtgggcctgttccaggtgggcctgggcctgatccacttcggcttcgtggtgacctacctgagcgagcccctggtgagaggctacaccaccgccgccgccgtgcaggtgttcgtgagccagctgaagtacgtgttcggcctgcacctgagcagccacagcggccccctgagcctgatctacaccgtgctggaggtgtgctggaagctgccccagagcaaggtgggcaccgtggtgaccgccgccgtggccggcgtggtgctggtggtggtgaagctgctgaacgacaagctgcagcagcagctgcccatgcccatccccggcgagctgctgaccctgatcggcgccaccggcatcagctacggcatgggcctgaagcacagattcgaggtggacgtggtgggcaacatccccgccggcctggtgccccccgtggcccccaacacccagctgttcagcaagctggtgggcagcgccttcaccatcgccgtggtgggcttcgccatcgccatcagcctgggcaagatcttcgccctgagacacggctacagagtggacagcaaccaggagctggtggccctgggcctgagcaacctgatcggcggcatcttccagtgcttccccgtgagctgcagcatgagcagaagcctggtgcaggagagcaccggcggcaacagccaggtggccggcgccatcagcagcctgttcatcctgctgatcatcgtgaagctgggcgagctgttccacgacctgcccaaggccgtgctggccgccatcatcatcgtgaacctgaagggcatgctgagacagctgagcgacatgagaagcctgtggaaggccaacagagccgacctgctgatctggctggtgaccttcaccgccaccatcctgctgaacctggacctgggcctggtggtggccgtgatcttcagcctgctgctggtggtggtgagaacccagatgccccactacagcgtgctgggccaggtgcccgacaccgacatctacagagacgtggccgagtacagcgaggccaaggaggtgagaggcgtgaaggtgttcagaagcagcgccaccgtgtacttcgccaacgccgagttctacagcgacgccctgaagcagagatgcggcgtggacgtggacttcctgatcagccagaagaagaagctgctgaagaagcaggagcagctgaagctgaagcagctgcagaaggaggagaagctgagaaagcaggccgccagccccaagggcgccagcgtgagcatcaacgtgaacaccagcctggaggacatgagaagcaacaacgtggaggactgcaagatgatgcaggtgagcagcggcgacaagatggaggacgccaccgccaacggccaggaggacagcaaggcccccgacggcagcaccctgaaggccctgggcctgccccagcccgacttccacagcctgatcctggacctgggcgccctgagcttcgtggacaccgtgtgcctgaagagcctgaagaacatcttccacgacttcagagagatcgaggtggaggtgtacatggccgcctgccacagccccgtggtgagccagctggaggccggccacttcttcgacgccagcatcaccaagaagcacctgttcgccagcgtgcacgacgccgtgaccttcgccctgcagcaccccagacccgtgcccgacagccccgtgagcgtgaccagactgtag

SEQ ID NO: 32916 - protein, 364 aa, Artificial Sequence
  derived and/or modified sequence
MAASGPGCRSWCLCPEVPSATFFTALLSLLVSGPRLFLLQQPLAPSGLTLKSEALRNWQVYRLVTYIFVYENPISLLCGAIIIWRFAGNFERTVGTVRHCFFTVIFAIFSAIIFLSFEAVSSLSKLGEVEDARGFTPVAFAMLGVTTVRSRMRRALVFGMVVPSVLVPWLLLGASWLIPQTSFLSNVCGLSIGLAYGLTYCYSIDLSERVALKLDQTFPFSLMRRISVFKYVSGSSAERRAAQSRKLNPVPGSYPTQSCHPHLSPSHPVSQTQHASGQKLASWPSCTPGHMPTLPPYQPASGLCYVQNHFGPNPTSSSVYPASAGTSLGIQPPTPVNSPGTVYSGALGTPGAAGSKESSRVPMP

SEQ ID NO: 32917 - protein, 223 aa, Artificial Sequence
  derived and/or modified sequence
MLGVTTVRSRMRRALVFGMVVPSVLVPWLLLGASWLIPQTSFLSNVCGLSIGLAYGLTYCYSIDLSERVALKLDQTFPFSLMRRISVFKYVSGSSAERRAAQSRKLNPVPGSYPTQSCHPHLSPSHPVSQTQHASGQKLASWPSCTPGHMPTLPPYQPASGLCYVQNHFGPNPTSSSVYPASAGTSLGIQPPTPVNSPGTVYSGALGTPGAAGSKESSRVPMP

SEQ ID NO: 32918 - protein, 434 aa, Artificial Sequence
  derived and/or modified sequence
MGRGLWEAWPPAGSSAVAKGNCREEAEGAEDRQPASRRGAGTTAAMAASGPGCRSWCLCPEVPSATFFTALLSLLVSGPRLFLLQQPLAPSGLTLKSEALRNWQVYRLVTYIFVYENPISLLCGAIIIWRFAGNFERTVGTVRHCFFTVIFAIFSAIIFLSFEAVSSLSKLGEVEDARGFTPVAFAMLGVTTVRSRMRRALVFGMVVPSVLVPWLLLGASWLIPQTSFLSNVCGLSIGLAYPHLLLFHRPLRASGTEARSDLPLQPDEEDIRVQVRLRVFSREEGSPEPETEPGAWLLPHTELPPSPVPKPPCVPDAARQWSEAGLLASCTPGHMPTLPPYQPASGLCYVQNHFGPNPTSSSVYPASAGTSLGIQPPTPVNSPGTVYSGALGHQGLQAPRSPPGSPCPERISREVISLGLLKVLPKSLLTKVTY

SEQ ID NO: 32919 - DNA, 1095 bp, Artificial Sequence
  derived and/or modified sequence
atggccgccagcggccccggctgcagaagctggtgcctgtgccccgaggtgcccagcgccaccttcttcaccgccctgctgagcctgctggtgagcggccccagactgttcctgctgcagcagcccctggcccccagcggcctgaccctgaagagcgaggccctgagaaactggcaggtgtacagactggtgacctacatcttcgtgtacgagaaccccatcagcctgctgtgcggcgccatcatcatctggagattcgccggcaacttcgagagaaccgtgggcaccgtgagacactgcttcttcaccgtgatcttcgccatcttcagcgccatcatcttcctgagcttcgaggccgtgagcagcctgagcaagctgggcgaggtggaggacgccagaggcttcacccccgtggccttcgccatgctgggcgtgaccaccgtgagaagcagaatgagaagagccctggtgttcggcatggtggtgcccagcgtgctggtgccctggctgctgctgggcgccagctggctgatcccccagaccagcttcctgagcaacgtgtgcggcctgagcatcggcctggcctacggcctgacctactgctacagcatcgacctgagcgagagagtggccctgaagctggaccagaccttccccttcagcctgatgagaagaatcagcgtgttcaagtacgtgagcggcagcagcgccgagagaagagccgcccagagcagaaagctgaaccccgtgcccggcagctaccccacccagagctgccacccccacctgagccccagccaccccgtgagccagacccagcacgccagcggccagaagctggccagctggcccagctgcacccccggccacatgcccaccctgcccccctaccagcccgccagcggcctgtgctacgtgcagaaccacttcggccccaaccccaccagcagcagcgtgtaccccgccagcgccggcaccagcctgggcatccagccccccacccccgtgaacagccccggcaccgtgtacagcggcgccctgggcacccccggcgccgccggcagcaaggagagcagcagagtgcccatgccctag

SEQ ID NO: 32920 - DNA, 1305 bp, Artificial Sequence
  derived and/or modified sequence
atgggcagaggcctgtgggaggcctggccccccgccggcagcagcgccgtggccaagggcaactgcagagaggaggccgagggcgccgaggacagacagcccgccagcagaagaggcgccggcaccaccgccgccatggccgccagcggccccggctgcagaagctggtgcctgtgccccgaggtgcccagcgccaccttcttcaccgccctgctgagcctgctggtgagcggccccagactgttcctgctgcagcagcccctggcccccagcggcctgaccctgaagagcgaggccctgagaaactggcaggtgtacagactggtgacctacatcttcgtgtacgagaaccccatcagcctgctgtgcggcgccatcatcatctggagattcgccggcaacttcgagagaaccgtgggcaccgtgagacactgcttcttcaccgtgatcttcgccatcttcagcgccatcatcttcctgagcttcgaggccgtgagcagcctgagcaagctgggcgaggtggaggacgccagaggcttcacccccgtggccttcgccatgctgggcgtgaccaccgtgagaagcagaatgagaagagccctggtgttcggcatggtggtgcccagcgtgctggtgccctggctgctgctgggcgccagctggctgatcccccagaccagcttcctgagcaacgtgtgcggcctgagcatcggcctggcctacccccacctgctgctgttccacagacccctgagagccagcggcaccgaggccagaagcgacctgcccctgcagcccgacgaggaggacatcagagtgcaggtgagactgagagtgttcagcagagaggagggcagccccgagcccgagaccgagcccggcgcctggctgctgccccacaccgagctgccccccagccccgtgcccaagcccccctgcgtgcccgacgccgccagacagtggagcgaggccggcctgctggccagctgcacccccggccacatgcccaccctgcccccctaccagcccgccagcggcctgtgctacgtgcagaaccacttcggccccaaccccaccagcagcagcgtgtaccccgccagcgccggcaccagcctgggcatccagccccccacccccgtgaacagccccggcaccgtgtacagcggcgccctgggccaccagggcctgcaggcccccagaagcccccccggcagcccctgccccgagagaatcagcagagaggtgatcagcctgggcctgctgaaggtgctgcccaagagcctgctgaccaaggtgacctactag

SEQ ID NO: 32921 - DNA, 1095 bp, Artificial Sequence
  derived and/or modified sequence
atggccgccagcggaccaggttgcaggtcctggtgtctctgtcctgaggtacctagtgctacattctttaccgccctgctcagccttctggttagcggaccaaggctgtttctgctacaacagcctctggcaccctccggacttactttgaaatcagaggccctgcgaaactggcaggtctataggcttgtgacttacatctttgtgtacgaaaacccaatcagtctgttgtgcggtgcaattatcatctggcggttcgctggaaactttgaacggactgtgggaacagtgaggcattgcttttttactgtcatctttgctatattctcagccatcattttcctctccttcgaggctgtgtctagcttatctaagcttggcgaagtcgaggacgccaggggttttacgcctgttgctttcgcaatgctgggggtgaccaccgtgcggagccggatgcgcagggccctggtctttggtatggtagtgcccagcgttcttgtgccctggctgcttctgggggcgtcgtggctgatccctcaaacaagcttccttagtaacgtgtgtggcctctctatcggcctggcctacggcctcacctattgttattctattgacctgtccgaaagggtcgccctgaagctggaccagacattcccatttagcctgatgcggagaatttccgtgttcaaatatgtatctggtagcagtgcagaacggcgcgctgcccagtccaggaaacttaatccggtcccaggatcctatccaacgcagtcctgccatcctcacctctccccctcccaccctgtgtcacaaacgcaacatgccagtggtcaaaaattggcttcctggccctcctgcacccccgggcacatgcccaccttgccaccgtaccaacctgcatcaggactctgctatgtgcagaaccactttggacccaaccctacatcatcttctgtgtatcccgcatctgcaggcacttcactcggcatccaacctcctactcccgttaattctcccggaaccgtttattccggtgccttgggaacacctggcgcggccggaagcaaggaaagctctcgagtccccatgccttag

SEQ ID NO: 32922 - DNA, 1305 bp, Artificial Sequence
  derived and/or modified sequence
atgggacggggtctctgggaagcttggcctccagcagggtcctccgcagtggccaaaggaaattgcagagaggaggctgaaggcgccgaggataggcagccagcctctcgccgtggagcagggacaaccgcggccatggccgcttcgggtcctggctgtcggtcatggtgtctatgccctgaagtgccaagcgcgacctttttcaccgccctcctatcgctgctcgtgagtggccccaggctttttctcctgcagcagccactggcgccatcggggcttactcttaagagcgaagcccttagaaactggcaggtttaccgtttggtgacatatatctttgtttacgagaatcctatctcactgctgtgcggggctatcattatctggcgattcgccggcaactttgagcgcacagtaggcaccgtacggcattgcttcttcacagtgatatttgcaatcttctccgctattatcttccttagttttgaggctgtgtcttctctgtccaagttgggagaggttgaagatgcaagggggtttactcccgttgcttttgcgatgctaggggtaacgacggtcaggagccgaatgagaagggcacttgttttcgggatggttgtgcctagcgtactcgtcccctggctgctgcttggggcctcctggctgattcctcagacctcctttctctccaacgtgtgcgggctttccataggcctagcctaccctcatctgctcctgtttcaccgccctctgcgggcttccgggacggaagcccgaagtgatttgcctctccaaccagacgaggaggacatcagagtgcaggtacggctgagagtattttctagagaagaaggcagtccggagcctgaaacagagccgggcgcctggctcctgccccatacagaattgccaccctccccagtgccaaagcctccttgcgttccggacgctgctcgacagtggtcagaggctgggctgctggcaagctgcaccccaggccacatgcctaccctccccccttaccagcctgcctcaggcctgtgctacgtgcagaaccattttggtccaaaccccacctcgagctcggtctacccagcctctgccggtactagccttggtatccagcccccaaccccagtgaatagtccaggtactgtctattccggcgccctgggacatcagggcttacaggctccccggtcgccaccgggatccccgtgcccggaaaggatcagtagagaagttatttccttaggattgctgaaagtgctgccaaagagtctcctgacaaaggtaacgtattag

SEQ ID NO: 32923 - DNA, 1095 bp, Artificial Sequence
  derived and/or modified sequence
atggccgccagcggccctggctgccgctcctggtgcctgtgcccagaggtgcccagcgccaccttcttcaccgccctgctgagcctgctggtgtctggccccaggctcttcctgctgcagcagcccctggcccccagcggcctgaccctgaagtctgaggccctgaggaactggcaggtgtaccgcctggtgacctacatctttgtgtatgagaaccccatcagcctgctgtgtggggccatcatcatctggaggtttgctggcaactttgagaggacagtgggcaccgtgcgccactgcttcttcaccgtcatctttgccatcttcagcgccatcatcttcctgagctttgaagctgtgagcagcctgagcaagctgggggaggtggaggatgcccggggcttcacccctgtggcctttgccatgctgggcgtgaccaccgtgcgcagcaggatgagaagagccctggtgtttggcatggtggtgcccagcgtgctggtgccctggctgctgctgggcgcctcctggctgatcccccagaccagcttcctgagcaatgtgtgtggcctgagcatcggcctggcctacggcctgacctactgctacagcattgacctgtctgagcgggtggccctgaagctggaccagaccttccccttcagcctgatgaggcgcatctctgtgttcaagtatgtgtctggcagcagcgctgagaggagagctgcccagagcaggaagctgaaccctgtgcccggcagctaccccacccagagctgccacccccacctgagccccagccaccctgtgtcccagacccagcacgccagcggccagaagctggcctcctggcccagctgcaccccaggccacatgcccaccctgcccccctaccagcctgccagcggcctgtgctacgtgcagaaccacttcggccccaaccccaccagcagctctgtgtacccagccagcgctggcaccagcctgggcatccagccccccacccctgtgaacagccctggcaccgtgtacagcggggccctgggcaccccaggagctgctggcagcaaggagagcagccgggtgcccatgccctag

SEQ ID NO: 32924 - DNA, 1305 bp, Artificial Sequence
  derived and/or modified sequence
atgggccggggcctgtgggaggcctggcccccagctggcagcagcgctgtggccaagggcaactgccgggaggaggccgagggcgctgaggaccggcagcctgccagcagaagaggagctggcaccacagctgccatggccgccagcggccctggctgccgctcctggtgcctgtgcccagaggtgcccagcgccaccttcttcaccgccctgctgagcctgctggtgtctggccccaggctcttcctgctgcagcagcccctggcccccagcggcctgaccctgaagtctgaggccctgaggaactggcaggtgtaccgcctggtgacctacatctttgtgtatgagaaccccatcagcctgctgtgtggggccatcatcatctggaggtttgctggcaactttgagaggacagtgggcaccgtgcgccactgcttcttcaccgtcatctttgccatcttcagcgccatcatcttcctgagctttgaggccgtgagcagcctgagcaagctgggggaggtggaggatgcccggggcttcacccctgtggcctttgccatgctgggcgtgaccaccgtgcgcagcaggatgaggcgggccctggtgtttggcatggtggtgcccagcgtgctggtgccctggctgctgctgggcgcctcctggctgatcccccagaccagcttcctgagcaatgtgtgtggcctgagcatcggcctggcctacccccacctgctgctcttccaccggcccctgcgggccagcggcacagaggcccggagtgacctgcccctgcagccagatgaggaggacatccgggtgcaggtgcggctgcgggtcttcagccgggaggagggcagccctgagcctgagacagagcccggggcctggctgctgccccacacagagctgccccccagccctgtgcccaagccaccctgtgtgcctgatgctgcccggcagtggagcgaggccggcctgctggccagctgcaccccaggccacatgcccaccctgcccccctaccagcctgccagcggcctgtgctacgtgcagaaccacttcggccccaaccccaccagcagctctgtgtacccagccagcgctggcaccagcctgggcatccagccccccacccctgtgaacagccctggcaccgtgtacagcggggccctgggccaccagggcctgcaggcccccaggagccccccaggcagcccctgcccagagcgcatcagccgggaggtgatcagcctgggcctgctgaaggtgctgcccaagagcctgctgaccaaggtgacctactag

SEQ ID NO: 32925 - DNA, 1095 bp, Artificial Sequence
  derived and/or modified sequence
atggccgccagcggccccggctgccggagctggtgcctgtgccccgaggtccctagcgcgaccttttttaccgctctactatctctgctggtctccggtccccgactgttcctgctgcaacagcccctggccccgtctggattaaccctgaagtctgaggccctcagaaattggcaagtgtatcgcctcgttacatatatcttcgtatacgagaatccaataagtctgctgtgcggggctattatcatctggagattcgccggcaattttgaaagaacggttggaacagtgcggcattgtttcttcaccgtgatctttgctatattttccgctatcatctttttaagtttcgaggctgtgagctctctgagtaaactgggcgaggtggaggacgcacgaggcttcacaccggtggcctttgcaatgttaggtgtaaccacagttcggtcgcggatgcggcgcgcactggtgttcggtatggtcgtgcctagcgtcctggtgccatggcttctgctcggcgcgagctggctcatcccacagacttctttcttgtccaatgtatgtgggctctcaatcggcctggcttacggcctcacctactgttacagcatcgacctctcagagagggtggcactgaaactggatcaaacctttcccttctcgctcatgagaaggatcagcgtgtttaaatacgtatcaggctcatccgcagaacgcagagccgcccagagccggaagctcaatcctgtcccaggcagctaccccactcaatcctgccaccctcatctatcacctagccacccggtgtctcagacacagcacgcgtctggccagaagctggcaagttggccgagttgcactcctggccacatgccaacacttcctccgtatcagcccgcttctggcctgtgttacgtccagaaccactttgggcctaaccctacctcaagtagcgtgtatcccgcgagtgcagggacatccctggggatccagccccctaccccagtcaactcgcctggtaccgtttactctggcgctctgggcacaccaggtgctgctggcagtaaggaatctagccgggtgcctatgccttag

SEQ ID NO: 32926 - DNA, 1305 bp, Artificial Sequence
  derived and/or modified sequence
atgggccggggcctgtgggaggcctggccccccgccggcagcagcgcagtggccaagggtaactgccgagaggaggcagaaggcgccgaggaccgacagccagcgagccggagaggggccggaaccacagccgcgatggcagcaagtggacccggctgtaggtcatggtgtctgtgtcccgaggttccgtcggcgacttttttcaccgcactgctgagtctcctggtttcagggcccaggctctttttgcttcagcaaccactggcgccttcaggtttgacacttaaatccgaagctctgcggaactggcaggtctaccggttggtcacgtacatcttcgtatacgaaaatcccatctccttactgtgcggagctattattatctggcggttcgccgggaattttgagaggaccgtgggaaccgtcaggcattgcttctttacagtgattttcgcgatctttagtgccatcatttttctaagttttgaggccgtctcctcgttatctaagttgggggaggtggaagacgcaagaggattcacccctgtggccttcgcaatgttaggcgtcactacagtgcgcagtagaatgcgcagggcccttgttttcgggatggtggtgcccagcgttttggtgccctggctgctgctgggtgcatcctggctgattccccagaccagctttctctccaatgtttgcggtctcagtattggcctcgcctacccacacttactgcttttccaccgacctctgcgggccagcggcacggaagctaggagtgacctgccactgcagcctgacgaagaggatatcagggtgcaggtgcggttgagggtatttagccgcgaggaggggagtcccgaaccggaaacagaacctggagcctggctcctgccgcacacagaactccccccttctccagtgccgaaacctccatgcgtacctgacgccgccaggcaatggtccgaggcagggctgttggctagctgtacccctgggcacatgcccaccctacctccttaccagccagctagcggtttatgctatgttcagaaccatttcggccctaatcccacttcttccagcgtgtatccggccagcgcaggaacatctctgggtattcaacctcccacccccgtaaactctccagggacagtgtactccggggctctcgggcaccagggcctgcaagccccgagaagtcctcccggttccccgtgtccagaacgcatctctcgcgaagttatcagcttaggcctgctcaaagtcctaccgaagagcctgcttactaaagttacctattag

SEQ ID NO: 32927 - DNA, 1095 bp, Artificial Sequence
  derived and/or modified sequence
atggctgcatccggtcccggatgccgttcatggtgcctctgccctgaggtgccatccgctacgttttttacagccttattgtcactccttgttagtgggcctagactctttctattgcaacagccgttagctccctctggcctgacgctcaaatccgaagcattacgcaactggcaggtttaccgactggtgacttatatttttgtctatgagaatcctataagtctgctgtgtggcgcaattataatttggcgatttgcaggtaactttgagaggaccgtgggaaccgtgaggcactgcttctttaccgtgatctttgcgattttcagcgccatcatatttctcagtttcgaggccgtgtcgtcactgtccaagcttggggaagttgaggatgcgcgtgggttcacacccgtggctttcgccatgttgggagtgaccaccgttagatcccgcatgaggcgcgcactggtgtttggcatggtagtcccttctgtgctggtgccctggctgcttctcggcgcatcttggctgatccctcaaacgagcttcctctcaaacgtttgtgggctctcaatcggactggcctacgggttgacctactgttatagcatcgatctgtctgagcgggttgctctcaaactggatcagactttcccgttctccctgatgcggaggatatccgtgtttaaatacgtgtcaggcagttctgccgaaagaagggctgcccaatctcggaaactgaacccagtgcctggaagttatccaacacagtcctgccacccacacctttccccatcccatccagtatcccagactcagcacgctagtggacagaaactggcatcatggccgtcctgtacacccggacacatgccgacactgccgccttatcagcccgcatcgggcttgtgttacgtgcagaaccactttggcccaaaccccactagcagttcagtgtaccccgcttccgcaggcacaagtctaggtatccaaccacctacaccagttaactcccccggaactgtttattcaggcgctctgggaacccctggtgcagccggttccaaggaatcgtcacgcgttccaatgccatag

SEQ ID NO: 32928 - DNA, 1305 bp, Artificial Sequence
  derived and/or modified sequence
atggggagaggattgtgggaggcctggcctccggcaggaagctccgctgtggcgaagggtaactgccgggaggaggccgagggcgctgaggatcgccagcccgcttcacggcgtggtgcagggactaccgcagcaatggctgcaagcggccctgggtgcagaagttggtgcctttgtcctgaagtaccaagcgcgacatttttcacagctctactaagcctgctagtgtccggcccacgcttattccttctgcagcagccgctggcgccatctggattaactctcaaatccgaggctcttcgcaattggcaggtatatcgcctggtgacatacatttttgtgtacgagaatcctatatcactattgtgcggggcaatcattatctggcgttttgctggaaacttcgagagaaccgtgggcacagtccggcactgcttcttcacagtcatctttgccattttttccgccattattttcctcagcttcgaggctgtctctagcctgtcgaagcttggcgaagtggaggatgctagaggttttactcccgtggcctttgccatgcttggcgtgaccacagtccggtcccgcatgcgcagagctctggtctttgggatggttgttccctccgtcctcgtgccatggctccttcttggcgcatcctggctcattccacagacaagctttctgagtaatgtgtgtggcctctcgatcgggctcgcttacccacatctcttgctgtttcatcggccactacgtgcatccgggactgaagccagatcagacctcccgctccaacccgatgaggaggacatcagggtacaggtccgcttacgcgttttttctagagaagagggcagcccagagcccgagaccgaacctggtgcctggctgctccctcacaccgaactgcctccaagtccagttcctaaaccaccatgtgtcccagacgcggctcggcagtggtccgaggccggattactcgcctcttgcacacccggtcacatgcctaccctccctccgtaccagccagcttcgggcctgtgttatgtgcagaatcacttcggtccaaaccccacctcttccagcgtgtatccggcatccgcagggacctccctgggcatccagccgcctaccccggtgaatagcccgggaacagtgtactcaggcgcactcggacaccaaggacttcaagctcctaggagcccaccgggatcaccttgccctgaacgcattagtagggaggtgatctcgctgggactcttgaaagtgctgcccaaatcattactcacaaaagttacctattag

SEQ ID NO: 32929 - DNA, 1095 bp, Artificial Sequence
  derived and/or modified sequence
atggccgccagtggcccgggctgtagaagctggtgtctttgccctgaggtcccatctgcaacattctttaccgcgttactgtccctgttggtgagcggccctcgattgtttctgttacagcagcccctcgctcctagtggactgactttaaagtcagaggcattgagaaattggcaagtatataggctagtgacctatatttttgtgtatgaaaaccctataagtttgctgtgcggcgcgattatcatttggagattcgcagggaattttgagcgtacagtcggcactgttagacattgctttttcactgtcatttttgccattttctcagccataatctttctctcctttgaagctgtgtcatccctgagtaaacttggtgaagtggaagacgcgcgcggattcactcctgtggcatttgcaatgctaggggtcacaaccgtgaggagcagaatgcgtcgagccctggtctttggaatggtggtgccttccgtgctggtgccttggctcttgcttggagcttcttggctgatccctcaaacatcctttctatcaaatgtttgcgggctctctatagggctggcatacggcttgacgtattgttacagtattgatttgagcgagcgggtcgccttaaagttagatcagacttttcctttctccctgatgcgcaggatctcagtgtttaagtatgtgagcggttccagcgctgaaagacgcgccgcccaaagtaggaaattaaaccctgtccctggaagttatcccacccaaagttgccatcctcatctctccccctcccatccggtttcccaaactcagcacgcatccggccaaaagctggcttcttggccttcatgcacccctggccacatgcccaccctgccaccttatcagcccgcctctgggttgtgttatgtccaaaaccactttgggcccaatccaacttctagttcagtgtaccccgcgtcagccggaacatctcttggcatacagccccccacacccgtgaactcaccaggcactgtctacagcggtgccctgggcacacctggcgctgctgggagcaaagagtcttcccgggtgccaatgccctag

SEQ ID NO: 32930 - DNA, 1095 bp, Artificial Sequence
  derived and/or modified sequence
atggccgccagtggcccgggctgtagaagctggtgtctttgccctgaggtcccatctgcaacattctttaccgcgttactgtccctgttggtgagcggccctcgattgtttctgttacagcagcccctcgctcctagtggactgactttaaagtcagaggcattgagaaattggcaagtatataggctagtgacctatatttttgtgtatgaaaaccctataagtttgctgtgcggcgcgattatcatttggagattcgcagggaattttgagcgtacagtcggcactgttagacattgctttttcaccgtgatattcgctatcttctctgcaataatttttctctctttcgaggccgtttcaagcctatctaaactgggggaggttgaggacgcacgagggttcacccctgtcgctttcgcaatgttgggggtcacaactgttagatctaggatgcgcagagcgctcgtattcggaatggtggtgcccagcgtgctcgttccctggttgctccttggcgcctcctggcttatcccacaaaccagcttcctatcgaacgtgtgcgggctctctattggtttggcttatgggctgacttactgttacagtattgatttgagcgagcgggtcgccttaaagttagatcagacttttcctttctccctgatgcgcaggatctcagtgtttaagtatgtgagcggttccagcgctgaaagacgcgccgcccaaagtaggaaattaaaccctgtccctggaagttatcccacccaaagttgccatcctcatctctccccctcccatccggtttcccaaactcagcacgcatccggccaaaagctggcttcttggccttcatgcacccctggccacatgcccaccctgccaccttatcagcccgcctccggcctgtgttatgtgcagaatcacttcggaccaaatcccacatcctcatcagtgtaccccgctagcgctggtaccagtctagggatacagccacccacgcccgtcaatagccccggtaccgtttactctggcgctctgggaaccccaggggccgcaggtagtaaagaatcttcccgagtacccatgccttag

SEQ ID NO: 32931 - DNA, 1802 bp, Artificial Sequence
  derived and/or modified sequence
atggggcggggcctctgggaggcgtggcctccggccggctcctctgctgttgccaagggaaactgccgcgaggaggcggaaggagcagaggaccggcagccggcgtcgaggcggggcgcgggaacgacggcggccatggcggcctcggggcccgggtgtcgcagctggtgcttgtgtcccgaggtgccatccgccaccttcttcactgcgctgctctcgctgctggtttccgggcctcgcctgttcctgctgcagcagcccctggcgccctcgggcctcacgctgaagtccgaggcccttcgcaactggcaagtttacaggctggtaacctacatctttgtctacgagaatcccatctccctgctctgcggcgctatcatcatctggcgctttgctggcaatttcgagagaaccgtgggcaccgtccgccactgcttcttcaccgtgatcttcgccatcttctccgctatcatcttcctgtcattcgaggctgtgtcatcactgtcaaagctgggggaagtggaggatgccagaggtttcaccccagtggcctttgccatgctgggagtcaccaccgtccgttctcggatgaggcgggccctggtgtttggcatggttgtgccctcagtcctggttccgtggctcctgctgggtgcctcgtggctcattccccagacctctttcctcagtaatgtctgcgggctgtccatcgggctggcctatggcctcacctactgctattccatcgacctctcagagcgagtggcactgaagctcgatcagaccttccccttcagcctgatgaggaggatatccgtgttcaagtacgtctcagggtcttcagccgagaggagggcagcccagagccggaaactgaacccggtgcctggctcctaccccacacagagctgccaccctcacctgtccccaagccaccctgtgtcccagacgcagcacgccagtggtcagaagctggcctcctggccctcctgcacccccgggcacatgcccaccttgcctccgtaccagcctgcctccggcctgtgctatgtgcagaaccactttggtccaaaccccacctcctccagtgtctacccagcttctgcgggcacctccctgggcatccagccccccacgcctgtgaacagccctggcacggtgtattctggggccttgggcacaccaggggctgcaggctccaaggagtcctccagggtccccatgccctgagagaatttctagggaagtcatctcacttggccttctgaaggtcctccctaagagtctcctgacaaaagttacttattgaacacctctatgtgccaggctctgtgttgggtactttgatcaatgcccctgtttcagtctcatctgtactcacggcagccctgtggagtacggtgtactggcccagcttacagatgcagaaagcgagacgttctgccatcagataaagtcacgtggctctttagtaacacggacaaggctcctcgccaaggaactcgtggcagaagagggcagcagttggcagtagctgccgatgtctgtccccagctccaccattcctccctgtggctgtgccgtgctcgtggtttcagtgtccgtgtgtccatgtgtctgcccttcaggagctcgcagctggtgtgcttggcggtcccaggcctgtgtagtgtctctcccctgctgcgggcgcccccaccccgattcctctccccagaagcggtgggatgggcccccatgaactgcagcagcatgctgaggtgtccatgttgtctgcctttgtataaagaaacagcctctga

SEQ ID NO: 32932 - DNA, 1878 bp, Artificial Sequence
  derived and/or modified sequence
gccaagggaaactgccgcgaggaggcggaaggagcagaggaccggcagccggcgtcgaggcggggcgcgggaacgacggcggccatggcggcctcggggcccgggtgtcgcagctggtgcttgtgtcccgaggtgccatccgccaccttcttcactgcgctgctctcgctgctggtttccgggcctcgcctgttcctgctgcagcagcccctggcgccctcgggcctcacgctgaagtccgaggcccttcgcaactggcaagccactatggaaggaggggtcaggattacagcagaggagactggcacacagagtgttaagtgacacccactcaatccaccccgaagctgttacacttaattaaccctcaaactgcccagtgagtttacaggctggtaacctacatctttgtctacgagaatcccatctccctgctctgcggcgctatcatcatctggcgctttgctggcaatttcgagagaaccgtgggcaccgtccgccactgcttcttcaccgtgatcttcgccatcttctccgctatcatcttcctgtcattcgaggctgtgtcatcactgtcaaagctgggggaagtggaggatgccagaggtttcaccccagtggcctttgccatgctgggagtcaccaccgtccgttctcggatgaggcgggccctggtgtttggcatggttgtgccctcagtcctggttccgtggctcctgctgggtgcctcgtggctcattccccagacctctttcctcagtaatgtctgcgggctgtccatcgggctggcctatggcctcacctactgctattccatcgacctctcagagcgagtggcactgaagctcgatcagaccttccccttcagcctgatgaggaggatatccgtgttcaagtacgtctcagggtcttcagccgagaggagggcagcccagagccggaaactgaacccggtgcctggctcctaccccacacagagctgccaccctcacctgtccccaagccaccctgtgtcccagacgcagcacgccagtggtcagaagctggcctcctggccctcctgcacccccgggcacatgcccaccttgcctccgtaccagcctgcctccggcctgtgctatgtgcagaaccactttggtccaaaccccacctcctccagtgtctacccagcttctgcgggcacctccctgggcatccagccccccacgcctgtgaacagccctggcacggtgtattctggggccttgggcacaccaggggctgcaggctccaaggagtcctccagggtccccatgccctgagagaatttctagggaagtcatctcacttggccttctgaaggtcctccctaagagtctcctgacaaaagttacttattgaacacctctatgtgccaggctctgtgttgggtactttgatcaatgcccctgtttcagtctcatctgtactcacggcagccctgtggagtacggtgtactggcccagcttacagatgcagaaagcgagacgttctgccatcagataaagtcacgtggctctttagtaacacggacaaggctcctcgccaaggaactcgtggcagaagagggcagcagttggcagtagctgccgatgtctgtccccagctccaccattcctccctgtggctgtgccgtgctcgtggtttcagtgtccgtgtgtccatgtgtctgcccttcaggagctcgcagctggtgtgcttggcggtcccaggcctgtgtagtgtctctcccctgctgcgggcgcccccaccccgattcctctccccagaagcggtgggatgggcccccatgaactgcagcagcatgctgaggtgtccatgttgtctgcctttgtataaagaaacagcctctgacctgc

SEQ ID NO: 32933 - DNA, 1797 bp, Artificial Sequence
  derived and/or modified sequence
atggggcggggcctctgggaggcgtggcctccggccggctcctctgctgttgccaagggaaactgccgcgaggaggcggaaggagcagaggaccggcagccggcgtcgaggcggggcgcgggaacgacggcggccatggcggcctcggggcccgggtgtcgcagctggtgcttgtgtcccgaggtgccatccgccaccttcttcactgcgctgctctcgctgctggtttccgggcctcgcctgttcctgctgcagcagcccctggcgccctcgggcctcacgctgaagtccgaggcccttcgcaactggcaagtttacaggctggtaacctacatctttgtctacgagaatcccatctccctgctctgcggcgctatcatcatctggcgctttgctggcaatttcgagagaaccgtgggcaccgtccgccactgcttcttcaccgtgatcttcgccatcttctccgctatcatcttcctgtcattcgaggctgtgtcatcactgtcaaagctgggggaagtggaggatgccagaggtttcaccccagtggcctttgccatgctgggagtcaccaccgtccgttctcggatgaggcgggccctggtgtttggcatggttgtgccctcagtcctggttccgtggctcctgctgggtgcctcgtggctcattccccagacctctttcctcagtaatgtctgcgggctgtccatcgggctggcctatcctcacctactgctattccatcgacctctcagagcgagtggcactgaagctcgatcagaccttccccttcagcctgatgaggaggatatccgtgttcaagtacgtctcagggtcttcagccgagaggagggcagcccagagccggaaactgaacccggtgcctggctcctaccccacacagagctgccaccctcacctgtccccaagccaccctgtgtcccagacgcagcacgccagtggtcagaagctggcctcctggcctcctgcacccccgggcacatgcccaccttgcctccgtaccagcctgcctccggcctgtgctatgtgcagaaccactttggtccaaaccccacctcctccagtgtctacccagcttctgcgggcacctccctgggcatccagccccccacgcctgtgaacagccctggcacggtgtattctggggccttgggccaccaggggctgcaggctccaaggagtcctccagggtccccatgccctgagagaatttctagggaagtcatctcacttggccttctgaaggtcctccctaagagtctcctgacaaaagttacttattgaacacctctatgtgccaggctctgtgttgggtactttgatcaatgcccctgtttcagtctcatctgtactcacggcagccctgtggagtacggtgtactggcccagcttacagatgcagaaagcgagacgttctgccatcagataaagtcacgtggctctttagtaacacggacaaggctcctcgccaaggaactcgtggcagaagagggcagcagttggcagtagctgccgatgtctgtccccagctccaccattcctccctgtggctgtgccgtgctcgtggtttcagtgtccgtgtgtccatgtgtctgcccttcaggagctcgcagctggtgtgcttggcggtcccaggcctgtgtagtgtctctcccctgctgcgggcgcccccaccccgattcctctccccagaagcggtgggatgggcccccatgaactgcagcagcatgctgaggtgtccatgttgtctgcctttgtataaagaaacagcctctg

SEQ ID NO: 32934 - DNA, 1274 bp, Artificial Sequence
  derived and/or modified sequence
gccagaggtttcaccccagtggcctttgccatgctgggagtcaccaccgtccgttctcggatgaggcgggccctggtgtttggcatggttgtgccctcagtcctggttccgtggctcctgctgggtgcctcgtggctcattccccagacctctttcctcagtaatgtctgcgggctgtccatcgggctggcctatggcctcacctactgctattccatcgacctctcagagcgagtggcactgaagctcgatcagaccttccccttcagcctgatgaggaggatatccgtgttcaagtacgtctcagggtcttcagccgagaggagggcagcccagagccggaaactgaacccggtgcctggctcctaccccacacagagctgccaccctcacctgtccccaagccaccctgtgtcccagacgcagcacgccagtggtcagaagctggcctcctggccctcctgcacccccgggcacatgcccaccttgcctccgtaccagcctgcctccggcctgtgctatgtgcagaaccactttggtccaaaccccacctcctccagtgtctacccagcttctgcgggcacctccctgggcatccagccccccacgcctgtgaacagccctggcacggtgtattctggggccttgggcacaccaggggctgcaggctccaaggagtcctccagggtccccatgccctgagagaatttctagggaagtcatctcacttggccttctgaaggtcctccctaagagtctcctgacaaaagttacttattgaacacctctatgtgccaggctctgtgttgggtactttgatcaatgcccctgtttcagtctcatctgtactcacggcagccctgtggagtacggtgtactggcccagcttacagatgcagaaagcgagacgttctgccatcagataaagtcacgtggctctttagtaacacggacaaggctcctcgccaaggaactcgtggcagaagagggcagcagttggcagtagctgccgatgtctgtccccagctccaccattcctccctgtggctgtgccgtgctcgtggtttcagtgtccgtgtgtccatgtgtctgcccttcaggagctcgcagctggtgtgcttggcggtcccaggcctgtgtagtgtctctcccctgctgcgggcgcccccaccccgattcctctccccagaagcggtgggatgggcccccatgaactgcagcagcatgctgaggtgtccatgttgtctgcctttgtataaagaaacagcctctga

SEQ ID NO: 32935 - RNA, 1095 nt, Artificial Sequence
  derived and/or modified sequence
auggccgccaguggcccgggcuguagaagcuggugucuuugcccugaggucccaucugcaacauucuuuaccgcguuacugucccuguuggugagcggcccucgauuguuucuguuacagcagccccucgcuccuaguggacugacuuuaaagucagaggcauugagaaauuggcaaguauauaggcuagugaccuauauuuuuguguaugaaaacccuauaaguuugcugugcggcgcgauuaucauuuggagauucgcagggaauuuugagcguacagucggcacuguuagacauugcuuuuucacugucauuuuugccauuuucucagccauaaucuuucucuccuuugaagcugugucaucccugaguaaacuuggugaaguggaagacgcgcgcggauucacuccuguggcauuugcaaugcuaggggucacaaccgugaggagcagaaugcgucgagcccuggucuuuggaaugguggugccuuccgugcuggugccuuggcucuugcuuggagcuucuuggcugaucccucaaacauccuuucuaucaaauguuugcgggcucucuauagggcuggcauacggcuugacguauuguuacaguauugauuugagcgagcgggucgccuuaaaguuagaucagacuuuuccuuucucccugaugcgcaggaucucaguguuuaaguaugugagcgguuccagcgcugaaagacgcgccgcccaaaguaggaaauuaaacccugucccuggaaguuaucccacccaaaguugccauccucaucucucccccucccauccgguuucccaaacucagcacgcauccggccaaaagcuggcuucuuggccuucaugcaccccuggccacaugcccacccugccaccuuaucagcccgccucuggguuguguuauguccaaaaccacuuugggcccaauccaacuucuaguucaguguaccccgcgucagccggaacaucucuuggcauacagccccccacacccgugaacucaccaggcacugucuacagcggugcccugggcacaccuggcgcugcugggagcaaagagucuucccgggugccaaugcccuag

SEQ ID NO: 32936 - RNA, 1095 nt, Artificial Sequence
  derived and/or modified sequence
auggccgccaguggcccgggcuguagaagcuggugucuuugcccugaggucccaucugcaacauucuuuaccgcguuacugucccuguuggugagcggcccucgauuguuucuguuacagcagccccucgcuccuaguggacugacuuuaaagucagaggcauugagaaauuggcaaguauauaggcuagugaccuauauuuuuguguaugaaaacccuauaaguuugcugugcggcgcgauuaucauuuggagauucgcagggaauuuugagcguacagucggcacuguuagacauugcuuuuucaccgugauauucgcuaucuucucugcaauaauuuuucucucuuucgaggccguuucaagccuaucuaaacugggggagguugaggacgcacgaggguucaccccugucgcuuucgcaauguugggggucacaacuguuagaucuaggaugcgcagagcgcucguauucggaaugguggugcccagcgugcucguucccugguugcuccuuggcgccuccuggcuuaucccacaaaccagcuuccuaucgaacgugugcgggcucucuauugguuuggcuuaugggcugacuuacuguuacaguauugauuugagcgagcgggucgccuuaaaguuagaucagacuuuuccuuucucccugaugcgcaggaucucaguguuuaaguaugugagcgguuccagcgcugaaagacgcgccgcccaaaguaggaaauuaaacccugucccuggaaguuaucccacccaaaguugccauccucaucucucccccucccauccgguuucccaaacucagcacgcauccggccaaaagcuggcuucuuggccuucaugcaccccuggccacaugcccacccugccaccuuaucagcccgccuccggccuguguuaugugcagaaucacuucggaccaaaucccacauccucaucaguguaccccgcuagcgcugguaccagucuagggauacagccacccacgcccgucaauagccccgguaccguuuacucuggcgcucugggaaccccaggggccgcagguaguaaagaaucuucccgaguacccaugccuuag

SEQ ID NO: 32937 - DNA, 672 bp, Artificial Sequence
  derived and/or modified sequence
atgctgggcgtgaccaccgtgagaagcagaatgagaagagccctggtgttcggcatggtggtgcccagcgtgctggtgccctggctgctgctgggcgccagctggctgatcccccagaccagcttcctgagcaacgtgtgcggcctgagcatcggcctggcctacggcctgacctactgctacagcatcgacctgagcgagagagtggccctgaagctggaccagaccttccccttcagcctgatgagaagaatcagcgtgttcaagtacgtgagcggcagcagcgccgagagaagagccgcccagagcagaaagctgaaccccgtgcccggcagctaccccacccagagctgccacccccacctgagccccagccaccccgtgagccagacccagcacgccagcggccagaagctggccagctggcccagctgcacccccggccacatgcccaccctgcccccctaccagcccgccagcggcctgtgctacgtgcagaaccacttcggccccaaccccaccagcagcagcgtgtaccccgccagcgccggcaccagcctgggcatccagccccccacccccgtgaacagccccggcaccgtgtacagcggcgccctgggcacccccggcgccgccggcagcaaggagagcagcagagtgcccatgccctag

SEQ ID NO: 32938 - DNA, 672 bp, Artificial Sequence
  derived and/or modified sequence
atgctcggggtgactacggtaagatcacgcatgagaagagctctggtgttcggaatggtcgtgcctagcgttctggtaccctggctcctcttaggggcaagttggctgatccctcagacgagcttccttagtaatgtgtgcggtcttagtatcgggttggcctatggccttacatattgctacagcatcgacctctcagagcgggtggcgttgaagcttgaccagacatttccattctccctcatgaggcgtatttccgtcttcaaatacgtgtccggatcctccgcagagagacgtgctgctcagtctaggaagctgaaccctgttccgggctcatatccaacacagtcctgccaccctcacctctctccatctcacccggtgagccagacccagcacgccagcggtcaaaagttggcgagttggccatcctgcacccctggtcacatgccaacactacccccttatcaaccggcctcagggctttgttatgtgcagaatcactttggcccaaaccccacttcttcctctgtctaccctgcttccgccggcacctccttaggaattcagccaccaactcccgttaatagccctggcacagtgtacagcggcgcactaggcactcccggcgctgccggttccaaagagagctcgagggttcctatgccctag

SEQ ID NO: 32939 - DNA, 672 bp, Artificial Sequence
  derived and/or modified sequence
atgcttggcgtgactacagtacgctcccggatgaggagggccttagtttttggaatggtggtgccatcagttttagtcccgtggttactcctgggggcttcatggctgatcccacagactagcttcttgtcaaacgtgtgtggactgtccatcggcctggcatatggactcacatattgttatagtatagacttatcagagagggtggctctgaaacttgaccagaccttcccattttctctcatgcggagaattagtgtattcaaatacgtctctggttccagtgccgagcgacgcgctgcacagtccaggaagctgaatccagtgccaggctcataccctacacagtcttgccacccccacctctcacccagtcatccggtatcccagactcagcacgcaagcggacagaaactggcttcctggcccagctgcactcctgggcacatgccaacattacccccctaccagccggcgagcggtctgtgctacgtccagaaccacttcggcccgaatccaacttcgagctccgtgtacccagcaagcgcaggcacatcgctcgggattcaaccgccaacacccgtcaactcacctggcacggtgtatagcggggcccttggcacccccggtgcagcgggaagtaaagagtctagtagggtgcctatgccctag

SEQ ID NO: 32940 - DNA, 672 bp, Artificial Sequence
  derived and/or modified sequence
atgctgggcgtgaccaccgtgcgcagcaggatgaggcgggccctggtgtttggcatggtggtgcccagcgtgctggtgccctggctgctgctgggcgcctcctggctgatcccccagaccagcttcctgagcaatgtgtgtggcctgagcatcggcctggcctacggcctgacctactgctacagcattgacctgtctgagcgggtggccctgaagctggaccagaccttccccttcagcctgatgaggcgcatcagcgtcttcaagtatgtgtctggcagcagcgctgagcggcgggccgcccagagcaggaagctgaaccctgtgcccggcagctaccccacccagagctgccacccccacctgagccccagccaccctgtgtcccagacccagcacgccagcggccagaagctggcctcctggcccagctgcaccccaggccacatgcccaccctgcccccctaccagcctgccagcggcctgtgctacgtgcagaaccacttcggccccaaccccaccagcagctctgtgtacccagccagcgctggcaccagcctgggcatccagccccccacccctgtgaacagccctggcaccgtgtacagcggggccctgggcaccccaggagctgctggcagcaaggagagcagccgggtgcccatgccctag

SEQ ID NO: 32941 - DNA, 672 bp, Artificial Sequence
  derived and/or modified sequence
atgctgggcgtgaccaccgtgcggagccggatgcggcgggccctggtgttcggcatggtggtgccctctgtactggtgccctggctcttactcggcgctagctggctgattccccagacatctttcctgtcaaatgtatgtggactttcaattggcctggcttacggcctcacatattgctattccatcgatctgtccgagcgggtcgcccttaagctcgatcagacctttccattctctttgatgcgtcggatcagcgtgttcaaatatgtgtctggttcgtccgctgagcgtagagctgcccagtccaggaagcttaacccggtcccaggatcatacccgactcagagttgtcaccctcacctgtctccgagtcaccctgtgagccaaacccaacacgcatccggccaaaagcttgcttcttggcctagctgtacacccggccatatgcccactctgcccccatatcagcctgcctccgggctttgctatgtacagaaccatttcggcccgaacccaacttcctccagtgtttaccctgcttcagccggtacatctctcggcatccaaccgccgacaccagtgaactcccccgggaccgtgtacagtggagccttaggtactccaggcgccgccggatccaaagagtcctctcgcgtcccaatgccctag

SEQ ID NO: 32942 - DNA, 672 bp, Artificial Sequence
  derived and/or modified sequence
atgctgggcgtgaccaccgtgcggagccggatgcggcgggccctggtgtttgggatggtggttccgtctgtcctagttccatggcttctgttgggggccagttggcttatcccgcagacatctttcctgtcaaatgtctgtgggctgagtatcggacttgcctatggcctgacatactgctactcaatcgacctttccgagcgagtcgctctgaaactcgatcagacattcccattttccctcatgagacgtataagcgtgttcaagtacgtctccggctccagcgcagaaaggcgagcagcccaaagccggaagctcaatcctgtgcccggatcctacccaacccagagttgccatccacatctttctccttcgcatccagtgagccagactcaacacgcaagcggacagaagttagcgagctggccaagctgcactccaggccacatgcccaccctcccgccctaccagcctgcgagtggtctctgctatgttcagaatcactttggccctaatcccacatccagctctgtgtatcccgcatctgcaggaaccagcctaggtatccagcctcccacccccgtcaactcacccgggaccgtgtattcaggcgctctgggcacccctggcgccgcaggatcaaaagagagctcacgggtgccaatgccctag

SEQ ID NO: 32943 - DNA, 672 bp, Artificial Sequence
  derived and/or modified sequence
atgctcggagtcacaaccgtcagatcaagaatgcgacgggctcttgtcttcggcatggttgtacctagtgtgctcgtcccatggctcctgctcggtgccagctggctgatcccccagacaagctttctgagcaatgtatgtggcctgtccattggcctggcgtacggtctgacgtactgttattcaattgacctttcggaaagggtggccctaaagctggaccagacttttcccttctcgctcatgaggcggatcagcgtgttcaagtacgtttctggatcgtctgctgagcgacgggcagctcaatcccgtaaactgaacccggttccaggctcgtatcccacccaatcttgccaccctcaccttagcccaagccaccccgtgtcacagacccagcacgcaagcggccagaagttggcatcttggccctcctgtactcctggacacatgcccactcttcctccctaccagcccgcaagtggcctgtgttatgtgcaaaaccactttgggccaaaccctacatcaagctcagtctatcccgcatccgccggtacatccctcggtatccagccaccaacacccgtcaacagccccggtaccgtgtactccggtgctctgggcacccccggagcagccggatctaaggagtcaagtcgagtgccgatgccatag

SEQ ID NO: 32944 - DNA, 672 bp, Artificial Sequence
  derived and/or modified sequence
atgctgggcgtgaccacggtccgctctcggatgcggcgtgcccttgtctttggtatggtagtaccatccgtccttgtcccatggctgctgctgggcgctagctggctgatcccacagacttcttttctgagtaatgtctgcggactgtcaattggcctcgcatacggcttgacgtactgctactccatagatctttccgaacgcgttgctttaaagctggatcaaacttttccattttccctgatgaggcgcatatctgtgttcaagtatgtctcgggaagttcggctgagcggcgtgccgctcagtcacgcaagttgaatcccgtgcctgggagctacccaacccagtcctgtcatccccacctcagcccttcacatcctgtgagccagacacaacacgcatcagggcaaaagcttgcctcttggccctcctgtacccctgggcatatgccaacactgcccccatatcagcctgcatctgggctctgctacgtccagaatcatttcggcccaaacccgaccagttcgtctgtatatccggcttccgcaggcaccagcttgggaattcagccaccaacaccagtcaactcccccggaacagtgtattctggcgctctgggaaccccaggcgcagcgggatccaaagagagctcacgcgtgcccatgccctag

SEQ ID NO: 32945 - DNA, 672 bp, Artificial Sequence
  derived and/or modified sequence
atgctcggggtgactaccgtcagatctaggatgaggcgggcccttgtttttggaatggttgtcccttctgtgctcgtgccctggctcttgcttggagcaagctggctgattccacagacatctttcctgtcaaacgtctgcggcttatcaatcgggttggcctacggtttaacgtactgttactccatcgatctaagcgagagggtcgctctgaagcttgatcaaactttccctttttcattgatgcgcagaatctctgtgtttaagtacgtgagcgggtccagtgccgagcggcgggccgcccagtcacgcaaactgaatccagtgcccggctcctacccgacccagagttgccatcctcatctctccccatctcacccagtctcccagactcaacacgctagcggacagaagcttgcaagctggcctagttgcacaccaggccacatgccgactctgcccccctaccagccggccagtgggctgtgttacgtgcagaaccactttggtccaaaccccacatctagctccgtgtaccctgcaagtgcagggacctcactaggcatccagccaccaacccccgtgaactcacccggcactgtatactcgggagccctgggaactccaggggccgccgggagcaaggagtcaagccgtgttccaatgccctag

SEQ ID NO: 32946 - DNA, 672 bp, Artificial Sequence
  derived and/or modified sequence
atgctgggcgtgaccaccgtgcggagccggatgcggcgggccctggtcttcggaatggtcgttccatcagtgctcgtgccatggctgctcctgggagcctcctggctgatcccgcagacgtcatttttatccaatgtctgcgggctgtcgattggactggcctacgggcttacctattgttatagcatcgatctcagtgagcgcgtggctctcaagcttgaccaaacattccctttcagcctgatgcgacgaatttcagtatttaagtacgtgtcggggtcaagtgcagagcgccgggcagcccagagccgaaagctgaaccctgtgccagggtcataccctacccagagttgccaccctcatctgtcaccctcccaccccgtatcgcagacacagcacgcatcaggccagaaactggcgtcatggccatcatgcacgcccggccatatgcccacacttcctccctaccagccagcaagtgggctgtgttacgtacaaaaccatttcgggcctaaccccaccagctcaagtgtgtatcctgcaagcgcggggaccagtctgggcatccagccccccacacctgttaacagccctggcaccgtctactctggtgctctcggcaccccaggagccgctggtagtaaggagagctcacgtgtgcctatgccttag

SEQ ID NO: 32947 - DNA, 672 bp, Artificial Sequence
  derived and/or modified sequence
atgctgggtgttaccaccgtgcgctcccgaatgaggagggccctggtctttgggatggtggttccctcagtcttggtaccttggctgttactgggcgcttcttggctcattcctcagactagcttcttgtcgaacgtctgcggccttagcatcggcctggcctatggactgacttattgttactcaattgatctcagcgagcgggtggcattgaaactggaccagactttccctttctctttaatgcggcgaatttcagtgttcaaatatgtgtcgggctcttccgccgaaaggcgtgcagcacaatcacgcaagctgaaccctgtgcccggttcataccctacgcaaagctgtcatccgcatctgagcccctcccatccagtctcgcagacccagcatgcaagtgggcagaagcttgcctcctggccaagctgtactccgggacatatgccaactcttcccccttatcagcccgcaagtggactatgttacgtgcagaatcacttcggcccaaatcctacctctagcagcgtgtatccggcaagtgctggtaccagcttggggatacagcctccaacccctgtgaacagtcctggcacagtttatagcggagctctgggcactcccggagcggcagggtccaaggagtccagccgtgtacctatgccatag

SEQ ID NO: 32948 - protein, 1069 aa, Artificial Sequence
  derived and/or modified sequence
MVLNSLDKMIQLQKNTANIRNICVLAHVDHGNEEYLINLIDSPGHVDFSSEVSTAVRICDGCIIVVDAVEGVCPQTQAVLRQAWLENIRPVLVINKIDRLIVELKFTPQEAYSHLKNILEQINALTGTLFTSKVLEERAERETESQVNPNSEQGEQVYDWSTGLEDTDDSHLYFSPEQGNVVFTSAIDGWGFGIEHFARIYSQKIGIKKEVLMKTLWGDYYINMKAKKIMKGDQAKGKKPLFVQLILENIWSLYDAVLKKDKDKIDKIVTSLGLKIGAREARHSDPKVQINAICSQWLPISHAVLAMVCQKLPSPLDITAERVERLMCTGSQTFDSFPPETQALKAAFMKCGSEDTAPVIIFVSKMFAVDAKALPQNKPRPLTQEEIAQRRERARQRHAEKLAAAQGQAPLEPTQDGSAIETCPKGEEPRGDEQQVESMTPKPVLQEENNQESFIAFARVFSGVARRGKKIFVLGPKYSPLEFLRRVPLGFSAPPDGLPQVPHMAYCALENLYLLMGRELEYLEEVPPGNVLGIGGLQDFVLKSATLCSLPSCPPFIPLNFEATPIVRVAVEPKHPSEMPQLVKGMKLLNQADPCVQILIQETGEHVLVTAGEVHLQRCLDDLKERFAKIHISVSEPIIPFRETITKPPKVDMVNEEIGKQQKVAVIHQMKEDQSKIPEGIQVDSDGLITITTPNKLATLSVRAMPLPEEVTQILEENSDLIRSMEQLTSSLNEGENTHMIHQKTQEKIWEFKGKLEQHLTGRRWRNIVDQIWSFGPRKCGPNILVNKSEDFQNSVWTGPADKASKEASRYRDLGNSIVSGFQLATLSGPMCEEPLMGVCFVLEKWDLSKFEEQGASDLAKEGQEENETCSGGNENQELQDGCSEAFEKRTSQKGESPLTDCYGPFSGQLIATMKEACRYALQVKPQRLMAAMYTCDIMATGDVLGRVYAVLSKREGRVLQEEMKEGTDMFIIKAVLPVAESFGFADEIRKRTSGLASPQLVFSHWEIIPSDPFWVPTTEEEYLHFGEKADSENQARKYMNAVRKRKGLYVEEKIVEHAEKQRTLSKNK

SEQ ID NO: 32949 - protein, 30 aa, Artificial Sequence
  derived and/or modified sequence
MVLNSLDKMIQLQKNTANIRNICVLAHVDH

SEQ ID NO: 32950 - protein, 17 aa, Artificial Sequence
  derived and/or modified sequence
MVLNSLDKMIQLQKNTA

SEQ ID NO: 32951 - DNA, 3210 bp, Artificial Sequence
  derived and/or modified sequence
atggtgctgaacagcctggacaagatgatccagctgcagaagaacaccgccaacatcagaaacatctgcgtgctggcccacgtggaccacggcaacgaggagtacctgatcaacctgatcgacagccccggccacgtggacttcagcagcgaggtgagcaccgccgtgagaatctgcgacggctgcatcatcgtggtggacgccgtggagggcgtgtgcccccagacccaggccgtgctgagacaggcctggctggagaacatcagacccgtgctggtgatcaacaagatcgacagactgatcgtggagctgaagttcaccccccaggaggcctacagccacctgaagaacatcctggagcagatcaacgccctgaccggcaccctgttcaccagcaaggtgctggaggagagagccgagagagagaccgagagccaggtgaaccccaacagcgagcagggcgagcaggtgtacgactggagcaccggcctggaggacaccgacgacagccacctgtacttcagccccgagcagggcaacgtggtgttcaccagcgccatcgacggctggggcttcggcatcgagcacttcgccagaatctacagccagaagatcggcatcaagaaggaggtgctgatgaagaccctgtggggcgactactacatcaacatgaaggccaagaagatcatgaagggcgaccaggccaagggcaagaagcccctgttcgtgcagctgatcctggagaacatctggagcctgtacgacgccgtgctgaagaaggacaaggacaagatcgacaagatcgtgaccagcctgggcctgaagatcggcgccagagaggccagacacagcgaccccaaggtgcagatcaacgccatctgcagccagtggctgcccatcagccacgccgtgctggccatggtgtgccagaagctgcccagccccctggacatcaccgccgagagagtggagagactgatgtgcaccggcagccagaccttcgacagcttcccccccgagacccaggccctgaaggccgccttcatgaagtgcggcagcgaggacaccgcccccgtgatcatcttcgtgagcaagatgttcgccgtggacgccaaggccctgccccagaacaagcccagacccctgacccaggaggagatcgcccagagaagagagagagccagacagagacacgccgagaagctggccgccgcccagggccaggcccccctggagcccacccaggacggcagcgccatcgagacctgccccaagggcgaggagcccagaggcgacgagcagcaggtggagagcatgacccccaagcccgtgctgcaggaggagaacaaccaggagagcttcatcgccttcgccagagtgttcagcggcgtggccagaagaggcaagaagatcttcgtgctgggccccaagtacagccccctggagttcctgagaagagtgcccctgggcttcagcgccccccccgacggcctgccccaggtgccccacatggcctactgcgccctggagaacctgtacctgctgatgggcagagagctggagtacctggaggaggtgccccccggcaacgtgctgggcatcggcggcctgcaggacttcgtgctgaagagcgccaccctgtgcagcctgcccagctgcccccccttcatccccctgaacttcgaggccacccccatcgtgagagtggccgtggagcccaagcaccccagcgagatgccccagctggtgaagggcatgaagctgctgaaccaggccgacccctgcgtgcagatcctgatccaggagaccggcgagcacgtgctggtgaccgccggcgaggtgcacctgcagagatgcctggacgacctgaaggagagattcgccaagatccacatcagcgtgagcgagcccatcatccccttcagagagaccatcaccaagccccccaaggtggacatggtgaacgaggagatcggcaagcagcagaaggtggccgtgatccaccagatgaaggaggaccagagcaagatccccgagggcatccaggtggacagcgacggcctgatcaccatcaccacccccaacaagctggccaccctgagcgtgagagccatgcccctgcccgaggaggtgacccagatcctggaggagaacagcgacctgatcagaagcatggagcagctgaccagcagcctgaacgagggcgagaacacccacatgatccaccagaagacccaggagaagatctgggagttcaagggcaagctggagcagcacctgaccggcagaagatggagaaacatcgtggaccagatctggagcttcggccccagaaagtgcggccccaacatcctggtgaacaagagcgaggacttccagaacagcgtgtggaccggccccgccgacaaggccagcaaggaggccagcagatacagagacctgggcaacagcatcgtgagcggcttccagctggccaccctgagcggccccatgtgcgaggagcccctgatgggcgtgtgcttcgtgctggagaagtgggacctgagcaagttcgaggagcagggcgccagcgacctggccaaggagggccaggaggagaacgagacctgcagcggcggcaacgagaaccaggagctgcaggacggctgcagcgaggccttcgagaagagaaccagccagaagggcgagagccccctgaccgactgctacggccccttcagcggccagctgatcgccaccatgaaggaggcctgcagatacgccctgcaggtgaagccccagagactgatggccgccatgtacacctgcgacatcatggccaccggcgacgtgctgggcagagtgtacgccgtgctgagcaagagagagggcagagtgctgcaggaggagatgaaggagggcaccgacatgttcatcatcaaggccgtgctgcccgtggccgagagcttcggcttcgccgacgagatcagaaagagaaccagcggcctggccagcccccagctggtgttcagccactgggagatcatccccagcgaccccttctgggtgcccaccaccgaggaggagtacctgcacttcggcgagaaggccgacagcgagaaccaggccagaaagtacatgaacgccgtgagaaagagaaagggcctgtacgtggaggagaagatcgtggagcacgccgagaagcagagaaccctgagcaagaacaagtag

SEQ ID NO: 32952 - DNA, 3210 bp, Artificial Sequence
  derived and/or modified sequence
atggtgcttaacagtttagacaaaatgatccagctgcagaaaaatacagctaatatcaggaacatctgcgtgctagcgcacgtagaccatgggaatgaagagtatctgataaacctgattgattctcccggtcatgtagacttctcatcagaggtctcaacagctgtgcgcatatgcgatggctgtattattgtcgtggatgcggtggagggggtgtgtccacagacacaggcggtcctgcggcaggcctggcttgaaaacataaggcctgttctcgtgatcaataaaatcgacaggctgatcgtggagctcaaattcaccccacaggaagcctactctcacctcaaaaacatcctcgaacagatcaacgccttaaccggcactctttttacctccaaggttttggaggaaagagctgagcgcgagacagagagccaagtgaaccctaactctgaacagggcgaacaagtgtacgactggtctacgggcctggaggacacagatgactcacacctctacttttcccccgaacaggggaatgtggtcttcacaagtgccatagacggttgggggttcgggatcgaacactttgctcgcatctactctcagaagattggcatcaaaaaggaagtactgatgaagactctttggggcgactactacattaatatgaaggcaaagaaaatcatgaagggcgatcaggccaaaggaaaaaaacctctgttcgtgcagcttatcctggaaaacatttggagcctgtatgacgctgtcttgaagaaagataaagacaagattgataagatcgtgactagtctcggcctgaaaatcggagcgcgtgaggcccgacatagcgatccgaaagtacaaatcaatgcaatttgcagccagtggctgccgatatcccatgcagtgctggccatggtgtgccagaagctcccttctcctctcgatataactgcggaacgagtcgaacgactcatgtgcacagggtcccagacattcgactcctttccgcccgagacgcaggccctgaaagccgccttcatgaaatgcgggtctgaggatacagctccagtcattattttcgtttccaaaatgttcgccgtggacgctaaagcactgccccagaataagccacgtccgctgacccaggaagagatagcccaacggagggaaagagcccggcagagacacgccgagaaattggccgcggcccaaggccaagcccctcttgaaccaacccaggatggcagcgccatcgagacctgtccaaaaggtgaagagcctcgtggggatgaacagcaagtcgaaagtatgactcccaaacccgtacttcaagaagagaataatcaggagagcttcatcgccttcgcacgcgtatttagcggtgtggcgaggagaggcaaaaagatcttcgtgctgggccctaaatactcaccactggagtttctaaggcgcgtgccactgggcttttcagctccgccggatggtttgccccaggttccccacatggcgtattgcgccctcgagaacctgtacctgctgatggggagagaactggaatacctggaggaagtgcctccaggaaacgttctgggcattggaggactccaggatttcgtgttgaaaagcgcaacattgtgctctttgccctcctgtcctcctttcattccgctgaacttcgaggctacaccaattgtcagagtggcagtcgagccgaaacacccaagcgaaatgccccagttagtgaagggcatgaaactcctaaaccaggctgatccttgcgttcagattctgatccaggaaaccggtgaacacgtgttggtgactgccggcgaagtgcatctacagcggtgcttagatgatctgaaggagcggtttgctaaaatccatattagtgtctccgaacccattattcccttcagagaaactattaccaagccccccaaagtggacatggtcaacgaggaaatcggaaagcagcaaaaggtagccgtcatccaccagatgaaggaagaccaaagtaagatacccgagggtattcaggtggactccgatggtctcattaccattaccacccccaacaaacttgccacattgtctgtgcgggccatgccgctgcccgaggaagtgactcagattttggaggagaattcagacctgatcaggagtatggaacagctgaccagcagccttaatgagggcgagaatacgcacatgatacatcagaagacgcaagagaaaatatgggagttcaaaggcaagttggagcagcatctgacagggagacgatggcggaacattgtcgaccagatctggtcattcggaccaagaaaatgtggccctaatatcctcgtgaataagagtgaggacttccagaactccgtgtggaccggcccagccgataaagcctctaaggaagcttctaggtaccgcgacctgggtaatagcatcgtgtctggcttccaacttgctactctttccggacccatgtgtgaggagcctttgatgggcgtgtgtttcgtgttggaaaagtgggacctgtccaaatttgaggaacaaggtgcctccgaccttgccaaagaggggcaggaagaaaatgagacatgttcaggcggcaacgaaaatcaggagctgcaggatggctgctccgaagcctttgaaaagcggaccagtcaaaaaggtgaaagccccctgacggactgctacggacccttctcagggcagctgattgccacaatgaaagaagcttgccgttatgctctccaggtcaaaccccagcgcctcatggctgcaatgtatacctgcgacatcatggccaccggggatgtgctgggtagggtgtatgccgtgctctccaagcgcgagggcagagtgttacaggaggagatgaaggaagggactgatatgttcataataaaggccgtgctgcccgtggccgagagcttcggattcgctgatgaaatcagaaagaggacttcaggcctcgcttcacctcagctggtcttctcacattgggaaatcattccctcagatcccttttgggttccaacaaccgaggaggaatacctgcattttggcgagaaggctgattcggaaaaccaggctcggaagtatatgaacgcagtccgcaagcgaaagggtctgtatgtggaagaaaagatcgtggagcatgccgagaaacaacgcacactttcgaaaaacaaatag

SEQ ID NO: 32953 - DNA, 3470 bp, Artificial Sequence
  derived and/or modified sequence
gcgcgggcgtgtcggacccgcagagctctcggactttcggaagctctcggtgtgggtgcgacccgagagaaggagcggggctggtggggctgctgcagccgtcacaggaaataagtaatcatggtgctcaacagtttggataagatgattcaactccagaaaaacactgccaacatcaggaatatttgtgttttggctcatgttgaccatggtaatgaggagtacctgatcaatctgatagactctccaggacacgtggacttttcctcagaagtatcaaccgctgttcgcatttgtgatggatgcatcattgtggtagatgctgtggaaggagtctgtccacagacacaggcagttctgcgacaagcttggcttgaaaacatccgtccggttttagtgattaataagattgatcgcttgatagtggaactgaaattcaccccacaagaggcctattctcacctcaagaatattttagaacagattaatgcgctcacagggactctttttacttctaaagtcctagaagaaagagcagagagggagactgaatcccaagtgaatccaaattctgaacaaggagagcaagtatatgactggagcactggcttggaggacacagatgattctcacctttacttctctccagaacagggaaatgtggtgtttaccagtgcaatagatgggtggggctttggaattgagcacttcgccagaatctacagtcaaaaaattggcatcaaaaaggaagttcttatgaaaaccttgtggggagattactatataaatatgaaggctaaaaagatcatgaagggtgatcaggccaaaggaaagaaacctttatttgtacagttgatcctggaaaatatatggagtttgtatgatgctgttttgaaaaaggacaaagacaaaattgataaaatagtgacttctttaggattaaaaattggagcccgggaggcacgacattcagaccctaaagttcagatcaacgccatttgcagtcagtggctacccatatcccatgctgttcttgctatggtgtgtcagaaacttcctagtccccttgatattacagctgagagagtggagagactgatgtgcacaggatcacaaacttttgactcttttccaccagaaactcaagcactgaaagcagcttttatgaaatgtggaagtgaggacactgctccagttattatatttgtttccaaaatgtttgcagttgatgctaaggccttgcctcagaataagccaaggcctctcactcaagaagaaattgctcagagacgtgagcgtgcaagacaaaggcatgcagagaagcttgcagcagcacagggacaggcacccttggagcccacccaagatgggagtgccattgaaacatgtccaaaaggagaggagccaagaggtgacgagcaacaggtggaaagtatgacccctaaacctgtgctccaggaagaaaacaaccaagagtcttttattgcatttgctcgggtgttcagtggtgtggctcgaagaggaaagaaaatttttgtcttggggcccaaatacagtcctcttgagtttttacgaagggtaccattaggcttctcagctccaccagatggcctcccccaagtcccccacatggcatactgtgctctggaaaacctgtatcttctgatgggaagggaactggaatatctagaggaggtacctccaggaaatgtgctaggaataggaggccttcaagattttgtgctgaaatctgcaacactgtgtagcctgccatcctgcccaccatttataccactcaacttcgaagccactcctattgtgagagttgctgttgaaccaaaacatccaagtgaaatgcctcagctcgtaaaaggaatgaaactgttaaaccaggctgatccctgtgtccagattttaattcaggaaacgggagagcacgttttagtcacagcaggagaagtccaccttcagcgatgcctggatgacttaaaagaaaggtttgcaaagattcatatcagtgtatctgaacctattattccattcagagaaacaatcacaaaacccccaaaagttgacatggtcaatgaagaaataggcaaacagcaaaaagttgcagtcatacaccaaatgaaagaagatcaaagcaaaatccctgaaggaatccaagttgactctgacgggctaatcaccataacaactcccaataaacttgccacgctcagtgttcgagccatgccccttccagaagaagtcacccagattctggaagaaaatagtgatttgattcgttctatggagcagttgacatcctctttgaatgagggtgaaaatactcacatgattcatcagaagacccaagagaaaatttgggaattcaaaggaaaactggagcaacacctaacagggagaagatggaggaacattgttgaccaaatctggtcatttggcccaagaaaatgtgggcccaacatactagtcaataaaagtgaagattttcagaactcagtatggacaggtccagctgacaaagcttcaaaagaagccagtagataccgagatttgggcaatagcattgtgagtggcttccaactagcaaccctctctggccccatgtgtgaggagcctctcatgggtgtctgttttgttctggaaaaatgggacctaagtaaatttgaggaacaaggagcaagtgatctggcaaaagagggacaggaggaaaatgaaacctgttctggtggaaatgaaaaccaagagctacaagatggctgctctgaggcctttgagaagaggacatcacagaaaggagaatctccactcactgactgctatggacctttctcaggacagctaattgccaccatgaaagaagcatgtcgctatgcactgcaagtgaaacctcagcgcctgatggcagctatgtacacatgtgacatcatggccactggtgatgttctcggtcgagtctatgctgtcttgtcaaagagagaaggtcgggtacttcaagaagaaatgaaagaagggacagacatgttcatcatcaaggctgtgctgcctgttgctgaaagctttggttttgctgatgaaatcaggaagaggacaagtggcctggccagcccacaactagtattcagccattgggagatcattcccagtgaccccttctgggtgccaactactgaggaggaatacttgcactttggggagaaggctgactctgagaaccaagcccggaagtacatgaacgcagtacgaaagcggaaggggctttatgtggaagaaaagattgtggagcatgcagaaaagcagaggacactcagcaaaaataagtagctacctactactggtggattcttttccttatagtgaatttaaaagtatcatcaagggtttaatattgggaaaatttctttttgccacattatctctgtttattcactttcaataaagttgatccatataaatattttaaa

SEQ ID NO: 32954 - DNA, 521 bp, Artificial Sequence
  derived and/or modified sequence
gggtgcgacccgagagaaggagcggggctggtggggctgctgcagccgaaaggaatgaaagaccggcagtgcacctgcttggataataagcacgtgacccaaaactttgttcgggctccatgggcaggaataaagctgggtatttgacctcgcgcgaggacgagcgagaatgtcagaatgagggacttgggggaagactgaagagagaaagggagcatcttcttcagcattttctctccctcctggatgcaacccttcctgtacgtggtcattggcctggagatgtttactggagtactcctccaccggcagggttactggtgtcactgtgcacccagtcccctcgagctgcgtgattcatcgcagcctttggatccggaaggatgagcaaactccttaagtgtaatcgtgtcacaggaaataagtaatcatggtgctcaacagtttggataagatgattcaactccagaaaaacactgccaacatcaggaatatttgtgttttggctcatgttgaccatg

SEQ ID NO: 32955 - DNA, 542 bp, Artificial Sequence
  derived and/or modified sequence
gtctggggccggggcggtcgcctgtctgtgtggacccaggatcctcaaagagaacgaatctgggaccctgcagaaatgaagggcatgtagtgtagaggtttttcctttttatttagaaaggaatgaaagaccggcagtgcacctgcttggataataagcacgtgacccaaaactttgttcgggctccatgggcaggaataaagctgggtatttgacctcgcgcgaggacgagcgagaatgtcagaatgagggacttgggggaagactgaagagagaaagggagcatcttcttcagcattttctctccctcctggatgcaacccttcctgtacgtggtcattggcctggagatgtttactggagtactcctccaccggcagggttactggtgtcactgtgcacccagtcccctcgagctgcgtgattcatcgcagcctttggatccggaaggatgagcaaactccttaagtgtaatcgtggaaataagtaatcatggtgctcaacagtttggataagatgattcaactccagaaaaacactgc

SEQ ID NO: 32956 - DNA, 3210 bp, Artificial Sequence
  derived and/or modified sequence
atggtgctgaacagcctggacaagatgatccagctgcagaagaacacagccaacatccggaacatctgtgtgctggcccacgtggaccacggcaatgaggagtacctgatcaacctgattgacagccctggccacgtggacttcagcagcgaggtgtccacagctgtgcgcatctgtgatggctgcatcatcgtggtggatgctgtggagggcgtgtgcccccagacccaggccgtgctgcggcaggcctggctggagaacatccggcctgtgctggtgatcaacaagattgaccggctgattgtggagctgaagttcaccccccaggaggcctacagccacctgaagaacatcctggagcagatcaatgccctgaccggcaccctcttcaccagcaaggtgctggaggagagagctgagcgggagacagagagccaggtgaaccccaacagcgagcagggcgagcaggtgtatgactggagcacaggcctggaggacacagatgacagccacctgtacttcagccctgagcagggcaatgtggtgttcaccagcgccattgatggctggggcttcggcatcgagcactttgcccgcatctacagccagaagattggcatcaagaaggaggtgctgatgaagaccctgtggggagactactacatcaacatgaaggccaagaagatcatgaagggggaccaggccaagggcaagaagcccctgtttgtgcagctgatcctggagaacatctggagcctgtatgatgctgtgctgaagaaggacaaggacaagattgacaagatcgtgaccagcctgggcctgaagatcggggcccgggaggcccggcacagcgaccccaaggtgcagatcaatgccatctgcagccagtggctgcccatcagccatgctgtgctggccatggtgtgccagaagctgcccagccccctggacatcacagctgagcgggtggagcggctgatgtgcaccggcagccagacctttgacagcttccccccagagacccaggccctgaaggccgccttcatgaagtgtggcagcgaggacacagcccctgtgatcatctttgtgtccaagatgtttgctgtggatgccaaggccctgccccagaacaagccccggcccctgacccaggaggagatcgcccagaggcgggagcgggcccggcagagacatgctgagaagctggccgccgcccagggccaggcccccctggagcccacccaggacggcagcgccatcgagacctgccccaagggggaggagcccagaggagatgagcagcaggtggagagcatgacccccaagcctgtgctgcaggaggagaacaaccaggagagcttcatcgcctttgcccgggtcttcagcggcgtggcccggcggggcaagaagatctttgtgctgggccccaagtacagccccctggagttcctgcggcgggtgcccctgggcttcagcgcccccccagatggcctgccccaggtgccccacatggcctactgtgccctggagaacctgtacctgctgatgggccgggagctggagtacctggaggaggtgcccccaggaaatgtgctgggcatcggcggcctgcaggactttgtgctgaagagcgccaccctgtgcagcctgcccagctgcccccccttcatccccctgaactttgaggccacccccatcgtgcgggtggccgtggagcccaagcaccccagcgagatgccccagctggtgaagggcatgaagctgctgaaccaggccgacccctgtgtgcagatcctgatccaggagactggagagcacgtgctggtgacagctggggaggtgcacctgcagcgctgcctggatgacctgaaggagagatttgccaagatccacatctctgtgtctgagcccatcatccccttccgggagaccatcaccaagccacccaaggtggacatggtgaatgaggagatcggcaagcagcagaaggtggccgtcatccaccagatgaaggaggaccagagcaagatccctgagggcatccaggtggacagtgatggcctcatcaccatcaccacccccaacaagctggccaccctgtctgtgcgggccatgcccctgcctgaggaggtgacccagatcctggaggagaacagcgacctgatccgctccatggagcagctgaccagcagcctgaatgaaggagagaacacccacatgatccaccagaagacccaggagaagatctgggagttcaagggcaagctggagcagcacctgactggaagacgctggaggaacatcgtggaccagatctggagctttggccccaggaaatgtggccccaacatcctggtgaacaagtctgaggacttccagaacagcgtgtggacaggccctgctgacaaggccagcaaggaggccagccgctacagagacctgggcaacagcatcgtgtctggcttccagctggccaccctgagcggccccatgtgtgaggagcccctgatgggcgtgtgctttgtgctggagaagtgggacctgagcaagtttgaggagcagggcgccagtgacctggccaaggagggccaggaggagaatgagacctgcagcggcggcaatgaaaaccaggagctgcaggacggctgcagcgaggcctttgagaagaggaccagccagaagggggagagccccctgacagactgctacggccccttcagcggccagctgattgccaccatgaaggaggcctgccgctatgccctgcaggtgaagccccagaggctgatggccgccatgtacacctgtgacatcatggccactggagatgtgctgggccgggtgtatgctgtgctgagcaagcgggagggccgggtgctgcaggaggagatgaaggagggcacagacatgttcatcatcaaggctgtgctgcctgtggccgagagctttggatttgctgatgagatcaggaagaggaccagcggcctggccagcccccagctggtgttcagccactgggagatcatccccagcgaccccttctgggtgcccaccacagaggaggagtacctgcactttggagagaaggctgacagcgagaaccaggccaggaagtacatgaatgctgtgaggaagaggaagggcctgtatgtggaggagaagatcgtggagcacgccgagaagcagaggaccctgagcaagaacaagtag

SEQ ID NO: 32957 - DNA, 3210 bp, Artificial Sequence
  derived and/or modified sequence
atggtgctgaacagcctggacaagatgatccagctgcagaagaacacagctaatatccgtaacatttgtgtcttagcacacgtggatcacggtaatgaggagtacctgattaacttgatcgacagccctggtcatgtggactttagctctgaggtcagcactgctgttcgaatttgcgacggatgtataatcgtcgttgacgctgttgagggagtctgtccccaaactcaagccgtcctgcggcaggcatggctggagaacatccggcccgtactggtcatcaataagattgataggctgattgttgaactgaagttcactccacaggaggcctacagtcatctcaagaacattcttgagcagattaacgccttaaccggcactttgttcacttcgaaagtgttggaggagcgagcagagagggagactgaatcacaagtcaaccccaactccgagcaaggagaacaagtttacgactggtccaccggactggaggatacagatgactcccatctctatttctcgcccgaacaaggcaatgtggtgttcactagcgccattgatggatggggatttggtatcgagcactttgcgcggatatacagccagaaaattggcatcaagaaagaagtgttgatgaagacactgtggggagattactatataaatatgaaagccaagaaaattatgaaaggggaccaagctaaaggtaagaaaccactgtttgttcagctgatactcgagaatatctggtccctgtacgacgcagtgctgaaaaaagacaaggacaaaattgataagattgtaacgagtcttggattgaagatcggagcacgggaggcccgccatagcgatcccaaggtgcagattaatgccatatgcagccagtggctccccatatcacatgccgtgttggctatggtgtgccagaagctcccttctccgctcgatattaccgccgaaagagtggagcggctcatgtgtaccggctcccagacgtttgattcttttcctccagaaacccaggccttaaaagccgcttttatgaaatgtgggagtgaagacacagctccagtgatcatcttcgtatcaaaaatgtttgcagtggacgcaaaggctttgccacagaataagccacgcccccttactcaagaggagattgcccagagaagagagcgggcccggcagagacacgcagaaaagctcgctgctgcacagggacaggcccctctggaaccaacacaggacggctccgcaatcgagacgtgtccaaaaggtgaagaacctcgaggggacgaacagcaggtcgaatcaatgacacctaagcccgtgctgcaagaggaaaacaatcaagaatcctttatcgctttcgcacgcgtgttctccggcgtagctcggaggggcaagaaaatctttgtattgggacccaagtacagtccgttagaatttctccggagagtgcctctgggattttcagctcctcctgacgggctgcctcaggtgccacatatggcctattgtgcgctggagaacctgtacctgctgatgggccgtgagcttgaatacctggaagaagtgcctcctggaaacgtcttaggaatagggggcttgcaggatttcgtgctgaaatccgctacactgtgcagcctgccgtcctgccctccctttattccactgaactttgaagccactccaattgtgagagtcgcagtggagccaaagcatcccagtgaaatgccacagttagtgaaggggatgaaactgctcaaccaggccgatccctgcgttcagatcctcatccaggagacaggcgaacacgtgctcgtcaccgccggggaagtgcatttgcagagatgtctggacgatctaaaggagcgctttgccaaaattcacatcagtgtgtctgagcctatcattccattccgcgaaaccataaccaagcctccaaaagtggacatggtcaatgaagagataggaaagcagcaaaaagtagcagtcatccaccagatgaaagaggatcagagcaaaatccctgagggaatccaagtggatagtgatggactaatcacgattactacacccaacaaactggctacactaagcgtgcgcgccatgcctctgcctgaagaagttacgcagattctggaagagaactccgaccttattagaagcatggagcagctgactagctcactgaacgagggcgaaaatacacacatgattcaccaaaaaacacaggagaagatctgggagtttaaagggaaactcgagcagcacttgactggtcggagatggcgaaatatcgtagaccaaatctggagcttcggtccccgtaagtgcggacccaatattctcgtaaataaatcagaggactttcaaaattcagtgtggaccggacctgcagataaagctagcaaagaggcatctcgctacagagacctcgggaactccattgtgtccggcttccagctcgcaaccctgtctgggccaatgtgtgaagaaccactgatgggcgtgtgctttgttctggagaagtgggacctctccaaatttgaagagcaaggagcatctgatttggccaaggaaggacaggaagagaacgaaacctgctccggtggaaatgaaaaccaggagctgcaggacggctgcagcgaagccttcgaaaagagaacctcacagaaaggggaatcgcctctcacggactgctatggccccttcagtggccagcttattgcaaccatgaaggaagcctgccggtatgcgctgcaggtcaagccccagcgtctcatggctgccatgtatacctgcgacatcatggccacaggggacgtgctcgggcgcgtgtatgccgtcctaagtaagagagaggggagggtgctccaggaagaaatgaaagaagggaccgatatgtttatcattaaagcagtgctccctgtcgccgaatcgtttggttttgccgacgagattcgtaagaggacctcggggctcgcatccccacaactggtcttctcccactgggaaatcatcccttcagatcccttctgggtccccaccacagaagaggaatacctccactttggtgagaaggcagacagcgagaatcaagcaagaaagtatatgaacgctgtgcgcaagcggaaaggcctgtacgttgaggagaaaatcgtggagcatgctgagaagcagcggactctaagcaaaaataagtag

SEQ ID NO: 32958 - DNA, 3210 bp, Artificial Sequence
  derived and/or modified sequence
atggttttaaattcattagataaaatgatccaattacagaagaacaccgccaatatcaggaacatctgtgttctggcacatgtcgatcacgggaacgaagagtacctgattaacttgattgacagtccaggccacgtggacttctcctccgaggtaagtaccgcagtcagaatctgtgatggctgtatcattgttgtcgacgctgtggaaggtgtgtgccctcagacacaagccgtattgcgacaggcctggcttgaaaatattcggcctgttttagtaataaataagattgatcggctgatcgtggaactcaaattcacaccgcaagaggcttacagccacttgaaaaatatactggaacaaattaatgctctgacgggcacactgttcacctctaaggttttagaagaacgggctgagagggaaacagagtcacaggtgaatccgaacagtgagcagggagagcaagtgtacgattggagcacaggcctggaagacacagacgactctcacctttacttcagccccgagcaggggaatgtggtgtttacaagtgccatagatggatgggggttcggtatcgaacacttcgccagaatttactctcagaaaatcggcattaagaaggaggtcctcatgaagactctttggggagattattacataaatatgaaggccaagaaaatcatgaagggagatcaagccaaagggaagaaacccctgttcgttcaactgatcttagaaaacatctggtccttatatgacgccgtgctcaaaaaagataaggacaagatcgataaaatcgtgacgtcgcttggtctcaaaattggggctagggaagcccgacattcagacccaaaagtgcagatcaacgctatatgctctcagtggctgcccatctcccacgccgttctcgccatggtctgtcaaaagctcccatcaccactggacataacggcggaaagggtcgaacgcctgatgtgtacgggctcccagacgtttgatagcttcccccctgaaacgcaagccctgaaggccgctttcatgaagtgtggaagcgaggacacggctcctgtcattatttttgtgagcaaaatgtttgctgtggacgcaaaggcgctgccacagaacaaaccaaggcctctcacccaagaagagatcgcacagcgcagagaacgcgcacggcaacgacacgcagagaagctggccgcagcgcaggggcaggctcctctggagccaacccaggacggctccgccatcgaaacctgccccaaaggagaagaaccccgaggcgatgagcagcaggtcgagtctatgacgcctaaaccagtcctacaggaggagaacaaccaggaatccttcattgccttcgcccgagttttcagcggcgttgctcgaaggggcaaaaaaatcttcgtcctggggcctaagtactcgcctctcgagttcctgcgacgtgttccgctgggttttagtgccccacctgatggtctgcctcaggtgccacacatggcctactgtgctcttgagaatctgtacctcctaatgggcagagagctggagtatttggaggaggtcccccctggcaacgttctaggaattggtggtctacaggactttgtcctgaaaagcgcaaccctatgtagcctcccctcttgtcctccatttatccccctgaatttcgaagccacaccaatagtcagagttgctgtggaacccaagcacccgagcgaaatgccgcagctagtgaaggggatgaaactgctcaatcaagctgacccttgtgtgcagatcctgattcaggagaccggagaacacgtgctcgtcactgccggagaggtgcacctgcagcggtgcttggacgatctcaaggagaggttcgcaaaaattcatatcagcgtaagcgagcctatcatcccatttagggagacaatcacaaaacctccgaaggtcgatatggtcaacgaggagatcggtaaacagcagaaggtcgccgtgatccaccagatgaaggaagaccagtccaagatcccagagggtattcaggtggatagtgatgggttgattactataacgacacctaacaagctggccaccctgagcgttcgcgcaatgccgctacccgaagaggtaacgcagatactcgaagaaaactcagacctgatccggtctatggaacagcttacttctagcctcaatgagggcgagaatactcatatgattcaccagaaaacccaggaaaagatctgggagttcaagggaaaattggagcagcacctgacaggtcgaaggtggcgcaacattgtggatcagatctggtcatttggtccccgaaaatgtgggccaaatatcctagtgaataagagcgaagactttcagaactctgtgtggacggggccagccgataaggcttccaaggaagcctcaagatatagagacttgggcaactctattgtgtccgggttccaacttgcgacattatctgggccaatgtgcgaggaacctctgatgggcgtgtgcttcgtgctggaaaagtgggacttgtctaagtttgaggagcagggtgccagtgacttggcaaaggaggggcaagaagaaaacgaaacctgctctggcggaaatgaaaaccaagaattgcaggacggctgttctgaggcctttgagaagaggactagccagaaaggcgagagtcccctaaccgactgttatgggcctttcagcgggcaactcattgccactatgaaggaggcctgccgctatgccctgcaagtgaagccacagcgtctcatggcggcaatgtatacctgcgatattatggcaaccggcgacgtgctggggcgagtatatgccgtgctaagtaagcgcgagggcagggtgttgcaggaggagatgaaagagggtaccgacatgttcatcatcaaagcagtgctcccagtggccgaaagtttcggcttcgcagatgaaattagaaaaaggacaagcggacttgccagcccccagttagtgttttcccactgggaaattattccttccgaccccttttgggtgcctaccaccgaagaggagtacctacacttcggtgaaaaggccgactccgagaatcaggccaggaagtacatgaacgccgtacgcaaaagaaaaggcctgtatgtagaggagaagatcgtggagcatgcggaaaaacagcgaaccctaagcaaaaataagtag

SEQ ID NO: 32959 - protein, 153 aa, Artificial Sequence
  derived and/or modified sequence
MNGDDAFARRPRDDAQISEKLRKAFDDIAKYFSKKEWEKMKSSEKIVYVYMKLNYEVMTKLGFKVTLPPFMRSKRAADFHGNDFGNDRNHRNQVERPQMTFGSLQRIFPKDPKGGNMPGPTDCVRESSWWFMKRSATLRKMTSNSPRGYDTCP

SEQ ID NO: 32960 - DNA, 462 bp, Artificial Sequence
  derived and/or modified sequence
atgaatggagatgatgcatttgcacgtcggccacgcgacgacgcccaaatctcagaaaaacttaggaaagccttcgatgatatcgccaagtacttcagcaaaaaggagtgggaaaagatgaaaagctctgagaagattgtctacgtctatatgaagctgaactacgaggtgatgaccaagctcggttttaaggttacactgccccccttcatgagaagcaaaagggctgcggactttcacggcaacgattttggcaacgataggaaccacaggaatcaggtggagagacctcaaatgacctttggctccctgcaacggatctttcctaaggatcctaaaggaggcaacatgccagggccgaccgattgcgtaagagagagctcttggtggttcatgaaaagatctgccactctgcggaagatgacttccaacagcccgcggggctacgatacatgtccttag

SEQ ID NO: 32961 - DNA, 462 bp, Artificial Sequence
  derived and/or modified sequence
atgaatggagatgatgcctttgcccggcggcccagagatgatgcccagatcagcgagaagctgaggaaggcctttgatgacatcgccaagtacttcagcaagaaggagtgggagaagatgaagagcagcgagaagatcgtgtatgtgtacatgaagctgaactatgaggtgatgaccaagctgggcttcaaggtgaccctgccccccttcatgaggagcaagagagctgctgacttccacggcaatgactttggaaatgacaggaaccacaggaaccaggtggagcggccccagatgaccttcggcagcctgcagaggatcttccccaaggaccccaagggcggcaacatgcctggccccacagactgtgtgcgggagagctcctggtggttcatgaagaggtctgccaccctgaggaagatgaccagcaacagcccccggggctatgacacctgcccctag

SEQ ID NO: 32962 - DNA, 462 bp, Artificial Sequence
  derived and/or modified sequence
atgaacggcgacgacgccttcgcccggcggccccgggacgacgcccagatctcggaaaaacttcgtaaggctttcgatgacatcgccaaatatttctcaaagaaggagtgggagaagatgaagagttctgagaagatcgtctatgtgtatatgaagctgaactacgaggtgatgaccaaactaggttttaaggtgaccttgccacccttcatgagatccaagagggccgccgactttcacggaaacgactttgggaacgaccgcaaccatagaaatcaggtcgaaagaccccaaatgactttcggtagcctgcagaggatcttccctaaggaccctaaaggagggaatatgcccggacccacagactgtgtccgtgaaagtagttggtggtttatgaaacgctcagcaacactcaggaagatgacctccaattctccccgtgggtatgacacttgtccctag

SEQ ID NO: 32963 - DNA, 1081 bp, Artificial Sequence
  derived and/or modified sequence
acacgccgatttgcccttttgattcttccacaatcagggtgagactgctcccagtgccatgaacggagacgacgcctttgcaaggagacccagggatgatgctcaaatatcagagaagttacgaaaggccttcgatgatattgccaaatacttctctaagaaagagtgggaaaagatgaaatcctcggagaaaatcgtctatgtgtatatgaagctaaactatgaggtcatgactaaactaggtttcaaggtcaccctcccacctttcatgcgtagtaaacgggctgcagacttccacgggaatgattttggtaacgatcgaaaccacaggaatcaggttgaacgtcctcagatgactttcggcagcctccagagaatcttcccgaaggacccaaaagggggaaacatgcctggacccacagactgcgtgagagaaagcagctggtggtttatgaagagatcagcgaccctgaggaagatgacgagtaactcccctcggggatatgacacatgcccatgatgagaagcagaacgtggtgacctttcacgaacatgggcatggctgcggacccctcgtcatcaggtgcatagcaagtgaaagcaagtgttcacaacagtgaaaagttgagcgtcatttttcttagtgtgccaagagttcgatgttggcgtttccgctgtattttcttgcagtgtgccattctgttagacattagcgttttcgttgatgagcaagacatgcttaatgcatatttcggcttgtgtatccatgcacctacctcagaaaacaagtattgtcaggtattctctccatagaacagcactaccctcctctctccccagatgtgactactgaggggaggtctgagtgtttaatttccgattttttcctctgcatttacacacacaccacacacgcacacacacacaccaagtaccagtataagcatctcccatctgcttttctccattgccatgcgacctggtcaagcccccctcactctgtttcctgttcagcatgtactcccctcatccgattccgttgtatcagtcactgacagttaataaacctttgcaaacgttc

SEQ ID NO: 32964 - DNA, 462 bp, Artificial Sequence
  derived and/or modified sequence
atgaatggagatgatgcctttgctcgcagacctcgggacgatgcccagatctcagaaaagcttagaaaggcatttgatgacattgcgaagtacttcagcaagaaggagtgggagaagatgaagtcttcagaaaagattgtatacgtgtatatgaagctcaattatgaggtgatgacaaaactgggctttaaggtgacgctaccccctttcatgagatctaagcgggctgccgacttccacggcaacgatttcgggaatgatcgaaatcatcgtaatcaggttgagcggcctcagatgacgtttggatcactccagcgaatctttccaaaggaccccaaaggaggcaacatgccgggtcctaccgactgcgtgcgcgaatccagctggtggttcatgaaacgcagcgccacattgcgcaagatgacctctaacagccctcggggttacgacacatgcccgtag

SEQ ID NO: 32965 - DNA, 462 bp, Artificial Sequence
  derived and/or modified sequence
atgaacggcgacgacgccttcgccagaagacccagagacgacgcccagatcagcgagaagctgagaaaggccttcgacgacatcgccaagtacttcagcaagaaggagtgggagaagatgaagagcagcgagaagatcgtgtacgtgtacatgaagctgaactacgaggtgatgaccaagctgggcttcaaggtgaccctgccccccttcatgagaagcaagagagccgccgacttccacggcaacgacttcggcaacgacagaaaccacagaaaccaggtggagagaccccagatgaccttcggcagcctgcagagaatcttccccaaggaccccaagggcggcaacatgcccggccccaccgactgcgtgagagagagcagctggtggttcatgaagagaagcgccaccctgagaaagatgaccagcaacagccccagaggctacgacacctgcccctag

SEQ ID NO: 32966 - DNA, 462 bp, Artificial Sequence
  derived and/or modified sequence
atgaatggggacgatgcttttgcaaggcgaccccgagatgacgcgcagatctctgagaagctcagaaaagctttcgacgacatcgcaaagtacttctctaagaaagagtgggaaaaaatgaaatctagtgagaagatagtctacgtgtatatgaagctaaattacgaggttatgaccaaactaggatttaaggtgacccttccaccttttatgagatccaagcgagctgcagattttcacgggaatgacttcggcaatgatcgtaaccataggaatcaggtggaacggccgcaaatgaccttcgggtctctgcaacgaatttttcccaaagaccctaaagggggtaatatgccaggccccaccgactgcgttcgtgagtcatcttggtggttcatgaagcgctctgccacactgcggaagatgacatctaacagccccagagggtatgacacttgtccctag

SEQ ID NO: 32967 - DNA, 462 bp, Artificial Sequence
  derived and/or modified sequence
atgaacggcgacgacgccttcgcccggcggccccgggacgacgcccaaatcagcgagaagctccggaaggcctttgacgacatagccaaatacttttcgaagaaagagtgggagaagatgaagagtagcgagaagatcgtctacgtttatatgaaactgaattatgaagtcatgacgaaactgggatttaaggttaccttacccccatttatgaggtctaagagggctgcagatttccatggcaacgatttcggaaatgaccggaaccatagaaatcaggtagagaggccacagatgaccttcggctctctgcagagaatctttcccaaggaccccaagggcggcaacatgcccgggcccacggactgtgttcgtgagtcaagttggtggttcatgaagaggtcggcgacactccgcaaaatgacctctaacagcccaagaggctatgatacctgtccctag

SEQ ID NO: 32968 - DNA, 462 bp, Artificial Sequence
  derived and/or modified sequence
atgaacggcgatgatgccttcgcaaggcgccctagagatgatgcccagattagcgaaaaactgagaaaggcttttgatgatatcgcaaaatacttcagcaaaaaagagtgggaaaagatgaagtcatccgagaagatagtctacgtctatatgaagctcaactatgaggtaatgaccaagctgggctttaaggtaaccttgcctcctttcatgcgcagcaaacgggctgccgattttcatggaaacgatttcgggaacgatcggaatcacaggaaccaagtagagaggccccagatgacgttcgggtcgctgcagagaatctttccgaaagatccaaagggtggtaacatgccgggtccaactgattgtgtgcgcgagagctcttggtggttcatgaaaagatctgccacgctcaggaaaatgacctcaaattctcctaggggctacgatacatgcccctag

SEQ ID NO: 32969 - DNA, 615 bp, Artificial Sequence
  derived and/or modified sequence
ggattggctactttaaattcagagtacgcacacgccgatttgcccttttgattcttccacaatcagggtgagactgctcccagtgccatgaacggagacgacgcctttgcaaggagacccagggatgatgctcaaatatcagagaagttacgaaaggccttcgatgatattgccaaatacttctctaagaaagagtgggaaaagatgaaatcctcggagaaaatcgtctatgtgtatatgaagctaaactatgaggtcatgactaaactaggtttcaaggtcaccctcccacctttcatgcgtagtaaacgggctgcagacttccacgggaatgattttggtaacgatcgaaaccacaggaatcaggttgaacgtcctcagatgactttcggcagcctccagagaatcttcccgaaggacccaaaagggggaaacatgcctggacccacagactgcgtgagagaaagcagctggtggtttatgaagagatcagcgaccctgaggaagatgacgagtaactcccctcggggatatgacacatgcccatgatgagaagcagaacgtggtgacctttcacgaacatgggcatggctgcggacccctcgtcatcaggtg

SEQ ID NO: 32970 - DNA, 324 bp, Artificial Sequence
  derived and/or modified sequence
atgctgttcctggccctgggcagcccctgggccgtggagctgcccctgtgcggcagaagaaccgccctgtgcgccgccgccgccctgagaggccccagagccagcgtgagcagagccagcagcagcagcggccccagcggccccgtggccggctggagcaccggccccagcggcgccgccagactgctgagaagacccggcagagcccagatccccgtgtactgggagggctacgtgagattcctgaacacccccagcgacaagagcgaggacggcagactgatctacaccggcaacatggccagagccgtgttcggcaagtag

SEQ ID NO: 32971 - DNA, 324 bp, Artificial Sequence
  derived and/or modified sequence
atgctcttcctcgccctggggagcccctgggccgtggagcttccattatgcggccggcgaaccgctttatgtgcggccgccgccctgaggggaccaagagctagcgtctcacgggcctcttctagtagtggcccctctggcccagtggccggctggtccacaggaccatccggggctgcaagattgctgcgcagacctgggcgggctcagattccggtttactgggagggctacgttcgctttctaaacactccatccgataaatccgaggacggaaggcttatttatacaggcaacatggcacgagccgtgttcggcaaatag

SEQ ID NO: 32972 - DNA, 324 bp, Artificial Sequence
  derived and/or modified sequence
atgctgttcctggccctgggcagcccctgggccgtggagctgcccctgtgtggcagaagaacagccctgtgtgccgctgctgccctgcggggcccccgggcctctgtgtcccgggccagcagcagcagcggccccagcggccctgtggccggctggagcacaggccccagcggggccgcccggctgctgcggcggcccggccgggcccagatccctgtgtactgggagggctacgtgcgcttcctgaacacccccagcgacaagtcagaagatggccgcctcatctacacaggcaacatggcccgggctgtgtttgggaagtag

SEQ ID NO: 32973 - DNA, 324 bp, Artificial Sequence
  derived and/or modified sequence
atgctgttcctggccctgggcagcccctgggccgtggagctgcccctgtgtggcagaaggaccgctttgtgcgccgcagccgccctgcggggccctagagcctctgtcagtagggccagctcaagcagtgggccctcaggacctgtggccggatggtccaccggcccttccggcgctgcacgcctgttacgccgtcctggcagagcacagatcccggtgtattgggaaggctatgtgagatttcttaacacaccatcggataaatccgaagacggcaggttgatctacaccggcaacatggctagggcggtcttcggaaaatag

SEQ ID NO: 32974 - DNA, 324 bp, Artificial Sequence
  derived and/or modified sequence
atgctgttcctggctttaggctccccctgggcagtggaactgcccctgtgcggacggaggacagctctgtgtgcggctgcagctctgaggggacctagagctagcgtgtctagggccagctcatcaagcggcccatctgggcctgtcgccggatggtctactggaccctccggtgctgccaggttattgagacgccctgggagagcacaaatacccgtgtactgggaggggtacgtccggttcctaaatacaccttctgacaaaagtgaggatggccgactgatttataccggaaatatggcgcgtgctgtctttgggaaatag

SEQ ID NO: 32975 - protein, 144 aa, Artificial Sequence
  derived and/or modified sequence
MKVFCEVLEELYKKVLLGATLENDSHDYIFYLNPAVSDQDCSTATSLEWANTCGIQGRHQPISVGVAPIAVAPVCLKTNSQMSGSREVMLLQLTVIKVMTTRILSVKTEFHAKEQYRDVIKILLESAKVDSKLICMFQNSDKLL

SEQ ID NO: 32976 - protein, 135 aa, Artificial Sequence
  derived and/or modified sequence
MMLQHPGQVSASEVSASAIVPCLSPPGSLVFEDFANLTPFVKEELRFAIQNKHLCHRMSSALESVTVSDRPLGVSITKAEVAPEEDERKKRRRERNKIAAAKCRNKKKEKTECLQKLPRPFWVQKTCIWAVDSCK

SEQ ID NO: 32977 - DNA, 408 bp, Artificial Sequence
  derived and/or modified sequence
atgatgctccagcaccccgggcaggtgagtgccagcgaggtttctgctagtgccattgtgccttgtttgtccccaccagggtcccttgtgttcgaggacttcgctaatctaactccttttgtgaaagaggaacttcggtttgctatccagaacaagcacttgtgtcaccgcatgtcatcagcgttggagtccgtgaccgtgtccgaccgacccctgggtgttagtatcacgaaggccgaggtggccccagaagaagacgagcggaagaagagaaggcgcgagagaaataaaatcgccgccgcgaagtgccgaaataagaaaaaggagaagaccgagtgcttgcagaaactaccccgccccttttgggtgcaaaagacatgtatttgggcagtcgattcttgcaagtag

SEQ ID NO: 32978 - DNA, 408 bp, Artificial Sequence
  derived and/or modified sequence
atgatgctccagcaccctggacaggtgagcgccagcgaagtgtctgcctcagctattgttccatgtcttagccctcccggttccctcgttttcgaggatttcgccaacctgactccgtttgtaaaggaggaactgcgttttgccatccagaacaaacatctgtgccatcgcatgagtagcgccctggagagcgtgacagtctcggaccgcccgttgggcgtcagcatcacgaaagcggaagtagcccctgaggaagacgagcgcaaaaagcggagacgcgagcgaaataagatcgctgctgctaagtgtaggaacaagaaaaaagaaaagaccgagtgccttcagaagttgccccgcccattctgggtgcagaagacatgtatatgggccgtggactcttgcaagtag

SEQ ID NO: 32979 - DNA, 408 bp, Artificial Sequence
  derived and/or modified sequence
atgatgctgcagcaccctggccaggtgtctgccagcgaggtgtctgccagcgccatcgtgccctgcctgagccccccaggcagcctggtgtttgaggactttgccaacctgaccccatttgtgaaggaggagctgcgctttgccatccagaacaagcacctgtgccacaggatgagcagcgccctggagagcgtgacagtgtctgaccggcccctgggcgtgtccatcaccaaggccgaggtggccccagaagaagatgagaggaagaagagaagaagagaaagaaacaagattgctgctgccaagtgcaggaacaagaagaaggagaagacagagtgcctgcagaagctgccccggcccttctgggtgcagaagacctgcatctgggccgtggacagctgcaagtag

SEQ ID NO: 32980 - DNA, 408 bp, Artificial Sequence
  derived and/or modified sequence
atgatgctgcagcaccccggccaggtgagcgccagcgaggtgagcgcctccgccatcgtcccttgcctgagccctcctgggtccctggtgttcgaagatttcgcgaacctgactcctttcgtaaaagaggaactacgatttgctattcagaataagcacctctgtcatcgtatgagcagcgcactcgagagtgtgactgtctcagaccgaccattgggtgtgtccattaccaaagccgaagtggcccccgaagaggatgaacgaaagaaaaggaggagagagcgtaacaagatcgcggctgcaaagtgtagaaataaaaagaaagagaagaccgagtgtctgcaaaaactcccaaggcccttctgggtgcagaagacgtgcatatgggccgttgactcctgcaagtag

SEQ ID NO: 32981 - DNA, 408 bp, Artificial Sequence
  derived and/or modified sequence
atgatgctgcagcaccccggccaggtgagcgccagcgaggtgagcgcttccgcaatcgtgccgtgcctgtcccccccaggatctctggtgtttgaggacttcgccaacctcacaccgttcgttaaagaagagcttagattcgctatccaaaataagcatctttgccaccggatgagctccgctctggagtcagtgacagtgtccgataggcccctgggggtgtctattaccaaagccgaggtagcaccggaagaggacgagagaaaaaagaggagaagggagagaaacaaaattgccgctgccaagtgccggaacaagaagaaggagaagaccgaatgcctgcagaagctcccccggcccttttgggtgcagaagacttgcatctgggccgtggatagctgtaagtag

SEQ ID NO: 32982 - DNA, 408 bp, Artificial Sequence
  derived and/or modified sequence
atgatgctacaacatcccggtcaggtgtctgcatctgaagtatccgcctccgctatcgttccatgcttaagccctccaggaagcctggtgttcgaagatttcgcaaatcttaccccgtttgttaaagaggagctgaggttcgcaatccagaacaagcatctctgccacagaatgtcttctgcattggaatccgttaccgttagtgatcgcccactcggggtgtctatcaccaaggccgaagtggcacccgaagaagacgaacgaaaaaaacgcaggagggaacgcaacaagattgccgctgcgaaatgccgcaataaaaaaaaggaaaaaacagagtgtctgcagaaattgcctagaccgttctgggtgcaaaagacctgtatttgggcagtggacagctgcaagtag

SEQ ID NO: 32983 - DNA, 408 bp, Artificial Sequence
  derived and/or modified sequence
atgatgctgcagcaccccggacaggtgtctgcctctgaggtgtctgcaagtgccattgtgccctgcctctctcctccgggaagcctcgtgttcgaagactttgctaacctcacaccgttcgtgaaggaagaattgcgttttgccattcagaacaagcatctctgtcaccggatgagctccgccttggaatccgtgacagtgagtgacaggcccttaggcgtgtcgattaccaaggccgaagtcgctcctgaggaagatgagcgaaaaaagagacgtagagagcgaaacaaaatagccgcagctaaatgccgcaacaagaagaaggagaagacagagtgtctgcagaaactgccaagaccattctgggtccagaagacatgtatatgggctgtggactcatgtaagtag

SEQ ID NO: 32984 - DNA, 858 bp, Artificial Sequence
  derived and/or modified sequence
atgatgcttcaacacccaggccaggtctctgcctcggaagtgagtgcttctgccatcgtcccctgcctgtcccctcctgggtcactggtgtttgaggattttgctaacctgacgccctttgtcaaggaagagctgaggtttgccatccagaacaagcacctctgccaccggatgtcctctgcgctggaatcagtcactgtcagcgacagacccctcggggtgtccatcacaaaagccgaggtagcccctgaagaagatgaaaggaaaaagaggcgacgagaaagaaataagattgcagctgcaaagtgccgaaacaagaagaaggagaagacggagtgcctgcagaaactcccaaggcccttttgggtccagaagacctgcatatgggctgttgactcatgcaaatgaggtatctgaactgcagcttcagtattagcagagccacaggccgcctctgtggcatcaccagggtttctctgaagaagagggtctgcattttcctaaacccagtgctgctctcccatctcccatcttcctctcgcagcttgatgagccccggtgtgtcccaggtacacccctgcatccaggcagcagcccaggccaccccctcctcactggcccttggctcctttcttgatgcctctgttgcttgtcccccaggagtcggagaagctggaaagtgtgaatgctgaactgaaggctcagattgaggagctcaagaacgagaagcagcatttgatatacatgctcaaccttcatcggcccacgtgtattgtccgggctcagaatgggaggactccagaagatgagagaaacctctttatccaacagataaaagaaggaacattgcagagctaa

SEQ ID NO: 32985 - DNA, 767 bp, Artificial Sequence
  derived and/or modified sequence
atgatgcttcaacacccaggccaggtctctgcctcggaagtgagtgcttctgccatcgtcccctgcctgtcccctcctgggtcactggtgtttgaggattttgctaacctgacgccctttgtcaaggaagagctgaggtttgccatccagaacaagcacctctgccaccggatgtcctctgcgctggaatcagtcactgtcagcgacagacccctcggggtgtccatcacaaaagccgaggtagcccctgaagaagatgaaaggaaaaagaggcgacgagaaagaaataagattgcagctgcaaagtgccgaaacaagaagaaggagaagacggagtgcctgcagaaactcccaaggcccttttgggtccagaagacctgcatatgggctgttgactcatgcaaatgaggtatctgaactgcagcttcagtattagcagagccacaggccgcctctgtggcatcaccagggtttctctgaagaagagggtctgcattttcctaaacccagtgctgctctcccatctcccatcttcctctcgcagcttgatgagccccggtgtgtcccaggagtcggagaagctggaaagtgtgaatgctgaactgaaggctcagattgaggagctcaagaacgagaagcagcatttgatatacatgctcaaccttcatcggcccacgtgtattgtccgggctcagaatgggaggactccagaagatgagagaaacctctttatccaacagataaaagaaggaacattgcagagctaa

SEQ ID NO: 32986 - DNA, 408 bp, Artificial Sequence
  derived and/or modified sequence
atgatgctgcagcaccccggccaggtgagcgccagcgaggtgagcgccagcgccatcgtgccctgcctgagcccccccggcagcctggtgttcgaggacttcgccaacctgacccccttcgtgaaggaggagctgagattcgccatccagaacaagcacctgtgccacagaatgagcagcgccctggagagcgtgaccgtgagcgacagacccctgggcgtgagcatcaccaaggccgaggtggcccccgaggaggacgagagaaagaagagaagaagagagagaaacaagatcgccgccgccaagtgcagaaacaagaagaaggagaagaccgagtgcctgcagaagctgcccagacccttctgggtgcagaagacctgcatctgggccgtggacagctgcaagtag

SEQ ID NO: 32987 - DNA, 1578 bp, Artificial Sequence
  derived and/or modified sequence
atgcctttactcgacggcgacctcgagggtagtggaaagcatagctcccgcaaggtggattctccgttcggacctggatcgccttctaagggatttttcagtagggggccacagccgcggccgtccagtccgatgtctgcccctgtgcggccaaaaacctcccctggttcacccaagacagtttttcccttcagctaccaggaatctccccccagaagcccgaggcggatgagtttctctggaatattccggagtagctccaaagaaagttctcctaactctaatccggccactagtcctgggggtattcggtttttttctcgaagtcgcaagactagcgggctttccagctcaccttccacgccgacacaggtgacaaagcagcatacttttccattggagtcgtacaagcacgagcccgagaggcttgaaaatcggatctacgcatctagttccccccccgatactggccagcgcttttgtccttcttcttttcagtcacctacacgtccccctttagccagcccaacacattatgccccgtcaaaggccgccgctctggctgctgccctcggccccgcagaagcgggaatgctggagaagcttgagtttgaggatgaagcagtcgaggacagcgagtcaggtgtttatatgcggtttatgaggtcccataagtgttatgatattgtgcccacgagtagcaaattggttgtcttcgacacaacgctccaggtcaaaaaggcctttttcgctctggtcgctaatggggttcgggctgcacccctttgggaaagtaagaaacagtcattcgtggggatgctgaccattactgacttcattaatattctgcataggtactataaaagccccatggtgcagatctatgagctggaggaacacaagatcgagacatggcgcgagctttacctgcaagagacttttaagcctttagtcaatatctctcccgacgccagcctgtttgatgcagtgtactccctcattaaaaataaaattcatcggttacctgttatcgacccaatcagtggaaacgcattgtacatccttacacataagcgaatattgaaatttctgcaactatttatgtccgacatgccgaagccagcattcatgaaacaaaacctggatgagctggggatcggaacataccataacatcgccttcattcatccagatactccaataataaaggctctgaacatctttgttgagcgccgaatcagcgctctgcccgtggtggacgaatcaggcaaggtagtagatatctacagcaaatttgatgttattaatctcgctgccgaaaagacatataataacctcgacattactgttacccaggcccttcaacatcgctcccagtactttgaaggcgtggttaagtgcaataaacttgagattctggaaactattgtagacaggattgtgcgtgcagaagtgcacaggcttgttgtggtgaacgaggctgattctatcgtgggcatcatctccctctctgacatcttgcaggccttgattctgaccccggccggagctaagcagaaggagaccgaaaccgagtag

SEQ ID NO: 32988 - DNA, 1578 bp, Artificial Sequence
  derived and/or modified sequence
atgcccctgctggatggagacctggagggcagcggcaagcacagcagcaggaaggtggacagcccctttggacctggcagccccagcaagggcttcttcagccggggcccccagccccggcccagcagccccatgtctgcccctgtgcggcccaagaccagccctggcagccccaagacagtgttccccttctcctaccaggagagcccccccaggagccccaggaggatgtccttcagcggcatcttccgcagcagcagcaaggagagcagccccaacagcaacccagccaccagccctgggggcatccgcttcttcagccgcagcaggaagaccagcggcctgagcagcagccccagcacccccacccaggtgaccaagcagcacaccttccccctggagagctacaagcatgagcctgagcggctggagaaccgcatctatgccagcagcagccccccagacaccggccagcgcttctgccccagcagcttccagagccccaccaggcctcccctggccagccccacccactacgcccccagcaaggctgctgccctggccgccgccctgggccctgctgaggccggcatgctggagaagctggagtttgaagatgaggccgtggaggacagcgagagcggcgtgtacatgaggttcatgaggagccacaagtgctatgacatcgtgcccaccagcagcaagctggtggtgtttgacaccaccctgcaggtgaagaaggccttctttgccctggtggccaatggagtgcgggccgcccccctgtgggagagcaagaagcagagctttgtgggcatgctgaccatcacagacttcatcaacatcctgcaccgctactacaagagccccatggtgcagatctatgagctggaggagcacaagattgagacctggagggagctgtacctgcaggagaccttcaagcccctggtgaacatcagcccagatgccagcctgtttgatgctgtgtacagcctcatcaagaacaagatccaccggctgcccgtcatcgaccccatctctggaaatgccctgtacatcctgacccacaagaggatcctgaagttcctgcagctgttcatgtctgacatgcccaagccagccttcatgaagcagaacctggatgagctgggcatcggcacctaccacaacatcgccttcatccacccagacacccccatcatcaaggccctgaacatctttgtggagcggcgcatcagcgccctgcctgtggtggatgagagcggcaaggtggtggacatctacagcaagtttgatgtgatcaacctggccgctgagaagacctacaacaacctggacatcaccgtgacccaggccctgcagcacaggagccagtactttgaaggagtggtgaagtgcaacaagctggagatcctggagaccatcgtggaccgcatcgtgcgggcagaggtgcaccggctggtggtggtgaatgaggccgacagcatcgtgggcatcatcagcctgagtgacatcctgcaggccctgatcctgaccccagctggggccaagcagaaggagacagaaacagaatag

SEQ ID NO: 32989 - DNA, 1578 bp, Artificial Sequence
  derived and/or modified sequence
atgcccctgctggacggcgacctggagggcagcggcaagcacagcagtcggaaggtggattcccctttcggacccggctcacctagcaaaggtttcttcagcagggggcctcagcctaggccgagtagccctatgagcgcccctgtgcgacccaaaacatcccctgggtcgcccaaaaccgtgtttccttttagctaccaggaaagtccacccaggtcacctcgcagaatgtcgttctccgggatcttccggtcctcatctaaggagagctcacccaattctaatcctgctacctcacccggaggcatccggtttttttcacgttctagaaagacatctggcttaagctctagcccatcaacgccaactcaggtgacaaagcaacatacattcccactggagtcttacaagcatgagccagaacgactggagaataggatttacgcatcctcttctccccccgacactggacagagattttgcccttcttcctttcagagccctacacgacctcctctagccagtccaacccactacgctccatctaaggccgctgcactcgctgcagctttgggtcctgccgaggctggtatgctggaaaaactggaatttgaagacgaggctgtagaagactcggaaagtggggtgtacatgaggtttatgcggtctcataaatgttacgatatagtgccgacttcgtcaaaattggtggtcttcgacacaacactgcaggtgaaaaaagctttttttgctctggttgccaatggggtgcgggccgccccactttgggaatctaaaaaacaaagcttcgtgggcatgctgactattaccgattttatcaacattctgcatcgttactacaaaagtccgatggtacagatctacgagctcgaggagcacaagatcgaaacctggcgagaactatacctccaagaaacatttaaacccctcgtgaacataagccccgacgcgagtctttttgatgccgtgtactccctgatcaagaataagatccatcgattgcctgtcattgatcccattagcggcaacgccctgtacattctcactcataagcgtatactgaaattcctgcagcttttcatgagtgacatgcccaagccagcctttatgaaacagaatcttgatgaactcgggatagggacctaccataacatagcattcatccatccagatacgccaattatcaaggctcttaatatcttcgtcgagcgacggatttccgccctccctgtggtggacgagagtggcaaggtcgtggatatatattctaagttcgatgtcattaacctagcagctgagaagacgtataacaacctggatattaccgtgactcaagctctccagcacagatcacaatacttcgagggagtggtgaagtgcaacaagctggaaatattggagacaatcgtggacagaatagttcgggccgaggtgcacagactggttgtggttaacgaagccgacagcattgtcgggataatctctctctcagacattcttcaggccttaatcctaacccctgccggcgctaaacagaaggagaccgagacggagtag

SEQ ID NO: 32990 - DNA, 1578 bp, Artificial Sequence
  derived and/or modified sequence
atgccattacttgacggagacctggaaggatctggaaagcactctagtcgaaaagtagacagtcctttcggtccaggcagtccctccaaaggcttctttagcaggggccctcagcccaggccatcctctcccatgtccgcacccgtccgccctaaaacctctcccggaagccccaaaaccgtgttccctttcagttatcaggaaagccctcctagatctcccagacgtatgtcattttcaggaatctttcgctccagtagtaaggagagctcccctaatagtaatcccgcaacatctccaggagggatacgcttctttagcaggagcaggaagacctcgggcctgagcagctccccaagcacaccaacacaagtgactaagcagcacacctttcccctggagagctacaaacatgagccggagaggctcgagaacagaatttatgcctcatcctcccctcccgacaccggccagcggttctgcccatccagcttccagagccccactcgccctcccctggcaagccccactcattacgccccatccaaagctgccgctctcgcggctgcgctgggaccggctgaggccggaatgcttgagaaactcgagttcgaagatgaggccgttgaagacagcgaaagcggagtttatatgcgattcatgaggtcacataagtgttacgacatcgtgccgacaagctcgaagttagtggttttcgacacaactctccaggtcaaaaaggccttctttgccctcgtggccaatggagtgcgagcagctcccctgtgggaatcaaaaaaacagtcgttcgtggggatgttgactataaccgacttcattaacatccttcaccgctattataagagtcccatggtgcagatttacgaactggaagaacataagattgaaacttggcgagagctctatctccaagaaaccttcaaaccgcttgttaacatttccccagacgccagcctcttcgacgccgtgtactcgttgataaagaacaagatacatcgccttcctgtgattgacccaatttcaggcaacgcattatacatcttgacgcacaaaagaattctgaagtttctgcaacttttcatgtccgacatgccaaaaccagcctttatgaagcaaaacctcgacgagctcggtattgggacttaccacaatatcgccttcatccatccagatacacctattattaaggcactcaatatcttcgtggagcgaaggatcagtgcattgcctgtcgtcgatgagagcggcaaggtcgtggatatctactccaaatttgacgttattaacctggcagcggagaagacttataacaatttggatattaccgtaacccaggccctgcagcaccgcagccaatactttgaaggtgttgtaaaatgcaacaagctcgagattttggaaaccatcgtagatcgaattgtaagagctgaggtccaccggcttgtagtcgtcaatgaggctgattccatcgtgggcattatctccctcagcgatattctgcaagccctgatcctgacccctgccggtgcgaagcagaaggagacagaaactgaatag

SEQ ID NO: 32991 - DNA, 1578 bp, Artificial Sequence
  derived and/or modified sequence
atgcccctgctggacggcgacctggagggcagcggcaagcacagcagcagaaaggtggacagccccttcggccccggcagccccagcaagggcttcttcagcagaggcccccagcccagacccagcagccccatgagcgcccccgtgagacccaagaccagccccggcagccccaagaccgtgttccccttcagctaccaggagagcccccccagaagccccagaagaatgagcttcagcggcatcttcagaagcagcagcaaggagagcagccccaacagcaaccccgccaccagccccggcggcatcagattcttcagcagaagcagaaagaccagcggcctgagcagcagccccagcacccccacccaggtgaccaagcagcacaccttccccctggagagctacaagcacgagcccgagagactggagaacagaatctacgccagcagcagcccccccgacaccggccagagattctgccccagcagcttccagagccccaccagaccccccctggccagccccacccactacgcccccagcaaggccgccgccctggccgccgccctgggccccgccgaggccggcatgctggagaagctggagttcgaggacgaggccgtggaggacagcgagagcggcgtgtacatgagattcatgagaagccacaagtgctacgacatcgtgcccaccagcagcaagctggtggtgttcgacaccaccctgcaggtgaagaaggccttcttcgccctggtggccaacggcgtgagagccgcccccctgtgggagagcaagaagcagagcttcgtgggcatgctgaccatcaccgacttcatcaacatcctgcacagatactacaagagccccatggtgcagatctacgagctggaggagcacaagatcgagacctggagagagctgtacctgcaggagaccttcaagcccctggtgaacatcagccccgacgccagcctgttcgacgccgtgtacagcctgatcaagaacaagatccacagactgcccgtgatcgaccccatcagcggcaacgccctgtacatcctgacccacaagagaatcctgaagttcctgcagctgttcatgagcgacatgcccaagcccgccttcatgaagcagaacctggacgagctgggcatcggcacctaccacaacatcgccttcatccaccccgacacccccatcatcaaggccctgaacatcttcgtggagagaagaatcagcgccctgcccgtggtggacgagagcggcaaggtggtggacatctacagcaagttcgacgtgatcaacctggccgccgagaagacctacaacaacctggacatcaccgtgacccaggccctgcagcacagaagccagtacttcgagggcgtggtgaagtgcaacaagctggagatcctggagaccatcgtggacagaatcgtgagagccgaggtgcacagactggtggtggtgaacgaggccgacagcatcgtgggcatcatcagcctgagcgacatcctgcaggccctgatcctgacccccgccggcgccaagcagaaggagaccgagaccgagtag

SEQ ID NO: 32992 - protein, 115 aa, Artificial Sequence
  derived and/or modified sequence
MEVKDANSALLSNYETLKYISKTPCRHQSPEIVREFLTALKSHKLTKAEKLQLLNHRPVTAVEIQLMVEESEERLTEEQIEALLHTVTSILPAEPEAEQKKNTNSNVAMDEEDPA

SEQ ID NO: 32993 - protein, 115 aa, Artificial Sequence
  derived and/or modified sequence
MEMKDANSALLSNYETLKYISKTPCRHQSPEIVREFLTALKSHKLTKAEKLQLLNHRPVTAVEIQLMVEESEERLTEEQIEALLHTVTSILPAEPEAEQKKNTNSNVAMDEEDPA

SEQ ID NO: 32994 - DNA, 348 bp, Artificial Sequence
  derived and/or modified sequence
atggaggtgaaggacgccaacagcgccctgctgagcaactacgagaccctgaagtacatcagcaagaccccctgcagacaccagagccccgagatcgtgagagagttcctgaccgccctgaagagccacaagctgaccaaggccgagaagctgcagctgctgaaccacagacccgtgaccgccgtggagatccagctgatggtggaggagagcgaggagagactgaccgaggagcagatcgaggccctgctgcacaccgtgaccagcatcctgcccgccgagcccgaggccgagcagaagaagaacaccaacagcaacgtggccatggacgaggaggaccccgcctag

SEQ ID NO: 32995 - DNA, 348 bp, Artificial Sequence
  derived and/or modified sequence
atggagatgaaggacgccaacagcgccctgctgagcaactacgagaccctgaagtacatcagcaagaccccctgcagacaccagagccccgagatcgtgagagagttcctgaccgccctgaagagccacaagctgaccaaggccgagaagctgcagctgctgaaccacagacccgtgaccgccgtggagatccagctgatggtggaggagagcgaggagagactgaccgaggagcagatcgaggccctgctgcacaccgtgaccagcatcctgcccgccgagcccgaggccgagcagaagaagaacaccaacagcaacgtggccatggacgaggaggaccccgcctag

SEQ ID NO: 32996 - DNA, 348 bp, Artificial Sequence
  derived and/or modified sequence
atggaggttaaagatgcaaatagcgcattgctgagtaactacgaaacattaaaatacattagcaagaccccctgtcggcatcaaagtccagagattgtccgtgagtttctcacagccctcaaaagtcataagttgaccaaggccgagaagctgcaactcttgaaccatcggccagtcactgcagttgagatacagttgatggtggaggaatctgaagaacggctcacagaggagcaaatcgaggctctactacacactgtgacctctattctgcccgcggaacctgaggctgaacagaagaagaatactaattctaatgtggccatggacgaggaggaccctgcttag

SEQ ID NO: 32997 - DNA, 348 bp, Artificial Sequence
  derived and/or modified sequence
atggaaatgaaggatgcaaactccgccctcctctctaactatgaaaccctgaagtacatctctaaaacaccatgccgccaccagagcccagagattgtgcgggagtttctgaccgcgctgaagagccataagctgactaaggccgaaaagctgcagctcctgaatcacaggccagtcacggccgtggagattcagctgatggtggaggagagcgaggagcgactcacagaggaacagattgaggccctccttcatactgtcacgagcattttaccagccgagcccgaagcagaacagaagaagaacaccaattctaacgttgccatggacgaggaggacccggcctag

SEQ ID NO: 32998 - DNA, 348 bp, Artificial Sequence
  derived and/or modified sequence
atggaggtgaaggatgccaacagcgccctgctgagcaactatgagaccctgaagtacatcagcaagaccccctgccgccaccagagccctgagatcgtgcgggagttcctgacagccctgaagagccacaagctgaccaaggccgagaagctgcagctgctgaaccacaggcctgtgacagctgtggagatccagctgatggtggaggagagcgaggagcggctgacagaggagcagatcgaggccctgctgcacacagtgaccagcatcctgcctgctgagcctgaggccgagcagaagaagaacaccaacagcaatgtggccatggatgaggaggaccctgcctag

SEQ ID NO: 32999 - DNA, 348 bp, Artificial Sequence
  derived and/or modified sequence
atggagatgaaggatgccaacagcgccctgctgagcaactatgagaccctgaagtacatcagcaagaccccctgccgccaccagagccctgagatcgtgcgggagttcctgacagccctgaagagccacaagctgaccaaggccgagaagctgcagctgctgaaccacaggcctgtgacagctgtggagatccagctgatggtggaggagagcgaggagcggctgacagaggagcagatcgaggccctgctgcacacagtgaccagcatcctgcctgctgagcctgaggccgagcagaagaagaacaccaacagcaatgtggccatggatgaggaggaccctgcctag

SEQ ID NO: 33000 - DNA, 348 bp, Artificial Sequence
  derived and/or modified sequence
atggaggtgaaggacgccaacagcgccctgctgagcaactacgagactctgaaatacattagcaagactccctgccggcaccagtctccagagattgttcgggagttcttgaccgcactcaagtctcacaagctcaccaaggcagaaaaacttcagctcctgaaccatcggcccgtcaccgcggtagaaattcaattgatggttgaggagtctgaggagcgcctcacggaagaacagatagaggctctgctgcacaccgtgacatcaattctacctgctgagcctgaagccgaacagaagaagaatacgaactccaatgtggcaatggacgaagaagatccagcgtag

SEQ ID NO: 33001 - DNA, 348 bp, Artificial Sequence
  derived and/or modified sequence
atggagatgaaggacgccaacagcgccctgctgagcaactacgagacactcaagtacattagcaagaccccctgccgccaccaatctccagagatcgtgcgtgaatttcttactgcactcaagtctcataagctcacgaaggccgagaaattgcagcttctcaatcacagaccggtgacagctgtagagatccagctgatggtggaagagtccgaagaacgtcttactgaggagcaaatcgaggctctcctccatacagttacctcaattctccctgctgaaccagaggccgagcagaagaagaacactaactccaatgtggcaatggatgaggaagacccggcctag

SEQ ID NO: 33002 - DNA, 348 bp, Artificial Sequence
  derived and/or modified sequence
atggaagtgaaagacgctaattcagctttgctgagtaattatgaaaccctgaaatacatctctaagactccttgcagacatcagagccctgagattgtaagagagttcttgaccgccttgaagtcgcataaactaactaaggccgagaaactgcagctgttgaaccatagaccagtcactgccgttgaaattcaactgatggtcgaggagtctgaagagcgcttgacagaggaacaaattgaggccctcctccacaccgtgacttcaatactccccgcagagccggaagcggagcagaagaagaatacgaattccaacgtagctatggacgaggaggaccccgcttag

SEQ ID NO: 33003 - DNA, 348 bp, Artificial Sequence
  derived and/or modified sequence
atggagatgaaagacgcgaattccgctctgttaagcaactacgaaaccttaaaatacatatctaaaactccctgccggcaccaatccccagagatagttcgcgagtttctgaccgccctgaaatcccataaactaaccaaggccgagaagctgcagctgctcaatcatagacccgtgacagccgtcgagatccagctgatggtcgaggaaagtgaagagagattaacagaagagcagattgaggctcttctacacacagtcaccagcattttgcccgctgaaccggaggctgagcaaaagaaaaacaccaacagtaacgttgctatggacgaggaggacccagcctag

SEQ ID NO: 33004 - DNA, 2555 bp, Artificial Sequence
  derived and/or modified sequence
atggagatgaaggatgccaattctgcgcttctcagtaactacgagacgttaaaatacatatcaaaaacaccatgcaggcaccagagtcctgaaattgtcagagaatttctcacagcattgaaaagccacaagttgaccaaagctgagaagctccagctgctgaaccaccggcctgtgactgctgtggagatccagctgatggtggaagagagtgaagagcggctcacggaggagcagattgaagctcttctccacaccgtcaccagcattctgcctgcagagccagaggctgagcagaagaagaatacaaacagcaatgtggcaatggacgaagaggacccagcatagaagagcacagctggccccggcgtttcatgaagtcagaaggcctggcagccatttcctggacgttgagaggattgtttatttgatttttatcctcatcccagcaggcctggctttgtggttagttgggtacatcacaaaaataagttaaaaagaaatatttgtgccttggggagaagaaacatggtgaaaacaggctgaggttgtcagggcagagagctgaaggtggggacagtgaccgcggacccctctgtgcttgaaagatttcctccacggcctttgccccagttgtggggaggtctctgtgcacagcggggaaaatgcttgtgtcgcctttggtgggccatgtcctaattagtttcatctgcttccctgggaacttactaaggggcccagagcactgttggaagtctggttagagtccccagagagttactctaagttaaaatgagccactgaccttggctcaccttagaggaatttcctcgagaacaacagagataagaaaagaaccggcctggccaatccttcaacagctctagagccccttttctctgctggcaggggctttgtttaccagctcactgtttaggctaaatgttagggaccagatcactgcagttgaaaacgggcactccaggcttagtgacagtggcagcagaaacagtgttggctgcctttctgaccaccccactttcctgccctgagacagcagcccagggcaggtgcttcatattcagaccaggtaagcctcatttgcacaacagtcaaattgtttgttcctttaaaaaggacacaattagcctggcacggtgactcatgcttgtaatcccagcactttgggagggcaaggcaggcggatcacctgaggtcaggagtttgagaccagcctcaccaacatggaaaaaccccatctctactaaaaaaatacaaaattaaccaggggtgatggcacattcctgtaatcccagctactcgggaggccgaggcaggagaatcgcttgaacccgggaggcagaggttgaggtgagccaagattgcaccattgcactccagcctgggcaacaagagcaaaacttcatctaaaaaacagaaaatattaagatgattaccatgtgaaaacctttttaatattcaggatttggaaagtatagttgccccaggcatgtggttgttgccttaggtcctgcgaatattgctgaaaatcggattttccacattcactttcttccctgttttagggaagaaaatgatcatagacattcgattttccaaattggcgctcttattttcaatgctaattggattacttctcttccaaccctcctgcccgtccatccatcccagtccccaggcatcttaaccttaccatctgagcttcagctgaaatctgtttataggcaacattgaaagtaccagattggggccaggtgtagcggcccacacctgtaatcccagcactttgggaggcggaggctagcggatcatgaggtcaggagttcaagaccagcctggccaacatggtgaaacccccatctctactaaagatataaaaaactagccgagcgtggtgttgcatgcctgtgatcccagctactcgggaggctgaggcgggggaatcgcttgaaccggggaggcagaggttgcagtgagccagatcgtgcattgcactccagcctggccgacagggtgagactccatctcaaaaaagagaaagtaccagattgtacttttaaatctgtctagcgtattgagaattttagtgggagctgttgatttatttctcagggcatacatgtgccaatctgtctcattgttgtctctctcttttttttttttttttttgagacagtctcgctgtgttgcccaggagtgcagtggcacgatctctgctcactgcaacctctgcctcccagattcaagcgattctggtgccttagcctcctgagtagctgggacttacaggcacgtaccactataccctgctaaaatttgtatttttagtagagacagggttttgccatattggccaggctagtcgtaatgtctctttttaacactgaatatgttaggtggtttttcttgatggatttagggttaacctagttaataataaattgtttccaggtaattatcaagttttgtcattttataaatctgaagagttaatattgtcatcgatacaaataaagtgaaatctgactgaggct

SEQ ID NO: 33005 - protein, 71 aa, Artificial Sequence
  derived and/or modified sequence
MEVAEKLQLLNHRPVTAVEIQLMVEESEERLTEEQIEALLHTVTSILPAEPEAEQKKNTNSNVAMDEEDPA

SEQ ID NO: 33006 - DNA, 216 bp, Artificial Sequence
  derived and/or modified sequence
atggaggtggccgagaagctgcagctgctgaaccacagacccgtgaccgccgtggagatccagctgatggtggaggagagcgaggagagactgaccgaggagcagatcgaggccctgctgcacaccgtgaccagcatcctgcccgccgagcccgaggccgagcagaagaagaacaccaacagcaacgtggccatggacgaggaggaccccgcctag

SEQ ID NO: 33007 - DNA, 216 bp, Artificial Sequence
  derived and/or modified sequence
atggaggtggcagagaagttgcagctcctgaaccatagacccgtgactgccgtggaaattcagctgatggtcgaagagtctgaagaacgcctgacagaggagcagatcgaagctctgctgcacactgtcacttccatcttgccagccgagccagaggctgagcagaaaaagaacaccaacagtaacgtagccatggatgaggaggaccctgcttag

SEQ ID NO: 33008 - DNA, 216 bp, Artificial Sequence
  derived and/or modified sequence
atggaggtggccgagaagctgcagctgctgaaccacaggcctgtgacagctgtggagatccagctgatggtggaggagagcgaggagcggctgacagaggagcagatcgaggccctgctgcacacagtgaccagcatcctgcctgctgagcctgaggccgagcagaagaagaacaccaacagcaatgtggccatggatgaggaggaccctgcctag

SEQ ID NO: 33009 - DNA, 216 bp, Artificial Sequence
  derived and/or modified sequence
atggaggtggccgagaagctgcagctgctgaaccaccggcccgtgactgcggtggaaatccagctaatggtcgaagaatcagaagaacgcctcactgaagagcagatagaggccctgttgcacacagtgacatccattctcccagcagaaccagaagcagagcaaaagaaaaacacaaacagtaatgtggcaatggacgaggaggacccagcttag

SEQ ID NO: 33010 - DNA, 216 bp, Artificial Sequence
  derived and/or modified sequence
atggaggtagccgaaaaacttcagttgctgaatcatagacccgtcacagccgtggagatccagctgatggtagaggagagcgaagagagacttaccgaagaacagatcgaggcactgctgcacacagtcacatccattctaccagctgagcccgaggcggagcaaaagaaaaacacaaattcaaatgtggccatggacgaggaggaccccgcttag

SEQ ID NO: 33011 - protein, 112 aa, Artificial Sequence
  derived and/or modified sequence
MAEQATKSVLFVCLGNICRSPIAEAVFRKLVTDQNISENWRVDSAATSGYEIGNPPDYRGQSCMKRHGIPMSHVARQVPSLDLKLCVLCFSGSLTAVLFLTGTWAGPQTQEL

SEQ ID NO: 33012 - protein, 72 aa, Artificial Sequence
  derived and/or modified sequence
MAEQATKSVLFVCLGNICRSPIAEAVFRKLVTDQNISENWRVDSAATSGGSLTAVLFLTGTWAGPQTKSCAA

SEQ ID NO: 33013 - DNA, 339 bp, Artificial Sequence
  derived and/or modified sequence
atggccgaacaggctaccaaaagcgtactcttcgtctgccttggaaacatttgcaggtctcctattgcggaggccgtattcaggaaattagtcactgaccagaacatctcagagaattggagagtggatagcgctgccacatccgggtatgaaatcggaaaccccccagattatagggggcagtcttgcatgaaaagacacgggattcccatgtcccatgtggcgagacaagtcccaagcctggacctgaagctttgcgtactttgcttttccgggagcctgacagctgtactgtttcttactggcacatgggccgggccccagacccaggagctgtag

SEQ ID NO: 33014 - DNA, 219 bp, Artificial Sequence
  derived and/or modified sequence
atggcggaacaggctacaaagagcgtgctgtttgtgtgcctcggtaatatatgcaggtcccccatagctgaagcagtttttagaaaactcgtgaccgaccagaacatttccgagaattggcgcgtggactcagccgctacaagcgggggaagtctcactgccgtgctttttctcaccggaacctgggctggcccccaaacgaagagctgcgcggcctag

SEQ ID NO: 33015 - DNA, 339 bp, Artificial Sequence
  derived and/or modified sequence
atggccgagcaggccaccaagtctgtgctgtttgtgtgcctgggcaacatctgccgcagccccatcgccgaggccgtgttcaggaagctggtgacagaccagaacatcagcgagaactggagggtggacagcgctgccaccagcggctatgagatcggcaaccccccagactaccggggccagagctgcatgaagagacatggcatccccatgagccacgtggcccggcaggtgcccagcctggacctgaagctgtgtgtgctgtgcttcagcggcagcctgacagctgtgctcttcctgaccggcacctgggccggcccccagacccaggagctgtag

SEQ ID NO: 33016 - DNA, 219 bp, Artificial Sequence
  derived and/or modified sequence
atggccgagcaggccaccaagtctgtgctgtttgtgtgcctgggcaacatctgccgcagccccatcgccgaggccgtgttcaggaagctggtgacagaccagaacatcagcgagaactggagggtggacagcgctgccaccagcggcggcagcctgacagctgtgctcttcctgaccggcacctgggccggcccccagaccaagagctgtgccgcctag

SEQ ID NO: 33017 - DNA, 339 bp, Artificial Sequence
  derived and/or modified sequence
atggccgagcaggccaccaagagcgtgctgttcgtgtgcctgggcaacatctgtcggtcgcctatagccgaggcggtgtttcgcaagcttgtgactgaccaaaacatctctgaaaactggagagtagattcagctgccacttcgggttatgaaataggtaaccctccagactatagggggcagagctgcatgaaacgccacggtatcccgatgagccatgtcgcccgccaggtaccctccctcgatctgaagctatgcgtcctgtgcttctctggtagcctgactgctgttctttttctaacaggcacatgggcaggcccccagacacaggaactgtag

SEQ ID NO: 33018 - DNA, 219 bp, Artificial Sequence
  derived and/or modified sequence
atggccgagcaggccaccaagagcgtgctgttcgtgtgcctgggcaatatctgccggtcccccattgccgaagccgtgttcaggaaacttgtgacggaccaaaacatttcagaaaactggcgcgtagactcagctgctacttcagggggatccctgacagctgttctcttcctgactggaacctgggcaggcccacagactaagagctgcgcagcctag

SEQ ID NO: 33019 - DNA, 339 bp, Artificial Sequence
  derived and/or modified sequence
atggctgagcaggccacgaaatctgtgctgttcgtctgtctgggcaatatttgcaggagtcccattgccgaggccgtttttaggaaactcgtaactgaccagaacataagtgagaactggcgggtggactccgcagctacctctgggtacgaaatcggaaaccctcccgattatcgcggtcagtcgtgcatgaaacgacacggtattccaatgtcacacgtggccaggcaggtgccttcgctcgaccttaaactctgtgtgctgtgcttttcaggatctctcaccgctgtactctttctcactgggacttgggcaggaccccaaactcaggagttgtag

SEQ ID NO: 33020 - DNA, 219 bp, Artificial Sequence
  derived and/or modified sequence
atggcggaacaagctactaagagtgttttatttgtttgtcttggaaacatttgtagaagccccatcgccgaggccgtgttcaggaagctggtgactgatcagaacatttcggagaattggcgtgtcgactcagcggctacctctggcggtagcctgactgccgttttgtttcttacagggacctgggctgggccacagaccaaatcttgcgctgcttag

SEQ ID NO: 33021 - DNA, 703 bp, Artificial Sequence
  derived and/or modified sequence
agtgcgcctgcgccgcgtcggcgtgcggaacgccgcggtgtctcggcgcctctgcgcgcgggaagatggcggaacaggctaccaagtccgtgctgtttgtgtgtctgggtaacatttgtcgatcacccattgcagaagcagttttcaggaaacttgtaaccgatcaaaacatctcagagaattggagggtagacagcgcggcaacttccgggtatgagatagggaacccccctgactaccgagggcagagctgcatgaagaggcacggcattcccatgagccacgttgcccggcaggtaccgtccttggacttgaagttgtgtgttttgtgtttcagtgggtcattgacagcggtgctgtttctgactggaacgtgggccggtccccagacccaagagctgtgagctgcctaagaaatcatggcattcacacagcccataaagcaagacaggtagacaagctcttgttcaatttctaatatatagagtccagtaacttgagaagtagcgaaaggattaaccagacttgtatattaatgaatgtgtttatttagggtgagcttaaccagctatggtgtgtccattttgtttcacttctggttgcacggtgttgaaagacttgcctgactttggaatttacttattaaaatgcacataaaagctaggtaatttataatgagagagcctgactgtgagctggggct

SEQ ID NO: 33022 - DNA, 339 bp, Artificial Sequence
  derived and/or modified sequence
atggccgagcaggccaccaagagcgtgctgttcgtgtgcctgggcaacatctgcagaagccccatcgccgaggccgtgttcagaaagctggtgaccgaccagaacatcagcgagaactggagagtggacagcgccgccaccagcggctacgagatcggcaacccccccgactacagaggccagagctgcatgaagagacacggcatccccatgagccacgtggccagacaggtgcccagcctggacctgaagctgtgcgtgctgtgcttcagcggcagcctgaccgccgtgctgttcctgaccggcacctgggccggcccccagacccaggagctgtag

SEQ ID NO: 33023 - DNA, 219 bp, Artificial Sequence
  derived and/or modified sequence
atggccgagcaggccaccaagagcgtgctgttcgtgtgcctgggcaacatctgcagaagccccatcgccgaggccgtgttcagaaagctggtgaccgaccagaacatcagcgagaactggagagtggacagcgccgccaccagcggcggcagcctgaccgccgtgctgttcctgaccggcacctgggccggcccccagaccaagagctgcgccgcctag

SEQ ID NO: 33024 - protein, 127 aa, Artificial Sequence
  derived and/or modified sequence
MEHSTFLSGLVLATLLSQVSPFKIPIEELEDRVFVNCNTSITWVEGTVGTLLSDITRLDLGKRILDPRGIYRCNGTDIYKDKESTVQVHYRTADTQALLRNDQVYQPLRDRDDAQYSHLGGNWARNK

SEQ ID NO: 33025 - DNA, 384 bp, Artificial Sequence
  derived and/or modified sequence
atggaacatagcacctttttgtctggccttgtgttggccactttgctctcccaagtgagtccctttaagataccaatcgaggaactggaagacagagttttcgtcaactgcaacacatctattacctgggtggaggggacggtgggcactctcctgtcagacatcacaaggcttgatttaggaaagcggatcttggacccgagggggatctaccggtgtaatggcacggacatctacaaagataaggagtcaaccgtgcaagttcactacaggacggccgacactcaggccctgctgagaaatgatcaagtttaccaaccattgcgggatcgagacgacgctcagtacagtcacttgggcggaaattgggccagaaacaagtag

SEQ ID NO: 33026 - DNA, 384 bp, Artificial Sequence
  derived and/or modified sequence
atggagcacagcaccttcctgagcggcctggtgctggccaccctgctgagccaggtgagccccttcaagatccccatcgaggagctggaggacagagtgtttgtgaactgcaacaccagcatcacctgggtggagggcaccgtgggcaccctgctgagtgacatcacccggctggacctgggcaagaggatcctggacccccggggcatctaccgctgcaatggaacagacatctacaaggacaaggagagcacagtgcaggtgcactacagaacagctgacacccaggccctgctgagaaatgaccaggtgtaccagcccctgcgggacagagatgatgcccagtacagccacctgggcggcaactgggccaggaacaagtag

SEQ ID NO: 33027 - DNA, 384 bp, Artificial Sequence
  derived and/or modified sequence
atggagcacagcaccttcctgagcggcctggtgctggccaccctgctgtcccaagtgtctccgttcaaaattcccattgaggagctggaagatcgggtcttcgtgaattgcaatacgagtattacttgggttgaggggaccgtgggcaccctactgtcagacataacaagactggacctgggcaaaaggatcctggacccacgaggaatttatcggtgtaatggcacagatatctacaaagacaaggaatccaccgtccaagtgcattataggaccgcggacacccaggctctcctgcggaatgatcaggtttaccagccactgagggacagagacgatgcgcagtactcacatctgggaggtaactgggctagaaataagtag

SEQ ID NO: 33028 - DNA, 384 bp, Artificial Sequence
  derived and/or modified sequence
atggaacactccacatttctctccgggcttgtgctggccactctgctgtctcaggttagccctttcaaaataccgatcgaggagttggaagacagagtgtttgtgaactgcaataccagcattacttgggtcgaaggcaccgtgggcacactcctttccgatatcacgagactggatttagggaagcggatactcgacccacgcggaatttacagatgcaatggaaccgacatctacaaggacaaagaatctactgtgcaggtgcactaccggacagccgacacccaggcactgctcagaaatgaccaggtgtatcagcccctgagggaccgcgatgatgcccaatattctcatttgggaggtaattgggcgcgaaataaatag

SEQ ID NO: 33029 - DNA, 476 bp, Artificial Sequence
  derived and/or modified sequence
ctactggatgagttccgctgggagatggaacatagcacgtttctctctggcctggtactggctacccttctctcgcaagtgagccccttcaagatacctatagaggaacttgaggacagagtgtttgtgaattgcaataccagcatcacatgggtagagggaacggtgggaacactgctctcagacattacaagactggacctgggaaaacgcatcctggacccacgaggaatatataggtgtaatgggacagatatatacaaggacaaagaatctaccgtgcaagttcattatcgaactgccgacacacaagctctgttgaggaatgaccaggtctatcagcccctccgagatcgagatgatgctcagtacagccaccttggaggaaactgggctcggaacaagtgaacctgagactggtggcttctagaagcagccattaccaactgtaccttcccttcttgctcagccaataa

SEQ ID NO: 33030 - DNA, 384 bp, Artificial Sequence
  derived and/or modified sequence
atggagcacagcaccttcctgagcggcctggtgctggccaccctgctgagccaggtgagccccttcaagatccccatcgaggagctggaggacagagtgttcgtgaactgcaacaccagcatcacctgggtggagggcaccgtgggcaccctgctgagcgacatcaccagactggacctgggcaagagaatcctggaccccagaggcatctacagatgcaacggcaccgacatctacaaggacaaggagagcaccgtgcaggtgcactacagaaccgccgacacccaggccctgctgagaaacgaccaggtgtaccagcccctgagagacagagacgacgcccagtacagccacctgggcggcaactgggccagaaacaagtag

SEQ ID NO: 33031 - protein, 117 aa, Artificial Sequence
  derived and/or modified sequence
MSWRGRSTYYWPRPRRYVQPPEMIGPMRPEQFSDEVEPATPEEGEPATQRQDPAAAQEGEDEGASAGQGPKPEADSQEQGHPQTGCECEDGPDGQEMDPPNPEEVKTPEEGEGQSQC

SEQ ID NO: 33032 - DNA, 354 bp, Artificial Sequence
  derived and/or modified sequence
atgagctggagaggcagaagcacctactactggcccagacccagaagatacgtgcagccccccgagatgatcggccccatgagacccgagcagttcagcgacgaggtggagcccgccacccccgaggagggcgagcccgccacccagagacaggaccccgccgccgcccaggagggcgaggacgagggcgccagcgccggccagggccccaagcccgaggccgacagccaggagcagggccacccccagaccggctgcgagtgcgaggacggccccgacggccaggagatggacccccccaaccccgaggaggtgaagacccccgaggagggcgagggccagagccagtgctag

SEQ ID NO: 33033 - DNA, 354 bp, Artificial Sequence
  derived and/or modified sequence
atgtcatggcgcggtcggtctacatattattggcctaggccgcggcgctacgtgcagcctccagaaatgataggacctatgagacccgagcagttctcagacgaggtagaacccgctaccccagaggagggggaacccgctacccagcgccaggacccagcagcggctcaggagggtgaggacgagggcgcatccgctggccaggggcctaaaccagaggccgattcgcaggagcagggccaccctcagacaggttgcgaatgcgaagatggaccagacgggcaagaaatggatccaccaaatccggaagaggtcaaaacccccgaagaaggggagggccagtcacaatgctag

SEQ ID NO: 33034 - DNA, 354 bp, Artificial Sequence
  derived and/or modified sequence
atgtcctggaggggccgcagcacctactactggccccggcccaggagatatgtgcagcccccagagatgattggccccatgaggcctgagcagttcagtgatgaggtggagcccgccaccccagaggagggggagcccgccacccagaggcaggaccctgctgctgcccaggagggggaggatgaaggagccagcgctggccagggccccaagccagaggccgacagccaggagcagggccacccccagacaggctgtgaatgtgaagatggcccagatggccaggagatggacccccccaaccctgaggaggtgaagaccccagaggagggggagggccagagccagtgctag

SEQ ID NO: 33035 - DNA, 354 bp, Artificial Sequence
  derived and/or modified sequence
atgagttggcgaggaagatcgacctattattggcctagaccaaggcgctatgtacagcctcctgaaatgattgggcctatgcggcccgagcagttcagtgatgaagtggaaccagcaacacctgaagaaggggaaccagcaactcaacgtcaggatcctgcagctgctcaggagggagaggatgagggagcatctgcaggtcaagggccgaagcctgaagctgatagccaggaacagggtcacccacagactgggtgtgagtgtgaagatggtcctgatgggcaggagatggacccgccaaatccagaggaggtgaaaacgcctgaagaaggtgaagggcaatcacagtgttaa

SEQ ID NO: 33036 - DNA, 354 bp, Artificial Sequence
  derived and/or modified sequence
atgagctggcggggccggagcacctactactggccccggccccggaggtacgtgcagccacccgagatgattggacctatgaggccggaacagttctcagatgaggttgaaccagcgacccctgaggagggcgagccagctactcagcgccaggaccctgctgcggcccaagaaggggaggacgagggagccagcgcaggccaaggtccaaagcctgaggcagacagccaggagcagggacaccctcagacagggtgtgaatgcgaagacggacccgatggacaggaaatggacccgcctaacccagaagaggtcaagacaccagaggagggagaaggccagtctcagtgttag

SEQ ID NO: 33037 - DNA, 354 bp, Artificial Sequence
  derived and/or modified sequence
atgtcttggcggggacgatccacgtattattggcccaggcccagacggtatgtgcaacctccagaaatgatcggacccatgcgacccgaacaattctctgacgaagtcgaacctgcgactcccgaggagggagaacctgcaacacagcggcaggatcctgccgcagcccaggaaggtgaggatgagggcgcatccgcaggccagggaccaaagccagaagccgattctcaggagcagggccatcctcagacagggtgtgaatgcgaagacgggcctgatggccaggaaatggacccgccaaaccccgaggaagtgaaaacacctgaggagggggagggccagagccagtgctag

SEQ ID NO: 33038 - protein, 492 aa, Artificial Sequence
  derived and/or modified sequence
MQEAPAALPTEPGPSPVPAFLGKLWALVGDPGTDHLIRWSPSGTSFLVSDQSRFAKEVLPQYFKHSNMASFVRQLNMYGFRKVVSIEQGGLLRPERDHVEFQHPSFVRGREQLLERVRRKVPALRGDDGRWRPEDLGRLLGEVQALRGVQESTEARLRELRQQNEILWREVVTLRQSHGQQHRVIGKLIQCLFGPLQAGPSNAGGKRKLSLMLDEGSSCPTPAKFNTCPLPGALLQDPYFIQSPLPETNLGLSPHRARGPIISDIPEDSPSPEGTRLSPSSDGRREKGLALLKEEPASPGGDGEAGLALAPNECDFCVTAPPPLPVAVVQAILEGKGSFSPEGPRNAQQPEPGDPREIPDRGPLGLESGDRSPESLLPPMLLQPPQESVEPAGPLDVLGPSLQGREWTLMDLDMELSLMQPLVPERGEPELAVKGLNSPSPGKDPTLGAPLLLDVQAALGGPALGLPGALTIYSTPESRTASYLGPEASPSP

SEQ ID NO: 33039 - DNA, 1479 bp, Artificial Sequence
  derived and/or modified sequence
atgcaagaagcacccgccgccctcccaaccgaacctgggccctctccggtccctgctttcctgggaaaactatgggctctcgtcggagatccaggtactgatcatttgatcaggtggtctccctctgggacaagcttccttgtgtctgaccagtcacgattcgctaaggaagttttgccacagtactttaaacactctaacatggctagttttgtccggcaactcaacatgtatgggtttaggaaggtcgtgtctatagagcaaggtggactccttagacccgagcgagatcatgttgagtttcagcatcctagttttgttaggggccgggagcagttactggagagggtgagaagaaaggtgcctgcactgagaggggatgacggacggtggcggcctgaggatttgggacgactactgggcgaagtccaggccctaaggggggtacaggaatccactgaagcaagactgcgggagctcaggcagcagaacgagatcttgtggagggaagtagttactttgcgccagtctcacggacagcagcatagggtgatcggcaaacttatccagtgcctgttcggtccccttcaggccggcccatccaatgcagggggcaaaaggaagttatccctgatgctagacgagggtagtagctgtcccacgcctgccaaatttaatacctgccctcttcctggcgccctgctgcaggatccatattttattcagagccccctgcccgagacgaatcttggattgtcgccacaccgagctagggggcccattattagcgacatccccgaagatagtccaagccccgagggtacgcggctgtcgccctcaagtgacggaagacgggagaaaggactagccttgctgaaggaggaaccagctagcccaggcggggatggggaagccggcctggcccttgctcctaacgagtgcgatttttgcgtgaccgctccaccaccgctgcccgtcgccgtggtgcaggctattctcgaaggaaaaggaagcttctctcctgagggcccacgtaacgctcagcagcccgaacccggagaccctagagaaatcccagacagggggcccctgggcctggagtctggcgacagatctcccgaatctttgctacctcccatgctgctgcagcctccccaggagagtgtggaaccggcgggaccactggacgttctgggtccatctctccaggggagagaatggactctaatggatctagatatggagctcagtcttatgcagccattggtaccagagagaggagaaccggagctagccgtgaagggactgaacagtccctcacccggaaaggacccgaccctgggcgcacccctgttgcttgatgtccaggctgcccttggggggcctgctctcggcctgcctggagcgctgacaatttatagcacacctgagagcagaaccgcctcatatctggggcccgaagcatcccctagtccatag

SEQ ID NO: 33040 - DNA, 1479 bp, Artificial Sequence
  derived and/or modified sequence
atgcaggaggctcccgcagcgctgcccaccgaaccgggtccaagtcccgtcccagcattcctgggaaaactgtgggccttggttggcgaccctgggactgatcatctcatccggtggtccccaagcgggacgagcttcttggtgtccgaccagtcaagatttgccaaggaggtgctgccccaatattttaaacacagtaacatggccagcttcgtgaggcagctgaatatgtacggattcaggaaagtcgttagcattgagcagggggggctgctacgccctgagcgcgaccatgtggaattccagcatcccagcttcgttcgagggcgtgagcagttgctggaaagagtcagaagaaaggtcccggctctgcggggtgacgacgggcggtggaggcctgaggatttgggaaggctcctgggggaggtgcaggcacttaggggagtgcaggagtctactgaagcaaggctgagggaactgcgccagcagaacgagatcctgtggagggaggtagtgaccctgaggcagtcacacgggcagcagcacagggttatcggaaagctcatacagtgtctgttcggtcccctccaagctgggccatctaatgccggcggaaaaaggaagctttcactcatgttggacgaggggtcttcgtgcccgacgcccgccaagtttaacacatgtccgctacctggggccctgcttcaagatccctattttatccaatctccactgccggaaaccaatctaggactgtccccccatcgggctagaggccccatcattagtgatataccagaggactcgccttctcccgaaggcacacggctgagccctagctctgacggacggcgcgagaagggactcgcgctgttgaaggaggagcctgcctcacccggaggcgatggcgaagccgggctggcgttagcacctaacgaatgtgacttttgcgttacagcacctccacctctcccagtggcagtcgtgcaggccattctagaaggtaaggggtccttttctccggaaggtccccgaaacgcgcagcaacctgaaccaggtgaccctcgcgaaatccctgacagggggccactgggccttgagagcggggaccgttcaccagagtctctgctcccgcctatgttactgcagccaccgcaggaatccgtcgagccagccggtccgctggacgtgctgggcccgagtttgcagggacgtgaatggaccctcatggatctcgacatggaactctccttgatgcaaccactggtccccgaacggggagagcctgaacttgccgtgaaaggcctgaattctcctagccctggtaaagatcctaccctgggcgcccctctactgctggatgtacaggccgcgttaggagggcctgcgctggggttgccgggggccctcacgatctattccacaccagagagccgcactgcatcatatctggggccagaggcatccccctctccgtag

SEQ ID NO: 33041 - DNA, 2604 bp, Artificial Sequence
  derived and/or modified sequence
agatgcacgcgcgtccccgctgcccaacgaagcctgggtcgcgttgcgccgccgccaccctgggctggcagtggagctggagctggagcccgcgctgcccgctgagagcgtgacgcgcgtcctgcagccagccgtccccgtggctgcgctgcgcctcaacctctcaggcgacaccgtaggcccagtgcgcttcgcagcacaccactacgccgcaaccctgtgcgcgctcgaggtgcgcgcagccgcttcggccgagctgaacgccgcgctggaggagctggcggcgcgctgcgcggccctgcgcgaggtgcattgtttctgcgtggtgagccactcggtgctggacgccttccgcgcgcactgcccgcgcctgcgcacctataccctcaagctcacgcgcgagccgcatccctggaggcctacgctcgtggcgtgattgggcgacttctctcccccgtccccgtggacacgccccacccgctcggtcctggacacactgcccccctctcttgcctccacccctctgcggactctgcagctccgcggccccggcgcagggagagggagggcacgggcgcgggccgggcctcaagggacttgcccagcccacaccaggtcgcgcaccggcgatttctcctgtagaacaaagaaggaaatagagggaccgagaggggtgggactcgaacccaagtctcccactcatctcaccccaccccaccccactccaccccaccccacccctccactccactccactccacacatcccatccagccagccttttctgcctgctggtgcctcggccgctgtccgagccccgccccgcgggcttgcacgtggcccccgcctgacccggcgccccggggcggagtagggcggagcgggcggcaaacgcagcactttccgcggctttgacgagcccgcagcggccgggcccgagcgcagagccgggccgagactgcaccatgcaggaagcgccagctgcgctgcccacggagccaggccccagccccgtgcctgccttcctcggcaagctatgggcgctggtgggggacccaggcacagaccacctgatccgctggagcccgagcgggaccagtttcctcgtaagcgaccagagccgtttcgccaaggaagtgctgccccagtatttcaagcatagcaacatggcgagcttcgtgcgccaactcaacatgtacggttttcggaaggtggtgagcatcgagcagggcggcctgcttaggccggagcgcgaccacgtcgagttccagcacccgagcttcgtgcgcggccgcgagcagctactggagcgcgtgcggcgcaaggtgcccgcgctgcgcggcgacgacggccgctggcgcccggaggacctgggtcgactactgggcgaggtgcaggctttgcggggagtgcaggagagcaccgaggcgcggctgcgggagctcaggcagcagaacgagatcttgtggcgggaggtggtgacacttcggcagagccacggtcagcagcaccgggtcattggcaagctgatccagtgtctctttgggccacttcaggcggggccgagcaatgcaggaggcaagagaaagctgtccctgatgctggatgaggggagctcatgcccaacacctgccaagttcaacacctgccctctacctggtgcccttctgcaggacccctacttcatccagtcgcctctcccagagacaaatttgggccttagccctcacagggccaggggccccatcatctctgacatcccagaagactctccatcccctgaggggaccaggctttctccctccagtgatggcaggagggagaagggcctggcactgctcaaagaagagccggccagtccagggggggatggcgaggccgggctggccctggccccaaacgagtgtgacttctgcgtgacagcccccccgccactgcctgtggctgtggtgcaggccatcctggaagggaaagggagcttcagccccgaggggcccaggaatgcccaacagcctgaaccaggggatcccagggagatacctgacagggggcctctgggcctggaaagcggggacaggagcccagagagtctgctgcctccgatgctgcttcagccccctcaagaaagtgtggaacctgcagggcctctagatgtgctgggccccagtctccaagggcgagaatggaccctgatggacttggacatggagctgtccttgatgcagcccttggttccagagcggggtgagcctgagctggcggtcaaggggttaaattctccaagcccagggaaggaccccacgctcggggccccactcctgctggatgtccaggcggccttgggaggcccagccctgggcctgcctggggctttaaccatttatagcactcctgagagccggactgcctcctacttgggcccggaagccagtccctccccctaagaccccgcgcctctgaaggggcttggaaccagtccgccgctgcacatccttcttggcttcctggcgccccctatcgggggtgagcgaagcccccactactaaatggcctctctccactaccccgactatccctgcacataaactccgttttttttttttc

SEQ ID NO: 33042 - DNA, 1515 bp, Artificial Sequence
  derived and/or modified sequence
atgcaggaagcgccagctgcgctgcccacggagccaggccccagccccgtgcctgccttcctcggcaagctatgggcgctggtgggggacccaggcacagaccacctgatccgctggagcccgagcgggaccagtttcctcgtaagcgaccagagccgtttcgccaaggaagtgctgccccagtatttcaagcatagcaacatggcgagcttcgtgcgccaactcaacatgtacggttttcggaaggtggtgagcatcgagcagggcggcctgcttaggccggagcgcgaccacgtcgagttccagcacccgagcttcgtgcgcggccgcgagcagctactggagcgcgtgcggcgcaaggtgcccgcgctgcgcggcgacgacggccgctggcgcccggaggacctgggtcgactactgggcgaggtgcaggctttgcggggagtgcaggagagcaccgaggcgcggctgcgggagctcaggcagcagaacgagatcttgtggcgggaggtggtgacacttcggcagagccacggtcagcagcaccgggtcattggcaagctgatccagtgtctctttgggccacttcaggcggggccgagcaatgcaggaggcaagagaaagctgtccctgatgctggatgaggggagctcatgcccaacacctgccaagttcaacacctgccctctacctggtgcccttctgcaggacccctacttcatccagtcgcctctcccagagacaaatttgggccttagccctcacagggccaggggccccatcatctctgacatcccagaagactctccatcccctgaggggaccaggctttctccctccagtgatggcaggagggagaagggcctggcactgctcaaagaagagccggccagtccagggggggatggcgaggccgggctggccctggccccaaacgagtgtgacttctgcgtgacagcccccccgccactgcctgtggctgtggtgcaggccatcctggaagggaaagggagcttcagccccgaggggcccaggaatgcccaacagcctgaaccaggggatcccagggagatacctgacagggggcctctgggcctggaaagcggggacaggagcccagagagtctgctgcctccgatgctgcttcagccccctcaagaaagtgtggaacctgcagggcctctagatgtgctgggccccagtctccaagggcgagaatggaccctgatggacttggacatggagctgtccttgatgcagcccttggttccagagcggggtgagcctgagctggcggtcaaggggttaaattctccaagcccagggaaggaccccacgctcggggccccactcctgctggatgtccaggcggccttgggaggcccagccctgggcctgcctggggctttaaccatttatagcactcctgagagccggactgcctcctacttgggcccggaagccagtccctccccctaagaccccgcgcctctgaaggggcttggaaccagtccg

SEQ ID NO: 33043 - DNA, 1479 bp, Artificial Sequence
  derived and/or modified sequence
atgcaggaggccccagctgccctgcccacagagcccggccccagccctgtgcctgccttcctgggcaagctgtgggccctggtgggggaccctggaacagaccacctgatccgctggagccccagcggcaccagcttcctggtgtctgaccagagcagatttgccaaggaggtgctgccccagtacttcaagcacagcaacatggccagctttgtgcggcagctgaacatgtatggcttcaggaaggtggtgtccattgagcagggcggcctgctgcggcctgagcgggaccacgtggagttccagcaccccagctttgtgcggggccgggagcagctgctggagcgggtgcggaggaaggtgcctgccctgcggggagatgatggccgctggaggcctgaggacctgggccgcctgctgggggaggtgcaggccctgcggggcgtgcaggagagcacagaggcccggctgcgggagctgcggcagcagaatgagatcctgtggagggaggtggtgaccctgcggcagagccacggccagcagcaccgggtgattggcaagctgatccagtgcctgtttggccccctgcaggccggccccagcaatgccggcggcaagaggaagctgagcctgatgctggatgagggcagcagctgccccaccccagccaagttcaacacctgccccctgcccggggccctgctgcaggacccctacttcatccagagccccctgcctgagaccaacctgggcctgagcccccaccgggcccggggccccatcatcagtgacatccctgaggacagccccagccctgagggcacccggctgagccccagcagtgatggccggcgggagaagggcctggccctgctgaaggaggagcccgccagccctggaggagatggagaggccggcctggccctggccccaaatgaatgtgacttctgtgtgacagcccccccacccctgcctgtggccgtggtgcaggccatcctggagggcaagggcagcttcagccctgagggccccagaaatgcccagcagcctgagcccggggacccccgggagatcccagaccggggccccctgggcctggagagcggggacaggagccctgagagcctgctgccccccatgctgctgcagcccccccaggagagcgtggagcccgccggccccctggatgtgctgggccccagcctgcagggccgggagtggaccctgatggacctggacatggagctgagcctgatgcagcccctggtgcctgagcggggggagcctgagctggccgtgaagggcctgaacagccccagccctgggaaggaccccaccctgggcgcccccctgctgctggatgtgcaggccgccctgggcggccctgccctgggcctgcccggggccctgaccatctacagcaccccagagagcaggacagccagctacctgggccctgaggccagccccagcccctag

SEQ ID NO: 33044 - DNA, 1479 bp, Artificial Sequence
  derived and/or modified sequence
atgcaggaggcccccgccgccctgcccaccgagcccggccccagcccagtccctgcttttctcgggaaactctgggccctggtgggggacccaggcacagaccacctcatccgctggtcaccgagcggcacatctttcctggtgagcgaccagtcccgctttgctaaggaggttctcccacaatacttcaagcacagcaatatggccagctttgtgcggcaactgaacatgtacggatttcggaaggttgtctctatcgagcaaggagggctgctcagacccgagcgggaccatgtggaattccagcatcccagttttgtccgaggtagagaacaactcttggagcgtgttagaagaaaagtgccagccctgcgcggcgatgatgggaggtggagaccagaggatctgggaagactcctcggtgaggtgcaagctctgagaggcgtgcaggaatctactgaggcccgcctcagggaacttaggcaacagaacgaaatcctgtggagggaagtggtaacattgcgccagtcccacggacagcaacatcgggtgattggcaaactgatccagtgcttgttcggacccctgcaagcgggcccttcaaatgctgggggcaaacggaagctttctttgatgttggacgaaggcagctcctgccccacaccagctaaattcaacacatgccctctccccggcgccctgcttcaggatccttattttattcaaagtcccctcccagagactaaccttggtcttagcccacaccgggcacgtggccccattatttccgacattcccgaggatagtccatctcccgaaggcaccagactgtctccgagctcggacggacggcgcgagaagggcctcgcgctgcttaaggaggagcccgccagccccggtggcgacggtgaggccggccttgcactcgccccaaatgaatgtgacttctgtgtgacagcccctccgccgctacctgtggccgtggtgcaagctattctggaagggaaaggatcattcagcccggaagggccccgcaacgcgcagcaaccagagcccggagacccaagagagatccccgaccgcggccctctgggtctagaatctggcgaccgtagtccggagtcactcctccctccaatgctcttgcaacccccacaggagtcagtcgagccagcggggccgttagacgtccttggaccgtccctgcagggcagagagtggaccttaatggacttggatatggagctttccctcatgcagcctctggtcccagagcgtggagagccggaattggccgtcaaagggctgaacagcccttccccgggaaaggaccctacactgggggccccgctgctgttggacgtccaggccgccttgggaggcccggctttaggtctgccaggggccttaactatttactcaacccccgaaagcaggacagcatcctatttggggccagaggcaagccccagcccatag

SEQ ID NO: 33045 - DNA, 1479 bp, Artificial Sequence
  derived and/or modified sequence
atgcaggaggcccccgccgccctgcccaccgagcccggccccagcccagtcccagccttcttagggaaactgtgggcacttgtcggcgatccaggcactgaccacctcattagatggagcccctctggcacgagcttccttgtctcagaccagtcacgattcgccaaagaagttcttccacaatattttaaacactccaatatggcatcgtttgtaagacagctgaacatgtatggattcagaaaagtcgtgagcatagaacaggggggactcctcagacccgaaagggaccacgtggagtttcaacaccccagtttcgtgcgggggagggaacagctgttggagcgtgttagacgcaaggttcccgcgctgcgcggtgacgacggtcgctggagacctgaagatctgggacgcctgctgggtgaagtgcaggcactacgtggcgtgcaagaatctacggaggccaggctgagggagttaaggcagcaaaatgagatactctggcgagaagttgtcaccctccgacaaagccacggccagcagcaccgtgtgataggtaagctcattcaatgtctgtttggcccactccaggctggtccatccaacgcaggcgggaagaggaaactgagcctgatgctcgatgagggtagttcatgcccaacccctgccaagttcaacacctgtccactccccggcgcccttcttcaggatccatattttattcagtcacccctccccgaaacaaatctggggcttagccctcaccgcgcccgggggcctatcattagcgacatccccgaggacagccctagcccagagggtacacgactctccccaagttccgatggacgccgggaaaaggggctggcacttctaaaggaagaacctgcttctcctggtggtgatggcgaggccgggctcgctctggcacccaacgagtgtgacttctgcgttaccgcccctcccccgctgcccgttgcagtggtacaggcaattctcgaaggtaaagggagcttcagtcccgaggggcctcgaaacgctcagcaacccgagccaggtgacccacgggagatcccagatagaggtcctctggggcttgaatccggcgaccggtcccctgagtccctccttcccccgatgcttttgcagccgcctcaggagtcagtcgagccagctggccctcttgacgtcctgggcccaagccttcagggaagggagtggacactgatggatttggacatggaactgtcacttatgcagcctctggttcccgaacgcggcgagcccgagctggccgtaaaggggcttaatagcccttcacctggaaaagatccaacactaggggctccactgcttttggatgttcaggcagctctaggggggccggcgcttggattgcccggcgctctcacaatctatagcacacccgagtccaggacagcttcttatcttggccctgaagcctcccccagcccctag

SEQ ID NO: 33046 - DNA, 1479 bp, Artificial Sequence
  derived and/or modified sequence
atgcaggaggcaccagctgccctgcctaccgaacccggacctagccccgtacccgcattcctggggaaactgtgggccctggtgggtgatcccggaacagaccacctaatccggtggtccccatccgggacatcctttttagtctcagaccagtctcgcttcgcaaaagaagttctcccccagtacttcaagcactccaatatggctagcttcgtgagacaactgaacatgtacggctttcgaaaggtcgtctccatcgaacagggaggcctgcttagaccggaacgcgaccatgtcgagtttcaacacccatcttttgtccggggtcgggagcagttactcgaacgggtacgcagaaaagttccagctctgcgcggagacgatgggaggtggcgtccagaggacctaggccgtctcctgggggaagtccaggctctccggggagtgcaggagtccactgaagcgaggctccgggagctcaggcagcaaaatgagattctgtggcgggaagtggtgacccttcgacagagccacggccaacagcacagggtgattgggaagctgatccagtgcctctttggaccactccaggcaggaccttctaacgctggcggaaaacgaaagttaagtcttatgctcgacgaagggagttcctgtcccacccccgctaagttcaacacatgccctctgccgggtgcccttctgcaggatccttactttattcaatcccctctgcctgaaacgaatctcggcctgagcccccatagagcaagggggccaatcattagtgacatccccgaagacagcccgagcccggaagggacgcggctctccccatccagcgacgggcgtcgggagaagggccttgccctgctgaaggaggaacccgcatcccccggtggagacggggaagcaggtctcgctctggccccaaacgaatgtgatttctgtgtgactgcccctcctccgctcccagtggcagtcgtccaggccattctggaaggaaagggatcgtttagtcctgaaggaccgcgaaacgcccagcagccagaacccggagatccccgagagatccctgaccgaggacccttgggcctcgaatctggcgatagatctccagagtccttactgcccccaatgctgctccagcccccacaggagtccgtagagcccgctggacctctggatgttctgggccctagtcttcagggcagggagtggaccctcatggacctggatatggaactgtctctgatgcagccactagtgcctgagcgtggagaacctgagctggcagttaaaggccttaatagtcccagtcctggcaaagatccaacactgggtgctccgttgttattggacgtgcaggctgctctgggagggccagccctgggcttgccaggggcactgaccatatattctactcctgaatcccgcaccgcttcctacctgggcccagaggcctctcccagtccgtag

SEQ ID NO: 33047 - DNA, 1479 bp, Artificial Sequence
  derived and/or modified sequence
atgcaggaagctcccgcagctctccccaccgagcctggacctagtccggtgccagctttcctgggaaaactgtgggccttggtcggcgatcccggaactgatcatctgatcagatggagtccgtcaggcacctcctttttggtttcagaccagtccagatttgccaaggaggtcctgccacagtattttaagcatagtaatatggcatcattcgttagacaactgaacatgtatggtttccgcaaggtcgtcagcattgaacagggaggtttactgcggccagagcgcgaccacgttgagtttcagcacccctctttcgttagaggacgtgagcagctgttagagcgagtccgcaggaaggtgccggcactgcgcggagatgatggaagatggcgacccgaggatttgggtcggctgctgggtgaggtccaagccctacgcggagtccaggaaagcacagaagcacgactgcgggagctgcgacagcagaacgaaatcctgtggagggaagtcgtgaccctgcgccagtcacacggacaacagcaccgcgtgataggcaagctgattcagtgtcttttcggcccattgcaggccggaccctccaatgctggcggtaagaggaaactgagccttatgctcgatgaaggaagtagctgtcctactcctgctaaatttaatacatgtccattaccaggagcgctgctgcaggacccttactttatacagtcaccacttccagagaccaatttgggactgagtcctcaccgggctagaggcccaataatcagtgatatccccgaggattctccaagccccgaaggaactcgcctttctcccagcagtgacgggcgaagagagaagggcctggccctgctgaaggaggagcccgctagtccaggtggcgacggtgaagccggactggccttggccccaaacgagtgtgacttctgcgtgaccgccccaccacctctgccagtcgccgtggttcaagcaatcctggaaggaaaagggagcttttcacctgaaggacctaggaatgctcagcagccagagccaggagaccccagagaaattccagacaggggacctctgggcctcgaatccggagaccgttcacccgagtctctgctgcccccaatgcttttacagccacctcaagaaagcgtggagccagctggtccgttagacgtgctggggccttcactgcagggacgggagtggaccctaatggaccttgatatggaactctctttgatgcagcctctggtcccagagaggggagagcctgaactcgccgtaaaaggtttgaatagtcctagccccggaaaagaccccacactgggggcacccctgcttctcgacgtacaggctgccttgggtggacccgctctaggattgccaggagcactgactatatattctactccagagagtcgcaccgcctcataccttggaccagaagcttccccaagcccttag

SEQ ID NO: 33048 - DNA, 1479 bp, Artificial Sequence
  derived and/or modified sequence
atgcaggaggcccccgccgccctgcccaccgagcccggccccagccccgtgcccgccttcctgggcaagctgtgggccctggtgggcgaccccggcaccgaccacctgatcagatggagccccagcggcaccagcttcctggtgagcgaccagagcagattcgccaaggaggtgctgccccagtacttcaagcacagcaacatggccagcttcgtgagacagctgaacatgtacggcttcagaaaggtggtgagcatcgagcagggcggcctgctgagacccgagagagaccacgtggagttccagcaccccagcttcgtgagaggcagagagcagctgctggagagagtgagaagaaaggtgcccgccctgagaggcgacgacggcagatggagacccgaggacctgggcagactgctgggcgaggtgcaggccctgagaggcgtgcaggagagcaccgaggccagactgagagagctgagacagcagaacgagatcctgtggagagaggtggtgaccctgagacagagccacggccagcagcacagagtgatcggcaagctgatccagtgcctgttcggccccctgcaggccggccccagcaacgccggcggcaagagaaagctgagcctgatgctggacgagggcagcagctgccccacccccgccaagttcaacacctgccccctgcccggcgccctgctgcaggacccctacttcatccagagccccctgcccgagaccaacctgggcctgagcccccacagagccagaggccccatcatcagcgacatccccgaggacagccccagccccgagggcaccagactgagccccagcagcgacggcagaagagagaagggcctggccctgctgaaggaggagcccgccagccccggcggcgacggcgaggccggcctggccctggcccccaacgagtgcgacttctgcgtgaccgcccccccccccctgcccgtggccgtggtgcaggccatcctggagggcaagggcagcttcagccccgagggccccagaaacgcccagcagcccgagcccggcgaccccagagagatccccgacagaggccccctgggcctggagagcggcgacagaagccccgagagcctgctgccccccatgctgctgcagcccccccaggagagcgtggagcccgccggccccctggacgtgctgggccccagcctgcagggcagagagtggaccctgatggacctggacatggagctgagcctgatgcagcccctggtgcccgagagaggcgagcccgagctggccgtgaagggcctgaacagccccagccccggcaaggaccccaccctgggcgcccccctgctgctggacgtgcaggccgccctgggcggccccgccctgggcctgcccggcgccctgaccatctacagcacccccgagagcagaaccgccagctacctgggccccgaggccagccccagcccctag

SEQ ID NO: 33049 - protein, 333 aa, Artificial Sequence
  derived and/or modified sequence
MGRPAGLFPPLCPFLGFRPEACWERHMQIERAPSVPPFLRWAGYRPGPVRRRGKVELIKFVRVQWRRPQVEWRRRRWGPGPGASMAGSEELGLREDTLRVLAAFLRRGEAAGSPVPTPPSPAQEEPTDFLSRLRRCLPCSLGRGAAPSESPRPCSLPIRPCYGLEPGPATPDFYALVAQRLEQLVQEQLKSPPSPELQGPPSTEKEAILRRLVALLEEEAEVINQKLASDPALRSKLVRLSSDSFARLVELFCSRDDSSRPSRACPGPPPPSPEPLARLALAMELSRRVAGLGGTLAGLSVEHVHSFTPWIQAHGGWEGILAVSPVDLNLPLD

SEQ ID NO: 33050 - DNA, 1002 bp, Artificial Sequence
  derived and/or modified sequence
atgggtcggcctgctggattgtttccccccctgtgcccttttcttggatttagaccagaggcatgttgggaaagacacatgcagatcgagcgcgctccttcagttcccccttttctaaggtgggccggttacaggccaggccctgttcggaggaggggaaaggttgagttaatcaaatttgtgcgagttcagtggaggaggccacaagtggaatggaggaggcgcaggtggggcccgggccctggggcctcgatggccggcagcgaggaactcgggctaagagaggacacactccgagtcctggcagcatttcttcgacggggcgaggccgccgggtctcccgtgcccactccacccagtcctgcgcaagaagaacccactgacttcctctccagactaagacgctgcctgccatgttcgctagggcgtggcgccgcaccgtctgaatcaccacggccgtgtagcctgccaatacgcccctgctacgggctggagccagggcctgctactcctgacttctacgctctagttgctcagagactcgagcaactggttcaggagcagttaaagtccccaccatcgccagagttacagggcccccccagtaccgagaaagaagcgatcctgaggcgcctggtggctctcttggaggaagaggcagaggtgattaaccagaagctggcttctgacccggcactgagatcaaaactagtccgtctctcgagtgactcctttgcaaggctcgtagagctcttctgttcgagggacgacagttccagaccctcgcgcgcctgccctggacccccccctccaagtccagaacccttagctaggctggctttggcgatggagctttctcggagagtagccggcttggggggaaccctcgctggcctgtccgttgagcatgtgcactcctttacgccgtggatccaggctcatggtgggtgggaggggatcttagccgttagccctgtagacctcaacttgccactggattag

SEQ ID NO: 33051 - DNA, 1002 bp, Artificial Sequence
  derived and/or modified sequence
atgggccggcctgctggcctcttcccccccctgtgccccttcctgggcttccggcctgaggcctgctgggagcggcacatgcagatcgagcgggcccccagcgtgccccccttcctgcgctgggccggctaccggcccggccctgtgagaagaagaggcaaggtggagctgatcaagtttgtgcgggtgcagtggaggcggccccaggtggagtggaggagaagacgctggggccctggccctggggcctccatggccggcagcgaggagctgggcctgcgggaggacaccctgcgggtgctggccgccttcctgcggcggggggaggccgccggcagccctgtgcccaccccacccagccctgcccaggaggagcccacagacttcctgagccggctgcggcgctgcctgccctgcagcctgggcagaggagctgcccccagcgagagcccccggccctgcagcctgcccatccggccctgctacggcctggagcccggccctgccaccccagacttctacgccctggtggcccagaggctggagcagctggtgcaggagcagctgaagagcccccccagccctgagctgcagggcccccccagcacagagaaggaggccatcctgcggcggctggtggccctgctggaggaggaggccgaggtgatcaaccagaagctggccagtgaccctgccctgcggagcaagctggtgcggctgagcagtgacagctttgcccggctggtggagctgttctgcagcagagatgacagcagccggcccagccgggcctgccccggccccccaccacccagccctgagcccctggcccggctggccctggccatggagctgagcagaagagtggccggcctgggcggcaccctggccggcctgtctgtggagcacgtgcacagcttcaccccctggatccaggcccacggcggctgggagggcatcctggccgtgtcccctgtggacctgaacctgcccctggactag

SEQ ID NO: 33052 - DNA, 1002 bp, Artificial Sequence
  derived and/or modified sequence
atgggccggcccgccggcctgttcccccccctgtgccccttcctgggtttccggccagaggcttgctgggagaggcatatgcaaatcgaacgcgcccctagcgtgcccccgttcttacggtgggccggttatagaccgggtccggtcaggagaagaggtaaggtggaactcatcaagtttgttcgagtccagtggcggcggccccaggtggagtggcgcagaaggagatggggcccaggcccgggcgccagcatggcaggctcggaagagctaggcctacgggaagatacactgagagtgttggcagccttcctaagaagaggggaggctgccggaagccctgtccccacacccccatctccagctcaggaggaacctaccgactttttgagcagattgaggcgctgcctcccatgttctctgggacggggcgccgcgcctagcgagagtccccgcccatgttcacttccgatacgtccatgctatggactggagccgggacccgcgacccccgatttttatgccctcgtagcacagaggctggagcagttggtccaagaacagttaaaaagtccaccctctcctgagctccaaggaccacccagtaccgagaaggaggccatactgagacggctagtggccctgctggaggaagaagccgaggtcattaatcagaagttggctagcgacccagccctgagatccaagctcgtgagattgtcttccgactctttcgcacggttggtggagctgttctgctctcgggacgattcatctaggccatccagagcctgcccaggaccgccgcctccatcccccgagccactcgcccgactagcactggccatggagttaagccgtagagtcgcagggttgggcggtaccctcgcagggttgtcagtggaacatgtgcacagctttacaccctggatccaggctcacgggggctgggaggggatcctggctgtgtctcctgttgatctcaatttacccctagattag

SEQ ID NO: 33053 - DNA, 1002 bp, Artificial Sequence
  derived and/or modified sequence
atgggtcggcctgccggattgttcccccctctgtgcccttttctaggcttccgcccagaagcctgctgggaaaggcacatgcagatcgaacgagctccgtccgtccctccctttcttaggtgggccggatatagaccaggacccgtaaggagaaggggcaaagtggaactaattaaatttgttagagtccagtggagacgcccacaggtggagtggcgacgccgtcggtgggggccaggcccaggcgctagtatggctggcagcgaagagctgggcctgagagaggacaccctgagggtcctggccgcattcctgaggagaggagaggcagcgggaagccctgttccaacaccgccatcaccagctcaagaagaaccaactgacttcctatcacgactcagaagatgtttaccttgtagtctgggcaggggagcagctccttctgagagtccaagaccttgtagtctgcctattcgaccatgctacggcctcgaacctggccctgctacgccagatttctacgccctcgtggcacagcgcctggaacagctggtccaagaacagctgaaatcgccaccctctccagaactgcaaggccctccatctacagaaaaggaggccatactgcggagactggtggcactactggaagaagaagcggaggtgatcaaccagaaattggcctcagaccctgctcttcgatcgaaacttgtcaggctgagctccgattcatttgcacggctcgtggaactgttttgttctagggatgactcatccaggcctagtcgagcctgtcctggcccaccaccaccctctcccgagccattggcgagactggctctagccatggaactgtcacgtagagtggccggactgggcggtactctcgctggcttatctgtggagcacgtgcacagcttcaccccgtggattcaggcacatgggggttgggaggggattttggccgtttctcccgtcgacttgaaccttcccctggattag

SEQ ID NO: 33054 - DNA, 1029 bp, Artificial Sequence
  derived and/or modified sequence
atgggacggcccgctgggctgttcccgcccctatgcccttttttgggtttccggccagaggcatgctgggagcgtcacatgcaaattgagcgtgcacccagcgttccgccctttctacgctgggccggttatcgacccggcccagtgcgcaggcgcgggaaagttgaactaataaagtttgtacgagttcagtggaggagaccgcaagttgagtggaggaggcggcggtggggccccggaccaggtgcctccatggcaggctctgaagagctggggctccgggaagacacgctgagggtcctagctgccttccttaggcgtggtgaggctgccgggtctcctgttccaactccacctaggcccagctactccagacttctatgctttggtggcccagcggctggaacagctggtccaagagcagctgaaatctccgcccagcccagaattacagggtcccccatcgacagagaaggaagccatactgcggaggctggtggccctgctggaggaggaggcagaagtcattaaccagaagctggcctcggaccccgccctgcgcagcaagctggtccgcctgtcctccgactctttcgcccgcctggtggagctgttctgtagccgggatgacagctctcgcccaagccgagcatgccccgggcccccgcctccttccccggagcccctggcccgcctggccctagccatggagctgagccggcgcgtggccgggctggggggcaccctggccggactcagcgtggagcacgtgcacagcttcacgccctggatccaggcccacgggggctgggagggcatcctggctgtttcacccgtggacttgaacttgccattggactgagctctttctcagaagctgctacaagatgacacctcatgtccctgccctcttcgtgtgcttttccaagtcttcctattccactcagggctgtggggtggtggttgccctacctgtttttgccaaaaataaattgtttaaaacttttcttattaaaaacgttacaaagt

SEQ ID NO: 33055 - DNA, 1851 bp, Artificial Sequence
  derived and/or modified sequence
aagtaagtatccccactttcagggtagcatcctctttccctagttatttcagtgcagaatcgattcacgtgtaagcctctacctcctgcacttaccccaatgtagacccccttccacagtccccctacagaagatctcccaaaacatttccaacacagaacttccattcaattcccctccgactgcccgcctccctcctccaggacagagcacgccccaggtttcgagactgaactacccccatctacggagtccacccctccctctctagaaccccctcagtgtagacgcctcctcttttcctctttcctccctactttttctagtttttctgcagccgacctccagcgtcggccactgtagctccttccttgctccactttccccagagtacacagcctgcctttccactctccgtgcagacccatcctctttcccgctcctcgctctcggacgccaccaacgctctcccgggctcttccgcgttacctacgatggaaggtcggggcgtgcgggcagctggaacccacccctgtcttggagctccgggtagctctcaaactcgaggctgcgcaccccctttcccgtcagctgagctctagagcgctggggctttctttttgatcgacttcttgaaataaaaccaactttatcattctttgggtaacagacccaaaagccgatgggacggcccgctgggctgttcccgcccctatgcccttttttgggtttccggccagaggcatgctgggagcgtcacatgcaaattgagcgtgcacccagcgttccgccctttctacgctgggccggttatcgacccggcccagtgcgcaggcgcgggaaagttgaactaataaagtttgtacgagttcagtggaggagaccgcaagttgagtggaggaggcggcggtggggccccggaccaggtgcctccatggcaggctctgaagagctggggctccgggaagacacgctgagggtcctagctgccttccttaggcgtggtgaggctgccgggtctcctgttccaactccacctagccctgcccaagaagagccaacagacttcctgagccgccttcgaagatgtcttccctgctccctggggcgaggagcagccccctctgagtcccctcggccttgctctctgcccatccgcccctgctatggtttagagcctggcccagctactccagacttctatgctttggtggcccagcggctggaacagctggtccaagagcagctgaaatctccgcccagcccagaattacagggtcccccatcgacagagaaggaagccatactgcggaggctggtggccctgctggaggaggaggcagaagtcattaaccagaagctggcctcggaccccgccctgcgcagcaagctggtccgcctgtcctccgactctttcgcccgcctggtggagctgttctgtagccgggatgacagctctcgcccaagccgagcatgccccgggcccccgcctccttccccggagcccctggcccgcctggccctagccatggagctgagccggcgcgtggccgggctggggggcaccctggccggactcagcgtggagcacgtgcacagcttcacgccctggatccaggcccacgggggctgggagggcatcctggctgtttcacccgtggacttgaacttgccattggactgagctctttctcagaagctgctacaagatgacacctcatgtccctgccctcttcgtgtgcttttccaagtcttcctattccactcagggctgtggggtggtggttgccctacctgtttttgccaaaaataaattgtttaaaacttttcttattaaaaacgttacaaagt

SEQ ID NO: 33056 - DNA, 1002 bp, Artificial Sequence
  derived and/or modified sequence
atgggcagacccgccggcctgttcccccccctgtgccccttcctgggcttcagacccgaggcctgctgggagagacacatgcagatcgagagagcccccagcgtgccccccttcctgagatgggccggctacagacccggccccgtgagaagaagaggcaaggtggagctgatcaagttcgtgagagtgcagtggagaagaccccaggtggagtggagaagaagaagatggggccccggccccggcgccagcatggccggcagcgaggagctgggcctgagagaggacaccctgagagtgctggccgccttcctgagaagaggcgaggccgccggcagccccgtgcccaccccccccagccccgcccaggaggagcccaccgacttcctgagcagactgagaagatgcctgccctgcagcctgggcagaggcgccgcccccagcgagagccccagaccctgcagcctgcccatcagaccctgctacggcctggagcccggccccgccacccccgacttctacgccctggtggcccagagactggagcagctggtgcaggagcagctgaagagcccccccagccccgagctgcagggcccccccagcaccgagaaggaggccatcctgagaagactggtggccctgctggaggaggaggccgaggtgatcaaccagaagctggccagcgaccccgccctgagaagcaagctggtgagactgagcagcgacagcttcgccagactggtggagctgttctgcagcagagacgacagcagcagacccagcagagcctgccccggcccccccccccccagccccgagcccctggccagactggccctggccatggagctgagcagaagagtggccggcctgggcggcaccctggccggcctgagcgtggagcacgtgcacagcttcaccccctggatccaggcccacggcggctgggagggcatcctggccgtgagccccgtggacctgaacctgcccctggactag

SEQ ID NO: 33057 - protein, 918 aa, Artificial Sequence
  derived and/or modified sequence
MGTTAPGPIHLLELCDQKLMEFLCNMDNKDLVWLEEIQEEAERMFTREFSKEPELMPKTPSQKNRRKKRRISYVQDENRDPIRRRLSRRKSRSSQLSSRRLRSKDSVEKLATVVGENGSVLRRVTRAAAAAAAATMALAAPSSPTPESPTMLTKKPEDNHTQCQLVPVVEIGISERQNAEQHVTQLMSTEPLPRTLSPTPASATAPTSQGIPTSDEESTPKKSKARILESITVSSLMATPQDPKGQGVGTGRSASKLRIAQVSPGPRDSPAFPDSPWRERVLAPILPDNFSTPTGSRTDSQSVRHSPIAPSSPSPQVLAQKYSLVAKQESVVRRASRRLAKKTAEEPAASGRIICHSYLERLLNVEVPQKVGSEQKEPPEEAEPVAAAEPEVPENNGNNSWPHNDTEIANSTPNPKPAASSPETPSAGQQEAKTDQADGPREPPQSARRKRSYKQAVSELDEEQHLEDEELQPPRSKTPSSPCPASKVVRPLRTFLHTVQRNQMLMTPTSAPRSVMKSFIKRNTPLRMDPKCSFVEKERQRLENLRRKEEAEQLRRQKVEEDKRRRLEEVKLKREERLRKVLQARERVEQMKEEKKKQIEQKFAQIDEKTEKAKEERLAEEKAKKKAAAKKMEEVEARRKQEEEARRLRWLQQEEEERRHQELLQKKKEEEQERLRKAAEAKRLAEQREQERREQERREQERREQERREQERREQERQLAEQERRREQERLQAERELQEREKALRLQKEQLQRELEEKKKKEEQQRLAERQLQEEQEKKAKEAAGASKALNVTVDVQSPACTSYQMTPQGHRAPPKINPDNYGMDLNSDDSTDDEAHPRKPIPTWARGTPLSQAIIHQYYHPPNLLELFGTILPLDLEDIFKKSKPRYHKRTSSAVWNSPPLQGARVPSSLAYSLKKH

SEQ ID NO: 33058 - DNA, 2757 bp, Artificial Sequence
  derived and/or modified sequence
atgggcaccaccgcccccggccccatccacctgctggagctgtgcgaccagaagctgatggagttcctgtgcaacatggacaacaaggacctggtgtggctggaggagatccaggaggaggccgagagaatgttcaccagagagttcagcaaggagcccgagctgatgcccaagacccccagccagaagaacagaagaaagaagagaagaatcagctacgtgcaggacgagaacagagaccccatcagaagaagactgagcagaagaaagagcagaagcagccagctgagcagcagaagactgagaagcaaggacagcgtggagaagctggccaccgtggtgggcgagaacggcagcgtgctgagaagagtgaccagagccgccgccgccgccgccgccgccaccatggccctggccgcccccagcagccccacccccgagagccccaccatgctgaccaagaagcccgaggacaaccacacccagtgccagctggtgcccgtggtggagatcggcatcagcgagagacagaacgccgagcagcacgtgacccagctgatgagcaccgagcccctgcccagaaccctgagccccacccccgccagcgccaccgcccccaccagccagggcatccccaccagcgacgaggagagcacccccaagaagagcaaggccagaatcctggagagcatcaccgtgagcagcctgatggccaccccccaggaccccaagggccagggcgtgggcaccggcagaagcgccagcaagctgagaatcgcccaggtgagccccggccccagagacagccccgccttccccgacagcccctggagagagagagtgctggcccccatcctgcccgacaacttcagcacccccaccggcagcagaaccgacagccagagcgtgagacacagccccatcgcccccagcagccccagcccccaggtgctggcccagaagtacagcctggtggccaagcaggagagcgtggtgagaagagccagcagaagactggccaagaagaccgccgaggagcccgccgccagcggcagaatcatctgccacagctacctggagagactgctgaacgtggaggtgccccagaaggtgggcagcgagcagaaggagccccccgaggaggccgagcccgtggccgccgccgagcccgaggtgcccgagaacaacggcaacaacagctggccccacaacgacaccgagatcgccaacagcacccccaaccccaagcccgccgccagcagccccgagacccccagcgccggccagcaggaggccaagaccgaccaggccgacggccccagagagcccccccagagcgccagaagaaagagaagctacaagcaggccgtgagcgagctggacgaggagcagcacctggaggacgaggagctgcagccccccagaagcaagacccccagcagcccctgccccgccagcaaggtggtgagacccctgagaaccttcctgcacaccgtgcagagaaaccagatgctgatgacccccaccagcgcccccagaagcgtgatgaagagcttcatcaagagaaacacccccctgagaatggaccccaagtgcagcttcgtggagaaggagagacagagactggagaacctgagaagaaaggaggaggccgagcagctgagaagacagaaggtggaggaggacaagagaagaagactggaggaggtgaagctgaagagagaggagagactgagaaaggtgctgcaggccagagagagagtggagcagatgaaggaggagaagaagaagcagatcgagcagaagttcgcccagatcgacgagaagaccgagaaggccaaggaggagagactggccgaggagaaggccaagaagaaggccgccgccaagaagatggaggaggtggaggccagaagaaagcaggaggaggaggccagaagactgagatggctgcagcaggaggaggaggagagaagacaccaggagctgctgcagaagaagaaggaggaggagcaggagagactgagaaaggccgccgaggccaagagactggccgagcagagagagcaggagagaagagagcaggagagaagagagcaggagagaagagagcaggagagaagagagcaggagagaagagagcaggagagacagctggccgagcaggagagaagaagagagcaggagagactgcaggccgagagagagctgcaggagagagagaaggccctgagactgcagaaggagcagctgcagagagagctggaggagaagaagaagaaggaggagcagcagagactggccgagagacagctgcaggaggagcaggagaagaaggccaaggaggccgccggcgccagcaaggccctgaacgtgaccgtggacgtgcagagccccgcctgcaccagctaccagatgaccccccagggccacagagccccccccaagatcaaccccgacaactacggcatggacctgaacagcgacgacagcaccgacgacgaggcccaccccagaaagcccatccccacctgggccagaggcacccccctgagccaggccatcatccaccagtactaccacccccccaacctgctggagctgttcggcaccatcctgcccctggacctggaggacatcttcaagaagagcaagcccagataccacaagagaaccagcagcgccgtgtggaacagcccccccctgcagggcgccagagtgcccagcagcctggcctacagcctgaagaagcactag

SEQ ID NO: 33059 - DNA, 2757 bp, Artificial Sequence
  derived and/or modified sequence
atgggaaccacagcccctgggccaatccatctactcgaattatgtgaccagaaactgatggagttcctatgcaacatggacaataaagacttagtgtggctggaggaaatccaggaagaggctgagcgcatgttcacaagggaattctctaaggaacccgaactcatgcccaaaaccccctctcagaaaaataggaggaagaaaaggcggatctcttacgtgcaggatgagaacagagatccaattagacgaagattgtcccggagaaagagtagatcatcgcaattgtctagtaggcgcctcaggagtaaagattccgtggaaaaactggccacggtggttggcgaaaatggatctgtgttgaggcgcgttactagggcagccgcagcggctgcggcagcaacaatggcccttgctgccccttcctctccaaccccagaatcccctaccatgctgactaagaaaccggaggacaatcatacccagtgtcagctcgtccctgttgttgaaattggcatttccgaaaggcaaaacgcagagcaacatgtgactcagcttatgtcaaccgagcccctcccacggaccctcagtcctacgccagcatctgcaacagctccaactagtcagggcatccccacatctgatgaagagagcacacctaaaaagagtaaagccagaattctggaaagcatcacagtgtccagtctcatggcgacaccccaagaccctaagggacagggtgtggggaccggcaggtctgcatccaaactgagaatcgcacaggtcagccctgggccacgcgactcccctgcctttccagattccccatggcgagagcgagtattggctcccattttgcctgacaatttttcaacgccaaccgggtcgcggacggattcacagagtgtgcggcacagccctattgcaccaagcagcccttctccccaggtgctggcccagaagtactcgttggtcgcaaagcaggagtctgtggtccgccgtgcctctcggcggctcgcgaagaagaccgccgaagagccggcagcgtccggtagaattatctgccattcctatcttgagcggctgctgaatgtcgaagtgccacagaaagttgggtctgagcagaaggaaccccccgaggaggcggagccagtcgctgctgctgaacctgaggtgcccgaaaacaacggaaacaacagctggcctcataatgatacagagattgcgaattcaaccccaaacccaaaacctgctgccagctctccagagacccccagcgccggtcagcaagaagcaaaaacagaccaggcagacggccctagggaacccccccagagcgctcggaggaaaagatcctacaagcaggccgtttcggagctggatgaagagcagcatttagaggacgaggagttgcagccgcccaggagcaaaactccttcttctccttgtccagcctcaaaggtggtaagacctctccggacattcctccacaccgtgcaaagaaatcagatgctaatgactccaacgagcgctccccgcagcgtgatgaagagcttcattaagcgcaatacaccgctgcggatggatccaaaatgctcttttgtggagaaagagagacaaaggcttgagaatctgcgccggaaagaagaggctgaacagctgcgacggcaaaaagtcgaagaagacaaaagacgcaggctggaagaagtaaaactgaaacgggaggaacgactgcgaaaggtgttgcaagctagagagagggttgagcagatgaaagaggaaaagaaaaaacagattgaacagaaattcgcccaaatagatgaaaagactgagaaggccaaagaggagagattagccgaggaaaaggccaagaagaaagccgctgccaaaaagatggaggaagtggaggctagaagaaaacaggaagaggaggctcgcagactgcgctggctgcagcaggaagaagaagaaagaaggcatcaggagctcctccaaaaaaagaaggaagaggaacaggaacggttgaggaaagctgcagaggccaaaagactggcggagcagcgtgaacaggagaggcgggagcaggaacggcgagaacaagagcgtagggaacaggaaagaagagagcaggagcgacgagagcaggaaagacagctggctgagcaggagaggcggagggagcaggaacgattacaagctgagcgcgagttgcaagaaagggagaaagccttgaggctccagaaagagcagctgcagagagagttggaggagaagaaaaagaaagaggagcagcagcgtctggccgagcggcagctccaagaggagcaggagaagaaggccaaagaggcagccggggccagtaaagcgcttaacgttaccgtggatgtacaatctccggcctgtacctcctaccagatgacacctcagggccaccgtgctccaccaaagataaaccccgataattatgggatggacctcaattcagacgacagtaccgacgacgaggcacatccccgaaagccaatccccacctgggcacgcgggacccctctgtctcaagccattatacaccagtactatcatcccccaaacctgctggagctgtttggcaccatcttaccactcgacttggaggatatctttaaaaagagcaaaccaaggtaccacaagcggacatcttcagcggtttggaactctccaccactgcagggcgcgagagtgcctagttcattggcttactccctgaagaagcactag

SEQ ID NO: 33060 - DNA, 2757 bp, Artificial Sequence
  derived and/or modified sequence
atgggcaccacagcccctggccccatccacctgctggagctgtgtgaccagaagctgatggagttcctgtgcaacatggacaacaaggacctggtgtggctggaggagatccaggaggaggccgagaggatgttcacccgggagttcagcaaggagcctgagctgatgcccaagacccccagccagaagaacagaaggaagaagaggcgcatctcctatgtgcaggatgaaaatagagaccccatcagaagaaggctgagcaggaggaagagccgcagcagccagctgagcagccggcggctgcggagcaaggacagcgtggagaagctggccaccgtggtgggggagaatggatctgtgctgcggcgggtgaccagggctgctgctgctgctgctgctgccaccatggccctggccgcccccagcagccccaccccagagagccccaccatgctgaccaagaagccagaggacaaccacacccagtgccagctggtgcctgtggtggagatcggcatcagcgagcggcagaatgctgagcagcacgtgacccagctgatgagcacagagcccctgcccaggaccctgagccccaccccagccagcgccacagcccccaccagccagggcatccccaccagtgatgaggagagcacccccaagaagagcaaggcccgcatcctggagagcatcaccgtgagcagcctgatggccaccccccaggaccccaagggccagggcgtgggcaccggccgcagcgccagcaagctgagaattgcccaggtgtccccaggcccccgggacagccctgccttcccagacagcccctggagggagcgggtgctggcccccatcctgcctgacaacttcagcacccccaccggcagcaggacagacagccagagcgtgcgccacagccccatcgcccccagcagccccagcccccaggtgctggcccagaagtacagcctggtggccaagcaggagagcgtggtgagaagagccagccggcggctggccaagaagacagctgaggagcctgctgccagcggccgcatcatctgccacagctacctggagcggctgctgaatgtggaggtgccccagaaggtgggcagcgagcagaaggagcccccagaggaggccgagcctgtggccgctgctgagcctgaggtgcctgagaacaacggcaacaacagctggccccacaatgacacagagatcgccaacagcacccccaaccccaagccagctgccagcagccctgagacccccagcgctggccagcaggaggccaagacagaccaggctgatggcccccgggagcccccccagagcgcccggaggaagaggagctacaagcaggccgtgtctgagctggatgaggagcagcacctggaggatgaggagctgcagcccccaagaagcaagacccccagcagcccctgcccagccagcaaggtggtgcggcccctgcggaccttcctgcacacagtgcagaggaaccagatgctgatgacccccaccagcgcccccaggtctgtgatgaagagcttcatcaagaggaacacccccctgaggatggaccccaagtgcagctttgtggagaaggagcggcagaggctggagaacctgcggaggaaggaggaggccgagcagctgcggcggcagaaggtggaggaggacaagagaagaaggctggaggaggtgaagctgaagcgggaggagcggctgaggaaggtgctgcaggcccgggagcgggtggagcagatgaaggaggagaagaagaagcagatcgagcagaagtttgcccagattgatgagaagacagagaaggccaaggaggagcggctggccgaggagaaggccaagaagaaggccgccgccaagaagatggaggaggtggaggcccggaggaagcaggaggaggaggcccggcggctgcgctggctgcagcaggaggaggaggagcggcggcaccaggagctgctgcagaagaagaaggaggaggagcaggagcggctgaggaaggctgctgaggccaagaggctggccgagcagcgggagcaggagcggcgggagcaggagcggcgggagcaggagcggcgggagcaggagcggcgggagcaggagcggcgggagcaggagcggcagctggccgagcaggagaggagaagagagcaggagcggctgcaggccgagcgggagctgcaggagcgggagaaggccctgcggctgcagaaggagcagctgcagcgggagctggaggagaagaagaagaaggaggagcagcagaggctggccgagcggcagctgcaggaggagcaggagaagaaggccaaggaggccgccggggccagcaaggccctgaatgtgacagtggatgtgcagagccctgcctgcaccagctaccagatgaccccccagggccaccgggccccacccaagatcaacccagacaactacggcatggacctgaacagtgatgacagcacagatgatgaggcccaccccaggaagcccatccccacctgggcccggggcacccccctgagccaggccatcatccaccagtactaccacccccccaacctgctggagctgtttggcaccatcctgcccctggacctggaggacatcttcaagaagagcaagccccgctaccacaagaggaccagcagcgctgtgtggaacagcccccccctgcagggcgcccgggtgcccagcagcctggcctacagcctgaagaagcactag

SEQ ID NO: 33061 - DNA, 3964 bp, Artificial Sequence
  derived and/or modified sequence
cttgccgaggattggctgagccttcagttttgaaaatcatagttttcgcccgcgctgcgccgcctggttgctcctcccgtgcggtgagtcccgaaggcccggagccaagtgggtctgggcaagcggggccttacctagggataccaccggacttggatcggagcagccttcaggggacgtggcgcagtcgaacagagccaccatggggacgacggccccagggcccattcacctgctggagctatgtgaccagaagctcatggagtttctctgcaacatggataataaggacttggtgtggcttgaggaaatccaagaggaggccgagcgcatgttcaccagagaattcagcaaagagccagagctgatgcccaaaacaccttctcagaagaaccgacggaagaagagacggatttcttatgttcaggatgaaaacagagatcccatcaggagaaggttatcccgcagaaagtctcggagcagccagctgagctcccgacgcctccgcagcaaggacagtgtagagaagctggctacagtggtcggggagaacggctccgtcctgcggcgtgtgacccgtgctgcggctgcagctgccgcggctaccatggcattggctgcaccttcttcacccacccctgagtctcccacgatgctgactaagaagcccgaggataaccacacccagtgccagctggtgcctgtggtggagatcggcatcagtgagcgccagaatgctgagcagcatgtcacccagctcatgtccaccgagcctctgccccgcactctgtccccgactccagcttcagccacagctccaacctcccagggcatcccgacatcagatgaggaatcaacacctaagaagtcgaaggccaggatactggagtccatcacagtgagctccctgatggctacaccccaggaccccaagggtcaaggggtcgggacggggcggtctgcgtctaagctcaggattgcgcaggtctcccctggcccacgggactcgccagcctttccagattctccatggcgggagcgggtgctggctcccatcctgccggataacttctccacgcccacgggctctcgcacggactctcaatcggtgcggcacagcccgatcgccccgtcttccccgagtccccaagtcttagcccagaagtactctctggtggccaaacaggaaagtgttgtccgcagggcgagcagaaggcttgccaagaagactgccgaagagccagctgcctctggccgcatcatctgtcacagttacctggagaggctcctgaatgttgaggtgccccagaaagttggttctgagcagaaggaaccccccgaggaggctgagcctgtggcggcagctgagccagaggtccctgagaacaatggaaataactcgtggccccacaatgacacggagattgccaacagcacacccaacccgaagcctgcagccagcagcccggaaacaccctctgcagggcagcaagaggccaagacggaccaagcagatggacccagagagccaccgcagagtgccaggaggaagcgcagctacaagcaggccgtgagtgagctggacgaggagcagcacctggaggatgaggagctgcagccccccaggagcaagaccccttcctcaccctgcccagccagcaaggtggtacggcccctccggacctttctgcacacagtgcagaggaaccagatgctcatgaccccgacctcagccccacgcagcgtcatgaagtcctttattaagcgcaacactcccctgcgcatggaccccaagtgcagcttcgtcgagaaggagcggcagcgcctggagaatctgcggcggaaggaggaggccgagcagctgcgcaggcagaaggtggaggaggacaagcggcggcggctggaggaggtgaagctgaagcgtgaggaacgcctccgcaaggtgctgcaggcccgcgagcgggtggagcagatgaaggaggagaagaagaagcagattgagcagaagtttgctcagatcgacgagaagactgagaaggccaaggaggagcggctggcagaggagaaggccaagaaaaaggcggcggccaagaagatggaggaggtggaagcacgcaggaagcaggaagaggaggcacgtaggctcaggtggctgcagcaggaggaggaagagcggcggcaccaagagctgctgcagaagaagaaggaagaggagcaggagcggctgcggaaggcggccgaggctaagcggctggcagagcagcgggagcaggagcggcgggagcaggagcggcgcgagcaggagcggcgcgagcaggagcggcgggagcaggagcggcgcgagcaggagcgacagctggcagagcaggagcgtcggcgggagcaggagcggctccaggccgagagggagctgcaggagcgggagaaggccctgcggctgcagaaggagcagctgcagagggaactggaggagaagaagaagaaggaagagcagcagcgtctggctgagcggcagctgcaggaggagcaagagaagaaagccaaggaggcagcaggggccagcaaggccctgaatgtgactgtggacgtgcagtctccagcttgtacctcatatcagatgactccgcaagggcacagggcccctcccaagatcaacccagataactacgggatggatctgaatagcgacgactccaccgatgatgaggcccatccccggaagcccatccccacctgggcccgaggcaccccgctcagccaggctatcattcaccagtactaccacccaccgaaccttctggagctctttggaaccattctcccactggacttggaggatatcttcaagaagagcaagccccgctatcacaagcgcaccagctctgctgtctggaactcaccgcccctgcagggcgccagggtccccagcagcctggcctacagcctgaagaagcactgaggctggcctgcggccttcttggcagcctcgcctcctgtccatgtctatctgtctgtctgtcggtctctgtcttggtctgttgccctccttcttggcatgccattgtggagggcttggccaggtgtatataaacgtcctctgtgctgggtgtttctgctgcaggtggcaggtggccccaggcctgtttggaggatgggctgggtgggtgggtggggaagaaatgggcccagccccacatggcctgcagacagtgctctgtaaatagttgttttaatttagctgaatgttagcattttagtctttggcattttagcgtttgggaggtagattaataaagtatattccttcaagcctgctgttgataccatgaagactgggcgcctcagtcccagccctgtagctgtgtgtcttgggccaccagtggcctgcaggacgaaggtactgttccatcacctgcggtgtgcctcaggatcaccaggtgcaggcccccaccctcggagatgctgctgcagtgagtggttccactgcctggataacccttgaggaacacgtcagttactgtcacgatggggcaggtggagctccttcctattttttggggtgctccctgtttgtaaaggggagtttgttcattgggaaagacctgggtcttgacacggccctgccacttagtcccctaccctctccattccccaggctccacccgtgctgctcaggtgcaaatggacttgagagcatctatgtgctggtgaagcatgaggtctgagtagaaaaggggtatcccttgagaccaccttgggaccagtgcttgcaagcagcgagatatttccccagcaaaaccaggcagctgctaattaaatgcttagaaccaatgaaagctggctgtggtcctgcctgtgagctgcctactgctgccttctgaatgcatatatctgctactgtagccccgggttgtcaaactatggcctgtgggccaaatccagccacagtcggttctttaaagtt

SEQ ID NO: 33062 - DNA, 2757 bp, Artificial Sequence
  derived and/or modified sequence
atgggcaccaccgcccccggccccatccacctgctggagctgtgcgaccagaaattaatggaatttttgtgtaacatggacaataaagaccttgtttggctggaggaaatccaggaagaggctgaaagaatgtttactcgcgaattctcaaaggagcctgagcttatgccgaagaccccctctcagaagaaccggcggaagaaacgcagaattagctacgtccaagacgagaatagagacccaattaggcgaaggctgtcccggcgtaagtctcgctcaagccaactctcatcacgcagactgaggtccaaagatagtgtggaaaaacttgcaactgtcgtcggcgaaaacggctctgtccttcggcgggtcacacgcgccgctgctgccgccgctgctgcaactatggctctcgctgccccaagctccccgacacccgagtccccgacaatgctgacaaaaaagcccgaggataaccatacccagtgccaactggtgccggtcgtagagattggtatttcggagcgccaaaatgccgagcagcatgtgacgcaattgatgtccaccgagccattaccaagaactctcagccctactcccgcctccgcgacggcacccacgtcacagggcattcctacatcagatgaggagagtacccccaaaaagtccaaggctcgaatccttgaaagcattactgtgagtagcctcatggccactccacaggatccgaagggccagggtgtggggacggggcgcagtgctagcaaacttaggatcgcgcaagtgtcgcctggacctcgcgattctcctgcattccccgattctccatggagagagcgggtcctggcgccgatactgcctgataacttttccacaccaactgggagtcggactgatagccagagcgtgcgacactcccctatagcccccagttcacccagcccccaagttctggctcaaaaatatagcctagtagccaagcaggaatccgtcgtgaggagggcaagcaggcgtctcgccaagaaaacggccgaagagcctgcagcctccggcaggattatctgccatagttacctcgaacggcttttgaacgtggaggttccccaaaaggtcgggagcgaacaaaaggagcctccggaggaggcggagcccgtggccgcggctgagccggaggtccctgagaataacgggaacaatagttggccccacaacgatacagagatcgccaattcaacccctaatcctaagcctgccgcctcttctccggagacgccctctgctggtcagcaggaagccaagaccgatcaggcagacggacctcgagagcctcctcagtcggctcggcgtaagcgatcctacaagcaggccgtgtccgagctggatgaagagcagcacctggaggacgaggagctgcaacctcccaggtccaaaactccatcatctccctgtccggctagtaaggtggtgaggcccctgcgtacttttctccacaccgtacaacgtaaccagatgctgatgacccctaccagtgccccaagatcagttatgaaatcatttataaaacgcaacacgccgcttaggatggaccccaagtgtagttttgtcgagaaggaacgccagcggctcgagaatctgcggcgtaaagaagaggccgagcagctacggcgtcagaaggtcgaagaggacaagcgacgccggctagaggaggtgaaactgaagcgggaggagcgattgagaaaggtcctgcaggccagggaacgcgtggagcagatgaaggaagagaaaaagaaacagatcgagcagaagttcgcccaaattgacgagaaaacagagaaagccaaggaggagcgtcttgccgaagaaaaagccaagaaaaaggccgcagccaaaaaaatggaggaggtcgaagcccggagaaagcaggaggaagaagcacgccgactgagatggctccagcaggaagaagaagagcgccgacaccaggagctgttacagaagaagaaggaggaagaacaggaacgtcttcgaaaagccgccgaggcgaagcggcttgctgagcagagagagcaggagagacgggaacaggaacgtcgggaacaagagcgacgtgaacaggagaggagggaacaggagcggcgcgagcaggaacgccagctcgctgaacaggaacgtcgcagagagcaagaaagactgcaggctgagcgtgaattgcaggagcgagagaaagccttgagactacagaaggaacaactgcagagggaattagaagaaaaaaagaagaaggaggagcaacagagactcgccgagaggcagctgcaggaagagcaggagaagaaggcaaaggaggcagcgggagcgtccaaggccttaaatgtcactgttgatgtgcagtcaccggcctgcacttcatatcaaatgacaccgcaaggccaccgtgctccacctaagatcaatcccgacaactacgggatggacttaaattccgacgactccacggatgatgaagcccacccaaggaagcccattcccacctgggcaaggggtacgcccctgagccaggcgatcattcatcagtactatcatccccctaatctgctggagctgtttgggacaatactgccgttggacctggaggatatcttcaagaaaagcaaaccaagataccacaagcgtacgagctcagccgtttggaacagcccacccctgcagggggcccgggttccatccagcctggcctactccctcaaaaagcactag

SEQ ID NO: 33063 - DNA, 2757 bp, Artificial Sequence
  derived and/or modified sequence
atgggcaccactgcaccaggtcctatccatcttttggaactgtgtgatcagaagctcatggagttcttatgcaatatggacaacaaggacctcgtatggctggaagagatacaggaggaggctgagcgcatgtttactcgtgaattttctaaggaacctgaattgatgcccaaaacaccaagccagaagaacagacgaaagaagcgccgtatttcatatgtgcaggacgagaatcgggacccaatccggaggcggctgagccggagaaaaagcaggagttctcagctttctagtagacgtctgcggagtaaggattcagtcgagaagctagccaccgtcgtcggggaaaatggatccgtcctgaggagggtgacccgggcagccgctgccgctgcagccgctaccatggccctggctgcgccaagtagtcccacaccagaatcacctacaatgctcaccaaaaagcccgaggacaatcatacccaatgccagcttgtccccgttgtggaaatcggtatttccgagcgccagaacgccgagcaacacgttacccagcttatgtcaacagagccacttcctaggacgctctccccaacccctgcaagcgccactgcacccacttcccagggtattcccacatccgatgaggaaagcacccccaagaaatcaaaggcacgcattctagagtcaattaccgtgtcttcactcatggctaccccgcaggacccaaagggccagggcgtggggacaggcaggtccgcgagtaagctaagaatcgcccaggtctctcctgggccacgcgactcacctgcgtttccagattcgccctggagggagcgggtgcttgccccaatactccctgataacttctcaacccctaccggatcacgaacagatagccagtccgtgagacattcccccattgcccctagcagcccctcgccccaggtcctggcacagaaatactcattggttgcaaagcaggagtcagtcgttagaagagctagtcgcagactggcaaagaaaacagctgaggaacccgctgccagtggcaggattatatgccattcatacctcgagagactcctaaatgtggaggtccctcagaaggtaggctcagagcagaaagagccaccagaggaagctgaacctgtggccgctgctgaacctgaggttccagaaaataatggcaacaattcctggccacataacgacaccgagattgctaacagcacacccaaccctaagcccgctgcctctagtcccgagactccttcagctggccagcaagaagccaaaacagaccaggccgatggcccaagagaacctccgcagagcgcccgacgcaagagatcctataaacaggctgtaagcgaacttgatgaggagcaacacctagaggatgaagagctacagcccccacgtagtaaaactccctcaagtccttgccccgctagcaaagtggttcgtccgctgcgaacattcttgcacacggttcagcggaatcaaatgctgatgacccccacgtccgcaccccgatctgtgatgaagtccttcatcaaaaggaacacccccctgcgaatggatcccaagtgcagtttcgtggagaaagaacgtcagagactggaaaatctaaggaggaaggaggaagctgagcagttgcgcaggcaaaaagtggaagaggataagaggcgtcgcctggaagaggtcaagctgaaaagggaggagcgtctgcggaaggtactgcaggctcgggaaagggtggagcagatgaaagaagaaaagaagaaacaaatcgagcagaagtttgcacagatcgacgaaaagactgaaaaagccaaggaggagcggctggcagaagagaaagcaaaaaaaaaagccgcagccaagaagatggaagaggtggaggcaagacgcaaacaagaagaggaagccaggcggctacgatggctgcagcaagaagaggaggaaagaagacaccaggagctgctccagaaaaagaaggaggaggagcaagaaaggttgcgaaaagctgctgaggcaaagcgcctcgcagaacagagggaacaggagaggcgcgagcaggagcggcgtgagcaggagcgccgtgaacaggaacgtcgggagcaggaacgacgagaacaagagcgtcagctggccgaacaagaaaggcggcgtgaacaggagcgcttgcaggcagagcgagaactccaggagagagagaaggccctgcgcctgcagaaagagcagttgcaacgcgaactggaagaaaagaagaagaaggaggaacaacaacgtcttgccgagcgccagctgcaagaggagcaagagaagaaggctaaggaagccgcaggtgcttccaaggctctgaacgtcactgtggatgtgcagtcccccgcatgtactagctaccagatgactccccagggtcacagggcgccacccaaaattaacccagacaattacggcatggacctgaattctgacgactccacggatgacgaggcacaccctcggaagcctattcccacatgggccaggggcacgcccctgagccaggccataattcaccagtattatcatccccctaatttgctcgagctctttggaactattcttccgctagatctggaagacatatttaagaaaagcaaacctagataccataagaggacatcctctgcagtgtggaacagtccccctctccagggagctagggtgccgtcctccctggcctattctctaaagaaacactag

SEQ ID NO: 33064 - protein, 471 aa, Artificial Sequence
  derived and/or modified sequence
MEFDCEGLRRLLGKYKFRDLTVEELRNVNVFFPHFKYSMDTYVFKDSSQKDLLNFTGTIPVMYQGNTYNIPIRFWILDSHPFAPPICFLKPTANMGILVGKHVDAQGRIYLPYLQNWSHPKSVIVGLIKEMIAKFQEELPMYSLSSSDEARQVDLLAYIAKITEGVSDTNSKSWANHENKTVNKITVVGGGELGIACTLAISAKGIADRLVLLDLSEGTKGATMDLEIFNLPNVEISKDLSASAHSKVVIFTVNSLGSSQSYLDVVQSNVDMFRALVPALGHYSQHSVLLVASQPVEIMTYVTWKLSTFPANRVIGIGCNLDSQRLQYIITNVLKAQTSGKEVWVIGEQGEDKVLTWSGQEEVVSHTSQVQLSNRAMELLRVKGQRSWSVGLSVADMVDSIVNNKKKVHSVSALAKGYYDINSEVFLSLPCILGTNGVSEVIKTTLKEDTVTEKLQSSASSIHSLQQQLKL

SEQ ID NO: 33065 - DNA, 1416 bp, Artificial Sequence
  derived and/or modified sequence
atggagttcgactgcgagggcctgagaagactgctgggcaagtacaagttcagagacctgaccgtggaggagctgagaaacgtgaacgtgttcttcccccacttcaagtacagcatggacacctacgtgttcaaggacagcagccagaaggacctgctgaacttcaccggcaccatccccgtgatgtaccagggcaacacctacaacatccccatcagattctggatcctggacagccaccccttcgccccccccatctgcttcctgaagcccaccgccaacatgggcatcctggtgggcaagcacgtggacgcccagggcagaatctacctgccctacctgcagaactggagccaccccaagagcgtgatcgtgggcctgatcaaggagatgatcgccaagttccaggaggagctgcccatgtacagcctgagcagcagcgacgaggccagacaggtggacctgctggcctacatcgccaagatcaccgagggcgtgagcgacaccaacagcaagagctgggccaaccacgagaacaagaccgtgaacaagatcaccgtggtgggcggcggcgagctgggcatcgcctgcaccctggccatcagcgccaagggcatcgccgacagactggtgctgctggacctgagcgagggcaccaagggcgccaccatggacctggagatcttcaacctgcccaacgtggagatcagcaaggacctgagcgccagcgcccacagcaaggtggtgatcttcaccgtgaacagcctgggcagcagccagagctacctggacgtggtgcagagcaacgtggacatgttcagagccctggtgcccgccctgggccactacagccagcacagcgtgctgctggtggccagccagcccgtggagatcatgacctacgtgacctggaagctgagcaccttccccgccaacagagtgatcggcatcggctgcaacctggacagccagagactgcagtacatcatcaccaacgtgctgaaggcccagaccagcggcaaggaggtgtgggtgatcggcgagcagggcgaggacaaggtgctgacctggagcggccaggaggaggtggtgagccacaccagccaggtgcagctgagcaacagagccatggagctgctgagagtgaagggccagagaagctggagcgtgggcctgagcgtggccgacatggtggacagcatcgtgaacaacaagaagaaggtgcacagcgtgagcgccctggccaagggctactacgacatcaacagcgaggtgttcctgagcctgccctgcatcctgggcaccaacggcgtgagcgaggtgatcaagaccaccctgaaggaggacaccgtgaccgagaagctgcagagcagcgccagcagcatccacagcctgcagcagcagctgaagctgtag

SEQ ID NO: 33066 - DNA, 1416 bp, Artificial Sequence
  derived and/or modified sequence
atggagtttgactgcgaaggtctgagacggctactcggaaaatataagtttagagatctcactgtggaggaactaagaaacgtcaatgttttctttccccactttaaatactcaatggacacttacgtgttcaaagactctagccagaaggatctcctcaacttcacggggaccatacctgttatgtatcagggcaacacgtataacataccaataagattctggattcttgacagtcatccctttgcacctcctatatgctttcttaaacctaccgccaatatgggcatactggtcggtaaacacgtggatgctcagggaagaatttaccttccttatttgcaaaactggtctcaccccaagtctgtcattgttgggttgattaaagagatgatcgctaagttccaagaagagctgccaatgtacagtctgtcgtcttctgatgaagctagacaggtcgacctgctggcctacattgccaagattaccgagggggtgtcagataccaacagcaaatcttgggctaaccatgagaacaagaccgtcaacaagattacagtggttggcgggggggaactgggcatcgcttgcacgctagccatctcagctaagggtatcgcggaccggttggtgctgctagatttatccgagggcaccaaaggagcgaccatggatctcgagatcttcaatctgcctaacgtcgaaatttcaaaggacctttctgcatcagcacattcgaaggttgttatcttcaccgtgaacagccttggtagttctcagagctatctggacgttgttcagtccaacgtggacatgttcagagcactggtcccggcattgggacactactcacaacatagcgtgcttctcgtcgcctcgcagcctgttgagataatgacctacgtcacttggaagcttagcaccttccccgccaatcgtgttatagggattggatgtaatttggacagccagcgcttgcagtatatcattaccaatgtattaaaggctcaaacatctggtaaagaggtttgggtcattggagaacagggcgaggacaaggtgttgacttggagcggtcaagaagaagtggtgtcacacacaagccaggtgcagctgtcaaacagagcaatggagcttcttcgggtcaagggccagaggagctggtcagtcggcctgtctgtcgcagatatggtggactcgattgtgaataataaaaagaaggtgcatagcgtgtccgcgcttgctaagggatactacgacatcaattccgaggtttttttgtctttgccttgtatcttaggcacaaacggagtgtcagaagtcattaagaccactctgaaagaagatactgtcacagaaaagctccagagttctgcgtcatccattcattccctccagcagcagttgaagctttag

SEQ ID NO: 33067 - DNA, 1416 bp, Artificial Sequence
  derived and/or modified sequence
atggagtttgactgtgagggcctgcggcggctgctgggcaagtacaagttccgggacctgactgtggaggagctgagaaatgtgaatgtgttcttcccccacttcaagtacagcatggacacctacgtgttcaaggacagcagccagaaggacctgctgaacttcaccggcaccatccctgtgatgtaccagggcaacacctacaacatccccatccgcttctggatcctggacagccacccctttgccccacccatctgcttcctgaagcccacagccaacatgggcatcctggtgggcaagcacgtggatgcccagggccgcatctacctgccctacctgcagaactggagccaccccaagagcgtcatcgtgggcctcatcaaggagatgattgccaagttccaggaggagctgcccatgtacagcctgagcagcagtgatgaggcccggcaggtggacctgctggcctacatcgccaagatcacagaaggagtgtctgacaccaacagcaagtcctgggccaaccacgagaacaagacagtgaacaagatcaccgtggtgggcggcggggagctgggcatcgcctgcaccctggccatcagcgccaagggcattgctgaccggctggtgctgctggacctgtctgagggcaccaagggggccaccatggacctggagatcttcaacctgcccaacgtggagatcagcaaggacctgagcgccagcgcccacagcaaggtggtgatcttcaccgtgaacagcctgggcagcagccagagctacctggatgtggtgcagagcaatgtggacatgttccgggccctggtgcctgccctgggccactacagccagcacagcgtgctgctggtggccagccagcctgtggagatcatgacctacgtgacctggaagctgagcaccttccctgccaacagagtgattggaattggctgcaacctggacagccagaggctgcagtacatcatcaccaacgtgctgaaggcccagaccagcggcaaggaggtgtgggtgattggagagcagggcgaggacaaggtgctgacctggagcggccaggaggaggtggtgagccacaccagccaggtgcagctgagcaacagagccatggagctgctgcgggtgaagggccagaggtcctggagcgtgggcctgtctgtggccgacatggtggacagcatcgtgaacaacaagaagaaggtgcacagcgtgtctgccctggccaagggctactatgacatcaacagcgaggtgttcctgagcctgccctgcatcctgggcaccaacggggtgtctgaggtgatcaagaccaccctgaaggaggacacagtgacagagaagctgcagagcagcgccagcagcatccacagcctgcagcagcagctgaagctgtag

SEQ ID NO: 33068 - DNA, 1416 bp, Artificial Sequence
  derived and/or modified sequence
atggagttcgactgcgagggcctgcggcggctgctgggcaagtacaaattcagggatctgacagtggaggaactgaggaacgttaatgtatttttccctcatttcaagtactcaatggacacttacgtctttaaagactcctcacagaaggatctgctcaattttaccgggacgatcccagtcatgtatcagggcaacacctacaatattcctattcgcttttggatacttgattctcacccgtttgctccacccatctgcttcctgaaaccaactgccaatatggggatcctggtcggcaaacacgtcgacgcccagggccgcatttatcttccctacctgcagaactggagtcaccccaaaagcgtcattgtggggcttataaaggaaatgatagccaagttccaggaggagttgccaatgtactccctgagcagcagtgatgaggctcgccaggtggatctgctggcatacatcgccaaaatcacagaaggagtgtctgacactaactccaagtcgtgggcaaatcatgaaaataagaccgtcaacaagatcacagtggtgggcggaggagaacttgggatagcttgcaccctggctattagcgctaagggaatcgctgatagactggtgctcctagacctgtccgaaggcaccaagggggccactatggatttagagatcttcaacctacccaacgtcgagattagcaaagaccttagcgcttccgcacactctaaggttgtgatcttcaccgtaaatagcctgggtagcagccaaagctatctggacgtcgtgcagagcaacgtggacatgttcagagcattagtcccagccctaggccactatagtcaacattctgtactgttggtggcctctcagcccgtagagataatgacatacgtgacctggaaactgtctacgtttccagctaatagagtgattggcatagggtgcaatcttgatagtcagagactgcagtatattatcaccaacgtgttaaaggcccagacctcaggcaaagaggtgtgggtgatcggcgagcaaggcgaagataaggtgcttacgtggagcggccaggaggaggtggtaagtcacaccagccaagtgcagctgtcaaacagggccatggagctgttgagagtgaaggggcagaggtcatggagcgtgggcctgtccgtggccgatatggtcgattctatcgtgaataataaaaagaaggtgcactccgtctcagcactcgcaaaaggctattacgatatcaatagtgaagtcttcctgagcctgccttgcatcctgggaaccaacggagtctctgaggttattaagactacccttaaggaggatactgtcactgaaaagctgcagagctcagcatctagtattcactctttacagcagcagctcaagctgtag

SEQ ID NO: 33069 - DNA, 1416 bp, Artificial Sequence
  derived and/or modified sequence
atggaattcgattgcgaaggccttcggcgactgctcggaaaatacaagtttagagatctgaccgtggaggagctgagaaacgtgaatgtgttttttccacactttaagtatagtatggatacctatgtatttaaggattcttcacagaaggatttgctgaacttcactgggactattccggtcatgtaccaaggcaatacgtacaatatccctatccgtttttggatcctggacagccatccttttgcaccacctatctgttttttgaagccaacagccaatatggggatcctggtgggtaagcatgtggacgcacaagggcgtatctacctgccctacttacaaaattggtcccacccgaaatcagttatcgtgggtcttatcaaggagatgatcgccaaatttcaggaagagctccctatgtacagtctgagctcaagtgacgaagcacgccaggtcgatctgctggcttacattgcgaagatcacggaaggggtgtcggataccaattcaaaaagctgggccaaccacgagaataaaacagtcaacaaaattacggtagtgggcggaggggagctcgggatcgcttgcactctggccattagtgccaaggggatcgcagatcgtcttgtgctactagacctcagcgaggggaccaagggagctaccatggacctggaaatcttcaacttaccaaatgtcgaaatttccaaagatctgtctgcttccgcacactccaaggttgtcatctttacagtcaattctctgggatccagtcagtcttacctggacgtcgttcagtcaaacgtcgatatgttccgggcactagtgcccgcattgggacactactcacaacacagcgttctgttagtggcttcccagccggttgagattatgacatatgtgacctggaaactgagtacattcccagcaaatcgagtgatcggaattgggtgtaatttggattcccagcgattgcagtatatcatcactaacgtccttaaagcccagacttccggcaaggaagtgtgggttattggggagcagggggaggacaaggtactgacatggagcggccaagaagaggttgtgtcacatactagtcaggtccagctctccaatcgcgcaatggaactactacgcgtgaaaggacagagatcatggtctgtgggtctgtccgtggccgatatggtagacagtatcgtaaacaataaaaagaaggtgcactcagtcagtgcgctcgccaagggatattacgacattaattctgaggtcttcttgtctttgccctgtatcctcggcacaaatggagtgtccgaggtgatcaagaccacccttaaagaggataccgttaccgagaagctgcagagctccgcctccagtattcacagtctgcagcaacagctcaaactctag

SEQ ID NO: 33070 - DNA, 2030 bp, Artificial Sequence
  derived and/or modified sequence
ctgggacctagctcgggaccggcctggagatggagttcgactgcgagggcctgagacggctgcttggcaagtacaagttcagggacctaactgtggaagaactaaggaatgtaaatgtatttttcccacatttcaaatattccatggacacctatgtttttaaagatagttctcagaaagacctgctgaattttactggcacaattcctgtgatgtatcagggtaatacatataacataccaattcgtttctggattttggattctcaccctttcgctccccctatttgcttcttgaagccaactgcaaatatgggaatcttagtcggaaaacatgtggatgctcaaggcagaatatatttgccctatctccaaaactggagccatcctaaatctgtcattgttggattaattaaagaaatgattgccaagtttcaagaggaacttcccatgtattctctatcatcatctgatgaggcacggcaggtagacttgctagcctatattgcaaaaatcactgaaggtgtttcagatacaaattcaaagagctgggcaaatcatgagaataaaacagtcaataaaattactgtggttggaggtggagaactcggtattgcctgcacattagcaatttcagcaaagggtattgcagacaggcttgtcctcttagacctctcagaagggactaaaggagccacgatggaccttgaaatcttcaaccttcctaatgtggagatcagcaaagatttgtctgcctctgctcattccaaggtggtgatcttcacagtcaactctttgggtagttctcagtcgtaccttgatgtggtacagagcaatgtggatatgttcagagcccttgtcccagctctgggacattatagtcaacacagtgtcctgctcgttgcatctcaaccagtggaaatcatgacctatgtaacatggaaactgagtacatttcctgcaaatcgagtgatcggaattggatgtaatctggattcacagagattacagtatattattacaaatgttttgaaggcacagacttcaggcaaagaagtatgggttattggcgagcaaggagaagacaaagtgctcacatggagtggccaagaagaagtagtgagtcatacctctcaagtgcagctgtccaacagagccatggaactgctaagagtaaaaggtcaaagatcctggtctgttggactatcagtagctgacatggttgacagtattgtaaacaataagaagaaagtgcattctgtatcagctttagcaaagggatattatgatataaatagtgaagtgtttttaagtttgccttgcatccttggaaccaatggagtatctgaagttatcaaaaccacactgaaagaagatacagttactgagaaactccaaagcagtgcatcctcaatccacagtctccaacaacagttaaaactttgattctcaaatgcaatttgagaggctggacttctacctaaagggaaaagtcatttaattttacctatatataggtttgaggatttctgtatcctgctacttacttttacaaactgcttggttaaagtagagggtttcttgattagctttgtgatgtaaatccttaaggagttatacaaggaggggaaaaattaattttatttggggttcttgagatatctatgctgttctttaaatctacagcaggggtaaacattcatctgcagtgtgcatcaatttaaatcatatatcctaaactaaaagcacaattcatacttcgggaatattttataagtaatatatctttaaaagaaaattaccctttgacttttataatcaacataagttccaggcccagtatggatttacaaaatctgtgtcagttgtacattcacaggatccacagcttaagttactaatgtttcttgtgtaaaatcctgttggtagtaatagtaaagcattgtatttcccttcttcaaattaattacctaccaaaaaatggaaaagaattttacatgcactttaaaatagtaaaatggaaagtgaatt

SEQ ID NO: 33071 - protein, 359 aa, Artificial Sequence
  derived and/or modified sequence
MDPLGPAKPQWSWRCCLTTLLFQLLMAVCFFSYLRVSQDDPTVYPNGSRFPDSTGTPAHSIPLILLWTWPFNKPIALPRCSEMVPGTADCNITADRKVYPQADAVIVHHREVMYNPSAQLPRSPRRQGQRWIWFSMESPSHCWQLKAMDGYFNLTMSYRSDSDIFTPYGWLEPWSGQPAHPPLNLSAKTELVAWAVSNWGPNSARVRYYQSLQAHLKVDVYGRSHKPLPQGTMMETLSRYKFYLAFENSLHPDYITEKLWRNALEAWAVPVVLGPSRSNYERFLPPDAFIHVDDFQSPKDLARYLQELDKDHARYLSYFRWRETLRPRSFSWALAFCKACWKLQEESRYQTRGIAAWFT

SEQ ID NO: 33072 - protein, 30 aa, Artificial Sequence
  derived and/or modified sequence
MDPLGPAKPQWSWRCCLTTLLFQLLMAVCF

SEQ ID NO: 33073 - protein, 137 aa, Artificial Sequence
  derived and/or modified sequence
MDPLGPAKPQWSWRCCLTTLLFQLLMAVCFFSYLRVSQDDPTVYPNGSRFPDSTGTPAHSIPLILLWTWPFNKPIALPRCSEMVPGTADCNITADRKVYPQADAVIVHHREVMYNPSAQLPRSPRRQGQRWIWFSME

SEQ ID NO: 33074 - protein, 66 aa, Artificial Sequence
  derived and/or modified sequence
MDPLGPAKPQWSWRCCLTTLLFQLLMAVCFFSYLRVSQDDPTVYPNGSRFPDSTGTPAHSIPLILL

SEQ ID NO: 33075 - protein, 45 aa, Artificial Sequence
  derived and/or modified sequence
MDPLGPAKPQWSWRCCLTTLLFQLLMAVCFFSYLRVSQDDPTVYP

SEQ ID NO: 33076 - DNA, 2847 bp, Artificial Sequence
  derived and/or modified sequence
agatcatttctctccattccaggaagtttgcatagctccctggacttctgctttgcactgccctgcaggagtgggtggggaaaggaagtggctttgaggcacacagaggggcttgttgaggccaccggaggaagcttctgccaccaatatgggacctgtgcccagcctaccagaagagagcatctgaaaacatgtatcgacatggtaacccctctgcttgaagcctcacatggctccctattgccttggtgctgaacaccctatggctgaccgtggcccagcctctgcaacagctctgcctcctctccagtggtgaagacccagcctgctgagactcctcctgcagttcctcaacatgcctgcatttctgctgcctcagggcctttgcgaaggttgttccttgtaactggaatgcccttccatcccttttttattcaaaaggctgcaattttaattgaagaaagttcccttccaaggttcatgagttgcctgacttgcccaccggtttcctgcaagatcccttggcctggcacttagtgctcaggaaatatttggtgatgggccaactgagtgagaaggtgggatctggtgggaaggaaagcggaaaggtagaaattctgctcacttcctcattcccacctcccaaggaacccctggtgtccctgtggaacccgctttgggaaccggtggttcaggtcagccttttcactttgtactcaaagccacatcgcattgaagccacaggtggggcaaggtcatgcatgacctgagtctccaaatcccttcaccctgtttggttctgcaacggggattaggggagccccacgatttgttttcaaaggatgtccgggctccaggacaggatgccctgggtcacctgatgacaggtgtggtggttggaaagggcctggtttcagctccgggtacacttcctccttccttctgctgcgtggtgtggcctcttccacgtcctcagaatccagctgttactccgtccgcggcctctcagctctagggccctctgcacactggcccccccagatactctgacccatggatcccctgggcccggccaagccacagtggtcgtggcgctgctgtctgaccacgctgctgtttcagctgctgatggctgtgtgtttcttctcctatctgcgtgtgtctcaagacgatcccactgtgtaccctaatgggtcccgcttcccagacagcacagggacccccgcccactccatccccctgatcctgctgtggacgtggccttttaacaaacccatagctctgccccgctgctcagagatggtgcctggcacggctgactgcaacatcactgccgaccgcaaggtgtatccacaggcagacgcggtcatcgtgcaccaccgagaggtcatgtacaaccccagtgcccagctcccacgctccccgaggcggcaggggcagcgatggatctggttcagcatggagtccccaagccactgctggcagctgaaagccatggacggatacttcaatctcaccatgtcctaccgcagcgactccgacatcttcacgccctacggctggctggagccgtggtccggccagcctgcccacccaccgctcaacctctcggccaagaccgagctggtggcctgggcagtgtccaactgggggccaaactccgccagggtgcgctactaccagagcctgcaggcccatctcaaggtggacgtgtacggacgctcccacaagcccctgccccagggaaccatgatggagacgctgtcccggtacaagttctatctggccttcgagaactccttgcaccccgactacatcaccgagaagctgtggaggaacgccctggaggcctgggccgtgcccgtggtgctgggccccagcagaagcaactacgagaggttcctgccacccgacgccttcatccacgtggacgacttccagagccccaaggacctggcccggtacctgcaggagctggacaaggaccacgcccgctacctgagctactttcgctggcgggagacgctgcggcctcgctccttcagctgggcactcgctttctgcaaggcctgctggaaactgcaggaggaatccaggtaccagacacgcggcatagcggcttggttcacctgagaggctggtgtggggcctgggctgccaggaacctcattttcctggggcctcacctgagtgggggcctcatctacctaaggactcgtttgcctgaagcttcacctgcctgaggactcacctgcctgggacggtcacctgttgcagcttcacctgcctggggattcacctacctgggtcctcactttcctggggcctcacctgctggagtcttcggtggccaggtatgtcccttacctgggatttcacatgctggcttccaggagcgtcccctgcggaagcctggcctgctggggatgtctcctggggactttgcctactggggacctcggctgttggggactttacctgctgggacctgctcccagagaccttccacactgaatctcacctgctaggagcctcacctgctggggacctcaccctggagggcactgggccctgggaactggcacccatggggccccacccatgagtgatggttctggctgatttgtttgtgatgttgttagccgcctgtgaggggtgcagagagataatcaccgcaccgtttccagatgtaatactgcaaagaaaaccgatgatgaggccgggtgcggtggctcacacctgtaatcccagcactttgggaggccgaggcaggcggatcacaaggtcaggagatcgagaccatcctggccaatatggtgaaacccgtctctactaaaaatacaaaaa

SEQ ID NO: 33077 - DNA, 3137 bp, Artificial Sequence
  derived and/or modified sequence
aaaaccagtattccagatcatttctctccattccaggaagtttgcatagctccctggacttctgctttgcactgccctgcaggagtgggtggggaaaggaagtggctttgaggcacacagaggggcttgttgaggccaccggaggaagcttctgccaccaatatgggacctgtgcccagcctaccagaagagagcatctgaaaacatgtatcgacatggtaacccctctgcttgaagcctcacatggctccctattgccttggtgctgaacaccctatggctgaccgtggcccagcctctgcaacagctctgcctcctctccagtggtgaagacccagcctgctgagactcctcctgcagttcctcaacatgcctgcatttctgctgcctcagggcctttgcgaaggttgttccttgtaactggaatgcccttccatcccttttttattcaaaaggctgcaattttaattgaagaaagttcccttccaaggttcatgagttgcctgacttgcccaccggtttcctgcaagatcccttggcctggcacttagtgctcaggaaatatttggtgatgggccaactgagtgagaaggtgggatctggtgggaaggaaagcggaaaggtagaaattctgctcacttcctcattcccacctcccaaggaacccctggtgtccctgtggaacccgctttgggaaccggtggttcaggtcagccttttcactttgtactcaaagccacatcgcattgaagccacaggtggggcaaggtcatgcatgacctgagtctccaaatcccttcaccctgtttggttctgcaacggggattaggggagccccacgatttgttttcaaaggatgtccgggctccaggacaggatgccctgggtcacctgatgacaggtgtggtggttggaaagggcctggtttcagctccgggtacacttcctccttccttctgctgcgtggtgtggcctcttccacgtcctcagaatccagctgttactccgtccgcggcctctcagctctagggccctctgcacactggcccccccagtgtcacgggcatccagacgggatccagtgcatcctcttttagaagaaaggcctgtctccagatccccgagtccctctagcatctcccagaaggtgtcagacgcagcagtgtccagggagcggcagcagatactctgacccatggatcccctgggcccggccaagccacagtggtcgtggcgctgctgtctgaccacgctgctgtttcagctgctgatggctgtgtgtttcttctcctatctgcgtgtgtctcaagacgatcccactgtgtaccctaatgggtcccgcttcccagacagcacagggacccccgcccactccatccccctgatcctgctgtggacgtggccttttaacaaacccatagctctgccccgctgctcagagatggtgcctggcacggctgactgcaacatcactgccgaccgcaaggtgtatccacaggcagacgcggtcatcgtgcaccaccgagaggtcatgtacaaccccagtgcccagctcccacgctccccgaggcggcaggggcagcgatggatctggttcagcatggagtccccaagccactgctggcagctgaaagccatggacggatacttcaatctcaccatgtcctaccgcagcgactccgacatcttcacgccctacggctggctggagccgtggtccggccagcctgcccacccaccgctcaacctctcggccaagaccgagctggtggcctgggcagtgtccaactgggggccaaactccgccagggtgcgctactaccagagcctgcaggcccatctcaaggtggacgtgtacggacgctcccacaagcccctgccccagggaaccatgatggagacgctgtcccggtacaagttctatctggccttcgagaactccttgcaccccgactacatcaccgagaagctgtggaggaacgccctggaggcctgggccgtgcccgtggtgctgggccccagcagaagcaactacgagaggttcctgccacccgacgccttcatccacgtggacgacttccagagccccaaggacctggcccggtacctgcaggagctggacaaggaccacgcccgctacctgagctactttcgctggcgggagacgctgcggcctcgctccttcagctgggcactcgctttctgcaaggcctgctggaaactgcaggaggaatccaggtaccagacacgcggcatagcggcttggttcacctgagaggctggtgtggggcctgggctgccaggaacctcattttcctggggcctcacctgagtgggggcctcatctacctaaggactcgtttgcctgaagcttcacctgcctgaggactcacctgcctgggacggtcacctgttgcagcttcacctgcctggggattcacctacctgggtcctcactttcctggggcctcacctgctggagtcttcggtggccaggtatgtcccttacctgggatttcacatgctggcttccaggagcgtcccctgcggaagcctggcctgctggggatgtctcctggggactttgcctactggggacctcggctgttggggactttacctgctgggacctgctcccagagaccttccacactgaatctcacctgctaggagcctcacctgctggggacctcaccctggagggcactgggccctgggaactggcacccatggggccccacccatgagtgatggttctggctgatttgtttgtgatgttgttagccgcctgtgaggggtgcagagagataatcaccgcaccgtttccagatgtaatactgcaaagaaaaccgatgatgaggccgggtgcggtggctcacacctgtaatcccagcactttgggaggccgaggcaggcggatcacaaggtcaggagatcgagaccatcctggccaatatggtgaaacccgtctctactaaaaatacaaaaatttgccgggcgtggtggtgcatgcctgtaatcccagctacttgggaagctgaggcaggagaatcgcttgaaccagagagtcggaggttgcagtaagccgagatcgcgccactgcactccagcctggcgacagagcgagactctgtctc

SEQ ID NO: 33078 - DNA, 2598 bp, Artificial Sequence
  derived and/or modified sequence
gtttgcatagctccctggacttctgctttgcactgccctgcaggagtgggtggggaaaggaagtggctttgaggcacacagaggggcttgttgaggccaccggaggaagcttctgccaccaatatgggacctgtgcccagcctaccagaagagagcatctgaaaacatgtatcgacatggtaacccctctgcttgaagcctcacatggctccctattgccttggtgctgaacaccctatggctgaccgtggcccagcctctgcaacagctctgcctcctctccagtgccttttcactttgtactcaaagccacatcgcattgaagccacaggtggggcaaggtcatgcatgacctgagtctccaaatcccttcaccctgtttggttctgcaacggggattaggggagccccacgatttgttttcaaaggatgtccgggctccaggacaggatgccctgggtcacctgatgacaggtgtggtggttggaaagggcctggtttcagctccgggtacacttcctccttccttctgctgcgtggtgtggcctcttccacgtcctcagaatccagctgttactccgtccgcggcctctcagctctagggccctctgcacactggcccccccagatactctgacccatggatcccctgggcccggccaagccacagtggtcgtggcgctgctgtctgaccacgctgctgtttcagctgctgatggctgtgtgtttcttctcctatctgcgtgtgtctcaagacgatcccactgtgtaccctaatgggtcccgcttcccagacagcacagggacccccgcccactccatccccctgatcctgctgtggacgtggccttttaacaaacccatagctctgccccgctgctcagagatggtgcctggcacggctgactgcaacatcactgccgaccgcaaggtgtatccacaggcagacgcggtcatcgtgcaccaccgagaggtcatgtacaaccccagtgcccagctcccacgctccccgaggcggcaggggcagcgatggatctggttcagcatggagtccccaagccactgctggcagctgaaagccatggacggatacttcaatctcaccatgtcctaccgcagcgactccgacatcttcacgccctacggctggctggagccgtggtccggccagcctgcccacccaccgctcaacctctcggccaagaccgagctggtggcctgggcagtgtccaactgggggccaaactccgccagggtgcgctactaccagagcctgcaggcccatctcaaggtggacgtgtacggacgctcccacaagcccctgccccagggaaccatgatggagacgctgtcccggtacaagttctatctggccttcgagaactccttgcaccccgactacatcaccgagaagctgtggaggaacgccctggaggcctgggccgtgcccgtggtgctgggccccagcagaagcaactacgagaggttcctgccacccgacgccttcatccacgtggacgacttccagagccccaaggacctggcccggtacctgcaggagctggacaaggaccacgcccgctacctgagctactttcgctggcgggagacgctgcggcctcgctccttcagctgggcactcgctttctgcaaggcctgctggaaactgcaggaggaatccaggtaccagacacgcggcatagcggcttggttcacctgagaggctggtgtggggcctgggctgccaggaacctcattttcctggggcctcacctgagtgggggcctcatctacctaaggactcgtttgcctgaagcttcacctgcctgaggactcacctgcctgggacggtcacctgttgcagcttcacctgcctggggattcacctacctgggtcctcactttcctggggcctcacctgctggagtcttcggtggccaggtatgtcccttacctgggatttcacatgctggcttccaggagcgtcccctgcggaagcctggcctgctggggatgtctcctggggactttgcctactggggacctcggctgttggggactttacctgctgggacctgctcccagagaccttccacactgaatctcacctgctaggagcctcacctgctggggacctcaccctggagggcactgggccctgggaactggcacccatggggccccacccatgagtgatggttctggctgatttgtttgtgatgttgttagccgcctgtgaggggtgcagagagataatcaccgcaccgtttccagatgtaatactgcaaagaaaaccgatgatgaggccgggtgcggtggctcacacctgtaatcccagcactttgggaggccgaggcaggcggatcacaaggtcaggagatcgagaccatcctggccaatatggtgaaacccgtctctactaaaaatacaaaaatttgccgggcgtggtggtgcatgcctgtaatcccagctacttgggaagctgaggcaggagaatcgcttgaaccagagagtcggaggttgcagtaagccgagatcgcgccactgcactccagcctggcgacagagcgagactctgtctcaaaaaaaaaaaaaaaa

SEQ ID NO: 33079 - DNA, 2211 bp, Artificial Sequence
  derived and/or modified sequence
gcctcttccacgtcctcagaatccagctgttactccgtccgcggcctctcagctctagggccctctgcacactggcccccccagtgtcacgggcatccagacgggatccagtgcatcctcttttagaagaaaggcctgtctccagatccccgagtccctctagcatctcccagaaggtgtcagacgcagcagtgtccagggagcggcagcagattgaggaagagtctggggacacaccagaaaaggacaggatcaagatactctgacccatggatcccctgggcccggccaagccacagtggtcgtggcgctgctgtctgaccacgctgctgtttcagctgctgatggctgtgtgtttcttctcctatctgcgtgtgtctcaagacgatcccactgtgtaccctaatgggtcccgcttcccagacagcacagggacccccgcccactccatccccctgatcctgctgtggacgtggccttttaacaaacccatagctctgccccgctgctcagagatggtgcctggcacggctgactgcaacatcactgccgaccgcaaggtgtatccacaggcagacgcggtcatcgtgcaccaccgagaggtcatgtacaaccccagtgcccagctcccacgctccccgaggcggcaggggcagcgatggatctggttcagcatggagtccccaagccactgctggcagctgaaagccatggacggatacttcaatctcaccatgtcctaccgcagcgactccgacatcttcacgccctacggctggctggagccgtggtccggccagcctgcccacccaccgctcaacctctcggccaagaccgagctggtggcctgggcagtgtccaactgggggccaaactccgccagggtgcgctactaccagagcctgcaggcccatctcaaggtggacgtgtacggacgctcccacaagcccctgccccagggaaccatgatggagacgctgtcccggtacaagttctatctggccttcgagaactccttgcaccccgactacatcaccgagaagctgtggaggaacgccctggaggcctgggccgtgcccgtggtgctgggccccagcagaagcaactacgagaggttcctgccacccgacgccttcatccacgtggacgacttccagagccccaaggacctggcccggtacctgcaggagctggacaaggaccacgcccgctacctgagctactttcgctggcgggagacgctgcggcctcgctccttcagctgggcactcgctttctgcaaggcctgctggaaactgcaggaggaatccaggtaccagacacgcggcatagcggcttggttcacctgagaggctggtgtggggcctgggctgccaggaacctcattttcctggggcctcacctgagtgggggcctcatctacctaaggactcgtttgcctgaagcttcacctgcctgaggactcacctgcctgggacggtcacctgttgcagcttcacctgcctggggattcacctacctgggtcctcactttcctggggcctcacctgctggagtcttcggtggccaggtatgtcccttacctgggatttcacatgctggcttccaggagcgtcccctgcggaagcctggcctgctggggatgtctcctggggactttgcctactggggacctcggctgttggggactttacctgctgggacctgctcccagagaccttccacactgaatctcacctgctaggagcctcacctgctggggacctcaccctggagggcactgggccctgggaactggcacccatggggccccacccatgagtgatggttctggctgatttgtttgtgatgttgttagccgcctgtgaggggtgcagagagataatcaccgcaccgtttccagatgtaatactgcaaagaaaaccgatgatgaggccgggtgcggtggctcacacctgtaatcccagcactttgggaggccgaggcaggcggatcacaaggtcaggagatcgagaccatcctggccaatatggtgaaacccgtctctactaaaaatacaaaaatttgccgggcgtggtggtgcatgcctgtaatcccagctacttgggaagctgaggcaggagaatcgcttgaaccagagagtcggaggttgcagtaagccgagatcgcgccactgcactccagcctggcgacagagcgagactctgtctc

SEQ ID NO: 33080 - DNA, 1080 bp, Artificial Sequence
  derived and/or modified sequence
atggaccctctgggacctgcaaaacctcaatggagctggagatgctgcctgaccacgttgctctttcaactgctcatggccgtttgtttctttagctaccttcgtgtatcacaggacgatccgacagtctaccctaatggaagcagatttcccgacagcaccgggactccagcgcactctataccgctcatcttgctttggacatggccttttaacaaacccattgcactgccaagatgcagtgaaatggtgcccggcacagccgactgcaatataacagctgataggaaggtgtacccccaggcagatgcggttattgtgcatcacagggaggtcatgtacaacccatcagcgcaactgcccagaagcccccgccggcagggacagaggtggatctggttcagcatggaaagtcctagccattgttggcagttgaaagcaatggatggctattttaacctgacaatgagctatagaagtgacagcgacatttttacgccgtacggatggctagaaccatggtctgggcaacctgcccaccctccactgaatctgagcgcaaagacagagctggtggcttgggccgtatcaaattggggaccgaactccgcccgggtacgctattatcagagcctacaggctcacttaaaggtggacgtgtacggtagatcccacaaaccactgcctcaaggaacgatgatggaaacactttcaaggtataaattctatctcgccttcgagaatagcttgcaccctgactacatcaccgagaagctctggaggaatgccctggaggcctgggctgttcccgttgtccttggcccctctcggagtaactacgaacgctttctgccacccgatgccttcatacacgtggacgattttcagtccccaaaggacctggcgaggtacctacaggaactggataaggaccatgcacggtacttgtcctatttcaggtggcgcgagacactgcggccccggtcctttagctgggctctcgccttttgcaaagcttgctggaagcttcaggaggagtctcgctaccagaccagagggatagccgcatggttcacttag

SEQ ID NO: 33081 - DNA, 1080 bp, Artificial Sequence
  derived and/or modified sequence
atggatccattgggtccggctaagccccagtggagttggcgatgctgcctgaccaccctcctatttcagctgttgatggcggtgtgtttcttttcttatttgcgcgtgtcacaggacgatcccacggtgtatcccaacggtagccggttcccagactcaactgggacacccgctcattcaatccccctgattttgctttggacctggccattcaataagcctatcgccctccctcgctgtagcgagatggtccccggcacggccgattgtaacattactgctgacaggaaagtttaccctcaggctgacgcagtgattgtgcaccaccgcgaggtcatgtacaacccttccgctcagctcccacggagtccgaggaggcagggtcagcggtggatctggtttagcatggaaagtcccagccactgttggcagctgaaagccatggatggatacttcaacctgacaatgagctatagatccgatagcgatatcttcactccatatggctggctggagccctggagtgggcaaccagcccaccctccactgaatttgtccgctaagacggagctagtggcgtgggcggtttccaattggggtcccaacagtgcccgcgtgagatactaccagagcctgcaagcccacctgaaggtggatgtttacgggcgaagccacaaaccactgccccaggggacaatgatggagactctgagtagatacaagttctatctggcgttcgaaaatagcttacatccggattatataacagaaaaactgtggagaaacgccttggaggcctgggcggtacccgtggtgctgggaccaagccggtctaattatgagcggttccttccccctgatgcatttatccacgtggacgatttccagtcccctaaagacctcgccaggtatctgcaggagctcgataaagaccacgcccgctatctgtcgtactttagatggagagaaacactcaggccacggtccttttcttgggcactggctttctgtaaggcttgttggaagctgcaagaagagtcccgttaccagactcgaggcattgctgcttggttcacttag

SEQ ID NO: 33082 - DNA, 1080 bp, Artificial Sequence
  derived and/or modified sequence
atggacccgctcggaccggcaaagccacaatggagctggagatgctgtctgacgactctattgttccagctactcatggccgtttgcttctttagctatctccgagtgtcccaggacgatcccacagtttatcctaacggcagtaggttccccgactccacgggtactcctgctcatagcatcccactgattctcctgtggacttggcctttcaacaaacctatcgctctccctaggtgcagtgagatggtgcccggcaccgccgactgtaacattactgccgatcgcaaagtttaccctcaggccgacgcggttattgtgcatcacagagaggtcatgtataatccatccgcacagctgcctcggtctccacgcagacaaggacaacggtggatctggttcagtatggaatccccgtctcactgctggcaattaaaggccatggatggctattttaatcttaccatgtcatatagatctgattccgatatattcacaccgtatggctggttggagccctggagcggacagccagcgcacccccctctgaacctgtcagctaagactgagcttgtggcatgggccgtctccaactggggccctaattcagctagagtgcggtactatcagtccctacaggcacacctgaaagtggatgtatacggaagatcccacaaaccattgccacagggcaccatgatggagaccctgagcagatacaagttctacctggcttttgagaactccttgcatcccgattatattaccgagaaactttggcgcaatgcgctggaagcatgggcagttccagtcgtgctggggccgtccagatcgaattacgaacggttcttgcctcccgacgccttcatccatgtagacgacttccaatccccgaaagatctggccagatacctgcaggaattggacaaagatcacgcccgatacctgtcttacttccgttggagggagacactccggccgagaagcttcagttgggcccttgccttctgcaaggcctgttggaagctgcaggaggagagtagataccagactcggggtattgcggcctggttcacttag

SEQ ID NO: 33083 - DNA, 1080 bp, Artificial Sequence
  derived and/or modified sequence
atggatccactcggccccgccaagcctcaatggtcgtggcgctgctgtctgaccaccttgttgtttcagctactcatggcggtgtgctttttctcttacctcagagtctcacaggatgatcccactgtgtacccaaacggttcaagattccctgactccacgggtacacctgcccattctataccgcttatccttctttggacctggccctttaataagccgattgcgctgcctcggtgcagcgagatggtgcctggcaccgcagactgcaacatcaccgccgataggaaggtatacccccaggcggatgctgtgatcgtacaccatcgcgaagtaatgtataatccctcggcccaactgccacgaagtcccaggcggcaaggacaacgttggatctggttctccatggaatctcctagccattgctggcaactcaaggcgatggatggttatttcaacctcacaatgtcataccggtcagattccgacatctttaccccttacggctggctcgagccgtggtcgggccaacctgcccacccacctttgaacctgtcggcaaaaacagagctagtcgcctgggcggtgtccaattggggacctaattcagccagggtaagatactaccagagcctgcaagcccacctgaaggtggacgtgtacgggcgcagtcacaagccgcttcctcaggggacaatgatggagacactgtctagatataagttctatttagcatttgagaactccctccaccctgactacattacagagaaactctggagaaatgctctggaagcatgggcagtgcctgttgtgttgggaccctctagaagcaactacgaacgctttctgccaccagacgcattcattcatgttgacgatttccagagccctaaagacttggcgcgttacctgcaagagcttgataaagaccatgctcggtatctgtcatatttcagatggagagaaaccctgcgcccacgatcattctcttgggcactggcgttctgtaaggcttgctggaagttacaggaggaaagccgttatcagacacgcgggatcgccgcgtggttcacatag

SEQ ID NO: 33084 - DNA, 1080 bp, Artificial Sequence
  derived and/or modified sequence
atggaccccctgggccctgccaagccccagtggagctggcgctgctgcctgaccaccctgctcttccagctgctgatggctgtgtgcttcttctcctacctgcgggtgtcccaggatgaccccaccgtgtaccccaacggcagccgcttcccagacagcacaggcaccccagcccacagcatccccctcatcctgctgtggacctggcccttcaacaagcccatcgccctgccccgctgcagcgagatggtgcctggaacagctgactgcaacatcacagctgacaggaaggtgtacccccaggctgatgctgtgattgtgcaccaccgggaggtgatgtacaaccccagcgcccagctgcccaggagcccccggcggcagggccagcgctggatctggttctccatggagagccccagccactgctggcagctgaaggccatggatggctacttcaacctgaccatgagctacagaagtgacagcgacatcttcaccccctacggctggctggagccctggagcggccagcctgcccacccccccctgaacctgagcgccaagacagagctggtggcctgggccgtgagcaactggggccccaacagcgcccgggtgcgctactaccagagcctgcaggcccacctgaaggtggatgtgtatggccgcagccacaagcccctgccccagggcaccatgatggagaccctgagccgctacaagttctacctggcctttgagaacagcctgcacccagactacatcacagagaagctgtggagaaatgccctggaggcctgggccgtgcctgtggtgctgggccccagccgcagcaactatgagcgcttcctgcccccagatgccttcatccacgtggatgacttccagagccccaaggacctggcccgctacctgcaggagctggacaaggaccacgcccgctacctgagctacttccgctggagggagaccctgcggcccaggagcttctcctgggccctggccttctgcaaggcctgctggaagctgcaggaggagagccgctaccagacccggggcattgctgcctggttcacctag

SEQ ID NO: 33085 - DNA, 1080 bp, Artificial Sequence
  derived and/or modified sequence
atggaccccctgggccccgccaagccccagtggagctggcggtgctgcttgaccaccctgctgtttcagctcctgatggcagtatgcttcttctcatacctgcgcgtgtcccaggacgatcctacggtctatcctaatggaagcagatttcccgattctactggaactccagcccattcaattcccttgattctgctgtggacttggccattcaacaagcccattgcactacctcgctgcagcgagatggttcccgggaccgccgattgtaacataaccgctgatcggaaggtctacccgcaagctgacgctgtcatcgtccatcatcgtgaagtgatgtacaacccaagcgcccagttaccacgcagcccgcgccgccaaggacagagatggatttggttttcaatggagagtccaagccactgttggcagttaaaggcaatggacgggtattttaacctgacaatgagctaccggtctgacagtgatatcttcaccccatacggatggctcgagccatggtcgggacagcccgcccatcctcctcttaacctctcagcaaaaacggagctagtcgcgtgggccgtgtccaactgggggcccaactccgctcgagtgaggtattatcagagtctgcaagcccacctcaaagtggatgtctacggaagaagccacaaacccctcccacagggtactatgatggagaccctgtctcgatataaattttacctggccttcgagaactccctgcatcccgattacatcaccgagaaactgtggagaaatgccctggaagcttgggcagtaccggtggtcttggggcccagcagatctaactacgaaaggttccttccgccagatgccttcatccacgttgatgactttcagagccctaaagaccttgccagatatttgcaggagcttgacaaggatcacgctcgatacctctcatattttagatggcgggagacccttcgcccccggtcatttagctgggccctcgctttctgtaaagcgtgctggaagttacaggaagagtcacgatatcagacacgcggtatcgcagcatggttcacctag

SEQ ID NO: 33086 - DNA, 1080 bp, Artificial Sequence
  derived and/or modified sequence
atggaccccctgggccccgccaagccccagtggagctggcggtgctgtctaacaaccctcctgtttcagctgcttatggctgtgtgttttttttcttacctgagagtgtcacaggatgaccccacagtgtatcctaacggaagtagattcccagattcaacaggcacccccgctcactccattcctctcattctgctgtggacctggccattcaacaagcccatagctctcccccgctgctcagaaatggtgcccggtacagccgattgtaatataactgctgacaggaaggtttacccacaggcagatgccgtgattgttcaccacagggaggtcatgtacaacccctctgcacaattgcctcgctccccacgccggcaggggcaaaggtggatctggttctctatggaatcaccatctcattgctggcagctcaaggccatggacggatattttaatttgacaatgtcttatagaagtgatagtgatatattcaccccgtatggatggctggaaccatggtcagggcagccagctcacccccccctcaacctgagcgcaaaaacagagttagtcgcgtgggctgtgagtaattggggtccgaactccgcccgagttagatattaccagtctctccaggcacacctgaaagtggatgtctacggcaggagccacaagccccttcctcaggggactatgatggagactctgtctagatacaagttctatctggcatttgaaaactcactgcatccagactacatcactgaaaagctctggaggaacgcactcgaagcatgggccgttcccgtggtactgggaccgtcgagatcaaattatgagaggtttttgccccctgacgcctttatccatgttgacgacttccagtcccccaaagacctggcccgataccttcaggagttggataaagaccacgcaagatacctcagttattttcgctggagggagacattgagaccacgtagcttcagctgggccctggccttttgtaaggcctgctggaaactccaagaggaatcccggtaccaaactagaggaatagctgcctggtttacctag

SEQ ID NO: 33087 - DNA, 1080 bp, Artificial Sequence
  derived and/or modified sequence
atggaccccctgggccccgccaagccccagtggagctggcggtgctgtcttactactctccttttccagctccttatggcagtgtgcttctttagctacctcagggtttcccaagacgacccaaccgtgtaccccaatggctcacgctttcccgactccaccggtactcctgcccacagcattcctctgatcctcctttggacgtggccattcaacaaacctatcgcgctacctaggtgtagcgaaatggtcccggggactgccgactgcaacattaccgcagataggaaggtctatccccaagcagacgctgtgatagtgcatcatagagaggttatgtataacccttcagcccagctccccagaagcccccggcgccaagggcaacgatggatctggttctctatggagagcccttcccattgctggcagctgaaagccatggacggttattttaatttaactatgtcctaccggagtgattcagacatttttaccccttacggctggcttgagccttggtccggacagccagcacacccacccctgaacctgtctgctaaaaccgaactggtggcctgggctgtgtcaaactggggcccgaactccgcccgcgtgaggtattatcaatctcttcaagcccatctgaaggtagacgtctatggccgctcccacaagcctttgccgcaggggacgatgatggaaacactatccaggtataagttctacttggcctttgagaacagcctccacccagactatatcacagaaaagctgtggcggaacgccctggaggcctgggctgtccctgtagtgctcggacccagccggtcaaattacgaaagattcctaccaccggacgctttcatccatgttgacgatttccaatctccaaaagatcttgctcggtatctccaggagctggataaggaccatgccaggtatctgtcctattttagatggagggagacccttcgacctcgttctttctcctgggcccttgccttctgtaaggcctgctggaagcttcaggaggagagccgctaccagactcgcggcattgcagcctggtttacgtag

SEQ ID NO: 33088 - DNA, 1080 bp, Artificial Sequence
  derived and/or modified sequence
atggaccccctgggccccgccaagccccagtggagctggcggtgctgcctgactaccctgttattccaacttctaatggccgtctgcttctttagttacctcagggtttcgcaagatgacccaacagtatatccaaacgggagtaggttccccgactcaacaggcactcctgcccactccataccactaatcctgctgtggacctggccgtttaacaagccaatcgcccttccgcggtgttctgagatggttcccggcactgcagattgtaacatcactgctgaccgaaaagtgtatccccaggccgatgctgtgatagttcatcatcgggaggttatgtacaaccccagcgcccagctccccaggtcacccaggagacagggccagagatggatctggttcagcatggagtcaccgtcacactgttggcaactgaaggcgatggatggttattttaacttaacgatgtcctatcgaagcgactccgacatttttacaccttacgggtggttagagccttggtccggacagcctgctcaccctccactgaatctctccgctaaaaccgagttagtggcatgggccgtctcgaactggggaccaaattcggcccgtgttaggtattaccagtctctgcaggcccacttgaaggtggatgtatacgggagaagccacaagcccctcccgcagggtactatgatggagacgctgagcagatacaaattctatctagcatttgagaactccctgcaccctgactacattacagagaaattgtggcggaatgctcttgaagcttgggccgtgcccgttgtgctaggaccatctaggtccaactacgaacggttccttccacctgatgcttttatccatgtcgacgatttccagtcaccgaaagaccttgcaaggtatttgcaggagttggacaaggaccacgcccgctatctttcctacttccgatggagggagacactccgacctaggtctttctcgtgggcgctcgcattttgcaaggcgtgctggaagcttcaggaggagtctcgttaccaaactagaggtattgccgcctggtttacatag

SEQ ID NO: 33089 - DNA, 1080 bp, Artificial Sequence
  derived and/or modified sequence
atggaccccctggggccagccaaaccccaatggtcctggagatgttgtctcacaacactgctgttccaactgctgatggccgtgtgttttttctcatatctccgtgtgtcacaagacgatcccacagtataccctaatggaagtcgtttcccagactccacaggtacccccgctcactcaatccccctgattttgctgtggacctggccattcaataagcccatcgcgctgccacgatgctctgagatggtgccaggcacggcagactgcaatatcacagctgacagaaaagtgtacccacaggccgacgcagtgatagtccatcacagggaggtgatgtacaacccctcagcacagctgcctagatccccccgacgccagggccagcgttggatctggttttccatggagtctccctcgcattgttggcagctgaaagcaatggatggctattttaacctaaccatgagttataggtctgattctgacatcttcacgccgtatggatggctggaaccttggtcaggacaaccagcacaccctccgttgaatctgagcgcgaaaaccgaattagtggcttgggccgtgtcgaactggggcccaaacagcgccagggtaagatattatcagtccctgcaggcccacctgaaggtcgatgtctatgggagatcccacaaacccctcccccagggtaccatgatggaaactttaagtaggtacaaattctatcttgcttttgagaactccctccatcccgactatattactgaaaagctgtggagaaacgcgctcgaagcctgggcggtgcctgtggtgctggggccaagtcggagcaattacgaacgttttctgcccccagacgcttttatccatgtcgacgactttcagtctccgaaggatctagcacggtacctccaggagctcgacaaggatcatgcgaggtacttatcctatttccgctggcgcgagactctcagaccccgaagtttttcctgggcattggcgttctgcaaggcctgctggaagctccaggaagagtctcgttaccagaccagaggcattgccgcatggttcacctag

SEQ ID NO: 33090 - DNA, 1080 bp, Artificial Sequence
  derived and/or modified sequence
atggatccccttgggcctgctaaaccccagtggagttggaggtgttgcttaacaacactgctttttcaactgctcatggctgtttgcttcttctcatacctgcgggtctctcaggacgaccctactgtttatccaaacggtagccgatttcccgactccacaggtacgcccgcacacagcattcccctgatactgctgtggacgtggccctttaacaaacctatagccctgcctaggtgtagtgaaatggtcccaggcaccgctgactgtaacatcacggcggatagaaaggtctatccgcaggccgatgcagtgatagttcaccaccgcgaggtaatgtacaatccatccgcccagctccccagatcaccacgaaggcagggccagagatggatttggtttagcatggaaagcccgtctcattgttggcagctaaaggctatggatggatactttaaccttactatgtcctaccggagcgactctgatatttttacaccctacggttggctggagccctggagtgggcagcctgcccacccaccactgaatttgagcgccaagacagaactagtggcctgggcggtctccaactgggggccaaattccgctagagttaggtactaccaatctctgcaggcacatctgaaagtcgatgtgtatggtcggtcacacaagccattgccacaagggaccatgatggagaccctgagccgatacaagttttatctggcttttgagaattctctgcacccggactatattaccgagaaattgtggaggaatgcactggaagcctgggctgtccctgtggtcctgggaccctcacggtccaattacgagcgcttcctccctccggatgcattcattcatgtggatgactttcagagtcccaaggatctcgccagatacttgcaagaactggacaaggatcacgctaggtacctatcatatttccgctggcgcgagacacttcggcctaggagtttctcttgggccttggccttctgtaaggcttgctggaaactgcaagaggagagcagatatcagactcgtgggattgccgcttggttcacatag

SEQ ID NO: 33091 - DNA, 1080 bp, Artificial Sequence
  derived and/or modified sequence
atggatcctttagggcctgccaaaccccaatggtcttggcgttgttgtctgaccaccctgctttttcaacttttgatggccgtgtgctttttttcgtacttacgcgtgagtcaagatgatccgacagtttaccccaacggttcgaggtttccagactctacagggacaccggcacacagcatacccttaattctgctctggacctggccctttaataagccaatcgcgctgcctcggtgcagtgagatggtgccaggcactgctgactgtaatataacagccgacaggaaagtttacccccaggccgatgctgtgatagtccatcaccgggaggtgatgtacaacccctccgctcagctccccagaagccctcgacgacagggtcagcgttggatatggttttccatggaatcaccttctcattgttggcagcttaaggccatggacggttactttaacctaacaatgtcctacaggagtgatagtgatatcttcaccccctacggatggctggagccatggagtgggcaacccgcacatccgcctctgaatctcagcgcaaaaactgagctggtggcatgggccgttagcaattggggacctaacagcgccagggtgaggtattaccaatccctccaggctcacctcaaagtggatgtttacggccgttcccataagcctctcccccaagggaccatgatggagactctaagccggtataagttttatctggcttttgagaattcgctgcacccggactacattacagagaagctgtggcggaacgccctggaagcttgggctgtgcctgtggtcctcggcccttctaggtcgaactatgagaggtttcttcccccagatgcattcatccatgtcgacgacttccaatcgcctaaggatctggccaggtacctgcaagagctagataaggaccacgctagatatttgtcctactttcggtggagggaaacactccggccacgctcattctcgtgggctctggctttttgtaaagcatgttggaaattacaggaagagtcccgataccaaactcggggaatagctgcatggttcacctag

SEQ ID NO: 33092 - DNA, 1080 bp, Artificial Sequence
  derived and/or modified sequence
atggaccccctcggtccggctaaaccacaatggtcgtggcgatgttgtctgactaccctcctctttcagctgcttatggcagtgtgtttcttttcttacctcagggtcagtcaggacgatcctacggtatacccaaatgggtcccgtttccctgactccactggtacccctgctcactcaatccctctgatcctgctctggacctggcctttcaacaaacctattgctttgccaaggtgctcggagatggtgcctgggaccgccgactgcaatatcacggccgatcggaaggtatatccacaggccgatgccgttattgtacaccacagagaggtgatgtacaacccatctgcacagctcccgcgtagccctcggcgacagggccagcgctggatctggttttcaatggaatctccctctcactgctggcaactgaaggcaatggatggatatttcaacttaacaatgagctatcgctctgattccgatatctttacaccttatggttggttggaaccgtggtctgggcagccagcgcaccctccccttaacctaagcgcaaagactgaactggtggcctgggcagtctcaaactggggcccaaactccgctcgcgtgaggtattatcagtctctgcaggcacatctcaaggtcgacgtgtacggcagatcacacaagccactgcctcagggcacaatgatggagactttatctcgttataaattctatctggcctttgaaaactccctgcatcctgattatattacagaaaaattgtggcgaaatgcattagaggcctgggcagtgcctgtcgtattaggcccatccaggagcaactatgaaaggttcttaccacccgacgccttcatccacgtagatgactttcagtcgccaaaagatctggcccgttacctccaagagttagataaggatcacgctcgctacctgtcctattttagatggcgagaaaccctcagacccagatcctttagttgggccttggcgttctgtaaagcatgttggaagctgcaggaggaaagtcggtaccagacccggggaatagcggcatggttcacttag

SEQ ID NO: 33093 - DNA, 1080 bp, Artificial Sequence
  derived and/or modified sequence
atggaccccctgggccccgccaagccccagtggagctggagatgctgcctgaccaccctgctgttccagctgctgatggccgtgtgcttcttcagctacctgagagtgagccaggacgaccccaccgtgtaccccaacggcagcagattccccgacagcaccggcacccccgcccacagcatccccctgatcctgctgtggacctggcccttcaacaagcccatcgccctgcccagatgcagcgagatggtgcccggcaccgccgactgcaacatcaccgccgacagaaaggtgtacccccaggccgacgccgtgatcgtgcaccacagagaggtgatgtacaaccccagcgcccagctgcccagaagccccagaagacagggccagagatggatctggttcagcatggagagccccagccactgctggcagctgaaggccatggacggctacttcaacctgaccatgagctacagaagcgacagcgacatcttcaccccctacggctggctggagccctggagcggccagcccgcccacccccccctgaacctgagcgccaagaccgagctggtggcctgggccgtgagcaactggggccccaacagcgccagagtgagatactaccagagcctgcaggcccacctgaaggtggacgtgtacggcagaagccacaagcccctgccccagggcaccatgatggagaccctgagcagatacaagttctacctggccttcgagaacagcctgcaccccgactacatcaccgagaagctgtggagaaacgccctggaggcctgggccgtgcccgtggtgctgggccccagcagaagcaactacgagagattcctgccccccgacgccttcatccacgtggacgacttccagagccccaaggacctggccagatacctgcaggagctggacaaggaccacgccagatacctgagctacttcagatggagagagaccctgagacccagaagcttcagctgggccctggccttctgcaaggcctgctggaagctgcaggaggagagcagataccagaccagaggcatcgccgcctggttcacctag

SEQ ID NO: 33094 - protein, 48 aa, Artificial Sequence
  derived and/or modified sequence
ELDRICGYGTARCRKKCRSQEYRIGRCPNTYACCLRKWDESLLNRTKP

SEQ ID NO: 33095 - protein, 50 aa, Artificial Sequence
  derived and/or modified sequence
EFELDRICGYGTARCRKKCRSQEYRIGRCPNTYACCLRKWDESLLNRTKP

SEQ ID NO: 33096 - protein, 50 aa, Artificial Sequence
  derived and/or modified sequence
EFELDRICGYGTARCRKKCRSQEYRIGRCPNTFACCLRKWDESLLNRTKP

SEQ ID NO: 33097 - protein, 50 aa, Artificial Sequence
  derived and/or modified sequence
EFEWDRICGYGTARCRNKCRSQEYRIGRCPNTFACCLRKWDESLLNSTKP

SEQ ID NO: 33098 - protein, 72 aa, Artificial Sequence
  derived and/or modified sequence
MQRLVLLLAISLLLYQDLPVRSEFELDRICGYGTARCRKKCRSQEYRIGRCPNTYACCLRKWDESLLNRTKP

SEQ ID NO: 33099 - DNA, 219 bp, Artificial Sequence
  derived and/or modified sequence
atgcagcgcctggtgctgctgctcgccatatcattgctgctgtatcaggacctcccagttcgcagcgagttcgaactcgatcggatatgtggctacggaaccgcccgatgccgcaagaagtgcaggtctcaggagtaccgcataggaaggtgccctaacacttatgcatgttgtctgcgcaaatgggacgagagcttgttgaatcgtaccaagccctag

SEQ ID NO: 33100 - DNA, 219 bp, Artificial Sequence
  derived and/or modified sequence
atgcagcgcctcgtccttctactcgctatctctctcctgttgtatcaggatcttccagtgcggagtgaatttgagctggatcgaatctgcggatatggaactgccaggtgtcgtaaaaagtgcagatcccaagagtaccgcatcggcagatgccccaatacctatgcttgctgcctgcgcaagtgggacgagtctctcctcaaccggactaaaccatag

SEQ ID NO: 33101 - DNA, 219 bp, Artificial Sequence
  derived and/or modified sequence
atgcagagacttgtgctactgctcgcaatttctctgctcctctatcaagacctcccggtaagaagcgaatttgaattagataggatctgcggctatggcacagcacgttgtagaaagaagtgtcgcagtcaggagtacagaattggtcgatgtcctaatacctacgcgtgctgcctgcgcaagtgggacgaatccctcctgaatagaaccaaaccatag

SEQ ID NO: 33102 - DNA, 219 bp, Artificial Sequence
  derived and/or modified sequence
atgcagcgcctggtcctgttacttgctatctcactactactttaccaagatctgcccgtacgaagcgagttcgagcttgaccgcatatgtggctatggaacagctcgctgcaggaaaaagtgtcggtcacaggagtataggatcgggagatgtcctaacacgtatgcttgttgtctccgcaaatgggatgagtctctgctgaatcgtacaaaaccatag

SEQ ID NO: 33103 - DNA, 219 bp, Artificial Sequence
  derived and/or modified sequence
atgcagagactggtgctgctgctggccatcagcctgctgctgtaccaggacctgcccgtgagaagcgagttcgagctggacagaatctgcggctacggcaccgccagatgcagaaagaagtgcagaagccaggagtacagaatcggcagatgccccaacacctacgcctgctgcctgagaaagtgggacgagagcctgctgaacagaaccaagccctag

SEQ ID NO: 33104 - DNA, 281 bp, Artificial Sequence
  derived and/or modified sequence
gcagccccagcattatgcagagacttgtgctgctattagccatttctcttctactctatcaagatcttccagtgagaagcgaatttgaattggacagaatatgtggttatgggactgcccgttgccggaagaaatgtcgcagccaagaatacagaattggaagatgtcccaacacctatgcatgctgtttgagaaaatgggatgagagcttactgaatcgtacaaaaccctgaaacgcagtagtgctggtccctagagtcgctggaagtaggacctcagta

SEQ ID NO: 33105 - DNA, 219 bp, Artificial Sequence
  derived and/or modified sequence
atgcaacgcctggtgctgttgctcgcaatttctctgcttttatatcaggatctgcccgtccgaagtgagtttgagctagataggatttgtggttatggcacagcgcgatgtagaaaaaagtgtcggagtcaagaatacaggatcggaaggtgccccaacacctacgcctgctgcctgcgaaagtgggatgagtctctgttaaaccggacaaagccttag

SEQ ID NO: 33106 - DNA, 219 bp, Artificial Sequence
  derived and/or modified sequence
atgcagcgcctcgtcctgctgctcgcaatcagcctgctgctgtatcaagatctgcctgttagatctgagttcgaactagacagaatatgtggctatgggacagcacggtgccgaaaaaaatgccggtcacaagagtaccggattggtaggtgtccaaatacctatgcttgctgcctcaggaaatgggacgagtctcttttgaatcgaacaaaaccctag

SEQ ID NO: 33107 - DNA, 219 bp, Artificial Sequence
  derived and/or modified sequence
atgcagaggctggtgctgctgctggccatcagcctgctgctgtaccaggacctgcctgtgcgctcagaatttgagctggaccgcatctgtggctacggcacagcccgctgcaggaagaagtgccgcagccaggagtaccgcatcggccgctgccccaacacctacgcctgctgcctgaggaagtgggatgagagcctgctgaacagaaccaagccctag

SEQ ID NO: 33108 - DNA, 219 bp, Artificial Sequence
  derived and/or modified sequence
atgcagcggctggtgctgctgctggccatcagcctgctgctgtaccaggaccttccagtgaggtccgagtttgaactagatcgcatttgcgggtacggcaccgcacgatgcagaaagaagtgtcgaagtcaggaataccggatcggaagatgccctaacacatacgcctgttgcctaaggaaatgggatgagtccctgctgaaccggaccaaaccttag

SEQ ID NO: 33109 - DNA, 219 bp, Artificial Sequence
  derived and/or modified sequence
atgcagcggctggtgctgctgctggccatcagcctgctgctgtaccaagacttgccggtccggtcagagttcgagcttgacagaatctgcggttatgggactgcacgttgcagaaaaaagtgccgctctcaagaatataggatcgggcgctgcccaaatacttatgcttgctgcttaaggaagtgggacgaatccttgctgaatcgtacaaagccgtag

SEQ ID NO: 33110 - RNA, 219 nt, Artificial Sequence
  derived and/or modified sequence
augcagagacuugugcuacugcucgcaauuucucugcuccucuaucaagaccucccgguaagaagcgaauuugaauuagauaggaucugcggcuauggcacagcacguuguagaaagaagugucgcagucaggaguacagaauuggucgauguccuaauaccuacgcgugcugccugcgcaagugggacgaaucccuccugaauagaaccaaaccauag

SEQ ID NO: 33111 - RNA, 219 nt, Artificial Sequence
  derived and/or modified sequence
augcagcgccugguccuguuacuugcuaucucacuacuacuuuaccaagaucugcccguacgaagcgaguucgagcuugaccgcauauguggcuauggaacagcucgcugcaggaaaaagugucggucacaggaguauaggaucgggagauguccuaacacguaugcuuguugucuccgcaaaugggaugagucucugcugaaucguacaaaaccauag

SEQ ID NO: 33112 - protein, 308 aa, Artificial Sequence
  derived and/or modified sequence
MKRAHPEYSSSDSELDETIEVEKESADENGNLSSALGSMSPTTSSQILARKRRRGIIEKRRRDRINNSLSELRRLVPSAFEKQVMEQGSAKLEKAEILQMTVDHLKMLHTAGGKGYFDAHALAMDYRSLGFRECLAEVARYLSIIEGLDASDPLRVRLVSHLNNYASQREAASGAHAGLGHIPWGTVFGHHPHIAHPLLLPQNGHGNAGTTASPTEPHHQGRLGSAHPEAPALRAPPSGSLGPVLPVVTSASKLSPPLLSSVASLSAFPFSFGSFHLLSPNALSPSAPTQAANLGKPYRPWGTEIGAF

SEQ ID NO: 33113 - DNA, 927 bp, Artificial Sequence
  derived and/or modified sequence
atgaagagagcccaccccgagtacagcagcagcgacagcgagctggacgagaccatcgaggtggagaaggagagcgccgacgagaacggcaacctgagcagcgccctgggcagcatgagccccaccaccagcagccagatcctggccagaaagagaagaagaggcatcatcgagaagagaagaagagacagaatcaacaacagcctgagcgagctgagaagactggtgcccagcgccttcgagaagcaggtgatggagcagggcagcgccaagctggagaaggccgagatcctgcagatgaccgtggaccacctgaagatgctgcacaccgccggcggcaagggctacttcgacgcccacgccctggccatggactacagaagcctgggcttcagagagtgcctggccgaggtggccagatacctgagcatcatcgagggcctggacgccagcgaccccctgagagtgagactggtgagccacctgaacaactacgccagccagagagaggccgccagcggcgcccacgccggcctgggccacatcccctggggcaccgtgttcggccaccacccccacatcgcccaccccctgctgctgccccagaacggccacggcaacgccggcaccaccgccagccccaccgagccccaccaccagggcagactgggcagcgcccaccccgaggcccccgccctgagagccccccccagcggcagcctgggccccgtgctgcccgtggtgaccagcgccagcaagctgagcccccccctgctgagcagcgtggccagcctgagcgccttccccttcagcttcggcagcttccacctgctgagccccaacgccctgagccccagcgcccccacccaggccgccaacctgggcaagccctacagaccctggggcaccgagatcggcgccttctag

SEQ ID NO: 33114 - DNA, 2296 bp, Artificial Sequence
  derived and/or modified sequence
actcccccgccctccccagggccctgggaaggggctcagcgtgggaaaggatggttgagttttaaccagaggcaaagcgtgagcgggatcagtgtgtgcggaacgcaagcagccgagagcggagaggcgccgctgtagttaactcctccctgcccgccgcgccgaccctccccaggaacccccagggagccagcatgaagcgagctcaccccgagtacagctcctcggacagcgagctggacgagaccatcgaggtggagaaggagagtgcggacgagaatggaaacttgagttcggctctaggttccatgtccccaactacatcttcccagattttggccagaaaaagacggagaggaataattgagaagcgccgacgagaccggatcaataacagtttgtctgagctgagaaggctggtacccagtgcttttgagaagcaggtaatggagcaaggatctgctaagctagaaaaagccgagatcctgcagatgaccgtggatcacctgaaaatgctgcatacggcaggagggaaaggttactttgacgcgcacgcccttgctatggactatcggagtttgggatttcgggaatgcctggcagaagttgcgcgttatctgagcatcattgaaggactagatgcctctgacccgcttcgagttcgactggtttcgcatctcaacaactacgcttcccagcgggaagccgcgagcggcgcccacgcgggcctcggacacattccctgggggaccgtcttcggacatcacccgcacatcgcgcacccgctgttgctgccccagaacggccacgggaacgcgggcaccacggcctcacccacggaaccgcaccaccagggcaggctgggctcggcacatccggaggcgcctgctttgcgagcgccccctagcggcagcctcggaccggtgctccctgtggtcacctccgcctccaaactgtcgccgcctctgctctcctcagtggcctccctgtcggccttccccttctctttcggctccttccacttactgtctcccaatgcactgagcccttcagcacccacgcaggctgcaaaccttggcaagccctatagaccttgggggacggagatcggagctttttaaagaactgatgtagaatgagggaggggaaagtttaaaatcccagctgggctggactgttgccaacatcaccttaaagtcgtcagtaaaagtaaaaaggaaaaaggtacactttcagataattttttttttaaagactaaaggtttgttggtttacttttatcttttttaatgtttttttcatcatgtcatgtattagcagtttttaaaaactagttgttaaattttgttcaagacattaaattgaaatagtgagtataagccaacactttgtgataggtttgtactgtgcctaatttactttgtaaaccagaatgattccgtttttgcctcaaaatttggggaatcttaacatttagtatttttggtctgtttttctccttgtatagttatggtctgtttttagaattaattttccaaaccactatgcttaatgttaacatgattctgtttgttaatattttgacagattaaggtgttgtataaataatattcttttggggggaggggaactatattgaattttatatttctgagcaaagcgttgacaaatcagatgatcagctttatccaagaaagaagactagtaaattgtctgcctcctatagcagaaaggtgaatgtacaaactgttggtggccctgaatccatctgaccagctgctggtatctgccaggactggcagttctgatttagttaggagagagccgctgataggttaggtctcatttggagtgttggtggaaaggaaactgaaggtaattgaatagaatacgcctgcatttaccagccccagcaacacaaagaatttttaatcacacggatctcaaattcacaaatgttaacatggataagtgatcatggtgtgcgagtggtcaattgagtagtacagtggaaactgttaaatgcataacctaattttcctgggactgccatattttcttttaactggaaatttttatgtgagttttccttttggtgcatggaactgtggttgccaaggtatttaaaagggctttcctgcctccttctctttgatttatttaatttgatttgggctataaaatatcatttttcaggtttattcttttagcaggtgtagttaaacgacctccactgaactgggtttgacctctgttgtactgatgtgttgtgactaaataaaaaagaaagaacaaa

SEQ ID NO: 33115 - DNA, 927 bp, Artificial Sequence
  derived and/or modified sequence
atgaagagagcccatccggaatattcctcttctgactccgaactagacgagactatcgaggtggagaaggaaagcgccgacgagaatgggaatctcagcagcgctctcggaagcatgtcacccaccactagtagtcagatcctcgcacggaaaagaaggagaggtattatcgaaaagagacgtagagacagaatcaataacagcttgagcgagttaaggagactggttccctcagcgtttgaaaaacaggtgatggagcagggctcagctaaactcgaaaaagcagagatcctgcaaatgactgtggaccacctaaagatgctgcacaccgcaggcgggaaaggctattttgatgctcacgccctggctatggattatcgctctttggggttcagggaatgcctggcagaggtcgcacgatatctgtcaattatcgagggcttggacgcctctgatcctctccgcgtccggctggtgagccacttgaataactatgcaagccagcgcgaagcagcttccggcgcacatgcaggcctcggacacataccctggggaaccgtcttcggtcaccacccccacatcgcccatcccctgctgttaccacagaatggccatgggaatgcagggacaaccgcttctcccacagaaccccaccatcagggcaggctggggtcagcacatccggaagcacccgccttgagagcccctccaagcggctccttggggccggtgctgcctgtggtcaccagcgcttctaagctgtctccacccctcttatcaagtgtggcctccctgtctgcattccctttttcttttggctcatttcacctgctgagcccaaatgccctctctcctagtgctcctacccaggcagccaatctgggaaagccctatcgcccatggggaacagaaatcggcgccttctag

SEQ ID NO: 33116 - DNA, 927 bp, Artificial Sequence
  derived and/or modified sequence
atgaaacgggcacaccctgagtattcttcatccgactcggagctcgatgaaaccatagaggtggagaaagagtccgctgacgaaaatggaaatctcagcagtgccctaggatctatgtccccgaccacttctagccagatactggctagaaaaaggcggagaggcatcattgagaagagaaggcgagatcgcataaacaatagtctctcagagctccggcgcctggttccatccgctttcgagaagcaggttatggaacagggaagcgctaagctggagaaagcagaaattctccagatgacggtggaccatctgaagatgcttcacactgccgggggaaagggctattttgatgcacatgcgttagccatggactatagaagtctgggttttcgcgagtgtctggccgaggtggctcgttacttgagcattatcgaagggctggacgcttctgacccgctgagggtcagactggtgagtcacctgaataactatgcttcccagagagaggcagcatccggcgcacatgcaggccttggccacatcccttggggaactgtgtttggtcaccacccgcatatcgctcaccctttactgttgccgcaaaacgggcacggtaacgctgggacaactgccagtcctaccgagcctcaccatcaaggacgattaggctcagcccacccggaagccccagcgttgcgtgcacctccttccggctccctcggtcctgtcctacctgtggttactagtgcttccaaactgtcacctcccctgctgagctcagtcgcatccctcagtgcctttccattttcgttcggaagctttcatctgctgagcccgaacgctctctctccttctgcacccacacaggcagccaacctgggaaaaccatatagaccgtgggggacagagattggggcattctag

SEQ ID NO: 33117 - DNA, 927 bp, Artificial Sequence
  derived and/or modified sequence
atgaagagggcccaccctgagtacagcagcagtgacagcgagctggatgagaccatcgaggtggagaaggagagcgcagatgaaaatggaaacctgagcagcgccctgggctccatgagccccaccaccagcagccagatcctggccaggaagagaagaagaggcatcatcgagaagagaagaagagaccgcatcaacaacagcctgtctgagctgcggcggctggtgcccagcgcctttgagaagcaggtgatggagcagggcagcgccaagctggagaaggccgagatcctgcagatgacagtggaccacctgaagatgctgcacacagctgggggcaagggctactttgatgcccacgccctggccatggactaccgcagcctgggcttcagagaatgtctggccgaggtggcccgctacctgagcatcatcgagggcctggatgccagtgaccccctgcgggtgcggctggtgagccacctgaacaactatgccagccagcgggaggccgccagcggggcccatgctggcctgggccacatcccctggggcaccgtgtttggccaccacccccacatcgcccaccccctgctgctgccccagaatggacatggaaatgccggcaccacagccagccccacagagccccaccaccagggccgcctgggcagcgcccaccctgaggccccagccctgcgggccccacccagcggcagcctgggccctgtgctgcctgtggtgaccagcgccagcaagctgagcccccccctgctgagctctgtggccagcctgagcgccttccccttctcctttggcagcttccacctgctgagccccaatgccctgagccccagcgcccccacccaggccgccaacctgggcaagccctaccggccctggggcacagaaattggagccttctag

SEQ ID NO: 33118 - DNA, 927 bp, Artificial Sequence
  derived and/or modified sequence
atgaagcgggcccaccccgagtacagcagcagcgacagcgagctggacgagacaatcgaagtagagaaggaatctgccgacgagaacgggaatttgagcagtgccctcggctcaatgagtcccacaacaagctcccagattctagcgaggaagcgacggcggggaattatagaaaaacgtagaagggaccgaatcaataattccctgtctgagctcaggcgcctagtaccgagcgcattcgagaagcaggttatggaacagggcagtgcaaagcttgagaaagccgaaattctgcaaatgacagtggaccatctgaaaatgctccacacagcaggcgggaagggatattttgatgcacacgcccttgccatggactaccgaagcttagggttcagggagtgtcttgccgaggtagcacggtatcttagtataatagagggcctagacgcctctgacccactgagagtcaggttggtgtcacaccttaacaactacgctagccagcgcgaagcggcctccggagcccatgctggtctgggacatattccatgggggaccgtatttgggcaccaccctcacatcgcccacccgttgctgctgccacagaacgggcacgggaatgcgggaaccacagcctctcctacagagccacatcaccagggtcgccttggatctgcccaccccgaagctcccgcccttagggcgcctcccagcggctccttgggccccgtgctgccagtggtgacgtccgccagtaaattatctccacccttgctcagttccgtcgctagtctatctgcattccctttctcatttggctcattccatcttttatcaccgaatgctttgtctccctctgcacccactcaggccgccaatctagggaagccctatcgtccttggggtaccgagataggagctttttag

SEQ ID NO: 33119 - DNA, 927 bp, Artificial Sequence
  derived and/or modified sequence
atgaagcgggcccaccccgagtacagcagcagcgacagcgagctggacgagacaatcgaggtagagaaagagtctgccgacgagaacggcaacctgagctctgcgctaggatcaatgagtccgacaacatcctcccagattctggctaggaaaagacggcggggcataatcgaaaagagaagaagagaccggatcaacaattctctgagtgagcttagaagactggtaccctccgctttcgagaaacaggttatggagcaggggtcagcaaagcttgaaaaggcagaaatccttcagatgacagttgaccacctcaagatgctccataccgccgggggaaagggctacttcgatgcccacgcacttgctatggattatcgtagcctgggttttcgagaatgtctagccgaggtggcgcggtacttatctatcatcgaggggcttgatgcaagcgatccactgcgtgtgcgtcttgtaagccacctgaataactacgccagccagagagaagctgcttctggagcgcatgcaggacttggccatattccttggggcacggtatttggacatcatccacatatcgctcacccactactgctcccgcagaatggccacgggaacgccgggactaccgcatctcccactgaaccacaccatcagggacggcttggctcagcacatcctgaagctcccgcactgcgcgctcctccgtctggcagtctgggccccgtgctacctgtggtgacctccgcatcgaagctgtcccctcccttactttcgtctgtcgcgtccctctccgcattcccattcagttttgggagctttcacttgctttcgcccaacgccctgtcaccttcagcacccacccaagcagctaatctcgggaagccttacagaccttggggaacagagattggtgctttttag

SEQ ID NO: 33120 - DNA, 927 bp, Artificial Sequence
  derived and/or modified sequence
atgaaacgcgcacatcctgagtattccagcagcgatagtgaactggacgaaacgatcgaagtagaaaaagaaagcgcagatgagaatggaaacctgtccagtgctcttggctcgatgtctccgaccacatcctctcaaatcctggctcgaaagcgcaggcgtgggattatcgaaaagagacgtcgggataggattaataactctctcagtgaattgcggagactggtcccatccgctttcgaaaagcaggtgatggagcagggctccgctaaacttgaaaaggctgagatcctgcagatgactgtcgatcacctcaagatgctccatacagcaggaggaaagggatatttcgacgcgcacgcactggccatggactatagaagtttggggtttcgagagtgtctcgccgaggttgcgcgatacctgtcaatcatcgaaggtctggatgcatctgacccgctgcgcgtcagacttgtctcccacttgaacaattacgccagccagagggaggctgcttctggggcacatgccggactcggtcacattccttggggtaccgtctttggccaccacccgcacatcgcccaccctctattactcccccagaacgggcatggaaacgctggtacaaccgctagtccaaccgagccacaccaccagggccgtcttggcagcgcccaccccgaggccccagctctgcgcgctcccccttctggttctctgggtccggtgctacctgttgtgacctctgcctccaaactaagtcccccattactgagcagtgtcgcgtctctgtcagcgtttccattcagcttcgggtcttttcatcttctgtcccctaacgccctgtccccatcagctcccacgcaggctgcgaatcttgggaagccttaccggccatggggaaccgagataggtgccttttag

SEQ ID NO: 33121 - DNA, 927 bp, Artificial Sequence
  derived and/or modified sequence
atgaaacgtgcacatccagagtatagctcgtccgatagcgagctggacgagacaatagaagtggaaaaagagagcgcagacgagaatggaaacctgagttccgccctcgggagcatgtcgcctaccacatctagtcagatcctggcaagaaaaagacggagaggaatcattgaaaagcgcagacgcgaccgcatcaataattcactcagcgagctccgcagactggtgccaagcgcattcgagaagcaggtgatggaacagggatctgccaaactggaaaaagcggagatcctgcaaatgaccgttgaccacctgaaaatgcttcacaccgcaggcggaaaaggatacttcgacgcccacgcgctcgccatggactaccggagtcttggatttcgcgaatgccttgccgaggtggcccgatacctcagcatcatcgagggcctcgacgcctccgaccctctcagagtgaggctggtgtcccacttaaacaattatgcatctcagcgggaagctgctagtggagcacacgctggcctaggtcacattccatgggggacagtattcggccatcatcctcacatagcacacccactgctgctgccccagaatggccacggcaacgctggtaccaccgcaagccctaccgaacctcaccaccaggggcgtttgggaagcgcacatcccgaagccccagctctccgcgctcctccctctggcagccttggaccggttctgcctgttgtgacaagtgcctctaaactgagccctcctctgttgtcctcagtcgcctccttgtccgcctttccgttttcttttggaagctttcacctgctctcccctaatgccttgtctccttcagccccaacccaggccgcaaatctggggaaaccctaccgtccatggggcaccgagataggagccttctag

SEQ ID NO: 33122 - DNA, 2037 bp, Artificial Sequence
  derived and/or modified sequence
atcagtgtgtgcggaacgcaagcagccgagagcggagaggcgccgctgtagttaactcctccctgcccgccgcgccgaccctccccaggaacccccagggagccagcatgaagcgagctcaccccgagtacagctcctcggacagcgagctggacgagaccatcgaggtggagaaggagagtgcggacgagaatggaaacttgagttcggctctaggttccatgtccccaactacatcttcccagattttggccagaaaaagacggagaggaataattgagaagcgccgacgagaccggatcaataacagtttgtctgagctgagaaggctggtacccagtgcttttgagaagcaggtaatggagcaaggatctgctaagctagaaaaagccgagatcctgcagatgaccgtggatcacctgaaaatgctgcatacggcaggagggaaaggttactttgacgcgcacgcccttgctatggactatcggagtttgggatttcgggaatgcctggcagaagttgcgcgttatctgagcatcattgaaggactagatgcctctgacccgcttcgagttcgactggtttcgcatctcaacaactacgcttcccagcgggaagccgcgagcggcgcccacgcgggcctcggacacattccctgggggaccgtcttcggacatcacccgcacatcgcgcacccgctgttgctgccccagaacggccacgggaacgcgggcaccacggcctcacccacggaaccgcaccaccagggcaggctgggctcggcacatccggaggcgcctgctttgcgagcgccccctagcggcagcctcggaccggtgctccctgtggtcacctccgcctccaaactgtcgccgcctctgctctcctcagtggcctccctgtcggccttccccttctctttcggctccttccacttactgtctcccaatgcactgagcccttcagcacccacgcaggctgcaaaccttggcaagccctatagaccttgggggacggagatcggagctttttaaagaactgatgtagaatgagggaggggaaagtttaaaatcccagctgggctggactgttgccaacatcaccttaaagtcgtcagtaaaagtaaaaaggaaaaaggtacactttcagataattttttttttaaagactaaaggtttgttggtttacttttatcttttttaatgtttttttcatcatgtcatgtattagcagtttttaaaaactagttgttaaattttgttcaagacattaaattgaaatagtgagtataagccaacactttgtgataggtttgtactgtgcctaatttactttgtaaaccagaatgattccgtttttgcctcaaaatttggggaatcttaacatttagtatttttggtctgtttttctccttgtatagttatggtctgtttttagaattaattttccaaaccactatgcttaatgttaacatgattctgtttgttaatattttgacagattaaggtgttgtataaataatattcttttggggggaggggaactatattgaattttatatttctgagcaaagcgttgacaaatcagatgatcagctttatccaagaaagaagactagtaaattgtctgcctcctatagcagaaaggtgaatgtacacaaagaatttttaatcacacggatctcaaattcacaaatgttaacatggataagtgatcatggtgtgcgagtggtcaattgagtagtacagtggaaactgttaaatgcataacctaattttcctgggactgccatattttcttttaactggaaatttttatgtgagttttccttttggtgcatggaactgtggttgccaaggtatttaaaagggctttcctgcctccttctctttgatttatttaatttgatttgggctataaaatatcatttttcaggtttattcttttagcaggtgtagttaaacgacctccactgaactgggtttgacctctgttgtactgatgtgttgtgactaaataaaaaagaaagaacaaagt

SEQ ID NO: 33123 - protein, 1502 aa, Artificial Sequence
  derived and/or modified sequence
MVHVARLLLLLLTFFLRTDAETPPRFTRTPVDQTGVSGGVASFICQATGDPRPKIVWNKKGKKVSNQRFEVIEFDDGSGSVLRIQPLRTPRDEAIYECVASNNVGEISVSTRLTVLREDQIPRGFPTIDMGPQLKVVERTRTATMLCAASGNPDPEITWFKDFLPVDTSNNNGRIKQLRSGGTPIRGALQIEQSEESDQGKYECVATNSAGTRYSAPANLYVRELREVRRVPPRFSIPPTNHEIMPGGSVNITCVAVGSPMPYVKWMLGAEDLTPEDDMPIGRNVLELNDVRQSANYTCVAMSTLGVIEAIAQITVKALPKPPGTPVVTESTATSITLTWDSGNPEPVSYYIIQHKPKNSEELYKEIDGVATTRYSVAGLSPYSDYEFRVVAVNNIGRGPPSEPVLTQTSEQAPSSAPRDVQARMLSSTTILVQWKEPEEPNGQIQGYRVYYTMDPTQHVNNWMKHNVADSQITTIGNLVPQKTYSVKVLAFTSIGDGPLSSDIQVITQTGVPGQPLNFKAEPESETSILLSWTPPRSDTIANYELVYKDGEHGEEQRITIEPGTSYRLQGLKPNSLYYFRLAARSPQGLGASTAEISARTMQSMFAKNFHVKAVMKTSVLLSWEIPENYNSAMPFKILYDDGKMVEEVDGRATQKLIVNLKPEKSYSFVLTNRGNSAGGLQHRVTAKTAPDVLRTKPAFIGKTNLDGMITVQLPEVPANENIKGYYIIIVPLKKSRGKFIKPWESPDEMELDELLKEISRKRRSIRYGREVELKPYIAAHFDVLPTEFTLGDDKHYGGFTNKQLQSGQEYVFFVLAVMEHAESKMYATSPYSDPVVSMDLDPQPITDEEEGLIWVVGPVLAVVFIICIVIAILLYKSKPDRKRAESDSRKSSIPNNKEIPSHHPTDPVELRRLNFQTPGMASHPPIPILELADHIERLKANDNLKFSQEYESIDPGQQFTWEHSNLEVNKPKNRYANVIAYDHSRVLLSAIEGIPGSDYVNANYIDGYRKQNAYIATQGSLPETFGDFWRMIWEQRSATVVMMTKLEERSRVKCDQYWPSRGTETHGLVQVTLLDTVELATYCVRTFALYKNGSSEKREVRQFQFTAWPDHGVPEHPTPFLAFLRRVKTCNPPDAGPMVVHCSAGVGRTGCFIVIDAMLERIKHEKTVDIYGHVTLMRAQRNYMVQTEDQYIFIHDALLEAVTCGNTEVPARNLYAYIQKLTQIETGENVTGMELEFKRLASSKAHTSRFISANLPCNKFKNRLVNIMPYESTRVCLQPIRGVEGSDYINASFIDGYRQQKAYIATQGPLAETTEDFWRMLWEHNSTIVVMLTKLREMGREKCHQYWPAERSARYQYFVVDPMAEYNMPQYILREFKVTDARDGQSRTVRQFQFTDWPEQGVPKSGEGFIDFIGQVHKTKEQFGQDGPISVHCSAGVGRTGVFITLSIVLERMRYEGVVDIFQTVKMLRTQRPAMVQTEDQYQFSYRAALEYLGSFDHYAT

SEQ ID NO: 33124 - protein, 1502 aa, Artificial Sequence
  derived and/or modified sequence
MVHVARLLLLLLTFFLRTDAETPPRFTRTPVDQTGVSGGVASFICQATGDPRPKIVWNKKGKKVSNQRFEVIEFDDGSGSVLRIQPLRTPRDEAIYECVASNNVGEISVSTRLTVLREDQIPRGFPTIDMGPQLKVVERTRTATMLCAASGNPDPEITWFKDFLPVDTSNNNGRIKQLRSGRVFHTGALQIEQSEESDQGKYECVATNSAGTRYSAPANLYVRVNRKVRRVPPRFSIPPTNHEIMPGGSVNITCVAVGSPMPYVKWMLGAEDLTPEDDMPIGRNVLELNDVRQSANYTCVAMSTLGVIEAIAQITVKALPKPPGTPVVTESTATSITLTWDSGNPEPVSYYIIQHKPKNSEELYKEIDGVATTRYSVAGLSPYSDYEFRVVAVNNIGRGPPSEPVLTQTSEQAPSSAPRDVQARMLSSTTILVQWKEPEEPNGQIQGYRVYYTMDPTQHVNNWMKHNVADSQITTIGNLVPQKTYSVKVLAFTSIGDGPLSSDIQVITQTGVPGQPLNFKAEPESETSILLSWTPPRSDTIANYELVYKDGEHGEEQRITIEPGTSYRLQGLKPNSLYYFRLAARSPQGLGASTAEISARTMQSMFAKNFHVKAVMKTSVLLSWEIPENYNSAMPFKILYDDGKMVEEVDGRATQKLIVNLKPEKSYSFVLTNRGNSAGGLQHRVTAKTAPDVLRTKPAFIGKTNLDGMITVQLPEVPANENIKGYYIIIVPLKKSRGKFIKPWESPDEMELDELLKEISRKRRSIRYGREVELKPYIAAHFDVLPTEFTLGDDKHYGGFTNKQLQSGQEYVFFVLAVMEHAESKMYATSPYSDPVVSMDLDPQPITDEEEGLIWVVGPVLAVVFIICIVIAILLYKRKPYRKRAESDSRKSSIPNNKEIPSHHPTDPVELRRLNFQTPGMASHPPIPILELADHIERLKANDNLKFSQEYESIDPGQQFTWEHSNLEVNKPKNRYANVIAYDHSRVLLSAIEGIPGSDYVNANYIDGYRKQNAYIATQGSLPETFGDFWRMIWEQRSATVVMMTKLEERSRVKCDQYWPSRGTETHGLVQVTLLDTVELATYCVRTFALYKNGSSEKREVRQFQFTAWPDHGVPEHPTPFLAFLRRVKTCNPPDAGPMVVHCSAGVGRTGCFIVIDAMLERIKHEKTVDIYGHVTLMRAQRNYMVQTEDQYIFIHDALLEAVTCGNTEVPARNLYAYIQKLTQIETGENVTGMELEFKRLASSKAHTSRFISANLPCNKFKNRLVNIMPYESTRVCLQPIRGVEGSDYINASFIDGYRQQKAYIATQGPLAETTEDFWRMLWEHNSTIVVMLTKLREMGREKCHQYWPAERSARYQYFVVDPMAEYNMPQYILREFKVTDARDGQSRTVRQFQFTDWPEQGVPKSGEGFIDFIGQVHKTKEQFGQDGPISVHCSAGVGRTGVFITLSIVLERMRYEGVVDIFQTVKMLRTQRPAMVQTEDQYQFSYRAALEYLGSFDHYAT

SEQ ID NO: 33125 - DNA, 4509 bp, Artificial Sequence
  derived and/or modified sequence
atggtgcatgtggctaggcttctccttcttttactcacgttcttcttgagaactgacgctgaaacaccaccacgctttaccagaacacccgtggatcaaactggagtgtctggaggagtcgccagttttatctgccaggccacgggtgatccgcggcccaagatcgtgtggaacaagaaggggaagaaggtgagcaatcaaaggtttgaggtcatcgaattcgacgatggttccggttcagttttacgaatccaacctctccggacaccgagggacgaggcgatttacgagtgcgttgccagtaacaacgtcggtgaaatctcagtttcaacaagattgacagtgctgagggaagaccagatccccaggggttttcctactatcgatatgggaccccaactgaaagtggtggaacgaactaggacagctacaatgttgtgtgctgcatcaggcaatcctgaccctgagatcacatggtttaaggacttcctgccagtggatacatctaacaataatggcaggatcaaacagctccgttccggtgggactcccattagaggcgccctgcagatcgagcaaagtgaagagagtgaccagggcaagtacgagtgcgtggccaccaacagcgcagggactcgatatagcgccccggctaacctgtatgtgcgcgagctcagggaggtgagaagagtcccgcctcggttcagcattcctccgaccaatcacgagattatgcctggcggatccgtcaacattacgtgcgttgccgtgggctccccaatgccttacgtgaagtggatgctgggagccgaagacctaaccccagaggacgatatgcccatcggacgcaatgtcctcgagttgaacgatgttaggcagtccgccaattatacctgtgtcgctatgtccacccttggcgtgattgaggccatcgcccagattaccgtgaaggccctcccaaaaccccctggcactcctgtggtcacagaatccaccgcaacatctatcactctcacctgggattcaggcaatcccgaacccgtatcctattacataatacagcataaacctaagaactctgaggagctctataaggagatagatggggtcgcaacaacaaggtactccgtggccggtctgtccccttacagcgattacgaattccgagtcgtggcagtgaacaacattgggcggggtcccccttctgagcctgtcctcacccagacgtcagagcaggccccgtcttccgctccacgggacgtgcaggccaggatgctgtcttctaccacaattctagtgcagtggaaggaacccgaggaaccaaatggacaaatccagggttacagggtctactacactatggaccccacgcagcacgttaataattggatgaagcacaacgtcgcagactcccagattaccactatcggcaacctcgtgccgcagaagacttacagtgtgaaggtgcttgcatttacaagcattggagacgggccgctgagctctgatattcaggtaataacgcagaccggtgtccctgggcaacctctcaacttcaaggctgagccagagagcgaaacgagtatcctgctcagctggacccctccgagatctgatacaattgccaattacgagctggtgtataaagacggcgaacatggcgaagaacaacgtataacaatcgaacctgggacttcttacaggttgcagggcctcaagcctaattcactctattactttagattagccgcgagatcacctcaaggcctgggtgcctctacggccgagatctccgccaggacaatgcagagcatgttcgcaaaaaatttccatgtgaaagctgttatgaaaacgtctgttttgctctcttgggagatacctgagaattataatagcgcaatgccctttaaaattctctatgacgatggcaaaatggtggaggaagtggacggaagggccacccaaaaactcatcgttaaccttaaacctgaaaagtcttactcgttcgtgctcacgaacagagggaacagcgcaggaggactgcagcacagggtcactgcaaaaaccgcacccgacgtgctccggaccaagcccgcattcatcgggaagacaaacctagacgggatgatcaccgttcagcttccagaggtgcctgcaaacgaaaacattaaaggctattacattataattgttcccctgaagaagagtcgtgggaagttcatcaagccttgggagtcacctgatgagatggagctggatgaactactgaaggaaatctcaagaaagcggcgatccatcagatatggaagggaagtggagctgaagccgtatatcgccgcccattttgacgtcttgcccaccgaattcactctgggggatgacaagcactacgggggttttactaacaagcaactgcagagtggtcaagaatatgtattcttcgttctggccgtgatggagcatgcagaaagtaagatgtacgctaccagtccgtactccgatcctgtcgtgtcgatggacctggatccccaacctatcacggatgaggaagaaggcttgatctgggtggtcggtccagtcttggccgtggtgtttattatttgtatagtaattgctattctcctctataagtctaagcctgatcgcaagcgtgccgagtccgatagccgaaagagtagtatcccaaataacaaagaaatcccaagtcaccaccccacagaccctgttgaacttcgccggttgaatttccagactcccggcatggccagccacccgccaataccaatcctggaattggccgatcacattgaacggctgaaagccaacgacaacctcaagttttctcaagaatatgagagtattgaccctggccaacagtttacctgggaacattcaaacttggaagttaacaagcccaagaatcggtacgccaatgtgattgcctacgatcacagccgagtgctcctctcagccatcgagggcatccctggtagtgactatgtgaacgcaaactacattgacggatatagaaagcaaaacgcctacattgctacccagggatccctcccagagacctttggggatttttggcgcatgatctgggaacagcgatctgccacggtggtaatgatgaccaagttggaagagaggagccgcgtgaagtgcgaccagtattggcccagtcgcggcactgaaacacacggtctggtccaggtcactctgttggacacagtggagctcgctacttactgtgtccggacttttgcgctctataagaatgggagttctgagaaacgggaggtgagacagtttcaattcaccgcctggcctgaccatggggtgcccgagcacccaactccttttttggcctttctgcgaagagttaagacctgcaaccccccagacgccggacctatggtggtgcattgctctgccggcgtgggaaggacaggttgtttcattgtaattgacgcaatgctggagaggatcaagcatgaaaagacagtggacatctatgggcacgttacactcatgcgggcacagcggaattacatggtgcaaaccgaagaccagtatatttttattcacgatgccctgttggaggccgtgacatgtggaaatacggaggtgccggccaggaacctctatgcttatatccaaaagttaactcagatcgagacaggggaaaatgtaaccggtatggagctggagttcaagcgcctggccagcagtaaggctcacacatcccgattcatctccgctaatctgccttgtaacaagtttaagaaccggttagttaatattatgccgtatgaatccaccagagtttgtctccagcccatccgaggcgtggagggctccgattacattaatgcctcctttatcgacggataccggcagcagaaagcgtacatcgcaacacaaggcccgctggcagaaacgacagaagacttttggaggatgctctgggagcacaacagtacgattgtggtgatgctgaccaaactgagagagatgggacgcgaaaagtgtcaccaatactggcccgctgaacgttctgcacgttatcagtacttcgtggtggatcccatggctgagtacaatatgcctcagtacatcctgagggagtttaaagtgaccgacgctcgcgatggacaatctcgaactgtccgacagtttcagttcaccgactggccagagcagggcgtgccaaagagtggagaggggtttattgattttatcgggcaggtgcataaaacaaaggagcagttcggacaggacgggcccatttccgtacactgttcagccggcgtgggtcgaactggtgtgttcattacacttagtatagtcctggaaagaatgcgatatgaaggagttgtggatatctttcagacagtgaaaatgttacgaacgcagaggcctgccatggtccagacggaggatcagtatcagttctcgtatagggctgccctggaatatctggggtcttttgaccactacgcaacatag

SEQ ID NO: 33126 - DNA, 4509 bp, Artificial Sequence
  derived and/or modified sequence
atggtccacgtggcgaggctgctgctgctgctgctcaccttcttcctgagaacggatgccgaaacaccccctcgtttcacgcgcactcccgttgatcagaccggagtgtccggcggggttgcatcttttatctgtcaggcaacaggagaccctaggccaaagattgtatggaacaaaaaaggcaagaaggtaagcaaccagagattcgaagtgatcgagttcgacgatgggagcggcagtgttctcaggattcagcccctgcgtacccctcgggatgaggcaatctatgaatgcgtggcttccaacaatgtcggcgaaatctctgtctcaactagacttaccgtgctgagggaggatcaaatacctcgaggattccctacaatcgacatgggcccccagctcaaagtcgtggagagaacgagaacagccacgatgctgtgcgccgccagcggcaatccggaccctgaaattacctggttcaaggactttctgcctgtcgatacaagcaataataacggaaggatcaagcaactgcgctcggggcgtgtgttccacacaggcgccctgcagatcgagcaatccgaggagtccgatcaaggaaagtacgaatgcgtcgctactaattctgccggcacccgctattcagcccccgctaacctttatgtgagagtcaatcggaaagttagacgcgtgcctcccaggttctctataccccctacaaatcacgagatcatgcccggaggctcagtgaatattacatgtgtcgcggtggggtctccgatgccatacgtcaagtggatgctaggtgctgaggatctgacaccagaggatgatatgccaattgggagaaatgtgctggagctgaatgacgtcagacagtcagctaattatacctgcgtcgcaatgtctacactcggtgtaattgaggcaatcgcccagataaccgtgaaggcgttaccgaaacctccaggcactcctgttgtcaccgagtctacagctacttctattaccttgacctgggactctggtaatcctgagcctgtgagttactacattatccagcataaaccaaagaactcagaagaactttacaaagagatcgacggggtggccacaacacgatattctgtcgctggcctgagcccctactccgattacgagtttcgggtggtggccgtgaacaacatcggtaggggcccccccagcgagcccgtcctaacacagacatccgagcaggccccctcttctgcaccgcgcgatgtgcaggcccgcatgctctcatcgacaacaatcctggtccagtggaaagagccagaggagcctaatgggcagatacaaggctatcgggtgtactacacaatggaccccacccaacacgtcaataactggatgaagcataatgttgcagatagtcagataacaaccataggcaacctggtcccacagaaaacatactctgttaaagtactggcattcaccagtataggagatgggcccttgtctagcgatattcaggtgatcacgcaaacaggagtgccaggacaaccacttaactttaaggccgaacccgagagcgaaacatctatcttgctttcctggaccccccccagatctgataccatagcaaattacgagctcgtgtataaggacggtgagcacggcgaagaacaaagaattaccattgagccgggaacctcctaccgcctgcagggcctgaagcccaattccctctactatttccggctcgctgctcgatcgccccaaggtctgggggcctccaccgccgagatcagtgcgcgcacaatgcagagtatgttcgccaaaaatttccatgtgaaggctgttatgaagacgagtgtgctcctgtcatgggagattccagagaactacaatagcgccatgcccttcaaaatcttatatgacgatggtaagatggtagaagaagtcgacggacgggccacacagaaactgatagtgaatcttaagccagagaagtcgtactcatttgtgctgaccaatcggggcaattccgcgggtggcttgcagcaccgcgtgacggccaagacggcacctgacgtgctgagaacgaagccagctttcatcggtaaaaccaacctggatggcatgatcacggtccaactgcccgaggtccctgcgaatgaaaacattaaaggatactacattataatagtgcccctcaaaaaatcaagaggcaagtttatcaagccctgggagtctccggatgagatggaattagacgagctgttgaaggagatcagccggaagcgccgctccatccgctatgggcgggaagtcgaactcaagccatatattgctgctcacttcgatgtactgcccactgagtttaccctcggggacgacaagcactatggagggtttaccaataaacaactgcagtcaggccaagaatacgtgttcttcgtattggccgtcatggaacacgcagaatctaagatgtacgccacaagcccatactctgatccagtggtaagcatggacttagacccgcaacctataacagatgaagaagaaggactgatatgggtggtgggtccagttctggccgtggttttcattatatgtattgtgatagcgattctcctctacaaaaggaaaccatatagaaaaagagcggagtccgactcccggaagtcatcaatccctaataataaggagatccctagtcaccacccgaccgatccagtagagcttaggaggttaaatttccagacacctggcatggcttcacatcctcccattccaattctggaactggccgaccatattgagaggttaaaagctaacgataacttgaagttttcacaggagtatgagagtatagatcctggacagcagtttacatgggaacatagtaacctcgaggtgaacaaaccaaagaataggtacgccaatgtgattgcgtacgatcactctcgggtgctgttgtccgccatcgagggaatcccaggctctgactatgtcaatgcaaattacattgatggataccgcaaacagaacgcctacatcgccacgcagggctcactccctgaaacctttggtgatttttggcgcatgatatgggaacaaaggtctgcaacggttgtaatgatgacaaaacttgaagagagaagtagggttaagtgcgaccaatactggccatcacgcggcaccgaaacccacggtctggtgcaagtgaccctgctggatactgtagagcttgctacctactgcgtaagaacattcgcactgtacaaaaatggctcaagcgagaagcgagaggttaggcagttccaatttaccgcttggcctgatcacggagtgcccgaacacccaacaccattcctcgcattccttcgccgtgtgaaaacttgcaacccacccgatgcggggccgatggttgttcactgttcggctggggttggacggacaggctgctttatcgtcattgacgccatgctggaaagaatcaaacatgaaaaaacagtagacatatatggccacgtgacactgatgagagcccagcgcaactacatggtccagacagaggatcaatacatcttcatacacgacgccctgctcgaggccgtcacctgtgggaacacagaggtgcccgcccgcaacctctatgcctacatccagaaactgactcagatcgaaactggggaaaacgtgacaggcatggagctggaatttaagcgcctcgccagttctaaggctcatacaagcaggtttatcagtgcgaacttgccttgtaataagtttaagaacaggctggttaacatcatgccatacgagagcaccagagtgtgccttcaaccaatccgtggcgtcgagggaagcgactatatcaatgcttccttcattgatgggtatcgccagcagaaggcatacatcgcgacgcaggggccattggccgagaccacagaagacttctggcggatgctatgggagcataatagcaccattgtggtcatgcttaccaaactgagggaaatgggaagggagaagtgccatcagtattggccagcagaaagaagcgcccggtatcagtactttgtggtggacccaatggccgagtacaacatgccccagtatatactacgggagttcaaagtgacagacgcaagggatggacagtccagaaccgttaggcagtttcagttcacagactggccagagcagggcgtccctaaatccggagaaggcttcattgacttcatcgggcaggtgcacaagacaaaagagcaatttggacaggatggacctatttctgtccactgcagcgccggggtggggaggacaggcgtctttattacattgagtatagtgctggagcgcatgcgatatgaaggtgtggtggatatttttcagacagtcaaaatgctccgtacccagcgacctgctatggtccaaactgaggaccagtaccagttcagctatcgcgccgcactcgagtatttaggatcttttgaccactatgccacttag

SEQ ID NO: 33127 - DNA, 4509 bp, Artificial Sequence
  derived and/or modified sequence
atggtgcacgtggcccggctgctgctgctgctgctgaccttcttcctgaggacagatgctgagaccccaccccgcttcaccaggacccctgtggaccagacaggagtgtctggaggagtggccagcttcatctgccaggccaccggggacccccggcccaagatcgtgtggaacaagaagggcaagaaggtgagcaaccagagatttgaagtcatcgagtttgatgatggcagcggctctgtgctgcgcatccagcccctgcggaccccaagagatgaggccatctatgaatgtgtggccagcaacaacgtgggggagatctctgtgtccacccggctgactgtgctgcgggaggaccagatcccccggggcttccccaccatcgacatgggcccccagctgaaggtggtggagaggaccaggacagccaccatgctgtgtgccgccagcggcaacccagaccctgagatcacctggttcaaggacttcctgcctgtggacaccagcaacaacaacggccgcatcaagcagctgcggagcggcggcacccccatccggggggccctgcagatcgagcagagcgaggagagtgaccagggcaagtatgaatgtgtggccaccaacagcgctggcacccgctacagcgccccagccaacctgtatgtgcgggagctgcgggaggtgagaagagtgcccccacgcttcagcatcccccccaccaaccacgagatcatgcctgggggctctgtgaacatcacctgtgtggccgtgggcagccccatgccctacgtgaagtggatgctgggcgctgaggacctgaccccagaagatgacatgcccatcggcagaaatgtgctggagctgaatgatgtgcggcagagcgccaactacacctgtgtggccatgagcaccctgggcgtcatcgaggccatcgcccagatcaccgtgaaggccctgcccaagcccccaggcacccctgtggtgacagagagcacagccaccagcatcaccctgacctgggacagcggcaaccctgagcctgtgtcctactacatcatccagcacaagcccaagaacagcgaggagctgtacaaggagattgatggagtggccaccacccgctacagcgtggccggcctgagcccctacagcgactatgagttccgggtggtggccgtgaacaacatcggccggggcccccccagcgagcctgtgctgacccagaccagcgagcaggcccccagcagcgcccccagagatgtgcaggccaggatgctgagcagcaccaccatcctggtgcagtggaaggagcctgaggagcccaacggccagatccagggctacagagtgtactacaccatggaccccacccagcacgtgaacaactggatgaagcacaacgtggccgacagccagatcaccaccatcggcaacctggtgccccagaagacctacagcgtgaaggtgctggccttcaccagcattggagatggccccctgagcagtgacatccaggtgatcacccagacaggagtgcccggccagcccctgaacttcaaggccgagcctgagagcgagaccagcatcctgctgtcctggaccccacccaggagtgacaccatcgccaactatgagctggtgtacaaggatggagaacatggagaggagcagaggatcaccatcgagcccggcaccagctaccgcctgcagggcctgaagcccaacagcctgtactacttccggctggccgcccggagcccccagggcctgggcgccagcacagctgagatcagcgcccggaccatgcagagcatgtttgccaagaacttccacgtgaaggctgtgatgaagacctctgtgctgctgtcctgggagatccctgagaactacaacagcgccatgcccttcaagatcctgtatgatgatggcaagatggtggaggaggtggatggccgggccacccagaagctgattgtgaacctgaagccagagaagagctacagctttgtgctgaccaacagaggcaacagcgctgggggcctgcagcaccgggtgacagccaagacagccccagatgtgctgcggaccaagccagccttcatcggcaagaccaacctggatggcatgatcaccgtgcagctgcctgaggtgcctgccaatgaaaacatcaagggctactacatcatcatcgtgcccctgaagaagagccggggcaagttcatcaagccctgggagagcccagatgagatggagctggatgagctgctgaaggagatcagcaggaagagaagaagcatccgctatggccgggaggtggagctgaagccctacatcgccgcccactttgatgtgctgcccacagagttcaccctgggagatgacaagcactatggaggcttcaccaacaagcagctgcagagcggccaggagtatgtgttctttgtgctggccgtgatggagcacgccgagagcaagatgtatgccaccagcccctacagcgaccctgtggtgtccatggacctggacccccagcccatcacagatgaggaggagggcctcatctgggtggtgggccctgtgctggccgtggtgttcatcatctgcatcgtgattgccatcctgctgtacaagagcaagccagacaggaagagagctgagagtgacagcaggaagagcagcatccccaacaacaaggagatccccagccaccaccccacagatcctgtggagctgcggcggctgaacttccagaccccaggcatggccagccacccccccatccccatcctggagctggccgaccacatcgagcggctgaaggccaatgacaacctgaagttcagccaggagtatgagagcattgaccccggccagcagttcacctgggagcacagcaacctggaggtgaacaagcccaagaacagatatgccaacgtcatcgcctatgaccacagccgggtgctgctgagcgccatcgagggcatccctggcagtgactatgtgaatgccaactacattgatggctacaggaagcagaatgcctacatcgccacccagggcagcctgcctgagaccttcggggacttctggaggatgatctgggagcagaggtctgccaccgtggtgatgatgaccaagctggaggagaggagccgggtgaagtgtgaccagtactggcccagccggggcacagagacccacggcctggtgcaggtgaccctgctggacacagtggagctggccacctactgtgtgaggacctttgccctgtacaagaatggcagcagcgagaagcgggaggtgcggcagttccagttcaccgcctggccagaccacggcgtgcctgagcaccccacccccttcctggccttcctgcggcgggtgaagacctgcaaccccccagatgctggccccatggtggtgcactgcagcgctggggtgggccgcacaggctgcttcatcgtgattgatgccatgctggagcgcatcaagcatgagaagacagtggacatctacggccacgtgaccctgatgagggcccagaggaactacatggtgcagacagaggaccagtacatcttcatccatgatgccctgctggaggccgtgacctgtggcaacacagaggtgcctgccaggaacctgtatgcctacatccagaagctgacccagattgaaacaggagaaaatgtgacaggcatggagctggagttcaagaggctggccagcagcaaggcccacaccagccgcttcatcagcgccaacctgccctgcaacaagttcaagaaccggctggtgaacatcatgccctatgagagcaccagggtgtgcctgcagcccatccggggcgtggagggcagtgactacatcaatgccagcttcattgatggctaccggcagcagaaggcctacatcgccacccagggccccctggccgagaccacagaggacttctggaggatgctgtgggagcacaacagcaccatcgtggtgatgctgaccaagctgcgggagatgggccgggagaagtgccaccagtactggccagctgagaggtctgcccgctaccagtactttgtggtggaccccatggccgagtacaacatgccccagtacatcctgcgggagttcaaggtgacagatgccagagatggccagagcaggacagtgcggcagttccagttcacagactggccagagcagggcgtgcccaagagcggggagggcttcatcgacttcatcggccaggtgcacaagaccaaggagcagtttggccaggacggccccatctctgtgcactgcagcgctggggtgggccgcactggagtcttcatcaccctgagcatcgtgctggagaggatgagatatgagggcgtggtggacatcttccagacagtgaagatgctgcggacccagaggcctgccatggtgcagacagaggaccagtaccagttctcctacagagctgccctggagtacctgggcagctttgaccactacgccacctag

SEQ ID NO: 33128 - DNA, 4509 bp, Artificial Sequence
  derived and/or modified sequence
atggtgcacgtggcccggctgctgctgctgctgctgaccttcttcctgaggacagatgctgagaccccaccccgcttcaccaggacccctgtggaccagacaggagtgtctggaggagtggccagcttcatctgccaggccaccggggacccccggcccaagatcgtgtggaacaagaagggcaagaaggtgagcaaccagagatttgaagtcatcgagtttgatgatggcagcggctctgtgctgcgcatccagcccctgcggaccccaagagatgaggccatctatgaatgtgtggccagcaacaacgtgggggagatctctgtgtccacccggctgactgtgctgcgggaggaccagatcccccggggcttccccaccatcgacatgggcccccagctgaaggtggtggagaggaccaggacagccaccatgctgtgtgccgccagcggcaacccagaccctgagatcacctggttcaaggacttcctgcctgtggacaccagcaacaacaacggccgcatcaagcagctgcggagcggccgggtcttccacactggagccctgcagatcgagcagagcgaggagagtgaccagggcaagtatgaatgtgtggccaccaacagcgctggcacccgctacagcgccccagccaacctgtatgtgcgggtgaacaggaaggtgagaagagtgcccccacgcttcagcatcccccccaccaaccacgagatcatgcctgggggctctgtgaacatcacctgtgtggccgtgggcagccccatgccctacgtgaagtggatgctgggcgctgaggacctgaccccagaagatgacatgcccatcggcagaaatgtgctggagctgaatgatgtgcggcagagcgccaactacacctgtgtggccatgagcaccctgggcgtcatcgaggccatcgcccagatcaccgtgaaggccctgcccaagcccccaggcacccctgtggtgacagagagcacagccaccagcatcaccctgacctgggacagcggcaaccctgagcctgtgtcctactacatcatccagcacaagcccaagaacagcgaggagctgtacaaggagattgatggagtggccaccacccgctacagcgtggccggcctgagcccctacagcgactatgagttccgggtggtggccgtgaacaacatcggccggggcccccccagcgagcctgtgctgacccagaccagcgagcaggcccccagcagcgcccccagagatgtgcaggccaggatgctgagcagcaccaccatcctggtgcagtggaaggagcctgaggagcccaacggccagatccagggctacagagtgtactacaccatggaccccacccagcacgtgaacaactggatgaagcacaacgtggccgacagccagatcaccaccatcggcaacctggtgccccagaagacctacagcgtgaaggtgctggccttcaccagcattggagatggccccctgagcagtgacatccaggtgatcacccagacaggagtgcccggccagcccctgaacttcaaggccgagcctgagagcgagaccagcatcctgctgtcctggaccccacccaggagtgacaccatcgccaactatgagctggtgtacaaggatggagaacatggagaggagcagaggatcaccatcgagcccggcaccagctaccgcctgcagggcctgaagcccaacagcctgtactacttccggctggccgcccggagcccccagggcctgggcgccagcacagctgagatcagcgcccggaccatgcagagcatgtttgccaagaacttccacgtgaaggctgtgatgaagacctctgtgctgctgtcctgggagatccctgagaactacaacagcgccatgcccttcaagatcctgtatgatgatggcaagatggtggaggaggtggatggccgggccacccagaagctgattgtgaacctgaagccagagaagagctacagctttgtgctgaccaacagaggcaacagcgctgggggcctgcagcaccgggtgacagccaagacagccccagatgtgctgcggaccaagccagccttcatcggcaagaccaacctggatggcatgatcaccgtgcagctgcctgaggtgcctgccaatgaaaacatcaagggctactacatcatcatcgtgcccctgaagaagagccggggcaagttcatcaagccctgggagagcccagatgagatggagctggatgagctgctgaaggagatcagcaggaagagaagaagcatccgctatggccgggaggtggagctgaagccctacatcgccgcccactttgatgtgctgcccacagagttcaccctgggagatgacaagcactatggaggcttcaccaacaagcagctgcagagcggccaggagtatgtgttctttgtgctggccgtgatggagcacgccgagagcaagatgtatgccaccagcccctacagcgaccctgtggtgtccatggacctggacccccagcccatcacagatgaggaggagggcctcatctgggtggtgggccctgtgctggccgtggtgttcatcatctgcatcgtgattgccatcctgctgtacaagaggaagccctacaggaagagagctgagagtgacagcaggaagagcagcatccccaacaacaaggagatccccagccaccaccccacagatcctgtggagctgcggcggctgaacttccagaccccaggcatggccagccacccccccatccccatcctggagctggccgaccacatcgagcggctgaaggccaatgacaacctgaagttcagccaggagtatgagagcattgaccccggccagcagttcacctgggagcacagcaacctggaggtgaacaagcccaagaacagatatgccaacgtcatcgcctatgaccacagccgggtgctgctgagcgccatcgagggcatccctggcagtgactatgtgaatgccaactacattgatggctacaggaagcagaatgcctacatcgccacccagggcagcctgcctgagaccttcggggacttctggaggatgatctgggagcagaggtctgccaccgtggtgatgatgaccaagctggaggagaggagccgggtgaagtgtgaccagtactggcccagccggggcacagagacccacggcctggtgcaggtgaccctgctggacacagtggagctggccacctactgtgtgaggacctttgccctgtacaagaatggcagcagcgagaagcgggaggtgcggcagttccagttcaccgcctggccagaccacggcgtgcctgagcaccccacccccttcctggccttcctgcggcgggtgaagacctgcaaccccccagatgctggccccatggtggtgcactgcagcgctggggtgggccgcacaggctgcttcatcgtgattgatgccatgctggagcgcatcaagcatgagaagacagtggacatctacggccacgtgaccctgatgagggcccagaggaactacatggtgcagacagaggaccagtacatcttcatccatgatgccctgctggaggccgtgacctgtggcaacacagaggtgcctgccaggaacctgtatgcctacatccagaagctgacccagattgaaacaggagaaaatgtgacaggcatggagctggagttcaagaggctggccagcagcaaggcccacaccagccgcttcatcagcgccaacctgccctgcaacaagttcaagaaccggctggtgaacatcatgccctatgagagcaccagggtgtgcctgcagcccatccggggcgtggagggcagtgactacatcaatgccagcttcattgatggctaccggcagcagaaggcctacatcgccacccagggccccctggccgagaccacagaggacttctggaggatgctgtgggagcacaacagcaccatcgtggtgatgctgaccaagctgcgggagatgggccgggagaagtgccaccagtactggccagctgagaggtctgcccgctaccagtactttgtggtggaccccatggccgagtacaacatgccccagtacatcctgcgggagttcaaggtgacagatgccagagatggccagagcaggacagtgcggcagttccagttcacagactggccagagcagggcgtgcccaagagcggggagggcttcatcgacttcatcggccaggtgcacaagaccaaggagcagtttggccaggacggccccatctctgtgcactgcagcgctggggtgggccgcactggagtcttcatcaccctgagcatcgtgctggagaggatgagatatgagggcgtggtggacatcttccagacagtgaagatgctgcggacccagaggcctgccatggtgcagacagaggaccagtaccagttctcctacagagctgccctggagtacctgggcagctttgaccactacgccacctag

SEQ ID NO: 33129 - DNA, 4509 bp, Artificial Sequence
  derived and/or modified sequence
atggtgcacgtggcccggctgctgctgctgctgctgaccttcttcctacgcacggacgctgaaacaccccctcggttcacgcgaacgccagtcgaccagaccggtgtcagcggcggcgtcgcctctttcatctgccaggctacaggcgatcctaggcccaaaatagtttggaataagaaaggcaaaaaggtcagtaatcagcgctttgaggtcattgagttcgatgatggtagtggttctgtcctccgcatccagcccctgcggacgccccgcgacgaagctatttatgaatgcgttgcgtctaacaacgtgggggagatcagtgtcagcactcgcctaacagttctgcgggaagatcagatacctcgagggttcccgactatagacatgggccctcaactaaaggtcgtagaacgtactcgcaccgcaaccatgctttgcgccgccagtggcaatccagacccagagataacctggttcaaggatttccttccagttgacacctctaacaataatgggaggatcaaacagctgcgcagcgggggaacacctatccgtggggctctgcagatcgaacagtccgaagaatcagatcagggcaaatacgaatgtgtggcaacaaattcggccggcacacgttacagcgcaccagcaaacttatatgtccgcgagctgcgcgaggtcaggcgagtaccccctcggttctccattccacccaccaatcacgaaattatgcctggaggctctgtgaacataacctgcgtagcagtgggatccccaatgccctatgtaaaatggatgctgggtgccgaggacctaaccccagaagacgatatgccaatcggacggaatgtgctggaacttaatgacgtacggcagtcagccaactacacgtgcgtagccatgtctactctgggcgtcattgaagccatcgctcagattactgtgaaagctcttccaaagcccccagggacaccggttgtgactgaaagtaccgctactagcatcacactgacctgggactctgggaaccctgagcccgtgtcctattatataatacaacataaaccaaagaattcggaagaactgtataaagaaatcgatggggtcgccacaaccagatactctgtagccgggttgagtccctacagcgattatgagtttcgggtcgtcgcagtgaacaacatcggaaggggtccccctagcgagccagttctgacccagacatcagagcaggcaccgtctagcgcccctcgggatgtccaggccaggatgctgagtagcaccaccattctcgtccaatggaaggaacccgaagagccaaatggccagatccagggctaccgcgtctactatactatggaccctacccagcatgtaaacaattggatgaaacataatgtcgctgactctcagataaccacaatcggaaaccttgtgccccagaaaacatactccgtcaaagtcctcgcttttactagcatcggagacggtccgctctcgagtgatatacaggtgatcacacagacaggtgtgcctggacagccactaaacttcaaggcagaacctgaaagtgaaacttctatactcctctcctggaccccgccaaggagtgacactatcgcaaattatgaattggtgtacaaggatggggagcacggcgaagagcaaagaatcactatcgaaccaggcaccagctacaggctgcaaggcctgaaaccaaattccctatattacttccggctagctgccagaagcccccagggcctcggggccagcacagctgaaatttccgctcgtactatgcaaagtatgttcgccaaaaattttcatgtgaaggcggttatgaaaacatctgtcctacttagctgggaaatccctgagaattacaactccgctatgccctttaaaatcttgtacgatgacggcaaaatggtggaagaagtggacggaagggccacacagaagcttattgttaacttgaagccagaaaaaagctacagctttgttctgacaaaccgcggtaatagtgcgggggggctgcagcaccgcgtgactgcgaaaacagcccccgatgtcctgcgcactaagcccgcatttataggcaagactaacctcgacgggatgataaccgtccagctgcccgaggtgccagcaaacgaaaacatcaaggggtactacattatcatcgtcccattgaagaaatctcggggcaaattcataaaaccgtgggaaagccctgatgaaatggagctggacgaactgttgaaagagatctccaggaaacggcgctccatccggtacggcagagaggtggaactgaaaccatatatcgctgctcattttgatgtgctgcctactgagttcacacttggcgacgataagcattacggaggatttaccaataagcagttgcaatccgggcaggaatacgttttttttgttctcgccgtgatggagcacgccgaaagcaagatgtacgctacaagtccctactcagacccggtcgtgtcaatggaccttgatccccaacccattaccgatgaggaggaaggacttatctgggttgtgggccccgtgctagcggtggtatttatcatatgtatcgtgatcgctatactactatacaagtctaagcctgaccgcaaacgcgcagagtccgactcacgaaagtcctcgattcctaacaataaagagattccatctcaccacccaacagaccctgtggagctgagacgtctcaacttccagactcccggtatggcctcgcaccctccgatcccgattctggagcttgccgaccacatcgagagattaaaggctaacgacaacctgaagttcagtcaggaatacgaaagtatcgatcccgggcaacagttcacatgggagcacagtaacttggaagtgaataagcccaaaaatcggtatgccaatgtgattgcatatgatcactctagggtgctgcttagcgcaattgaagggatacccggatccgactacgtaaatgccaattacatcgatgggtacaggaagcagaatgcctacatcgcaacgcagggatctcttccggaaacgttcggtgacttttggcggatgatctgggagcagaggagcgccaccgtggtgatgatgacaaaactggaagagcggagcagagtgaagtgcgatcaatactggcccagccgcgggactgagacccacgggttagtccaggtgacactgctggacacggttgaactggccacttattgcgtcagaaccttcgctttatacaaaaatgggagttctgaaaagagggaggtgcgacaattccagtttacagcctggccagatcacggagtacccgagcaccccacaccttttttagcattcctgagacgcgtcaagacctgcaatcctccggacgccggtcctatggtggtgcattgctccgccggcgtggggcggaccggctgcttcatcgtcatcgacgccatgctcgaaagaattaagcacgagaaaacagttgacatctatggccacgtcacactgatgagagcacagagaaattatatggtacaaactgaggatcagtacattttcatccacgatgctctcctggaggctgtgacctgtggaaacacggaggtgccagccagaaatttatacgcatacatccagaagctcacacagatcgagaccggcgaaaacgtgaccggcatggaactggagttcaagaggcttgcctcctcaaaagcgcacacctcccggttcattagcgcaaatctgccatgtaataagttcaagaatcgcctggtgaacataatgccgtacgaatctacgagggtttgtctgcaacctattagaggagttgaaggctctgactatatcaacgcttcgttcatcgatggataccggcaacagaaggcatatatcgccacccaggggcccctggcagagacaacagaagacttttggaggatgctctgggaacacaatagtacaattgttgtgatgctgactaaactccgggaaatgggacgcgagaagtgtcatcaatattggccagctgaacgctcagcccggtaccagtactttgtggtcgatcctatggctgaatacaatatgccacaatatatcctgcgcgagttcaaggtgacagatgctcgtgatggccagagccggacagtgcgccagtttcagtttacagactggcctgaacagggggtgccaaagtccggcgaggggttcatcgactttattggccaggtgcacaaaactaaggagcagttcggtcaggacggtcccatcagtgtgcattgtagtgcgggcgtagggagaacgggcgttttcatcactctgtccatagttcttgaaagaatgagatacgagggtgttgtggacatctttcagaccgtgaagatgctccgtacccaacgacccgcaatggttcaaactgaagatcagtaccagttctcataccgtgccgcactggaatatctaggcagcttcgatcattacgcaacttag

SEQ ID NO: 33130 - DNA, 4509 bp, Artificial Sequence
  derived and/or modified sequence
atggtgcacgtggcccggctgctgctgctgctgctgaccttcttcctgagaactgatgcagagactccacccagatttacacgcaccccagtcgaccagacaggagtgagtgggggcgttgcaagcttcatttgccaggcaaccggcgatcccagaccaaaaattgtgtggaataagaagggtaagaaggtctcaaatcaaaggtttgaggtaattgagtttgacgatggttctggatccgttctgcgcatccagccacttcgcacgccacgggacgaggcaatctacgagtgcgtggcttcaaataatgtgggggaaatctctgtgtctacgcgcctgaccgtgttgcgtgaagaccagattccccgaggtttcccaacgatcgacatgggcccgcagctcaaagtggtcgagcgaacacgtactgctaccatgttatgcgccgcatcaggcaatccagatccagagattacgtggtttaaggatttcctgcccgttgatacctcgaataataatggccggattaagcagctgcggtctggaagagtcttccacactggggcactgcagatcgagcagagtgaagaaagtgatcagggaaaatatgagtgcgtggctaccaattccgctgggacaagatattcagcacctgccaatttatatgtgcgggttaaccgcaaggtcaggagagtgcccccccgcttttcgattcctcccactaatcacgaaatcatgccagggggctcagtgaatatcacctgtgtagccgtgggttcacccatgccgtacgtgaagtggatgctgggcgctgaagatctcacaccagaggacgatatgccaataggaaggaatgttctggagctgaatgacgtccgccaatccgcaaattatacttgtgttgccatgtctacgctgggggtcatcgaggcgatcgcccaaattacagtcaaggccctgcccaaacctccaggcactcctgtggtaacggagtcaactgccacgagtataacgctaacatgggatagcgggaacccagagcctgtgtcttattatattatccaacataagcccaaaaattcagaagagctgtataaggagattgacggcgtcgcaaccacgcgttattcagtggcaggcctgtcgccatatagcgattatgagttccgcgtggtagccgtgaataacatcggccggggacctccgtcagaacccgtgcttacacaaacaagcgaacaagcacctagcagcgcccctagagatgtccaagcccggatgcttagctcaaccaccattctggttcagtggaaggaacctgaggagcccaacggtcagattcaaggatacagggtttattacacaatggaccccacccagcacgtgaataactggatgaaacataacgttgccgatagtcaaattacgactatcggtaacctcgtcccacaaaagacctacagcgttaaggtccttgcctttaccagcatcggagatggacctctctcttctgatattcaggttattactcagaccggagtacctggtcagccactgaacttcaaagcagagcccgagtccgagactagtattttactcagctggaccccaccacgtagtgatacaattgctaattatgagctggtttacaaagacggggagcacggtgaggagcagcggatcactattgaacccggcacttcatataggctgcaaggcctgaagcctaattcactttactattttagactggctgcccggtctccccagggccttggggcttccacggctgaaatcagtgctaggacaatgcagtctatgtttgctaagaatttccatgtaaaagccgtgatgaaaacatccgttttactgagttgggagatccccgagaactataatagtgcgatgcctttcaagattctttatgacgatggcaaaatggtggaggaagtcgatggtcgagcaactcagaagctgattgtgaacttgaaacccgagaagtcctattccttcgtactcactaatcggggtaacagcgctggaggactccagcatcgcgtgaccgctaagaccgcccccgacgtgctgaggaccaagccagcttttatcggcaaaactaacctcgatgggatgatcacagtgcagttacctgaggttcccgccaacgagaacatcaaaggatactacatcatcatcgtgcctctgaagaaatcccgaggcaaatttatcaagccctgggagagccctgatgagatggagctggatgagctgctcaaagagatctcaaggaaaaggaggagtatccgctacggccgcgaggtggagttaaagccttacattgcagctcacttcgacgtgctgccaactgagtttaccctgggcgacgataagcattacggcggcttcacaaacaagcagctgcagtccgggcaagaatatgtgttctttgtattggcagtaatggaacatgccgaaagcaagatgtacgcaacaagcccgtactccgatccagtcgtcagcatggatctggatccacagcccatcactgatgaggaagaggggcttatttgggtggtgggacccgtcctggcggttgtgttcatcatttgcatcgtgatagcaattctgctatataaacgcaagccgtaccgcaaacgtgctgagagtgatagcaggaaaagttcaattccaaataataaagagataccaagccaccaccctaccgatccggtcgagcttaggagactgaactttcagacacccgggatggcctcccaccccccaattcctattttagaactggcggaccacatcgaacgcctaaaagcgaacgataacctgaaatttagtcaagagtatgagtctatcgaccctgggcagcagtttacttgggaacactcaaatcttgaggttaacaaacctaagaatcggtatgccaacgttattgcctatgaccattccagagtcctgctgtctgccatcgaagggattccgggctctgattacgtgaatgccaactacattgacggatatcggaagcagaatgcctatatcgctactcaaggctccctgccggagacatttggcgacttttggcgcatgatttgggaacagcgctctgctactgtagtgatgatgacaaagctggaagagcgaagtagggttaaatgcgaccagtactggccatctcggggcactgaaactcacggtcttgtccaagtgacacttctagatacagtagagctggcgacatattgcgtgagaacattcgccctctacaaaaacgggtcctcagagaaaagggaagttcgtcaatttcagttcactgcgtggcctgatcacggggtgcccgagcaccctacgccattcctcgcgttcctcaggagggtaaagacttgcaacccaccagacgcgggtccaatggtggtccactgttcagccggggtgggtagaaccggctgctttatcgtgattgacgctatgctggaacgcatcaagcacgagaagaccgtggacatctatgggcacgtcacgctgatgcgcgcgcagaggaattacatggttcagactgaggatcaatatatctttatccacgacgccttactggaggccgtgacttgcggaaataccgaggtccccgcaagaaatctctatgcatacatccagaaactcacccagatagagacaggcgaaaatgtgaccgggatggagttggagttcaagagactcgcctccagcaaagcacacacctctcgcttcatcagcgctaacttgccctgcaacaaatttaagaatagactggtgaacattatgccctatgaaagcacgcgagtctgtctgcaaccaatcagaggggtggaagggagcgactatatcaacgcgtcattcatcgacggataccggcaacagaaggcctatatagctacccaggggcccctcgccgagaccacagaagatttctggaggatgttatgggaacataatagtactatcgtggtaatgctcactaaattgcgcgagatgggcagagagaaatgccatcagtattggcccgccgaacggtccgcacgctaccagtactttgtggtcgaccccatggccgagtataatatgccccagtatatattgcgcgaatttaaggtcacagacgccagagatggacagagtcgaaccgttcgtcagtttcagtttacagactggcccgagcaaggcgtgccaaaatcaggagaaggttttatcgatttcattggccaagtccacaaaaccaaggaacagtttggccaggacggacctatcagcgttcattgttccgctggagttggtagaaccggggtttttataaccctgagcatcgtgctggaaagaatgcgctatgagggagtagttgatatcttccagactgtgaagatgctgcgaacccagagacctgctatggttcagaccgaggaccagtatcagttcagttaccgggctgcgcttgaatacctcggaagctttgaccattacgcaacctag

SEQ ID NO: 33131 - DNA, 4509 bp, Artificial Sequence
  derived and/or modified sequence
atggtgcacgtcgctagactgctgctcttgcttctgactttttttctgagaactgatgcggagacaccgcctagattcacacgtactccggtggatcaaaccggcgtctccggtggcgtggcctcttttatctgtcaggcaacaggtgaccccagaccgaaaatagtgtggaacaaaaaaggcaaaaaggtgagcaatcaaaggttcgaggtgatcgagtttgatgatgggtccggctcagtgctcagaatccagccactacggaccccacgcgacgaggctatctatgagtgcgtggcctccaacaatgttggagagatcagcgtgagcacacggctgaccgtcctccgagaggatcagataccaagaggctttccaacaatcgacatgggaccacaactcaaagtggtggagcggactagaaccgcaaccatgctctgcgctgcgagtggaaatccggaccccgaaataacctggtttaaagactttctccccgtcgacacctccaacaacaacggccgaatcaagcaattaagaagcgggggaactcctattagaggagcgcttcaaatcgagcagtccgaagagagcgatcagggaaaatatgagtgcgtggccaccaactccgccggtacccgttactcagcacccgcaaacctctatgtgcgggagctacgagaggtgagaagggtgcctccgaggttctccattcccccaaccaaccacgagatcatgcctggcggttctgttaacattacatgtgtggcagtaggctctccaatgccctatgtgaaatggatgctgggcgctgaagacctcacgccagaagatgacatgccaattggccgaaacgtccttgaactgaacgacgtgagacagtccgcaaactatacatgtgttgccatgagcacacttggagtgatcgaagccattgcacagatcacagtcaaagccctacccaaacctccagggaccccagtcgtcacagagtcaaccgccaccagcataaccctcacatgggactctggaaaccccgagcctgtatcctactatatcatccagcacaaacccaagaatagtgaggaactttataaagagattgacggagtggctactactcgctatagcgtggctggtttgtcgccctatagcgactatgaattccgcgtcgtggcggtgaacaatattggacgcggacctccgtccgagcctgtgttgacacaaacttctgaacaggctcctagctctgcccctcgagatgtgcaggcacgcatgctgtcatcgacgaccatactggttcaatggaaggaacctgaagagcctaacgggcagatccaaggatatcgcgtgtactacaccatggatccgacacaacacgtcaataactggatgaagcacaacgtggctgactcgcagatcaccactatcggcaatctggtgccccagaaaacttactctgttaaggtgctcgcctttactagcatcggggacggtcctctttccagcgacatacaggtcattacacagacgggtgtgcccggtcagcccttgaatttcaaagcggaacctgagagcgagacttctattcttctgagctggacaccaccccgatccgacacgatcgccaactatgagctcgtgtataaagacggcgagcacggtgaggagcaacggattactatcgaacccggtacctcttatcgtcttcaaggcctcaagcctaactctctttactactttagactcgccgcaaggagccctcagggactcggtgcaagtaccgctgagatctccgcacgtactatgcaaagcatgttcgctaagaatttccatgtaaaagcagtgatgaagacgtctgttctgttgtcttgggaaatcccggagaactataactctgcaatgccctttaagatcctctacgatgatggaaaaatggtagaagaggtggatgggagggcgacccagaaactgattgtcaacctgaaacccgaaaagtcctactccttcgtcctgaccaaccgaggtaacagcgccggagggctgcaacaccgtgtgacggctaaaactgcgcctgatgtgctgcgcactaagccagccttcatcgggaaaaccaatctggatggtatgattaccgttcagctgcccgaggtgcccgcaaatgaaaacatcaaaggttactatataattattgttcctctgaagaagagccggggaaagttcattaagccatgggaatcccccgacgaaatggagctggatgagctgctcaaggagatcagcagaaagagaaggtccattcgctacggacgggaagtcgaacttaagccctacatcgccgcacacttcgacgtgttacccactgagtttactctgggtgatgataagcactatgggggtttcactaacaagcagctgcaatctggccaggagtatgtattcttcgtcctggcggtcatggagcacgctgaaagcaagatgtatgcaacgtccccctatagcgacccagtcgtatccatggacctggatcctcagcccatcaccgatgaggaggaaggcttgatttgggtggttggcccagtgctggccgtggtgttcatcatctgtattgtcatagctatccttttgtataaaagtaaacccgaccgtaagcgtgctgagagcgactctagaaaatcaagcatccctaataataaggaaattccctcacatcatccaactgatcccgtcgagttgaggcgcctgaatttccaaacaccgggaatggcttcacatcctcctatccctatcctcgaactcgccgaccatattgagcgccttaaagccaacgataatttgaagttcagtcaggagtacgaaagtatcgaccctgggcagcaattcacctgggagcactcaaacctggaggttaacaaacccaagaatcgatacgccaacgtaatcgcatacgatcactccagggtgttactgagtgctatcgaaggcatccctgggtctgactacgtgaatgctaattatatagatggttatcgcaagcagaacgcctacatcgcgacccagggctcccttcctgaaacctttggagacttttggcgcatgatctgggagcagcgtagcgccactgtggttatgatgaccaagctggaagaaaggagtcgtgtaaagtgtgatcagtactggccgtcacgcggaactgaaacacacggactcgtgcaggtgaccctgctggatactgttgaactggctacgtattgcgtgagaacattcgctttgtataaaaatggcagtagcgagaaacgggaggtgcggcagttccagttcaccgcttggccagatcacggagtgcccgagcatccgacgcctttcctcgcttttctgaggagagtcaagacatgtaatcctcccgacgctggtcccatggtggtgcactgctccgctggagttggacggactggatgttttattgtcatcgatgccatgctcgagcgaataaaacacgagaaaactgtggacatctatggtcacgtgactctcatgcgcgctcagcgtaattacatggtgcagacggaagaccaatacatttttatccacgacgcactgctggaggcagtaacgtgcggtaataccgaggtgccagctaggaacctctacgcgtatattcagaagcttacccagatcgagacaggggagaacgttaccggtatggagttagagttcaaacgcttggcatccagcaaggcccacacgagccgcttcatcagtgcaaacctgccgtgtaataagttcaagaaccggcttgtgaacatcatgccttacgaatccacacgggtgtgcctccagcctataagaggagtggaagggtccgattacattaatgcctcttttatagatggatatcgacagcagaaagcttacattgcgactcagggacccctcgcagagacaactgaggatttttggcgtatgctgtgggagcataattctactattgttgttatgttgacaaaacttcgcgagatgggacgggagaaatgccatcaatactggcccgcagagagatcggctaggtaccaatacttcgttgtggaccccatggccgaatacaacatgccccagtacatcctccgggagtttaaagtaactgatgccagggatggacagtcccgaactgtgcgccagttccaatttaccgattggcccgagcaaggtgtccccaaatctggagagggctttattgatttcatcggacaagttcacaaaacaaaggaacagtttggtcaggacgggccaatcagcgtccattgtagcgcaggagtggggagaacaggtgtctttatcactttaagcattgtgctggaacgcatgcgctacgaaggcgtcgtggacatcttccaaactgtaaaaatgctgaggactcagagacctgcgatggtgcagaccgaggaccagtaccaattttcatatcgagccgcactggaatatctcggctccttcgaccactatgcgacatag

SEQ ID NO: 33132 - DNA, 4509 bp, Artificial Sequence
  derived and/or modified sequence
atggtgcatgtggcaaggttgctgctgcttctcctgaccttctttctccgtacggatgccgagactccaccaaggttcactcgcaccccagtagatcagacaggggtatctggaggcgtcgcctctttcatctgtcaggctacaggtgaccctcgcccaaagatcgtctggaacaagaaaggcaaaaaggtgtcaaatcaacgcttcgaggtcatcgaattcgacgacgggtccgggtctgtgctgcgcatccagccgcttagaacacccagggacgaagccatctacgagtgcgtggcctccaacaatgtgggggagatcagcgtcagtaccaggctcacagtgttgcgggaggaccagattcctcgaggattccccactatagatatgggaccccagctaaaagtggtcgagcgtactcggaccgccactatgctttgtgctgccagcggcaacccagacccggaaatcacctggttcaaagactttcttcctgttgatacgagcaacaataatggccgaatcaaacaacttcggagtggaagggtcttccatacaggggcactacaaattgaacagtctgaggaatccgaccaggggaaatatgagtgtgtggcgaccaatagtgcagggacacggtactccgctccagctaatctgtacgtaagagtcaatcggaaggttaggagggtgccacccaggttctctatacccccaacgaaccacgagattatgccgggaggcagcgttaacatcacctgtgtggcggtcggctcccccatgccatacgtgaaatggatgctgggggctgaagatttgacacccgaagacgacatgccaattggcagaaatgtactggagcttaatgacgtgcggcagagtgctaactacacatgtgtagcaatgtctaccctgggcgtgatcgaagccatcgctcagatcactgtcaaggcattgcctaagccgcctgggacacccgtggtcactgagtccacggctacttctatcaccctcacttgggactcaggtaaccccgagccagttagttactatatcatacagcataagcccaaaaatagtgaggagctgtataaggagatcgacggggttgccaccaccagatactccgtcgctggcttgtctccatacagcgactacgaattccgtgtcgtagccgttaataatattggtcgtgggcctccctccgagccggttttaacccagacctccgagcaggccccatctagtgcgcctagagacgttcaggcacggatgctttccagcaccaccattctggtccaatggaaagaaccagaagagccaaacggccagatccaaggatacagagtgtactacactatggatccgacacagcatgttaataactggatgaaacataacgtagcagattctcagattacaaccattggaaatctcgttccccagaaaacttactcggtaaaagttctggcttttacatccatcggggacggccctctgagctccgatatccaggttatcacccaaaccggtgtgccgggacagcctttgaactttaaggctgagcccgagtctgagacctcaattctgttgtcttggacgcctccgaggtcagacacgatcgcaaattacgagcttgtttataaggacggcgagcacggcgaggagcagcggattaccattgagccaggcaccagttacagactgcaagggctgaagcctaactccctgtactacttccggttagcagcaagaagtccccagggattgggcgcttcaacggctgagattagcgcccgtaccatgcagagcatgtttgctaaaaattttcatgtgaaagccgtcatgaaaacttccgtgctgctgtcttgggagatacctgaaaattataacagtgctatgcccttcaaaattctttatgacgatggcaagatggtggaagaggtggacgggagagccacccagaagttaatcgttaatctcaagcccgagaagtcttacagttttgtcctcacaaatagaggcaactccgccggaggcctacagcaccgcgtcacagcaaagaccgcccctgacgttctgcgtacgaaaccggctttcattgggaaaactaatctcgatggcatgatcacagttcagttgcccgaggtccccgcaaacgagaacatcaaaggatattatatcataattgtacccctcaaaaaaagcagaggcaagttcattaagccgtgggaatctcctgacgaaatggagctggatgagctattgaaggagatttctagaaagcgacgttccattagatacggcagagaggtcgagctgaagccctacattgctgcccattttgacgttcttccgacagaattcaccctgggtgacgataaacattatgggggattcacaaacaaacagctccaaagtggacaggaatatgtattcttcgtgctggctgtaatggaacacgccgagtccaaaatgtatgctacaagtccctactcagatccagtcgtatctatggacctggatccgcaacctattaccgatgaagaggaggggctcatctgggttgtcggcccagtcctggcagtggtgttcatcatatgtatcgtaatcgccattttactgtacaagcggaaaccatatcggaagcgggctgagagcgatagtcggaagagctccattcccaacaataaagagatccctagtcatcacccaacagatccagtcgaactgcgcaggctgaactttcaaacacccggtatggctagccatcctccgatccccatcttggaactggcagatcatattgaacggctgaaggccaatgacaacctgaagttttcgcaagaatacgagagcatcgatcctggccaacagttcacgtgggagcacagcaacctggaagtaaataaacccaaaaatcggtacgccaacgtgattgcgtacgaccattcgcgggtcctcctgagcgctattgaagggatcccaggctcagattatgtgaacgcaaattacatcgatggttatcggaaacaaaacgcctacatcgccactcagggatccctgcctgagacttttggagacttttggcggatgatttgggagcagaggtcggccaccgtcgtcatgatgacaaagttggaagagcggagtagagtgaagtgtgatcagtactggccaagtcgtggtaccgaaacccacgggctggtccaggttactcttctcgatacagtggagctggctacctactgcgtgcgcactttcgccctgtacaaaaatgggtcgagcgaaaaacgagaggtgcggcagttccagtttactgcatggcccgaccatggcgtacctgagcatcccaccccatttctcgcatttcttcggcgtgtcaagacttgcaacccacctgatgcgggaccaatggtggtccattgctctgctggtgtaggaaggaccggatgcttcatcgtaatcgacgctatgctggaacgcatcaaacatgagaaaaccgtggacatttacgggcacgtcacactcatgcgtgcccagagaaattacatggtgcagacggaggaccagtacattttcatccacgatgcgcttctggaagcagtcacatgcgggaataccgaagtaccagctcggaatctgtatgcatacatccaaaagttgacccaaatcgaaacaggcgaaaatgtcaccgggatggaactggagttcaagagactggcaagtagcaaggcccatacaagtcgctttatctctgccaatttgccgtgtaacaagtttaaaaaccgcttagttaatattatgccttatgagagtacaagagtgtgtttacagcctattcgcggagtagagggaagcgattacattaacgccagcttcatcgacggataccggcagcagaaagcatatatagccacccaggggcctctggccgaaacgactgaagacttctggaggatgctgtgggagcacaactccacaattgtggtgatgcttactaaactgagggaaatgggcagggaaaaatgtcatcagtattggcctgctgagcgttctgccagatatcagtattttgtggtcgacccaatggctgagtacaacatgccacagtatatcctccgagagtttaaagtcacagatgctcgggacggccaatcccgcaccgtgagacagttccaattcaccgattggcctgagcagggagtccctaaatccggcgaaggttttatcgacttcataggccaagtgcataagacaaaggaacagttcggccaagatggaccaatctccgtgcactgctcagccggagtggggagaaccggtgtttttatcactctcagtatagttttggaaaggatgagatacgagggtgtggtagacatcttccaaaccgtgaagatgttgagaacacaacggcctgctatggttcagaccgaggatcagtaccagtttagttatcgggcagccctggagtacctcggatcatttgaccactatgcgacttag

SEQ ID NO: 33133 - DNA, 8239 bp, Artificial Sequence
  derived and/or modified sequence
gctctgaaagtgttccagctgaaatttcagatcggacagactcgctgcggctccggaggcagtgattccaagctgctcgcgcacgctgctgccaagctgcaggatggtgcacgtagccaggctgctgctgctgctcctcactttcttcctccgcacggatgctgagacacctccaaggtttacacgaacacccgttgatcagacaggggtctctggcggagttgcctctttcatctgccaagctacgggagacccaagacctaaaattgtctggaacaaaaaaggaaagaaagtcagcaatcagagatttgaggtaatagagtttgacgatgggtctggatcagttctcagaatacaacccttacggactccgagggatgaggccatttatgaatgtgtggcctcaaataatgtgggagaaataagtgtatccaccagactcacagttttgcgggaagatcaaattcccaggggcttccctaccattgacatgggcccacagttgaaggtggttgagcgtactcgcacggccaccatgctttgtgcagccagtggtaatccggatccagaaatcacttggtttaaagatttcttacctgtggacacaagcaacaacaatggtcgtattaagcagttacgatcaggtggtacaccaataagaggagcccttcagattgagcagagtgaagagtctgaccaaggaaaatatgagtgtgttgccaccaacagcgcgggcactcgctattccgctcctgccaatttatatgtcagagagctgcgagaagttcgccgtgtcccaccaagattctctatcccacccactaatcatgaaatcatgccaggcggaagcgttaatatcacctgtgtggccgtggggtcaccaatgccttatgtaaagtggatgttgggggcagaagatctgacacctgaagatgatatgccaataggaagaaatgtgctagaactgaatgatgtaagacagtcagcaaattacacctgtgttgctatgtcaacactgggtgtcattgaagcaatagcacagatcactgtcaaagccttacccaaacctccaggaactcctgtagtgaccgagagcacagctacaagcatcacactgacgtgggactctgggaaccctgagcctgtttcttattacataattcagcataaacctaaaaactctgaggaactttacaaagaaattgatggggtggcgaccacacgctacagtgtcgctggactaagtccctactcggattatgaattcagggttgttgctgtcaataacattgggcgggggcctcccagcgaacctgtgctaacacaaacctcagagcaagcaccatccagtgccccgagggatgtccaggcacgaatgttgagttcgaccaccattttggtacagtggaaggaacctgaagagccaaatggacagatccaaggatatagagtttattatacaatggatcccactcaacatgtcaacaactggatgaaacacaatgtagctgacagccaaatcactactattggcaacttagtgccccagaaaacatattctgtcaaagtcctggcttttacctcaattggagatggtcccctttcaagtgacatacaagtcatcactcagacaggagtaccagggcagccactaaacttcaaagcagaacctgagtctgaaacaagtattttgctctcttggacacctccacgttcagataccattgccaactatgaactggtctacaaagatggggagcatggagaggagcaacgaattaccattgagccagggacatcatataggctgcaaggactgaaaccaaacagcttatactatttccgtctggctgcacgctcccctcaaggcctgggtgcttctactgcagaaatatcagctagaaccatgcagtcaatgtttgcaaaaaattttcatgtcaaagcagtaatgaagacttccgtgttgctgtcttgggagattccagagaattataactccgccatgcctttcaaaattctttatgatgatgggaaaatggtagaagaagtggatggccgagccacacagaagttaattgtcaacctgaagcctgagaaatcatattcatttgtgctgacaaatcgtggaaacagtgctggtgggctgcagcacagggtcacggcaaagactgcaccagatgtattacgtaccaagcctgccttcattgggaagaccaacttggatggcatgattactgtgcaactgcctgaagtacctgcaaatgagaatataaaaggttactacataataattgtgcctttgaagaaatctcgcgggaaatttatcaagccatgggagagtccagatgaaatggaattagatgagctgcttaaggagatatctaggaagcgcagaagcatccgttatgggagagaagttgaattaaagccatatattgccgctcactttgatgtccttcccactgagttcaccctgggggatgacaagcattatggtggatttacaaacaagcaactccaaagtggtcaagaatatgtcttctttgtgttagcagtaatggaacatgcagagtctaagatgtatgcaaccagcccttactccgaccccgtggtgtcaatggatctggatccgcagccaatcacggatgaagaagaaggcttgatctgggttgtaggtcctgtccttgcagtggtctttatcatctgcattgtcattgctattcttctttataaaagtaaacccgacaggaagagggcagagtccgactctagaaaaagcagcataccgaacaataaggagatcccttcacaccacccaacagaccctgtagaactgaggcgccttaactttcaaacaccgggtatggctagccatcctccaatacccatcttggaacttgcagaccacattgaaagattgaaagcaaatgacaacttgaagttttcccaggaatatgagtcaattgaccctggccagcagttcacttgggaacattcaaacttggaagtaaacaaaccaaagaatagatacgcgaatgtaatcgcatatgatcattcccgggttctcctatcagctatagaagggatcccaggaagtgactatgtgaatgccaactacatagatgggtataggaagcaaaatgcctatattgcaacacagggatctctccccgaaacatttggggacttttggagaatgatatgggaacaacggagtgccacagttgtcatgatgacaaaactagaagaaagatcaagggtgaagtgtgaccagtattggcctagcagaggcacagaaacccacggactcgttcaagtaacgctgcttgatactgtggagctggccacatattgtgttcgaacatttgcactttacaagaatggttcaagtgagaagagagaagtgagacaattccagttcaccgcctggcctgatcatggtgttccagaacaccctacaccttttctagctttcttacgtagagtcaaaacctgtaaccctcccgatgctggtccgatggttgtgcactgcagtgcgggagttggccggactggttgcttcatcgtcatagatgccatgttagaaagaataaagcatgaaaaaactgtagatatttatggccatgtaactttaatgagagcccagaggaactatatggttcaaacagaagaccaatacatctttatccatgatgcactgttagaagcagtgacttgtggaaataccgaagtgccagctagaaacttgtatgcctacattcagaagctgacacaaatagaaacgggagagaatgtcacaggaatggagctcgaatttaagcgtctagccagctcaaaagctcacacctcaaggtttatcagtgccaatcttccatgtaataaattcaaaaatcgccttgttaatattatgccatatgaatccacaagggtatgcctgcagcctatccgtggagtagaaggatctgattacatcaatgccagttttattgatggatacagacaacagaaagcctacatcgctacccaggggcccttggcagagaccactgaagacttctggcggatgctctgggaacacaattccaccatagttgtgatgctcaccaagctgcgtgaaatgggcagagagaaatgtcaccaatactggccagcagaacggtctgcaagataccagtactttgttgtagatcccatggctgagtacaacatgccacagtatatcctaagggaattcaaggtcacagatgccagggacggccagtcccgaacagtaaggcagttccagttcactgactggccagagcaaggagtgccaaagtccggagaaggatttattgacttcatcggccaagtccataaaacaaaagaacagtttggccaagatggacccatttcagtccattgcagcgcgggcgttggaagaactggagtcttcataacgctaagcattgttttggaaagaatgagatatgaaggagttgtagatatcttccagactgtcaaaatgttaagaacacaacgaccagctatggtacagacagaggatcaatatcagttttcctatcgtgccgcactagagtacctgggcagctttgaccactatgcaacgtagaaacccctgacccattctggatttttactacaggcccttcaatatccatggagtctcttctgagccatacagggcacttgagaagtccttcttaacttctagctaacaactacttagtgggactattacacacaaaacaaattaaaaacaaattattccaggtggaccaagaattcacagtttaataatctaacctgaaaaataatgaagagaatcctgactgatgaggcatctgaaggattttatttacagatacctcaaggattcaaaatcaagggaagaagaaatcacagcaaagaaccaccatcttattcaggattgcttgaaaggtgcaaggagaaattgccagaatgctgcagttcagcacaagatatgtgctggtgtggcttctcacaatgaaacggactctgctttgacatcgccccttcccaccatactgctcataataacattttagggggaaaggggagggaatgtttaaaaagaaagtccttgatttagttttttagtattgtaaagatactgctgacctgtgcttcatttctaactgtgtaaacttttttttaacaaaatgtatcattcgataaagtgaattttaaaaaagttacataactcttcatttttttatttccaaatcgtaggtttttttaagctgtagaactgttatctgtaatatcttgctgtagaaatatcaaatcatttgaaaatttgcacatttttgtgcaaaactcaatctacagtatcagtctcgtcagatatattaattttacacttcagttttgattggtgagaaagtacccattctcttcaaataatcaaagataattattattttgttttgtttttggaatcaacagggaggcgcaaagtataaagttgctgctaacatatatacatatatatccatattttataagggtgtctatgtatatatagacagtgtgtccacacaaaaaatagatacagttatcagtcagtcagttcttccatgatttagtttttttaaacgtagaaaagctattgtaaacatctctttccatttattcttaattttttgacatattggtatttctttaaagggaaatgaggaatgcacatcagtgattgattgtcaaacctcaccccctgatttcctacctaatctacccccacctaaccaatcaatcacatccacaaattgttttgtttgtttgttagtcaggcttccaacaaagttcaatatttctaacactctagtgcaataaaaattattattaaatagctaagaggtgtgcatgtgggaaaggtcagtgcatatccctttaggaggggagaatgttgtaatatatcagctatcgagttgtttaaaaaaagtgtattcaatcgtatattgtctatagtatgtgctatgaaatttgcatttatgatatgtaacaggggcaaagccaaattcatgttactctgttcagtcagaaacattttgtggcatacagcattcctgggaagtgctgtactttgtttcgttttggttttagttttgcatttagagtgccttataattgatgcctattttaatagcatttctttttagcttttggttcgtatttccattcactgttcgtatctgttactttctattaaagcattatctgtttaccacatgtacaaaaactctttgaataatatgcattcctagttttcagccaagtcggggatgttagtgattgtaccagcccaaagcacttggataatcagggcccttcttccttttataatcaatcatcaacatcagaaaaagctacttgttttatttatattcccttccaaatccgctctggaacatgcagtaactgcaccaaacttattttagtaacaaatatcattggcaactttggaatatatttgatattccattaggatttttctaaaaggggaaataaactatatatatatatgtatcttacccccaattcttccaacagaatttctataggaagccatggatgatggcataagtttgccacatattacatgattttaaataatcctcaaaatacccaaggaactcttaaagagttttggtatgagtatactactttggtttaattttagcttcatggatgttctgcatggaaggatttttgttttccacattttcccattgctagcagagtgaaatccaagagaccaaacatttgcaagcattgtatttgagcacttttgtaaaaaacaaagaaaaagaaaaaaaagaaaatatatataatactaaaaaaaagtatctagaaggctacctcagaatgagactctctaacctacatcagaaccagagaagaatgtgcactatgtgggtctgttatcattattttcttttagtttgtatctttttggagatttatccaagtgccagattactcagtgctataattttcttttagttaaacaaagggggtcagacagacattgcatcatccagacatgccttgttggacatgtagaatccgatggagcactgcacaccagaatgattggccaatgagcagcttctctccctgaaacaataactgcccatttggcaaagggaaagatgacaataatcagaagaagaaaatgaatgggatgcataccatagacgaacgaggcggagactattgcgggaatcttactgttcaggagctgttcctagaactaactcccttactgtcattgatgtgcattccactctgtgcttttctgtacaaccattcaagttttaatttcccaggtgaaccatctttatctgccattaccacaagctttcaagtttccagttattttcatcatcataaccagtacggtgctattatttacctatgtacgtgtagttatgtataattttgtaattagttacaatggtaaaaaaaatcaaaatatataaaaagtgatttgtacagaactttattttagctcttttttaaaaatgatttgcatggttagaaaacggcgaggacagccaggggagggaagggcctctagggaactttgcactttctatacctttgtactatgcactgccctattgattctacacccaataatgatattacttgaacccatctgtaagaaactgcttcggaaattcatttgtgtgtatgtaaataacacaacatagaaacaggaagggaaaaaagtctgcagtaatgcacgtattttttttctttcctgtttattttcggttttgctttaagtccttttatttttaattccctttttgtttttctttttgggttttggttccttttgggtttatgggtgccctgatactccagcagagatcagaaggctacagatccattctatccatccgttatgtggctttgccatcccagcttggagtgtctttacaaagataataacagttgtgttctttgctctcgttttggatgcatagactgaaaaattaaaacaaataacttgtaaaatggcttgttaaaaaatacaattacctctaattagtagtacgcgtaaatgttttacagaatgaaaggcgtgctttttattttcttacttcgttacattggtggcgaaagaagtctgtatgaaaatcagttctttgctgacacaagttccatttgttacaaatgaattctaataaaaatgtcagtgttatgc

SEQ ID NO: 33134 - DNA, 8239 bp, Artificial Sequence
  derived and/or modified sequence
gctctgaaagtgttccagctgaaatttcagatcggacagactcgctgcggctccggaggcagtgattccaagctgctcgcgcacgctgctgccaagctgcaggatggtgcacgtagccaggctgctgctgctgctcctcactttcttcctccgcacggatgctgagacacctccaaggtttacacgaacacccgttgatcagacaggggtctctggcggagttgcctctttcatctgccaagctacgggagacccaagacctaaaattgtctggaacaaaaaaggaaagaaagtcagcaatcagagatttgaggtaatagagtttgacgatgggtctggatcagttctcagaatacaacccttacggactccgagggatgaggccatttatgaatgtgtggcctcaaataatgtgggagaaataagtgtatccaccagactcacagttttgcgggaagatcaaattcccaggggcttccctaccattgacatgggcccacagttgaaggtggttgagcgtactcgcacggccaccatgctttgtgcagccagtggtaatccggatccagaaatcacttggtttaaagatttcttacctgtggacacaagcaacaacaatggtcgtattaagcagttacgatcaggtagggtcttccatacaggagcccttcagattgagcagagtgaagagtctgaccaaggaaaatatgagtgtgttgccaccaacagcgcgggcactcgctattccgctcctgccaatttatatgtcagagtaaatagaaaagttcgccgtgtcccaccaagattctctatcccacccactaatcatgaaatcatgccaggcggaagcgttaatatcacctgtgtggccgtggggtcaccaatgccttatgtaaagtggatgttgggggcagaagatctgacacctgaagatgatatgccaataggaagaaatgtgctagaactgaatgatgtaagacagtcagcaaattacacctgtgttgctatgtcaacactgggtgtcattgaagcaatagcacagatcactgtcaaagccttacccaaacctccaggaactcctgtagtgaccgagagcacagctacaagcatcacactgacgtgggactctgggaaccctgagcctgtttcttattacataattcagcataaacctaaaaactctgaggaactttacaaagaaattgatggggtggcgaccacacgctacagtgtcgctggactaagtccctactcggattatgaattcagggttgttgctgtcaataacattgggcgggggcctcccagcgaacctgtgctaacacaaacctcagagcaagcaccatccagtgccccgagggatgtccaggcacgaatgttgagttcgaccaccattttggtacagtggaaggaacctgaagagccaaatggacagatccaaggatatagagtttattatacaatggatcccactcaacatgtcaacaactggatgaaacacaatgtagctgacagccaaatcactactattggcaacttagtgccccagaaaacatattctgtcaaagtcctggcttttacctcaattggagatggtcccctttcaagtgacatacaagtcatcactcagacaggagtaccagggcagccactaaacttcaaagcagaacctgagtctgaaacaagtattttgctctcttggacacctccacgttcagataccattgccaactatgaactggtctacaaagatggggagcatggagaggagcaacgaattaccattgagccagggacatcatataggctgcaaggactgaaaccaaacagcttatactatttccgtctggctgcacgctcccctcaaggcctgggtgcttctactgcagaaatatcagctagaaccatgcagtcaatgtttgcaaaaaattttcatgtcaaagcagtaatgaagacttccgtgttgctgtcttgggagattccagagaattataactccgccatgcctttcaaaattctttatgatgatgggaaaatggtagaagaagtggatggccgagccacacagaagttaattgtcaacctgaagcctgagaaatcatattcatttgtgctgacaaatcgtggaaacagtgctggtgggctgcagcacagggtcacggcaaagactgcaccagatgtattacgtaccaagcctgccttcattgggaagaccaacttggatggcatgattactgtgcaactgcctgaagtacctgcaaatgagaatataaaaggttactacataataattgtgcctttgaagaaatctcgcgggaaatttatcaagccatgggagagtccagatgaaatggaattagatgagctgcttaaggagatatctaggaagcgcagaagcatccgttatgggagagaagttgaattaaagccatatattgccgctcactttgatgtccttcccactgagttcaccctgggggatgacaagcattatggtggatttacaaacaagcaactccaaagtggtcaagaatatgtcttctttgtgttagcagtaatggaacatgcagagtctaagatgtatgcaaccagcccttactccgaccccgtggtgtcaatggatctggatccgcagccaatcacggatgaagaagaaggcttgatctgggttgtaggtcctgtccttgcagtggtctttatcatctgcattgtcattgctattcttctttataaaagaaaaccctataggaagagggcagagtccgactctagaaaaagcagcataccgaacaataaggagatcccttcacaccacccaacagaccctgtagaactgaggcgccttaactttcaaacaccgggtatggctagccatcctccaatacccatcttggaacttgcagaccacattgaaagattgaaagcaaatgacaacttgaagttttcccaggaatatgagtcaattgaccctggccagcagttcacttgggaacattcaaacttggaagtaaacaaaccaaagaatagatacgcgaatgtaatcgcatatgatcattcccgggttctcctatcagctatagaagggatcccaggaagtgactatgtgaatgccaactacatagatgggtataggaagcaaaatgcctatattgcaacacagggatctctccccgaaacatttggggacttttggagaatgatatgggaacaacggagtgccacagttgtcatgatgacaaaactagaagaaagatcaagggtgaagtgtgaccagtattggcctagcagaggcacagaaacccacggactcgttcaagtaacgctgcttgatactgtggagctggccacatattgtgttcgaacatttgcactttacaagaatggttcaagtgagaagagagaagtgagacaattccagttcaccgcctggcctgatcatggtgttccagaacaccctacaccttttctagctttcttacgtagagtcaaaacctgtaaccctcccgatgctggtccgatggttgtgcactgcagtgcgggagttggccggactggttgcttcatcgtcatagatgccatgttagaaagaataaagcatgaaaaaactgtagatatttatggccatgtaactttaatgagagcccagaggaactatatggttcaaacagaagaccaatacatctttatccatgatgcactgttagaagcagtgacttgtggaaataccgaagtgccagctagaaacttgtatgcctacattcagaagctgacacaaatagaaacgggagagaatgtcacaggaatggagctcgaatttaagcgtctagccagctcaaaagctcacacctcaaggtttatcagtgccaatcttccatgtaataaattcaaaaatcgccttgttaatattatgccatatgaatccacaagggtatgcctgcagcctatccgtggagtagaaggatctgattacatcaatgccagttttattgatggatacagacaacagaaagcctacatcgctacccaggggcccttggcagagaccactgaagacttctggcggatgctctgggaacacaattccaccatagttgtgatgctcaccaagctgcgtgaaatgggcagagagaaatgtcaccaatactggccagcagaacggtctgcaagataccagtactttgttgtagatcccatggctgagtacaacatgccacagtatatcctaagggaattcaaggtcacagatgccagggacggccagtcccgaacagtaaggcagttccagttcactgactggccagagcaaggagtgccaaagtccggagaaggatttattgacttcatcggccaagtccataaaacaaaagaacagtttggccaagatggacccatttcagtccattgcagcgcgggcgttggaagaactggagtcttcataacgctaagcattgttttggaaagaatgagatatgaaggagttgtagatatcttccagactgtcaaaatgttaagaacacaacgaccagctatggtacagacagaggatcaatatcagttttcctatcgtgccgcactagagtacctgggcagctttgaccactatgcaacgtagaaacccctgacccattctggatttttactacaggcccttcaatatccatggagtctcttctgagccatacagggcacttgagaagtccttcttaacttctagctaacaactacttagtgggactattacacacaaaacaaattaaaaacaaattattccaggtggaccaagaattcacagtttaataatctaacctgaaaaataatgaagagaatcctgactgatgaggcatctgaaggattttatttacagatacctcaaggattcaaaatcaagggaagaagaaatcacagcaaagaaccaccatcttattcaggattgcttgaaaggtgcaaggagaaattgccagaatgctgcagttcagcacaagatatgtgctggtgtggcttctcacaatgaaacggactctgctttgacatcgccccttcccaccatactgctcataataacattttagggggaaaggggagggaatgtttaaaaagaaagtccttgatttagttttttagtattgtaaagatactgctgacctgtgcttcatttctaactgtgtaaacttttttttaacaaaatgtatcattcgataaagtgaattttaaaaaagttacataactcttcatttttttatttccaaatcgtaggtttttttaagctgtagaactgttatctgtaatatcttgctgtagaaatatcaaatcatttgaaaatttgcacatttttgtgcaaaactcaatctacagtatcagtctcgtcagatatattaattttacacttcagttttgattggtgagaaagtacccattctcttcaaataatcaaagataattattattttgttttgtttttggaatcaacagggaggcgcaaagtataaagttgctgctaacatatatacatatatatccatattttataagggtgtctatgtatatatagacagtgtgtccacacaaaaaatagatacagttatcagtcagtcagttcttccatgatttagtttttttaaacgtagaaaagctattgtaaacatctctttccatttattcttaattttttgacatattggtatttctttaaagggaaatgaggaatgcacatcagtgattgattgtcaaacctcaccccctgatttcctacctaatctacccccacctaaccaatcaatcacatccacaaattgttttgtttgtttgttagtcaggcttccaacaaagttcaatatttctaacactctagtgcaataaaaattattattaaatagctaagaggtgtgcatgtgggaaaggtcagtgcatatccctttaggaggggagaatgttgtaatatatcagctatcgagttgtttaaaaaaagtgtattcaatcgtatattgtctatagtatgtgctatgaaatttgcatttatgatatgtaacaggggcaaagccaaattcatgttactctgttcagtcagaaacattttgtggcatacagcattcctgggaagtgctgtactttgtttcgttttggttttagttttgcatttagagtgccttataattgatgcctattttaatagcatttctttttagcttttggttcgtatttccattcactgttcgtatctgttactttctattaaagcattatctgtttaccacatgtacaaaaactctttgaataatatgcattcctagttttcagccaagtcggggatgttagtgattgtaccagcccaaagcacttggataatcagggcccttcttccttttataatcaatcatcaacatcagaaaaagctacttgttttatttatattcccttccaaatccgctctggaacatgcagtaactgcaccaaacttattttagtaacaaatatcattggcaactttggaatatatttgatattccattaggatttttctaaaaggggaaataaactatatatatatatgtatcttacccccaattcttccaacagaatttctataggaagccatggatgatggcataagtttgccacatattacatgattttaaataatcctcaaaatacccaaggaactcttaaagagttttggtatgagtatactactttggtttaattttagcttcatggatgttctgcatggaaggatttttgttttccacattttcccattgctagcagagtgaaatccaagagaccaaacatttgcaagcattgtatttgagcacttttgtaaaaaacaaagaaaaagaaaaaaaagaaaatatatataatactaaaaaaaagtatctagaaggctacctcagaatgagactctctaacctacatcagaaccagagaagaatgtgcactatgtgggtctgttatcattattttcttttagtttgtatctttttggagatttatccaagtgccagattactcagtgctataattttcttttagttaaacaaagggggtcagacagacattgcatcatccagacatgccttgttggacatgtagaatccgatggagcactgcacaccagaatgattggccaatgagcagcttctctccctgaaacaataactgcccatttggcaaagggaaagatgacaataatcagaagaagaaaatgaatgggatgcataccatagacgaacgaggcggagactattgcgggaatcttactgttcaggagctgttcctagaactaactcccttactgtcattgatgtgcattccactctgtgcttttctgtacaaccattcaagttttaatttcccaggtgaaccatctttatctgccattaccacaagctttcaagtttccagttattttcatcatcataaccagtacggtgctattatttacctatgtacgtgtagttatgtataattttgtaattagttacaatggtaaaaaaaatcaaaatatataaaaagtgatttgtacagaactttattttagctcttttttaaaaatgatttgcatggttagaaaacggcgaggacagccaggggagggaagggcctctagggaactttgcactttctatacctttgtactatgcactgccctattgattctacacccaataatgatattacttgaacccatctgtaagaaactgcttcggaaattcatttgtgtgtatgtaaataacacaacatagaaacaggaagggaaaaaagtctgcagtaatgcacgtattttttttctttcctgtttattttcggttttgctttaagtccttttatttttaattccctttttgtttttctttttgggttttggttccttttgggtttatgggtgccctgatactccagcagagatcagaaggctacagatccattctatccatccgttatgtggctttgccatcccagcttggagtgtctttacaaagataataacagttgtgttctttgctctcgttttggatgcatagactgaaaaattaaaacaaataacttgtaaaatggcttgttaaaaaatacaattacctctaattagtagtacgcgtaaatgttttacagaatgaaaggcgtgctttttattttcttacttcgttacattggtggcgaaagaagtctgtatgaaaatcagttctttgctgacacaagttccatttgttacaaatgaattctaataaaaatgtcagtgttatgc

SEQ ID NO: 33135 - DNA, 4509 bp, Artificial Sequence
  derived and/or modified sequence
atggtgcacgtggccagactgctgctgctgctgctgaccttcttcctgagaaccgacgccgagaccccccccagattcaccagaacccccgtggaccagaccggcgtgagcggcggcgtggccagcttcatctgccaggccaccggcgaccccagacccaagatcgtgtggaacaagaagggcaagaaggtgagcaaccagagattcgaggtgatcgagttcgacgacggcagcggcagcgtgctgagaatccagcccctgagaacccccagagacgaggccatctacgagtgcgtggccagcaacaacgtgggcgagatcagcgtgagcaccagactgaccgtgctgagagaggaccagatccccagaggcttccccaccatcgacatgggcccccagctgaaggtggtggagagaaccagaaccgccaccatgctgtgcgccgccagcggcaaccccgaccccgagatcacctggttcaaggacttcctgcccgtggacaccagcaacaacaacggcagaatcaagcagctgagaagcggcggcacccccatcagaggcgccctgcagatcgagcagagcgaggagagcgaccagggcaagtacgagtgcgtggccaccaacagcgccggcaccagatacagcgcccccgccaacctgtacgtgagagagctgagagaggtgagaagagtgccccccagattcagcatcccccccaccaaccacgagatcatgcccggcggcagcgtgaacatcacctgcgtggccgtgggcagccccatgccctacgtgaagtggatgctgggcgccgaggacctgacccccgaggacgacatgcccatcggcagaaacgtgctggagctgaacgacgtgagacagagcgccaactacacctgcgtggccatgagcaccctgggcgtgatcgaggccatcgcccagatcaccgtgaaggccctgcccaagccccccggcacccccgtggtgaccgagagcaccgccaccagcatcaccctgacctgggacagcggcaaccccgagcccgtgagctactacatcatccagcacaagcccaagaacagcgaggagctgtacaaggagatcgacggcgtggccaccaccagatacagcgtggccggcctgagcccctacagcgactacgagttcagagtggtggccgtgaacaacatcggcagaggcccccccagcgagcccgtgctgacccagaccagcgagcaggcccccagcagcgcccccagagacgtgcaggccagaatgctgagcagcaccaccatcctggtgcagtggaaggagcccgaggagcccaacggccagatccagggctacagagtgtactacaccatggaccccacccagcacgtgaacaactggatgaagcacaacgtggccgacagccagatcaccaccatcggcaacctggtgccccagaagacctacagcgtgaaggtgctggccttcaccagcatcggcgacggccccctgagcagcgacatccaggtgatcacccagaccggcgtgcccggccagcccctgaacttcaaggccgagcccgagagcgagaccagcatcctgctgagctggaccccccccagaagcgacaccatcgccaactacgagctggtgtacaaggacggcgagcacggcgaggagcagagaatcaccatcgagcccggcaccagctacagactgcagggcctgaagcccaacagcctgtactacttcagactggccgccagaagcccccagggcctgggcgccagcaccgccgagatcagcgccagaaccatgcagagcatgttcgccaagaacttccacgtgaaggccgtgatgaagaccagcgtgctgctgagctgggagatccccgagaactacaacagcgccatgcccttcaagatcctgtacgacgacggcaagatggtggaggaggtggacggcagagccacccagaagctgatcgtgaacctgaagcccgagaagagctacagcttcgtgctgaccaacagaggcaacagcgccggcggcctgcagcacagagtgaccgccaagaccgcccccgacgtgctgagaaccaagcccgccttcatcggcaagaccaacctggacggcatgatcaccgtgcagctgcccgaggtgcccgccaacgagaacatcaagggctactacatcatcatcgtgcccctgaagaagagcagaggcaagttcatcaagccctgggagagccccgacgagatggagctggacgagctgctgaaggagatcagcagaaagagaagaagcatcagatacggcagagaggtggagctgaagccctacatcgccgcccacttcgacgtgctgcccaccgagttcaccctgggcgacgacaagcactacggcggcttcaccaacaagcagctgcagagcggccaggagtacgtgttcttcgtgctggccgtgatggagcacgccgagagcaagatgtacgccaccagcccctacagcgaccccgtggtgagcatggacctggacccccagcccatcaccgacgaggaggagggcctgatctgggtggtgggccccgtgctggccgtggtgttcatcatctgcatcgtgatcgccatcctgctgtacaagagcaagcccgacagaaagagagccgagagcgacagcagaaagagcagcatccccaacaacaaggagatccccagccaccaccccaccgaccccgtggagctgagaagactgaacttccagacccccggcatggccagccacccccccatccccatcctggagctggccgaccacatcgagagactgaaggccaacgacaacctgaagttcagccaggagtacgagagcatcgaccccggccagcagttcacctgggagcacagcaacctggaggtgaacaagcccaagaacagatacgccaacgtgatcgcctacgaccacagcagagtgctgctgagcgccatcgagggcatccccggcagcgactacgtgaacgccaactacatcgacggctacagaaagcagaacgcctacatcgccacccagggcagcctgcccgagaccttcggcgacttctggagaatgatctgggagcagagaagcgccaccgtggtgatgatgaccaagctggaggagagaagcagagtgaagtgcgaccagtactggcccagcagaggcaccgagacccacggcctggtgcaggtgaccctgctggacaccgtggagctggccacctactgcgtgagaaccttcgccctgtacaagaacggcagcagcgagaagagagaggtgagacagttccagttcaccgcctggcccgaccacggcgtgcccgagcaccccacccccttcctggccttcctgagaagagtgaagacctgcaacccccccgacgccggccccatggtggtgcactgcagcgccggcgtgggcagaaccggctgcttcatcgtgatcgacgccatgctggagagaatcaagcacgagaagaccgtggacatctacggccacgtgaccctgatgagagcccagagaaactacatggtgcagaccgaggaccagtacatcttcatccacgacgccctgctggaggccgtgacctgcggcaacaccgaggtgcccgccagaaacctgtacgcctacatccagaagctgacccagatcgagaccggcgagaacgtgaccggcatggagctggagttcaagagactggccagcagcaaggcccacaccagcagattcatcagcgccaacctgccctgcaacaagttcaagaacagactggtgaacatcatgccctacgagagcaccagagtgtgcctgcagcccatcagaggcgtggagggcagcgactacatcaacgccagcttcatcgacggctacagacagcagaaggcctacatcgccacccagggccccctggccgagaccaccgaggacttctggagaatgctgtgggagcacaacagcaccatcgtggtgatgctgaccaagctgagagagatgggcagagagaagtgccaccagtactggcccgccgagagaagcgccagataccagtacttcgtggtggaccccatggccgagtacaacatgccccagtacatcctgagagagttcaaggtgaccgacgccagagacggccagagcagaaccgtgagacagttccagttcaccgactggcccgagcagggcgtgcccaagagcggcgagggcttcatcgacttcatcggccaggtgcacaagaccaaggagcagttcggccaggacggccccatcagcgtgcactgcagcgccggcgtgggcagaaccggcgtgttcatcaccctgagcatcgtgctggagagaatgagatacgagggcgtggtggacatcttccagaccgtgaagatgctgagaacccagagacccgccatggtgcagaccgaggaccagtaccagttcagctacagagccgccctggagtacctgggcagcttcgaccactacgccacctag

SEQ ID NO: 33136 - DNA, 4509 bp, Artificial Sequence
  derived and/or modified sequence
atggtgcacgtggccagactgctgctgctgctgctgaccttcttcctgagaaccgacgccgagaccccccccagattcaccagaacccccgtggaccagaccggcgtgagcggcggcgtggccagcttcatctgccaggccaccggcgaccccagacccaagatcgtgtggaacaagaagggcaagaaggtgagcaaccagagattcgaggtgatcgagttcgacgacggcagcggcagcgtgctgagaatccagcccctgagaacccccagagacgaggccatctacgagtgcgtggccagcaacaacgtgggcgagatcagcgtgagcaccagactgaccgtgctgagagaggaccagatccccagaggcttccccaccatcgacatgggcccccagctgaaggtggtggagagaaccagaaccgccaccatgctgtgcgccgccagcggcaaccccgaccccgagatcacctggttcaaggacttcctgcccgtggacaccagcaacaacaacggcagaatcaagcagctgagaagcggcagagtgttccacaccggcgccctgcagatcgagcagagcgaggagagcgaccagggcaagtacgagtgcgtggccaccaacagcgccggcaccagatacagcgcccccgccaacctgtacgtgagagtgaacagaaaggtgagaagagtgccccccagattcagcatcccccccaccaaccacgagatcatgcccggcggcagcgtgaacatcacctgcgtggccgtgggcagccccatgccctacgtgaagtggatgctgggcgccgaggacctgacccccgaggacgacatgcccatcggcagaaacgtgctggagctgaacgacgtgagacagagcgccaactacacctgcgtggccatgagcaccctgggcgtgatcgaggccatcgcccagatcaccgtgaaggccctgcccaagccccccggcacccccgtggtgaccgagagcaccgccaccagcatcaccctgacctgggacagcggcaaccccgagcccgtgagctactacatcatccagcacaagcccaagaacagcgaggagctgtacaaggagatcgacggcgtggccaccaccagatacagcgtggccggcctgagcccctacagcgactacgagttcagagtggtggccgtgaacaacatcggcagaggcccccccagcgagcccgtgctgacccagaccagcgagcaggcccccagcagcgcccccagagacgtgcaggccagaatgctgagcagcaccaccatcctggtgcagtggaaggagcccgaggagcccaacggccagatccagggctacagagtgtactacaccatggaccccacccagcacgtgaacaactggatgaagcacaacgtggccgacagccagatcaccaccatcggcaacctggtgccccagaagacctacagcgtgaaggtgctggccttcaccagcatcggcgacggccccctgagcagcgacatccaggtgatcacccagaccggcgtgcccggccagcccctgaacttcaaggccgagcccgagagcgagaccagcatcctgctgagctggaccccccccagaagcgacaccatcgccaactacgagctggtgtacaaggacggcgagcacggcgaggagcagagaatcaccatcgagcccggcaccagctacagactgcagggcctgaagcccaacagcctgtactacttcagactggccgccagaagcccccagggcctgggcgccagcaccgccgagatcagcgccagaaccatgcagagcatgttcgccaagaacttccacgtgaaggccgtgatgaagaccagcgtgctgctgagctgggagatccccgagaactacaacagcgccatgcccttcaagatcctgtacgacgacggcaagatggtggaggaggtggacggcagagccacccagaagctgatcgtgaacctgaagcccgagaagagctacagcttcgtgctgaccaacagaggcaacagcgccggcggcctgcagcacagagtgaccgccaagaccgcccccgacgtgctgagaaccaagcccgccttcatcggcaagaccaacctggacggcatgatcaccgtgcagctgcccgaggtgcccgccaacgagaacatcaagggctactacatcatcatcgtgcccctgaagaagagcagaggcaagttcatcaagccctgggagagccccgacgagatggagctggacgagctgctgaaggagatcagcagaaagagaagaagcatcagatacggcagagaggtggagctgaagccctacatcgccgcccacttcgacgtgctgcccaccgagttcaccctgggcgacgacaagcactacggcggcttcaccaacaagcagctgcagagcggccaggagtacgtgttcttcgtgctggccgtgatggagcacgccgagagcaagatgtacgccaccagcccctacagcgaccccgtggtgagcatggacctggacccccagcccatcaccgacgaggaggagggcctgatctgggtggtgggccccgtgctggccgtggtgttcatcatctgcatcgtgatcgccatcctgctgtacaagagaaagccctacagaaagagagccgagagcgacagcagaaagagcagcatccccaacaacaaggagatccccagccaccaccccaccgaccccgtggagctgagaagactgaacttccagacccccggcatggccagccacccccccatccccatcctggagctggccgaccacatcgagagactgaaggccaacgacaacctgaagttcagccaggagtacgagagcatcgaccccggccagcagttcacctgggagcacagcaacctggaggtgaacaagcccaagaacagatacgccaacgtgatcgcctacgaccacagcagagtgctgctgagcgccatcgagggcatccccggcagcgactacgtgaacgccaactacatcgacggctacagaaagcagaacgcctacatcgccacccagggcagcctgcccgagaccttcggcgacttctggagaatgatctgggagcagagaagcgccaccgtggtgatgatgaccaagctggaggagagaagcagagtgaagtgcgaccagtactggcccagcagaggcaccgagacccacggcctggtgcaggtgaccctgctggacaccgtggagctggccacctactgcgtgagaaccttcgccctgtacaagaacggcagcagcgagaagagagaggtgagacagttccagttcaccgcctggcccgaccacggcgtgcccgagcaccccacccccttcctggccttcctgagaagagtgaagacctgcaacccccccgacgccggccccatggtggtgcactgcagcgccggcgtgggcagaaccggctgcttcatcgtgatcgacgccatgctggagagaatcaagcacgagaagaccgtggacatctacggccacgtgaccctgatgagagcccagagaaactacatggtgcagaccgaggaccagtacatcttcatccacgacgccctgctggaggccgtgacctgcggcaacaccgaggtgcccgccagaaacctgtacgcctacatccagaagctgacccagatcgagaccggcgagaacgtgaccggcatggagctggagttcaagagactggccagcagcaaggcccacaccagcagattcatcagcgccaacctgccctgcaacaagttcaagaacagactggtgaacatcatgccctacgagagcaccagagtgtgcctgcagcccatcagaggcgtggagggcagcgactacatcaacgccagcttcatcgacggctacagacagcagaaggcctacatcgccacccagggccccctggccgagaccaccgaggacttctggagaatgctgtgggagcacaacagcaccatcgtggtgatgctgaccaagctgagagagatgggcagagagaagtgccaccagtactggcccgccgagagaagcgccagataccagtacttcgtggtggaccccatggccgagtacaacatgccccagtacatcctgagagagttcaaggtgaccgacgccagagacggccagagcagaaccgtgagacagttccagttcaccgactggcccgagcagggcgtgcccaagagcggcgagggcttcatcgacttcatcggccaggtgcacaagaccaaggagcagttcggccaggacggccccatcagcgtgcactgcagcgccggcgtgggcagaaccggcgtgttcatcaccctgagcatcgtgctggagagaatgagatacgagggcgtggtggacatcttccagaccgtgaagatgctgagaacccagagacccgccatggtgcagaccgaggaccagtaccagttcagctacagagccgccctggagtacctgggcagcttcgaccactacgccacctag

SEQ ID NO: 33137 - DNA, 873 bp, Artificial Sequence
  derived and/or modified sequence
atgcggctcaattccaccggtgaagtgcccgtcttgattcacggggagaacattatctgcgaagccacccagatcatcgactaccttgagcagacgtttctggacgagcgcactccccggttgatgccggacaaagaaagcatgtattacccccgtgtccaacactaccgcgaactcttagatagtctgcccatggatgcctacactcacggctgtattctgcatcccgagctcacagttgactccatgattccagcctacgccactacccggatcaggagtcagatcggaaataccgagtctgagcttaaaaagttggccgaggagaatcctgacctacaagaggcatatatcgctaaacaaaagcgccttaagagcaagctgcttgaccatgataatgtcaagtatttgaagaagatcttggacgagttggagaaggtcttggatcaggtggaaaccgaactgcagcggagaaacgaggaaacccctgaagaaggccagcaaccatggctttgtggcgagtctttcacattagccgacgtgtccctggccgtgactctgcatcgtttgaagttcctgggcttcgctaggagaaactggggcaatggcaagaggcccaacctcgaaacctattacgagagagtgttgaaacgtaaaacttttaacaaagtgttgggccatgtaaacaatatcttgatctccgcagtcttgcccaccgccttccgggttgccaaaaaaagggcaccaaaggttctgggaacaactctcgtggtcggcctgctcgcaggggttggatatttcgctttcatgctattcagaaagagactggggtcaatgattctcgccttcaggccccggccgaattatttctag

SEQ ID NO: 33138 - DNA, 873 bp, Artificial Sequence
  derived and/or modified sequence
atgaggctgaacagcactggagaggtgcctgtgctgatccacggggagaacatcatctgtgaggccacccagatcatcgactacctggagcagaccttcctggatgagaggaccccccggctgatgccagacaaggagagcatgtactacccccgggtgcagcactaccgggagctgctggacagcctgcccatggatgcctacacccacggctgcatcctgcaccctgagctgactgtggacagcatgatcccagcctatgccaccacccgcatccgcagccagatcggcaacacagaaagtgagctgaagaagctggccgaggagaacccagacctgcaggaggcctacatcgccaagcagaagaggctgaagagcaagctgctggaccatgacaacgtgaagtacctgaagaagatcctggatgagctggagaaggtgctggaccaggtggagacagagctgcagaggagaaatgaggagaccccagaggagggccagcagccctggctgtgtggggagagcttcaccctggctgatgtgtccctggccgtgaccctgcaccggctgaagttcctgggctttgcccggaggaactggggcaatggcaagaggcccaacctggagacctactatgaaagagtgctgaagaggaagaccttcaacaaggtgctgggccacgtgaacaacatcctgatctctgctgtgctgcccacagccttccgggtggccaagaagagggcccccaaggtgctgggcaccaccctggtggtgggcctgctggccggcgtgggctactttgccttcatgctgttcaggaagaggctgggctccatgatcctggccttccggccccggcccaactacttctag

SEQ ID NO: 33139 - DNA, 873 bp, Artificial Sequence
  derived and/or modified sequence
atgcggctgaacagcaccggcgaggtgcccgtgctgatccacggcgaaaacattatttgtgaagccacccagatcatcgactatcttgagcagaccttcctagacgagagaacccctcggcttatgcctgacaaggagagcatgtattaccctagggtgcagcattaccgcgagttgctcgatagtttgccaatggacgcgtatacacacgggtgcattctgcaccccgagcttaccgttgatagcatgatccctgcgtatgctactacccggattaggagtcagattgggaacaccgaatctgaactgaagaagctcgctgaggagaatcctgatctgcaagaagcatatatcgccaagcagaaacgacttaagtccaaactcttagaccacgataacgtgaagtacctcaaaaagatactcgacgaactggagaaggtgcttgatcaggttgagactgagctgcagcgcaggaacgaggagacgcccgaggaagggcagcaaccctggctatgtggtgagtcgttcaccctcgccgatgtctcactagcggttacactgcacagacttaaatttctcggcttcgcaaggcgtaactggggaaatggcaaacggccaaacttggaaacctattacgagcgcgtactcaaacgcaaaacttttaataaagttttaggccacgtaaacaacatcctgatatcggcagtcctgcctacggcctttagggtggcgaagaagcgcgcccctaaagtcctcggaactactctcgtcgtgggtctccttgcaggtgtgggttactttgcctttatgctgtttaggaagagattgggtagcatgatactcgcgttcagaccaaggcctaattatttttag

SEQ ID NO: 33140 - DNA, 873 bp, Artificial Sequence
  derived and/or modified sequence
atgagactcaattccactggggaggtgccagtcctgattcatggtgaaaacatcatttgcgaagcaacacagatcatagactacctcgaacagacattcttagacgagcgaacacccagactcatgccggacaaagagtccatgtactatcctagggtccaacattacagagagctgctcgacagtctcccgatggacgcctacacccatgggtgtatcctccacccagaactgaccgtggactctatgatccccgcttacgctactacgcggatacgctcccaaattggcaacaccgagagtgaattgaagaagctcgctgaggaaaacccagacctgcaggaggcgtatattgcgaaacagaagcgactcaagagtaaactgttggaccatgataatgtcaagtaccttaaaaagattcttgacgagctggagaaggtgctggaccaggtagagacagagctccagcggcgaaatgaagaaacccctgaagagggccagcagccgtggttgtgcggtgagtccttcacccttgccgacgtatctctggcggttacgctgcaccgactaaagttccttggcttcgcacgtagaaactggggcaatggcaaacgccctaatttggaaacctattatgagcgtgttctgaaaagaaagacttttaacaaagtcctgggacacgtcaataatatcttgatctctgcggtgctgcctaccgcgttccgggttgctaaaaaacgggctccaaaagtgttgggcaccacactggtcgtcgggctgctggctggcgtcggctactttgccttcatgttattcagaaaacggcttggctcaatgatactcgcttttcggcctaggccaaattatttctag

SEQ ID NO: 33141 - DNA, 873 bp, Artificial Sequence
  derived and/or modified sequence
atgagactgaacagcaccggcgaggtgcccgtgctgatccacggcgagaacatcatctgcgaggccacccagatcatcgactacctggagcagaccttcctggacgagagaacccccagactgatgcccgacaaggagagcatgtactaccccagagtgcagcactacagagagctgctggacagcctgcccatggacgcctacacccacggctgcatcctgcaccccgagctgaccgtggacagcatgatccccgcctacgccaccaccagaatcagaagccagatcggcaacaccgagagcgagctgaagaagctggccgaggagaaccccgacctgcaggaggcctacatcgccaagcagaagagactgaagagcaagctgctggaccacgacaacgtgaagtacctgaagaagatcctggacgagctggagaaggtgctggaccaggtggagaccgagctgcagagaagaaacgaggagacccccgaggagggccagcagccctggctgtgcggcgagagcttcaccctggccgacgtgagcctggccgtgaccctgcacagactgaagttcctgggcttcgccagaagaaactggggcaacggcaagagacccaacctggagacctactacgagagagtgctgaagagaaagaccttcaacaaggtgctgggccacgtgaacaacatcctgatcagcgccgtgctgcccaccgccttcagagtggccaagaagagagcccccaaggtgctgggcaccaccctggtggtgggcctgctggccggcgtgggctacttcgccttcatgctgttcagaaagagactgggcagcatgatcctggccttcagacccagacccaactacttctag

SEQ ID NO: 33142 - protein, 515 aa, Artificial Sequence [sequence omitted]

SEQ ID NO: 33143 - protein, 561 aa, Artificial Sequence
  derived and/or modified sequence
MAEQVALSRTQVCGILREELFQGDAFHQSDTHIFIIMGASGDLAKKKIYPTIWWLFRDGLLPENTFIVGYARSRLTVADIRKQSEPFFKATPEEKLKLEDFFARNSYVAGQYDDAASYQRLNSHMNALHLGSQANRLFYLALPPTVYEAVTKNIHESCMSQIGWNRIIVEKPFGRDLQSSDRLSNHISSLFREDQIYRIDHYLGKEMVQNLMVLRFANRIFGPIWNRDNIACVILTFKEPFGTEGRGGYFDEFGIIRGPGRQGGSGSESCSLSLGSLVWGPHALEPGEQGGELRRALASSVPRDVMQNHLLQMLCLVAMEKPASTNSDDVRDEKVKVLKCISEVQANNVVLGQYVGNPDGEGEATKGYLDDPTVPRGSTTATFAAVVLYVENERWDGVPFILRCGKALNERKAEVRLQFHDVAGDIFHQQCKRNELVIRVQPNEAVYTKMMTKKPGMFFNPEESELDLTYGNRYKNVKLPDAYERLILDVFCGSQMHFVRSDELREAWRIFTPLLHQIELEKPKPIPYIYGSRGPTEADELMKRVGFQYEGTYKWVNPHKL

SEQ ID NO: 33144 - protein, 256 aa, Artificial Sequence
  derived and/or modified sequence
MAEQVALSRTQVCGILREELFQGDAFHQSDTHIFIIMGASGDLAKKKIYPTIWWLFRDGLLPENTFIVGYARSRLTVADIRKQSEPFFKATPEEKLKLEDFFARNSYVAGQYDDAASYQRLNSHMNALHLGSQANRLFYLALPPTVYEAVTKNIHESCMSQIGWNRIIVEKPFGRDLQSSDRLSNHISSLFREDQIYRIDHYLGKEMVQNLMVLRFANRIFGPIWNRDNIACVILTFKEPFGTEGRGGYFDEFGII

SEQ ID NO: 33145 - DNA, 1548 bp, Artificial Sequence
  derived and/or modified sequence
atggccgagcaggtggccctgagcagaacccaggtgtgcggcatcctgagagaggagctgttccagggcgacgccttccaccagagcgacacccacatcttcatcatcatgggcgccagcggcgacctggccaagaagaagatctaccccaccatctggtggctgttcagagacggcctgctgcccgagaacaccttcatcgtgggctacgccagaagcagactgaccgtggccgacatcagaaagcagagcgagcccttcttcaaggccacccccgaggagaagctgaagctggaggacttcttcgccagaaacagctacgtggccggccagtacgacgacgccgccagctaccagagactgaacagccacatgaacgccctgcacctgggcagccaggccaacagactgttctacctggccctgccccccaccgtgtacgaggccgtgaccaagaacatccacgagagctgcatgagccagatcggctggaacagaatcatcgtggagaagcccttcggcagagacctgcagagcagcgacagactgagcaaccacatcagcagcctgttcagagaggaccagatctacagaatcgaccactacctgggcaaggagatggtgcagaacctgatggtgctgagattcgccaacagaatcttcggccccatctggaacagagacaacatcgcctgcgtgatcctgaccttcaaggagcccttcggcaccgagggcagaggcggctacttcgacgagttcggcatcatcagagacgtgatgcagaaccacctgctgcagatgctgtgcctggtggccatggagaagcccgccagcaccaacagcgacgacgtgagagacgagaaggtgaaggtgctgaagtgcatcagcgaggtgcaggccaacaacgtggtgctgggccagtacgtgggcaaccccgacggcgagggcgaggccaccaagggctacctggacgaccccaccgtgcccagaggcagcaccaccgccaccttcgccgccgtggtgctgtacgtggagaacgagagatgggacggcgtgcccttcatcctgagatgcggcaaggccctgaacgagagaaaggccgaggtgagactgcagttccacgacgtggccggcgacatcttccaccagcagtgcaagagaaacgagctggtgatcagagtgcagcccaacgaggccgtgtacaccaagatgatgaccaagaagcccggcatgttcttcaaccccgaggagagcgagctggacctgacctacggcaacagatacaagaacgtgaagctgcccgacgcctacgagagactgatcctggacgtgttctgcggcagccagatgcacttcgtgagaagcgacgagctgagagaggcctggagaatcttcacccccctgctgcaccagatcgagctggagaagcccaagcccatcccctacatctacggcagcagaggccccaccgaggccgacgagctgatgaagagagtgggcttccagtacgagggcacctacaagtgggtgaacccccacaagctgtag

SEQ ID NO: 33146 - DNA, 1686 bp, Artificial Sequence
  derived and/or modified sequence
atggccgagcaggtggccctgagcagaacccaggtgtgcggcatcctgagagaggagctgttccagggcgacgccttccaccagagcgacacccacatcttcatcatcatgggcgccagcggcgacctggccaagaagaagatctaccccaccatctggtggctgttcagagacggcctgctgcccgagaacaccttcatcgtgggctacgccagaagcagactgaccgtggccgacatcagaaagcagagcgagcccttcttcaaggccacccccgaggagaagctgaagctggaggacttcttcgccagaaacagctacgtggccggccagtacgacgacgccgccagctaccagagactgaacagccacatgaacgccctgcacctgggcagccaggccaacagactgttctacctggccctgccccccaccgtgtacgaggccgtgaccaagaacatccacgagagctgcatgagccagatcggctggaacagaatcatcgtggagaagcccttcggcagagacctgcagagcagcgacagactgagcaaccacatcagcagcctgttcagagaggaccagatctacagaatcgaccactacctgggcaaggagatggtgcagaacctgatggtgctgagattcgccaacagaatcttcggccccatctggaacagagacaacatcgcctgcgtgatcctgaccttcaaggagcccttcggcaccgagggcagaggcggctacttcgacgagttcggcatcatcagaggccccggcagacagggcggcagcggcagcgagagctgcagcctgagcctgggcagcctggtgtggggcccccacgccctggagcccggcgagcagggcggcgagctgagaagagccctggccagcagcgtgcccagagacgtgatgcagaaccacctgctgcagatgctgtgcctggtggccatggagaagcccgccagcaccaacagcgacgacgtgagagacgagaaggtgaaggtgctgaagtgcatcagcgaggtgcaggccaacaacgtggtgctgggccagtacgtgggcaaccccgacggcgagggcgaggccaccaagggctacctggacgaccccaccgtgcccagaggcagcaccaccgccaccttcgccgccgtggtgctgtacgtggagaacgagagatgggacggcgtgcccttcatcctgagatgcggcaaggccctgaacgagagaaaggccgaggtgagactgcagttccacgacgtggccggcgacatcttccaccagcagtgcaagagaaacgagctggtgatcagagtgcagcccaacgaggccgtgtacaccaagatgatgaccaagaagcccggcatgttcttcaaccccgaggagagcgagctggacctgacctacggcaacagatacaagaacgtgaagctgcccgacgcctacgagagactgatcctggacgtgttctgcggcagccagatgcacttcgtgagaagcgacgagctgagagaggcctggagaatcttcacccccctgctgcaccagatcgagctggagaagcccaagcccatcccctacatctacggcagcagaggccccaccgaggccgacgagctgatgaagagagtgggcttccagtacgagggcacctacaagtgggtgaacccccacaagctgtag

SEQ ID NO: 33147 - DNA, 1548 bp, Artificial Sequence
  derived and/or modified sequence
atggccgagcaggttgccctctccagaacccaggtgtgcggtatccttcgggaagaactgtttcagggcgatgcctttcaccagagcgacactcacatcttcattatcatgggagcttcgggagatctagccaagaagaagatctatcctacaatttggtggctcttcagggacggattgttgcccgagaatacattcatcgtcggatacgccagaagtcgtctcaccgtggcggatattcgcaaacagagtgagcctttttttaaggccacacctgaggaaaagttgaagctggaggatttctttgcgcgcaattcctacgtggccggccagtacgacgacgcagcctcctaccagcgactcaatagccacatgaacgcactacaccttggcagccaggccaaccgcctattctacttagcactgccacccacagtgtacgaggcagtcactaaaaatattcacgagagctgcatgtcccagattggttggaaccgaattatcgtggagaaacccttcggtagggatctacaaagttcagaccgcctgtctaaccacatatcaagcctgttcagagaggatcagatatatcgcatcgatcactatcttggaaaagagatggtacagaacctgatggttcttcgattcgctaatcggattttcggtcccatttggaaccgggataacatcgcatgcgtgattttgaccttcaaagagccctttggtaccgaggggagagggggttactttgatgagttcggcattattcgagatgtgatgcaaaatcacttgctgcagatgttgtgtttggtggccatggaaaaaccggcttcgactaatagcgatgatgtgagggatgagaaggttaaggtgctgaaatgtattagcgaggtacaagcgaacaacgtagttctgggtcagtatgtgggaaacccagatggcgaaggggaagccacaaagggttacttggatgaccccacagtgccccgtggcagtacaacagctacgttcgctgccgtcgtgctctatgtggaaaacgagcgatgggatggagtcccattcattctcaggtgtggcaaggcccttaatgagaggaaggcggaagtccggctgcaattccacgacgtggccggcgacatcttccaccagcaatgtaaacggaatgagttagtgatccgggtgcagcccaacgaggccgtgtacactaagatgatgacgaagaagcccgggatgttcttcaatcccgaagagtccgagctggatctcacgtatggcaaccggtacaagaatgtgaagctgccagacgcctatgagcggttgattctcgacgtgttctgcggatcacagatgcacttcgtgagatccgatgaactgagagaggcttggcggattttcactcctctcttacatcagatcgagctggagaaacccaaacctatcccctatatctatggtagtaggggccctacggaggccgatgaacttatgaagagagtggggttccagtatgaaggcacatataagtgggtgaacccccataagttgtag

SEQ ID NO: 33148 - DNA, 1686 bp, Artificial Sequence
  derived and/or modified sequence
atggccgagcaggtagccctaagccgcacacaagtctgcgggatcttacgggaggaactgtttcagggggacgcttttcaccagagcgatacccatattttcatcataatgggcgcttccggcgaccttgcaaaaaaaaagatctatccaacaatatggtggctcttccgcgacggcctgttacccgagaatacattcattgtcggatatgcacggtcgcgcctgacggtggcggacattaggaagcagagcgagccgttcttcaaagccaccccagaagaaaaactcaagctggaggatttcttcgcccggaacagttacgtggcagggcagtacgatgacgctgcctcctaccagcgcctgaactctcacatgaatgccctgcacctcggatcacaggccaatagattgttctacctggcactgccacccactgtgtatgaagcagtaaccaagaacatccacgaaagctgtatgtcccagatcggctggaaccgaataatagtcgagaagccttttggtagggatctccaaagttccgataggttaagtaaccatatcagttctctgtttagagaggaccagatctatcggatcgaccactacttagggaaggaaatggtccagaacctaatggtgctcaggttcgctaacaggatcttcggaccaatctggaaccgggacaacatcgcctgcgtgattcttacatttaaggagccgttcggcactgagggccgagggggatatttcgatgagtttggaataattaggggacccgggcgtcagggcggatcggggagcgaatcatgttctctgtctttgggatccctggtctggggcccgcatgctctggagccaggagagcaggggggagaactgcgtcgcgccctggcctcctctgtgcctcgcgacgttatgcaaaatcacctcttacaaatgctctgcttagtcgctatggagaagcctgcttctactaactctgacgatgtcagggacgagaaagttaaggtacttaaatgcatctctgaggtgcaagccaacaacgtcgttctgggtcaatatgttggcaacccggacggagaaggcgaagctactaaagggtatctggacgatcctaccgtacctcgtgggagcacgactgccacatttgctgccgtggtgctgtacgtggagaatgagcgctgggatggcgtcccatttattctgcgctgcggtaaagcactgaacgaacgtaaagcggaggtcagactgcagttccatgacgtggccggagatattttccatcaacagtgtaaacggaatgagctagtcattcgggtgcaacccaacgaggccgtgtatactaaaatgatgaccaagaaacccggcatgttcttcaaccctgaagagagcgagctggacctgacatacggaaaccggtacaaaaatgtgaaactgcccgatgcatacgagagactgatccttgatgttttctgtgggtcgcaaatgcacttcgtgaggagcgatgagctgagggaggcctggaggatttttacccctctgttacatcagattgagctggaaaaacctaagccgattccttatatctacggtagcagaggacccaccgaggccgatgagctgatgaagcgcgtgggtttccagtatgaagggacttacaaatgggtgaatcctcataagttgtag

SEQ ID NO: 33149 - DNA, 1548 bp, Artificial Sequence
  derived and/or modified sequence
atggctgagcaggttgcactgagtcgaactcaggtatgtgggatcctgagagaggaactgtttcagggagacgcttttcaccagtccgatactcacattttcattatcatgggtgccagtggcgatctggccaagaaaaaaatttaccccaccatatggtggcttttccgggacggactgctcccggaaaatacctttattgtcgggtacgcaagaagtagacttaccgtggctgacatccgcaagcagtccgaaccgttctttaaagctaccccagaagagaaactcaaactcgaggatttcttcgcaaggaacagctacgtggccggacaatatgatgacgccgcatcatatcagcgacttaactcccacatgaacgctctccatctcggttcacaagcgaatcgattgttttatttagcgttaccgcccacggtctatgaggcagtcactaaaaacatacacgagagctgcatgtcccagattgggtggaataggattattgtggagaagccctttggacgggatctgcagagctccgacaggctgtctaaccacatttcctcactgttccgtgaagatcaaatctacagaattgatcattatttgggaaaggagatggtgcaaaatctgatggtgctccgatttgccaaccggatcttcggaccaatatggaacagagacaacattgcttgcgtgatcttgacctttaaggaacccttcgggaccgaaggcagggggggctatttcgacgaattcggaatcattcgcgacgttatgcagaatcacctccttcagatgctttgcctggtggctatggaaaagcccgccagcaccaatagtgatgacgtgcgagatgagaaagtgaaggtcttgaaatgcatctctgaggtgcaggccaacaatgtggtgctgggccagtatgtcggaaatcccgatggcgagggagaagctacgaagggatatctggatgatcctaccgttccacgcgggtccaccactgcaacctttgccgccgtggtgctgtacgtggaaaacgagcgttgggatggcgttcccttcattctgcgctgtggcaaagctctaaacgagaggaaagcagaggtccgactgcagttccatgacgtggctggagatatcttccaccagcagtgtaagcgaaacgagttggttatccgagtacagccaaacgaagcggtgtacacaaaaatgatgacaaaaaagcccggcatgttctttaaccctgaagagagcgagctggacctgacttacggaaacagatataaaaacgtaaagctccctgacgcctacgagaggttgatccttgatgttttctgcggcagtcagatgcactttgtccgcagcgacgaactgcgtgaggcatggaggattttcacacccctcctacaccagatcgaactggagaagccgaagcctatcccctacatctacggctctaggggacctaccgaagcagatgagctgatgaaacgggtgggcttccagtatgaggggacttacaagtgggttaacccccataagctttag

SEQ ID NO: 33150 - DNA, 1548 bp, Artificial Sequence
  derived and/or modified sequence
atggccgagcaggtggccctgagcaggacccaggtgtgtggcatcctgcgggaggagctgttccagggagatgccttccaccagagcgacacccacatcttcatcatcatgggcgccagcggggacctggccaagaagaagatctaccccaccatctggtggctgttcagagatggcctgctgcctgagaacaccttcatcgtgggctacgcccggagccggctgactgtggccgacatcaggaagcagagcgagcccttcttcaaggccaccccagaggagaagctgaagctggaggacttctttgccaggaacagctatgtggccggccagtatgatgatgctgccagctaccagaggctgaacagccacatgaatgccctgcacctgggcagccaggccaacagactcttctacctggccctgcccccaacagtgtatgaagctgtgaccaagaacatccacgagagctgcatgagccagatcggctggaaccgcatcatcgtggagaagcccttcggccgggacctgcagagcagtgaccggctgagcaaccacatcagcagcctcttccgggaggaccagatctacagaattgaccactacctgggcaaggagatggtgcagaacctgatggtgctgcgctttgccaaccgcatcttcggccccatctggaacagagacaacatcgcctgcgtcatcctgaccttcaaggagccctttggaacagagggccggggcggctactttgatgaatttggcatcatcagagatgtgatgcagaaccacctgctgcagatgctgtgcctggtggccatggagaagccagccagcaccaacagtgatgatgtgagagatgagaaggtgaaggtgctgaagtgcatcagcgaggtgcaggccaacaacgtggtgctgggccagtatgtgggcaacccagatggagagggggaggccaccaagggctacctggatgaccccaccgtgccccggggcagcaccacagccacctttgctgctgtggtgctgtatgtggagaatgaacgctgggatggagtgcccttcatcctgcgctgtgggaaggccctgaatgaaaggaaggccgaggtgcggctgcagttccatgatgtggccggggacatcttccaccagcagtgcaagagaaatgagctggtgatccgggtgcagcccaatgaagctgtgtacaccaagatgatgaccaagaagccaggcatgttcttcaaccctgaggagagcgagctggacctgacctacggcaaccgctacaagaatgtgaagctgcctgatgcctatgagcggctcatcctggatgtgttctgtggcagccagatgcactttgtgcggagtgatgagctgcgggaggcctggaggatcttcacccccctgctgcaccagatcgagctggagaagcccaagcccatcccctacatctacggcagccggggccccacagaagcagatgagctgatgaagagggtgggcttccagtatgagggcacctacaagtgggtgaacccccacaagctgtag

SEQ ID NO: 33151 - DNA, 1686 bp, Artificial Sequence
  derived and/or modified sequence
atggccgagcaggtggccctgagcaggacccaggtgtgtggcatcctgcgggaggagctgttccagggagatgccttccaccagagcgacacccacatcttcatcatcatgggcgccagcggggacctggccaagaagaagatctaccccaccatctggtggctgttcagagatggcctgctgcctgagaacaccttcatcgtgggctacgcccggagccggctgactgtggccgacatcaggaagcagagcgagcccttcttcaaggccaccccagaggagaagctgaagctggaggacttctttgccaggaacagctatgtggccggccagtatgatgatgctgccagctaccagaggctgaacagccacatgaatgccctgcacctgggcagccaggccaacagactcttctacctggccctgcccccaacagtgtatgaagctgtgaccaagaacatccacgagagctgcatgagccagatcggctggaaccgcatcatcgtggagaagcccttcggccgggacctgcagagcagtgaccggctgagcaaccacatcagcagcctcttccgggaggaccagatctacagaattgaccactacctgggcaaggagatggtgcagaacctgatggtgctgcgctttgccaaccgcatcttcggccccatctggaacagagacaacatcgcctgcgtcatcctgaccttcaaggagccctttggaacagagggccggggcggctactttgatgaatttggcatcatccggggccctggccggcagggcggcagcggcagcgagagctgcagcctgagcctgggcagcctggtgtggggcccccacgccctggagcccggggagcagggcggggagctgcggcgggccctggccagctctgtgcccagagatgtgatgcagaaccacctgctgcagatgctgtgcctggtggccatggagaagccagccagcaccaacagtgatgatgtgagagatgagaaggtgaaggtgctgaagtgcatcagcgaggtgcaggccaacaacgtggtgctgggccagtatgtgggcaacccagatggagagggggaggccaccaagggctacctggatgaccccaccgtgccccggggcagcaccacagccacctttgctgctgtggtgctgtatgtggagaatgaacgctgggatggagtgcccttcatcctgcgctgtgggaaggccctgaatgaaaggaaggccgaggtgcggctgcagttccatgatgtggccggggacatcttccaccagcagtgcaagagaaatgagctggtgatccgggtgcagcccaatgaagctgtgtacaccaagatgatgaccaagaagccaggcatgttcttcaaccctgaggagagcgagctggacctgacctacggcaaccgctacaagaatgtgaagctgcctgatgcctatgagcggctcatcctggatgtgttctgtggcagccagatgcactttgtgcggagtgatgagctgcgggaggcctggaggatcttcacccccctgctgcaccagatcgagctggagaagcccaagcccatcccctacatctacggcagccggggccccacagaagcagatgagctgatgaagagggtgggcttccagtatgagggcacctacaagtgggtgaacccccacaagctgtag

SEQ ID NO: 33152 - DNA, 1548 bp, Artificial Sequence
  derived and/or modified sequence
atggccgagcaggtggccctgagccggacccaggtgtgcggcatcctgagggaggagctctttcaaggggatgcattccaccagtccgatacgcacatcttcattatcatgggagcgagcggggacctggcgaagaagaaaatctacccgactatttggtggctgtttcgggatggactcctgccggagaacacattcattgtaggctacgccagatccaggctaactgtcgccgacatccggaagcagagcgagcccttctttaaagctaccccggaagagaagctcaaactggaagacttctttgcacgcaatagctacgtggcaggacagtacgatgatgcagcatcataccagaggctgaacagccatatgaacgccttgcatttagggagccaggccaacagactgttctatttggctctcccacctaccgtgtacgaggctgtcaccaaaaatatccacgagtcatgcatgtcccagatcggatggaacagaatcatcgttgaaaaaccgtttgggcgagatttgcagtcttcggaccggctttccaatcatatcagctctctcttccgtgaggaccaaatttatcgaattgatcattacctagggaaagaaatggtccagaacctcatggttctgaggttcgcaaacagaatctttggacctatctggaaccgcgataatatcgcttgcgtgattctcacttttaaagagccttttggaacagagggaagaggcggatattttgatgaattcggcatcatacgtgatgtgatgcaaaatcatcttctccagatgttatgcttggtcgctatggaaaagccagccagtacaaacagcgatgacgtgagggacgaaaaggtcaaagtgctcaagtgtattagtgaggtgcaagctaacaacgtggtgctcgggcagtatgtgggcaaccccgatggggagggtgaggccaccaaaggctatctggacgaccccacagtccctagaggctcaaccacagctacttttgcggcagtcgtgctgtacgtggagaatgaacgctgggacggggtgccatttatccttcgctgtggcaaggccctgaacgaaagaaaggccgaggtgcgcttacagtttcatgatgtcgccggcgacatattccatcagcagtgcaagaggaatgaattggtgatcagagtacagcccaatgaagctgtgtataccaagatgatgaccaaaaagccggggatgttctttaatcccgaggagtccgaactcgacctcacttacggcaaccgctacaaaaacgtcaagcttccggatgcatacgagaggctgattcttgacgtattctgtggctcccaaatgcactttgtcagatcagacgaattaagagaggcctggcgcatcttcacaccactgctgcatcagatcgagctggagaaacccaagccaataccatacatttacggctcaaggggtcctactgaagccgatgagctcatgaagcgtgtgggatttcaatatgagggcacctacaaatgggtgaaccctcacaagctttag

SEQ ID NO: 33153 - DNA, 1686 bp, Artificial Sequence
  derived and/or modified sequence
atggccgagcaggtggccctgagccggacccaggtgtgcggcatcctgcgagaagagttgttccagggggatgcgttccatcaatcagatactcatatattcattattatgggagcctccggcgatctcgctaaaaaaaaaatttatcctactatttggtggttatttcgggacgggctgcttcccgagaataccttcatagtcgggtacgccaggagccggctcactgtcgccgacatccgcaaacagtctgaacccttcttcaaagcaacccccgaagaaaagctgaagcttgaggatttcttcgcccggaactcttacgtggcaggacaatacgacgatgcggccagctatcagcggcttaatagtcatatgaatgctttgcatctcgggtcacaagcaaaccgactgttctatctggcactcccaccgacagtgtatgaggccgtgactaaaaatatccatgagagctgcatgagccagatcgggtggaaccgcattatagtagagaaacctttcggcagagacctacagagctccgatagactgagtaaccacatctcaagtctctttagggaggaccagatttacagaattgaccactacttgggtaaggaaatggtgcagaacctcatggtgttgcggtttgctaaccgtatttttgggccaatttggaaccgggacaatatcgcgtgtgtcatcttgacattcaaggagccgttcggaacagagggtcgaggtggatatttcgatgaatttgggattatccgcggacccgggaggcagggtggatctggatccgagagctgttcgcttagtcttggtagcctggtttggggaccccatgcactggagccaggcgaacaggggggggagctgaggagggccttagcatcatccgttccgcgcgatgttatgcagaaccatttgctccagatgctttgccttgtggctatggagaagcccgcctcaactaactctgatgacgtgagagacgagaaggtgaaggtattaaagtgtatttcagaagtgcaggccaataacgttgtcttgggacagtatgtgggtaaccctgatggcgagggagaggcgacgaaagggtatctcgacgatccgaccgtgccgcgggggtccaccactgccacttttgctgctgtggtcctgtacgttgagaacgagcgttgggacggcgtacctttcatcctgagatgcgggaaagcactgaacgaacggaaggctgaagttcgactgcagttccacgatgtggctggagacatcttccatcagcagtgcaagaggaacgagctcgtgatccgcgttcagccaaatgaggctgtttacacaaaaatgatgaccaaaaaacccggaatgttcttcaacccggaggaaagcgaactggatctaacctacggaaacagatataaaaacgtgaagctgcctgatgcatacgagagactgatcctagacgtgttctgcggcagtcagatgcacttcgtgagatccgacgagctgcgcgaggcctggcgcatatttaccccactgttgcaccagattgagctggaaaaacctaaaccgataccttatatctacggctccaggggacccactgaagcagatgaactgatgaagcgggtgggcttccagtacgagggaacctataagtgggtaaacccacacaaactgtag

SEQ ID NO: 33154 - DNA, 1548 bp, Artificial Sequence
  derived and/or modified sequence
atggccgagcaggtggccctgagccggacccaggtgtgcggcatcctgagggaagagcttttccaaggtgatgccttccatcagtcagatacgcacatatttattattatgggtgcctctggtgacctggcgaaaaagaagatctatcccactatttggtggctgttccgagatggcttactcccagaaaatacgtttattgtcggctatgctaggagtagacttaccgtggctgacatccgaaagcagagtgaaccattttttaaagctactcccgaggagaagttaaagctggaggacttctttgcacggaattcttacgttgccgggcaatatgatgatgccgcttcataccagcgcttgaactctcacatgaatgcgttgcacctgggtagtcaggccaacagactcttctacttggctctgcctcctacagtctatgaagcagttactaagaatattcacgaaagctgtatgagccagattggatggaataggataattgtggaaaagccatttgggcgagacctgcaatccagcgatcgcctatccaatcatattagctccctgttccgggaggaccagatctatagaatcgatcattatcttggaaaagaaatggtccaaaatcttatggtccttcggtttgcaaaccggatcttcggcccaatctggaatagggataacattgcctgcgtaatcctgacctttaaggagcctttcgggactgagggcagagggggatactttgatgagttcgggattattcgcgacgtgatgcagaatcacctgcttcagatgttatgcttggtggccatggaaaaacctgccagtaccaacagcgatgatgtgcgtgacgagaaagttaaggtcctcaagtgcatttcagaagttcaagccaataacgtggtgctggggcagtacgttggaaacccagatggcgaaggcgaagccacaaagggctacctggacgacccaacagtacctcgaggtagcacaaccgcaaccttcgccgcagtggtcctgtatgtggaaaacgagcggtgggatggcgtcccattcatcctgcgttgtggaaaggccttaaatgagagaaaggcagaggtcaggctccagttccatgacgttgctggagatatatttcaccaacaatgtaaacgaaacgaactggttatcagagtacaacctaatgaggccgtatatacaaagatgatgacgaagaaacctggtatgttcttcaacccagaggagtctgagctggacctaacctatggtaacaggtacaagaacgtgaaattgccagatgcctatgaaagattgatcctggatgtattctgtggtagtcagatgcactttgtgcggtctgacgagctaagagaggcctggcgcatttttacccccctacttcatcagatcgagttagagaagcccaagcctatcccttacatctatgggagccggggccctacggaagctgacgagctcatgaagcgtgtggggtttcagtatgagggcacgtacaagtgggtcaatccccacaagctttag

SEQ ID NO: 33155 - DNA, 1548 bp, Artificial Sequence
  derived and/or modified sequence
atggctgagcaggtcgccttgagcaggacgcaggtttgtggaatcctgagagaagagctgttccagggtgatgccttccaccagtccgatacccacatatttattataatgggcgcatctggcgacctggcaaagaagaagatctatccaaccatctggtggttgtttagggatggacttctgccagaaaatacattcattgtggggtatgccaggagtcggctaacggtggcagacattaggaaacagtctgaacctttcttcaaggcaacaccagaagaaaagcttaaactcgaagatttcttcgccaggaactcatacgttgctgggcagtacgatgacgcagcttcttatcaacgccttaattcccatatgaatgccctgcacctcggttcccaggctaatcgactcttctacttggccctaccccctactgtctacgaagctgtgacaaaaaacatccacgaaagctgcatgagccaaattggctggaacagaattatcgtcgaaaagcccttcggtcgggatctccagagctccgacagattgagcaaccacatttcgtctttatttcgggaagatcagatttacagaattgaccattatcttggtaaggaaatggttcaaaacttgatggtgttgaggttcgccaacagaatattcgggcctatctggaatagagacaacattgcctgcgttatactaactttcaaagagcccttcggaaccgaaggcagggggggttactttgatgaatttggtatcatcagagatgtcatgcagaatcatctgttgcaaatgctatgcttggtggctatggaaaagccagcttctacgaactctgacgacgttcgtgatgaaaaggtgaaagttctcaagtgtatcagcgaggtgcaagccaacaacgtcgttctaggccaatacgtgggaaaccctgatggtgaaggggaggccacgaaaggctacctggacgaccccaccgtcccacgtggaagcacaactgcaacttttgcggctgttgtgttatatgtggaaaatgaacgttgggacggcgtccccttcatactgcgatgcgggaaggcattgaatgaaagaaaggcggaggtacggctacagttccatgacgttgcaggggatatatttcatcagcagtgcaagcgaaatgagttggtgattagggttcagcctaatgaagcagtttacactaaaatgatgaccaaaaaacccggtatgtttttcaaccctgaggagtccgagctggacctgacgtatggaaatcggtacaagaacgtaaaactgcctgatgcatacgaacgtctgattctggatgtgttctgcggtagccagatgcacttcgtccggtcggatgaactgagagaggcctggcggatatttaccccgctcctgcatcaaatcgagctggagaaacctaagcccattccatatatctacggaagccgcggtcctactgaggctgacgaactcatgaagcgagtgggattccagtacgaggggacttacaaatgggtcaatcctcacaagctgtag

SEQ ID NO: 33156 - DNA, 1686 bp, Artificial Sequence
  derived and/or modified sequence
atggccgaacaagtggcgctgtcccgtacacaagtgtgcggcatcctcagggaggaactcttccagggcgatgcctttcaccagagcgatactcacattttcatcatcatgggtgcatctggtgacctcgcaaagaagaaaatttatcctacgatctggtggctgttcagggacggccttctcccagaaaacacgtttatagtcggatatgcgagatcccgcttgaccgtcgccgacattagaaagcagtcggagccattttttaaggctacgcctgaagaaaagcttaagctcgaggatttctttgcgagaaactcttacgtggcaggccagtatgacgatgctgcttcttaccagaggttgaactcccatatgaatgccttgcatctcggcagccaggctaataggcttttctatttggccctgccgccaacagtgtatgaagcagtcaccaaaaacattcacgaatcctgcatgagccaaatcggatggaaccgaattatagttgaaaaaccctttggacgcgacctgcagtcgagcgataggctgtccaaccacatttccagtctgttcagggaggaccagatctatcgaatcgatcactacctgggaaaagagatggtccagaacctcatggttctgcggttcgctaacagaatattcgggccaatctggaacagagacaatatcgcatgtgtcatcctcacatttaaagaacccttcggcacagaggggaggggcggatacttcgatgaatttgggataatacgagggcctgggaggcaaggaggatccggatccgagtcatgcagcttgtcactaggaagtctcgtctgggggcctcatgccctggagcctggagaacagggcggagaattgcgtcgcgcactcgccagctctgtaccacgggatgtcatgcaaaaccatttgctacaaatgctttgtctggtggccatggaaaagcccgctagcacaaactcggacgatgttagggatgagaaggttaaggtacttaagtgtatttcagaggtgcaggctaataacgtagtactgggccagtacgtgggaaatcccgacggtgagggggaggcaactaaggggtatctggatgaccccaccgtgccaaggggcagcacaaccgccacatttgcagccgttgtgctgtatgtggaaaacgagcgttgggatggggtccctttcatattacggtgcggcaaggctctgaatgaaaggaaggccgaggttaggctgcaatttcacgatgtcgcaggggacattttccaccaacagtgcaagcgaaacgaacttgttatccgagtacagcctaacgaggctgtttacacaaagatgatgaccaagaagcccggtatgttctttaaccccgaggaatctgagttagacttaacgtatggcaataggtataagaacgtaaagctcccagacgcctatgaacgcctcattttggatgtgttttgcggctcccagatgcactttgtccgctctgatgagttgcgggaggcatggcggatctttacgcctctcttgcatcagatagagctcgaaaagcctaagcccataccctacatttatggaagccgcggaccaaccgaagccgacgaactcatgaaacgagtgggatttcagtatgaaggtacgtataagtgggtcaacccacataaattgtag

SEQ ID NO: 33157 - DNA, 1548 bp, Artificial Sequence
  derived and/or modified sequence
atggccgagcaggtggccctcagtcggactcaagtctgcggaattcttcgcgaggaactctttcaaggagacgccttccaccagtctgacacgcacatcttcataatcatgggggctagcggggacctggctaagaaaaagatatatcccaccatctggtggctttttagggatggactcttacctgaaaacacgtttatcgtgggttacgccaggtcccggctcactgtagcggatatcaggaagcagtcagagccgttttttaaggcaacacctgaagagaagctgaaactggaggacttttttgctagaaactcatacgttgccggacagtatgatgatgcagcctcatatcagcgcctgaattcccatatgaacgccctgcacctgggaagtcaggcgaatagactgttctacctggctcttccaccgaccgtctacgaggcggttaccaagaacatccatgaaagttgcatgtcccagataggatggaatcgaataatagtggagaagccttttggacgcgatttacagtcatctgaccggttgtcaaatcatatctcgagtctgtttagagaagaccagatctaccgcatcgaccattatctgggcaaggaaatggtgcagaacttgatggtccttaggtttgccaatagaatctttggaccaatctggaatcgggacaacatcgcctgcgtcatcctcacatttaaagagccctttggcaccgagggaagaggtggctatttcgatgaatttggcatcatcagggacgtcatgcagaaccacttactacaaatgttatgtcttgtcgctatggagaagcccgcttctacaaattcagatgacgtcagggatgagaaggttaaggtccttaagtgtatcagcgaagtgcaggccaataacgtggtactaggccagtacgtaggcaacccggatggggagggtgaagctaccaagggttacttggacgatccgaccgtgcctagaggatccaccacagcaacatttgcagccgtggtgttgtacgtggagaacgagaggtgggacggagtgccattcatcttacgatgcggcaaggctctcaacgaaaggaaagctgaggtgaggctccaattccatgacgtcgccggagatatttttcaccaacaatgtaaacggaatgagctggttataagagttcagcccaatgaggcagtgtatacaaaaatgatgaccaaaaaacccggtatgttttttaaccccgaggagtccgaactcgatttgacttacggaaaccgctacaagaatgtgaaactacccgacgcctatgaacgcctgattctggatgtgttttgtgggtctcagatgcattttgtcaggagcgacgagcttagagaagcctggagaatcttcacccctttactgcaccagatcgagctagaaaaacctaagccaataccatacatctatggcagccggggacccaccgaggctgatgaactcatgaaacgtgtgggcttccaatatgagggcacctacaagtgggtgaacccccataagttgtag

SEQ ID NO: 33158 - protein, 446 aa, Artificial Sequence
  derived and/or modified sequence
MPGSDLERRAHLLLAQLEHSEPIEAEPEALSPVPALKPTPELELALTPARAPSPVPAPAPEPEPAPTPAPGSELEVAPAPAPELQQAPEPAVGLESAPAPALELEPAPEQDPAPSQTLELEPAPAPVPSLQPSWPSPVVAENGLSEEKPHLLVFPPDLVAEQFTLMDAECRILKNFSSLYAILSALQSNSIHRLKKTWEDVSRDSFRIFQKLSEIFSDENNYSLSRELLIKEGTSKFATLEMNPKRAQKRPKETGIIQGTVPYLGTFLTDLVMLDTAMKDYLYGRLINFEKRRKEFEVIAQIKLLQSACNNYSIAPDEQFGAWFRAVERLSETESYNLSCELEPPSESASNTLRTKKNTAIVKRWSDRQAPSTELSTSGSSHSKSCDQLRCGPYLSSGDIADALSVHSAGSSSSDVEEINISFVPESPDGQEKKFWESASQSSPET

SEQ ID NO: 33159 - protein, 859 aa, Artificial Sequence
  derived and/or modified sequence
MMVDCQSSTQEIGEELINGVIYSISLRKVQLHHGGNKGQRWLGYENESALNLYETCKVRTVKAGTLEKLVEHLVPAFQGSDLSYVTIFLCTYRAFTTTQQVLDLLFKRYGRCDALTASSRYGCILPYSDEDGGPQDQLKNAISSILGTWLDQYSEDFCQPPDFPCLKQLVAYVQLNMPGSDLERRAHLLLAQLEHSEPIEAEPEALSPVPALKPTPELELALTPARAPSPVPAPAPEPEPAPTPAPGSELEVAPAPAPELQQAPEPAVGLESAPAPALELEPAPEQDPAPSQTLELEPAPAPVPSLQPSWPSPVVAENGLSEEKPHLLVFPPDLVAEQFTLMDAELFKKVVPYHCLGSIWSQRDKKGKEHLAPTIRATVTQFNSVANCVITTCLGNRSTKAPDRARVVEHWIEVARECRILKNFSSLYAILSALQSNSIHRLKKTWEDVSRDSFRIFQKLSEIFSDENNYSLSRELLIKEGTSKFATLEMNPKRAQKRPKETGIIQGTVPYLGTFLTDLVMLDTAMKDYLYGRLINFEKRRKEFEVIAQIKLLQSACNNYSIAPDEQFGAWFRAVERLSETESYNLSCELEPPSESASNTLRTKKNTAIVKRWSDRQAPSTELSTSGSSHSKSCDQLRCGPYLSSGDIADALSVHSAGSSSSDVEEINISFVPESPDGQEKKFWESASQSSPETSGISSASSSTSSSSASTTPVAATRTHKRSVSGLCNSSSALPLYNQQVGDCCIIRVSLDVDNGNMYKSILVTSQDKAPAVIRKAMDKHNLEEEEPEDYELLQILSDDRKLKIPENANVFYAMNSTANYDFVLKKRTFTKGVKVKHGASSTLPRMKQKGLKIAKGIF

SEQ ID NO: 33160 - protein, 309 aa, Artificial Sequence [sequence omitted]

SEQ ID NO: 33161 - DNA, 666 bp, Artificial Sequence
  derived and/or modified sequence
atggcagctgctggcccgttgtgtactgagcgagtttctgttctaagccagcccaatagcggggttgaagatcctacaccagcggggggaaggggccagggacgccgacggggaagggaagaattggagtcaattggagctggccctggagccagtgtgagaattctgcctgcactccgacccggactcggaggggtgtggggcgccggtgccgccagcctggtgttccaagccggcccggggagtagctggttgggttggcccgatctggacctggccctctataggggttgggcgtgccgcagcgaaggcactgcaaacgtggcttttccggggaccgccagccctggcttcagtagagcacggcagactcgggatctcaggaagccggccttgaaaacgcccagccataccgccagccagctagctgctgaagctggaaacccgagcggcggctgcccatctatgcgatgccagcgacgggtcggagccctggtccctacttggaagggaggctggagagatggatggtctgggtccgggggaagagcaaaggaaagaattctagctttttcctttcccgcaggggggggcattaggggtgagagagtgcaggcagctagtaatacgcgtatatgggaagagcccggaagcactcccaattag

SEQ ID NO: 33162 - DNA, 294 bp, Artificial Sequence
  derived and/or modified sequence
atgggcagcatccccagcaagccctgcaacaaccctgagggccccctgctgcagggcatggaggccgctgactggacaggcatcggcgtgtgcctgcccccaggaggagcccggggccacatctactgctgcacccggctgtgccaccagagagctgccagcgcccacaggagcctgctgctgcccaggacagtgcagacaggaggaacagagcgggagaagccaggccctggccagaggaagagaggagcccactgcagcgcctgcaagaggagcagcacccggcccagctag

SEQ ID NO: 33163 - DNA, 666 bp, Artificial Sequence
  derived and/or modified sequence
atggccgctgctgggcctctgtgcacagagcgggttagcgtgctgtcccagcccaatagtggagtcgaggacccaaccccagcgggagggcgagggcaaggaaggaggagaggacgggaagaactcgagtcaatcggcgcaggcccaggcgcatcagtcagaatactcccggcactgcgccctgggctaggtggagtgtggggtgctggagctgctagtctggtgtttcaggccggtcccggaagttcgtggctaggatggccggacctcgacctggccctgtatagggggtgggcgtgccgaagtgaggggactgccaacgtggctttcccgggaacagcttcacccggttttagcagagccaggcagacccgcgacctgcggaaaccggcactgaagaccccgagccacacggcctcacagttggctgccgaggctggtaatccatcaggcggatgtccctccatgaggtgtcaaagacgagttggtgcactggtccccacatggaaggggggttggcgggatggctggagcggttccggcggtcgcgcaaaagagcgaatcctggccttcagtttccctgcaggaggaggcattcgtggagagcgagtgcaagcggctagtaacacacggatttgggaagagccagggtctacgcctaattag

SEQ ID NO: 33164 - DNA, 1341 bp, Artificial Sequence
  derived and/or modified sequence
atgccgggaagtgaccttgagcgccgcgcccatctgctgttagcccagctggagcactcagagcccatcgaggcggaaccagaagccctgtcaccagtgcctgccctcaagcccacccctgagctcgaattagctctgacacctgctagggctcccagcccagtgccagcaccagctccagagccagagccagcccccacacctgcccctggcagcgaattagaggttgcccccgctcctgccccagaacttcagcaagcccccgagcctgctgtaggactggagtctgcgccggcaccagccttagaattagaacctgctccagagcaagatcctgcaccctctcaaactctggagctggaaccagcccctgcccctgtgcctagcttgcagcccagctggccaagtccagtggtggccgagaatggccttagtgaggaaaaaccgcacctcctcgtcttcccacctgatctggtcgccgaacagttcactctgatggacgctgaatgccgtattttgaagaacttcagctcgctctacgctattttgtcagctctgcaatccaattctatccatcggttgaaaaagacatgggaggacgtctccagggattcatttaggatattccagaagttgagcgagatcttttcagacgagaataactacagcctctcgagggagctgcttatcaaagagggcacatccaaattcgccacactggagatgaaccccaagagggctcagaaaaggcctaaagagacagggattattcagggaacagtgccctatctgggcacgttcttaacagaccttgttatgctggacacggcgatgaaagattatctgtatgggcggctaattaactttgaaaagcggcggaaggagtttgaggttatcgcacaaatcaagctgctccaaagtgcctgcaacaattactcgatagctccagatgagcagtttggagcctggtttagagcggtggaaagacttagcgagaccgagtcttacaacctgtcttgtgagctggagccaccatcagagagcgcgtctaacacgctgaggacgaaaaagaacactgccattgtgaagaggtggagcgatcggcaggccccttccacggagttgtcgacctctggttcaagccattcgaaatcttgtgaccagctgaggtgcggcccatacctgtcatccggcgatattgctgacgccctgagcgtccattcggctgggtctagctctagtgacgtggaggagataaacatctcttttgtgcctgaatcccccgatggccaggagaagaagttctgggagagtgcgtctcaatccagccccgagacctag

SEQ ID NO: 33165 - DNA, 2580 bp, Artificial Sequence
  derived and/or modified sequence
atgatggtggactgccagtcatcaacacaggagattggggaggagctgatcaacggggttatatacagcatcagcctgagaaaagtgcagctgcaccacggcgggaataaaggccagcgatggctggggtatgagaatgaatccgctctaaacttgtacgagacatgcaaggtaagaaccgtgaaggcaggtactctcgagaaactcgtggaacacctcgtgcccgctttccaagggtctgacttgagttacgtgaccattttcctttgtacctaccgcgccttcacgacgacccagcaggtccttgacctgctattcaaacgttacggccgttgcgacgctctgacggcatctagtcgatatggatgtatactgccatacagtgatgaggacggtggacctcaggatcagctgaaaaacgctatttcttcgattctcggtacatggctggaccagtactctgaagacttttgccagccccctgactttccctgcctcaagcagctggtggcttacgtgcagcttaatatgccaggctctgacctggagcgcagggcccacctgttgcttgctcagctggagcacagtgagcccatcgaagcggagcccgaggctctctcccccgtccctgcgctcaagccaaccccggaacttgaactggccctgaccccggcaagagctccatcaccagttccggccccagcacccgagcctgagcctgctcctacgcccgcccctggaagtgagctcgaggtggctccagccccagcacctgagttacaacaagctccagagcccgcagtcggactcgaaagcgctcccgcccccgccctagagctggagccagctcctgaacaagatccagccccaagtcagaccttagaactggagccagcccccgctccggtgccctcgcttcaacccagctggcccagccccgtggtagccgaaaacggacttagcgaggagaaaccgcatctgctagtgttcccccccgatctcgtagctgagcagtttaccctgatggatgctgaactctttaagaaagtagtgccctatcactgcttaggttcaatatggtcccagagggacaaaaagggcaaggaacacctggccccaaccatccgggccactgtgacacaattcaactctgtcgctaattgcgtaattacgacttgtctgggaaatcgatccacaaaggccccagaccgtgcccgcgtggtggagcactggatcgaagtcgcacgggaatgtcgaatccttaaaaacttcagcagcctgtatgctatcctcagtgccttacagtctaacagcatccacagactgaaaaagacatgggaagatgtgtcccgggacagcttccgcatattccagaaattgtctgagatcttcagcgatgaaaacaactacagtctgagtagagaactgctgatcaaggaaggtaccagtaaatttgctacccttgaaatgaatcctaaaagagcccaaaagcggcccaaggaaaccgggatcatccagggaaccgtcccatacctgggcaccttcctgactgacctcgtcatgttagacaccgcgatgaaggactatctctatggccgccttattaactttgaaaagcggcgcaaggaatttgaagtaatcgcacagattaagctgttgcagtccgcctgtaacaattatagtattgcgccagatgagcagttcggtgcttggtttcgcgcggttgagaggctctcagaaaccgagtcttataacctgagctgcgaactcgaacctccatcggaatccgcatctaatacactgaggactaaaaaaaatacagcgatcgtgaaaagatggtcagacaggcaagctccctctacagagcttagtacaagcgggtccagtcattcaaagtcctgtgaccaactgagatgcggcccctatctgtccagcggcgacatcgcggatgccctgagcgtgcattccgctggttcatccagctcagatgttgaagagataaatatttcattcgtgcctgaaagtcctgacgggcaggaaaagaaattctgggaaagcgctagccaatcaagtccggagacctccggtattagttccgcatcgagtagcacatcctcgagtagtgcatcaacgactccggtggctgccacacgtacacacaaacgttccgtctcagggctgtgtaactcctcctcagccttaccactgtacaatcagcaagtgggggactgctgtatcattagggtttcgctggatgtggataatggcaatatgtacaagtcaattttggtgacatcccaagataaggctccagccgtaatccggaaggctatggataagcacaatctggaggaagaagaacctgaagactatgaactgcttcagatactttctgacgatcgtaaactcaagatcccagagaatgctaacgtgttctatgctatgaatagcactgccaattacgactttgttctaaagaagcgaacgttcaccaaaggagttaaagtgaagcacggagcctcctctacactaccacgcatgaagcaaaaagggctcaaaatcgccaaaggaatcttctag

SEQ ID NO: 33166 - DNA, 930 bp, Artificial Sequence
  derived and/or modified sequence
gtggttgcagagaatgggctctctgaggagaaaccgcacttacttgtcttccctcctgatctggtcgcggaacaattcaccctgatggacgccgagtgccgaattctcaaaaactttagtagtctttatgccatacttagcgccttgcaatctaactctatccatcgtctgaaaaaaacttgggaagatgtgagtagggatagcttcaggatctttcagaagttatccgagattttctctgatgagaacaactactctctgtcccgcgagttgttaattaaagagggcacatccaaattcgctacactggagatgaaccctaaaagggcccaaaaaaggcccaaagagactggcatcatccaggggaccgtgccttatctgggtacatttcttaccgacttagtcatgctggacacagctatgaaagactatctgtatggacggttgattaatttcgagaaaagaaggaaggaattcgaggtgatagcacagatcaagctgctccaatccgcctgtaacaattattccattgccccagatgagcagttcggagcatggttcagagccgtcgagcgcctgagcgaaaccgagagctacaatctgtcctgtgagctagagccgccctctgaaagcgcatcaaatacgctgaggacgaagaaaaatacagccatcgtgaagcgctggtccgacaggcaggcaccgtccaccgaacttagcaccagtggttcttcccacagcaagtcttgtgaccagctccggtgtggaccctacctcagtagtggggatatagcagacgccctgtctgtccattcagctggaagctcctcctcggatgtggaggagattaacattagctttgtgcctgagagtcctgacggtcaagagaagaagttctgggagagcgcctcgcagtcatcccccgagacttag

SEQ ID NO: 33167 - DNA, 1341 bp, Artificial Sequence
  derived and/or modified sequence
atgcctggcagtgacctggagcggcgggcccacctgctgctggcccagctggagcacagcgagcccattgaagctgagcctgaggccctgagccctgtgcctgccctgaagcccaccccagagctggagctggccctgaccccagcccgggcccccagccctgtgcctgccccagcccctgagcctgagcccgcccccaccccagcccctggcagcgagctggaggtggccccagccccagcccctgagctgcagcaggcccctgagcctgctgtgggcctggagagcgccccagccccagccctggagctggagcccgcccctgagcaggaccctgcccccagccagaccctggagctggagcccgccccagcccctgtgcccagcctgcagcccagctggcccagccctgtggtggctgaaaatggcctgtctgaggagaagccccacctgctggtgtttcctccagacctggtggccgagcagttcaccctgatggatgctgaatgtcgcatcctgaagaacttcagcagcctgtatgccatcctgagcgccctgcagagcaacagcatccaccggctgaagaagacctgggaggatgtgtcccgggacagcttccgcatcttccagaagctgtctgagatcttcagtgatgagaacaactacagcctgagccgggagctgctgatcaaggagggcaccagcaagtttgccaccctggagatgaaccccaagagggcccagaagaggcccaaggagaccggcatcatccagggcaccgtgccctacctgggcaccttcctgacagacctggtgatgctggacacagccatgaaggactacctgtatggccgcctcatcaactttgagaagaggaggaaggagtttgaggtgattgcccagatcaagctgctgcagagcgcctgcaacaactacagcatcgccccagatgagcagtttggagcctggttccgggctgtggagcggctgtctgaaacagagagctacaacctgagctgtgagctggagccccccagcgagagcgccagcaacaccctgcggaccaagaagaacacagccatcgtgaagcgctggagcgaccggcaggcccccagcacagagctgagcaccagcggcagcagccacagcaagagctgtgaccagctgcgctgtggcccctacctgagcagcggggacattgctgatgccctgtctgtgcacagcgctggcagcagcagcagtgatgtggaggagatcaacatcagctttgtgcctgagagcccagatggccaggagaagaagttctgggagagcgccagccagagcagccctgagacctag

SEQ ID NO: 33168 - DNA, 2580 bp, Artificial Sequence
  derived and/or modified sequence
atgatggtggactgccagagcagcacccaggagatcggggaggagctgatcaacggggtcatctacagcatcagcctgaggaaggtgcagctgcaccacggcggcaacaagggccagcgctggctgggctatgaaaatgaaagtgccctgaacctgtatgagacctgcaaggtgaggacagtgaaggccggcaccctggagaagctggtggagcacctggtgcctgccttccagggcagtgacctgtcctatgtgaccatcttcctgtgcacctaccgggccttcaccaccacccagcaggtgctggacctgctcttcaagagatatggccgctgtgatgccctgacagccagcagccgctatggctgcatcctgccctacagtgatgaagatggcggcccccaggaccagctgaagaatgccatcagcagcatcctgggcacctggctggaccagtacagcgaggacttctgccagcccccagacttcccctgcctgaagcagctggtggcctacgtgcagctgaacatgcctggcagtgacctggagcggcgggcccacctgctgctggcccagctggagcacagcgagcccattgaagctgagcctgaggccctgagccctgtgcctgccctgaagcccaccccagagctggagctggccctgaccccagcccgggcccccagccctgtgcctgccccagcccctgagcctgagcccgcccccaccccagcccctggcagcgagctggaggtggccccagccccagcccctgagctgcagcaggcccctgagcctgctgtgggcctggagagcgccccagccccagccctggagctggagcccgcccctgagcaggaccctgcccccagccagaccctggagctggagcccgccccagcccctgtgcccagcctgcagcccagctggcccagccctgtggtggctgaaaatggcctgtctgaggagaagccccacctgctggtgtttcctccagacctggtggccgagcagttcaccctgatggatgctgagctgttcaagaaggtggtgccctaccactgcctgggcagcatctggagccagagggacaagaagggcaaggagcacctggcccccaccatccgggccaccgtgacccagttcaacagcgtggccaactgtgtgatcaccacctgcctgggcaacagaagcaccaaggccccagaccgggcccgggtggtggagcactggattgaggtggccagagaatgtcgcatcctgaagaacttcagcagcctgtatgccatcctgagcgccctgcagagcaacagcatccaccggctgaagaagacctgggaggatgtgtcccgggacagcttccgcatcttccagaagctgtctgagatcttcagtgatgagaacaactacagcctgagccgggagctgctgatcaaggagggcaccagcaagtttgccaccctggagatgaaccccaagagggcccagaagaggcccaaggagaccggcatcatccagggcaccgtgccctacctgggcaccttcctgacagacctggtgatgctggacacagccatgaaggactacctgtatggccgcctcatcaactttgagaagaggaggaaggagtttgaggtgattgcccagatcaagctgctgcagagcgcctgcaacaactacagcatcgccccagatgagcagtttggagcctggttccgggctgtggagcggctgtctgaaacagagagctacaacctgagctgtgagctggagccccccagcgagagcgccagcaacaccctgcggaccaagaagaacacagccatcgtgaagcgctggagcgaccggcaggcccccagcacagagctgagcaccagcggcagcagccacagcaagagctgtgaccagctgcgctgtggcccctacctgagcagcggggacattgctgatgccctgtctgtgcacagcgctggcagcagcagcagtgatgtggaggagatcaacatcagctttgtgcctgagagcccagatggccaggagaagaagttctgggagagcgccagccagagcagccctgagaccagcggcatcagcagcgccagcagcagcaccagcagcagcagcgccagcaccacccctgtggccgccaccaggacccacaagaggtctgtgtctggcctgtgcaacagcagcagcgccctgcccctgtacaaccagcaggtgggggactgctgcatcatccgggtgtccctggatgtggacaatggaaacatgtacaagagcatcctggtgaccagccaggacaaggccccagctgtgatcaggaaggccatggacaagcacaacctggaggaggaggagccagaagattatgagctgctgcagatcctgagtgatgacaggaagctgaagatcccagaaaatgccaacgtgttctacgccatgaacagcacagccaactatgactttgtgctgaagaagaggaccttcaccaagggcgtgaaggtgaagcacggggccagcagcaccctgcccaggatgaagcagaagggcctgaagatcgccaagggcatcttctag

SEQ ID NO: 33169 - DNA, 930 bp, Artificial Sequence
  derived and/or modified sequence
gtggtggccgagaatggcctgtctgaggagaagccccacctgctggtgttccccccagacctggtggccgagcagttcaccctgatggatgctgagtgccgcatcctgaagaacttcagcagcctgtatgccatcctgagcgccctgcagagcaacagcatccaccggctgaagaagacctgggaggatgtgtcccgggacagcttccgcatcttccagaagctgtctgagatcttcagtgatgagaacaactacagcctgagccgggagctgctgatcaaggagggcaccagcaagtttgccaccctggagatgaaccccaagagggcccagaagaggcccaaggagaccggcatcatccagggcaccgtgccctacctgggcaccttcctgacagacctggtgatgctggacacagccatgaaggactacctgtatggccgcctcatcaactttgagaagaggaggaaggagtttgaagtcatcgcccagatcaagctgctgcagagcgcctgcaacaactacagcatcgccccagatgagcagtttggagcctggttccgggctgtggagcggctgtctgaaacagagagctacaacctgagctgtgagctggagcccccatctgagagcgccagcaacaccctgcggaccaagaagaacacagccatcgtgaagcgctggagcgaccggcaggcccccagcacagagctgagcaccagcggcagcagccacagcaagagctgtgaccagctgcgctgtggcccctacctgagcagcggggacattgctgatgccctgtctgtgcacagcgctggcagcagcagcagtgatgtggaggagatcaacatcagctttgtgcctgagagcccagatggccaggagaagaagttctgggagagcgccagccagagcagccctgagacctag

SEQ ID NO: 33170 - DNA, 1341 bp, Artificial Sequence
  derived and/or modified sequence
atgcccggcagcgacctggagcggcgggcccacctgctgctggcccagttagagcactccgagccgatcgaagccgaacccgaagcactgagtcctgtccctgccctgaagcctactcctgagcttgagttggcgctcaccccagctagagccccaagcccagttcccgcccctgccccagagcccgaaccagcacccactccggcacctggttctgaactagaagttgcacccgcccccgctcctgagctgcaacaagcccccgaaccagcggtcggtcttgaatcagcacctgcaccggccctggaattagaacctgctcctgagcaagaccccgccccttcccaaaccctcgagctggagcctgctcccgctcccgtgccaagtttgcaaccctcttggcccagtcctgttgttgccgaaaacggactgagcgaggagaagccgcatctgctagtgtttcctcccgacttagtggccgagcagttcacacttatggacgcagaatgtcggatcttaaaaaatttctccagcctgtacgctatcttgagcgcactccagtccaacagtattcacaggctgaagaagacctgggaagatgtctcacgcgactcttttaggatttttcagaagctgtccgagatcttttctgacgaaaacaattattctctgagccgggagctgctgatcaaggagggcacatcaaagtttgcgaccctggagatgaacccaaagcgtgcccagaagaggcccaaggaaaccggcattatccagggaaccgtaccttatctgggcacctttctgacagatctagtgatgctggacacagccatgaaggactacctgtacgggaggctaattaattttgagaagcggcggaaggaattcgaggtgattgcccaaataaagctgctgcaatctgcttgtaacaactacagcatcgctcccgatgaacagtttggagcatggtttcgggccgtcgaacgcttgtccgagactgagtcgtataatctgagttgcgaattagaacctccctctgaatccgcgagtaacacattgaggacgaagaagaatacagccatcgttaaacgctggagcgacaggcaagctccctctacagagctgagcacctcaggttccagccacagcaaatcatgcgaccaactgcggtgcggtccatacctctcatcaggggacattgcggatgccttaagcgtccactcagctggctcctcttcctccgatgtggaagagatcaacatctcctttgtcccagagtccccagacggacaggagaaaaagttctgggaaagcgcttcacagtcgtcccctgagacatag

SEQ ID NO: 33171 - DNA, 2580 bp, Artificial Sequence
  derived and/or modified sequence
atgatggtggactgccagagcagcacccaggagatcggcgaggagctcattaacggagtgatctactccatctccctgcgcaaggtgcagcttcaccacgggggtaataaggggcagcggtggctgggttacgaaaatgagtccgcgctcaatctctatgagacttgtaaagtgagaaccgtcaaggctggtaccctggaaaagctggtggaacacctcgtgccagctttccaaggctccgacctgtcttacgtcaccatcttcctgtgcacctatcgggcatttacaactactcaacaggtcctcgacctgctgtttaagcggtatgggaggtgtgacgccctcaccgcctcaagcaggtatgggtgtatcctcccatatagcgatgaggacggaggaccccaagaccagctcaaaaacgccatttcctctatcctggggacctggcttgatcaatactcagaggatttttgtcagccccctgactttccctgcctcaagcagctcgtcgcttatgttcaattaaatatgcctgggtctgacctcgaaaggcgagcgcacttactcttggcgcagctggagcactctgaacccatagaagccgagcccgaggctctgtcgcctgtgcctgcattgaaaccaacccccgagctggagttggctctcactcccgccagagcaccgtcccccgtccccgctcccgccccagaacctgagcctgccccaacgccagcacctggcagcgagctcgaagtagcacccgccccggcaccggaactccagcaggcaccggagccagccgttggtctcgagagtgcaccagcccccgccctggagttggaacctgcccctgagcaggatcccgcaccatcccagacacttgagctggaacctgcccccgctccggttcctagcttgcagccatcatggccatcccccgttgtcgccgaaaacggactcagcgaagaaaaacctcacctgctcgtgtttcccccggacttagtcgctgagcagttcacattgatggatgccgaactgttcaagaaagtggtcccttaccactgtctcgggtccatctggtctcaaagagataagaaaggaaaggagcacctcgctccaaccatacgagccactgtgactcagtttaatagcgttgccaattgtgttattacgacatgcctgggtaaccggtcgaccaaggccccagatagggcaagagtcgttgagcactggattgaggtcgcacgggagtgccggattctcaagaactttagctctctgtacgccattctgtcagccctacagtcaaatagtattcaccgactcaaaaagacatgggaagatgtgtcaagagactcctttcggatattccaaaagttgtccgagattttcagcgatgagaataattattccctgtctagagaactgctgattaaggaggggactagcaagttcgccaccctagaaatgaaccccaagagggcccagaaacgccctaaagaaaccggaatcatccagggaacagttccctacctgggcacattcttaacagatctggttatgttagacacggccatgaaagactatttatacggacgactgataaactttgagaaaaggcgaaaagaattcgaagtcattgcccagatcaagctgttgcaaagtgcttgcaataactactcgatcgccccagatgagcagttcggcgcttggtttcgggctgtggagaggttatccgagaccgaaagttataatctgagttgcgaactcgagccaccttcggagtctgctagtaacacgcttcgcactaagaagaacactgccattgtaaagcgctggtcagataggcaggcacccagcactgagctgtcgacctccggatcctcccatagcaaaagctgtgaccagttacggtgtggaccgtatctatcaagcggggatattgcggatgcactctctgtccactctgccggttcatcgtcctctgatgtggaggagatcaacatttcatttgttccagaatccccagatggacaagaaaagaagttctgggagtcagcttcccagtcctcacctgagaccagtggcatcagtagcgctagctcttcgacgtcctcatcatcagcgagcaccacgccagtggctgccacacgcactcacaagcgatccgtgtcagggctctgtaactcatcctctgctctccctctgtataaccagcaggtaggggactgctgcataatccgagtgagtctcgacgtcgacaatgggaatatgtacaaatctatcctggttacctctcaggacaaggccccagccgtcattaggaaagccatggataaacacaatctggaggaggaagagcccgaggactacgaattgttacagattttgtccgacgacaggaagctaaagattcctgaaaacgcgaacgtgttttatgccatgaacagtacagccaactacgatttcgtgctgaaaaaacgcacatttactaagggagttaaagttaagcacggggcctccagcactctgccaagaatgaagcaaaagggtctgaaaattgctaaggggattttctag

SEQ ID NO: 33172 - DNA, 930 bp, Artificial Sequence
  derived and/or modified sequence
gtggtggccgagaacggcctgagcgaggagaagccccacctgctggtgtttcccccagatctcgtcgctgagcagtttacactcatggatgccgaatgtagaatcctcaagaatttttcgagtctgtacgccatattgagcgccctgcagagtaacagcatccacaggctcaagaagacctgggaggacgtatctcgtgactcctttaggatctttcagaagctgtctgaaatattttccgacgagaataattacagcctttcgagggagcttttgatcaaggagggcacatcgaaattcgctacactcgaaatgaatccaaaaagagcacagaagagaccgaaagagactggaatcatccagggaacggtaccctacttagggacctttttgactgacctggtcatgctggacacggcaatgaaagactacctttacggtcggctgatcaacttcgaaaagagacggaaagagttcgaggtcatagcacagattaagctgctccaaagcgcctgtaataattatagcattgcccctgatgagcagttcggtgcctggtttcgggccgtggaacgcctgtccgagaccgaatcctacaaccttagctgtgaactggagcctccatccgaaagtgccagtaatacactcagaacaaaaaagaacaccgctatagtgaaaaggtggtcagacaggcaagcccccagtacggagctgtctacctcagggtcctcacactcgaaaagttgtgatcagctgaggtgcggaccctatctgtcctccggagacatcgctgatgcattgagcgtacattccgcggggagctcttcaagcgacgttgaagagattaacatcagctttgttccagagtccccagatgggcaagagaagaagttctgggaatccgcctcacagagtagccccgagacttag

SEQ ID NO: 33173 - DNA, 1341 bp, Artificial Sequence
  derived and/or modified sequence
atgcccggaagcgacctcgaacgcagggcccatctgctgttggcacagctggagcactccgaacccatagaggctgagcctgaggcacttagccccgtccctgccctaaaaccgactccagaattagagctggccctgaccccggctcgtgcaccgtcccccgtaccagcccctgcacctgagcccgagccagcccctacaccggcacccggttctgagctggaggtcgctcctgcccctgcccctgaattgcagcaggcccctgaacctgcggtgggcctggagagcgcaccagccccagcactggagctggagcccgcacccgagcaagacccagctccatctcaaactctcgagctggagcctgccccagccccagtgccttctcttcagccctcatggccaagcccagtggtggccgagaatggcctatctgaagaaaaaccacacctgctggtcttcccgcctgacctggttgctgagcagtttaccctgatggacgccgagtgcaggattttaaagaactttagcagtctgtatgcaatactgtcagccttacagtcaaacagcattcacagactcaaaaagacttgggaggatgtttctcgcgactcctttcggatttttcagaagctgtccgagatcttctcagacgaaaacaattattctctttctcgggagctgcttattaaggagggcacgagtaaattcgcaactctggagatgaaccctaaacgagcacagaagcgacccaaggagacaggcataattcagggcaccgttccctatttgggcacgtttctcaccgatctcgtgatgctggataccgcaatgaaagactatctctacggcagactaatcaattttgagaaaaggcgtaaggagttcgaagtgatcgcacagattaagctacttcaatcagcatgtaataattacagcattgctccggatgagcagtttggagcctggttcagggctgttgaaaggctgagcgaaaccgagtcctacaacctaagctgtgagttggaacctccctccgaaagcgcatccaatacccttagaacaaagaagaacacagctatcgttaagcgatggagtgatagacaggccccatcgaccgagctgagcacatccgggtcatctcactcaaaaagctgcgatcagcttcggtgtggaccctacctgtcctccggcgacattgcagatgcgctgagtgtacactccgctggatctagctccagcgacgtcgaagaaataaacattagcttcgttcctgagtctccagatggccaggaaaaaaagttctgggaatccgcatcccaaagctcccccgagacatag

SEQ ID NO: 33174 - DNA, 2580 bp, Artificial Sequence
  derived and/or modified sequence
atgatggtcgactgccaaagttccacacaggagataggggaggagttaattaatggggtcatatacagtattagccttcggaaggtccaactccaccacggcggaaacaagggccaaaggtggctgggctacgagaatgagagcgcattgaatttgtacgagacatgtaaagtgcgcaccgttaaggctgggacgctggaaaagctggtcgaacatcttgtccctgcttttcaagggtccgacctgtcttacgtgacaatattcctttgcacttatagggccttcaccacgacacagcaagtgctggatctgctatttaaacggtatggacgctgcgatgcactcactgcttcttcacgctacgggtgcatcctgccttactcagacgaagacgggggacctcaggatcagcttaagaatgcaatatcatcaatcttgggcacctggctggatcagtactccgaggacttctgtcagccacccgactttccctgcctgaagcagcttgtggcatacgtgcagttaaatatgcccggaagtgacctcgagcgaagagctcatttgctgttagcacagctcgagcattcagagcctatcgaggctgaacccgaagcactctctcccgtacctgccctgaagcctactcccgagctcgaacttgcccttactcccgctagggccccttcacccgtcccggcacccgctcccgagcctgagcccgcacccaccccggcacccggtagcgaacttgaagtggcacccgcacccgcacctgagctgcagcaggctccggaacccgctgtcggcttggagagtgcacccgctccagccctggagctcgagccagctcccgagcaggatcctgctccctctcagactttagagttagagcccgctccagctcccgtgccctcccttcaacctagttggcctagtcccgtggtggctgaaaacggactcagcgaagaaaagccccatctcctcgtttttcctccagacctggtggcagaacagtttacgctgatggacgcagagctatttaagaaggtggtcccttatcactgcctgggtagcatttggagccagcgcgacaaaaagggcaaggaacacctggccccaaccatacgggcaacggtcacccagtttaatagtgtggccaactgcgtgatcaccacttgcctggggaatagatccactaaagcacctgaccgagcaagggtggttgagcactggatcgaggtggcccgagaatgcagaattttgaagaacttttccagcctctacgccatcctaagcgcgttacaaagcaatagtatccatcgtttgaaaaagacctgggaagatgtttcccgggactcctttcggattttccagaagctgagtgagattttcagtgacgagaacaattatagtctatcccgcgagctgttaatcaaagaggggacaagtaaattcgccaccctggagatgaacccaaaacgcgcacagaaacggccaaaagagaccggcatcatccaaggcaccgtgccatacctgggtacattcctgactgacctggtgatgctggatacagccatgaaagattacctgtatggaagattgatcaacttcgaaaaaagaaggaaggagttcgaagtaatagctcaaattaagcttctgcagagtgcctgcaataactactctatcgcaccagacgaacaatttggagcatggtttagagcggttgagcggttatctgaaactgagtcctataatctctcatgtgagttagaacctccctcagagtctgcatcaaacacgttgcgcactaagaagaacaccgccatcgtgaaacgatggtccgatagacaggcaccctcaaccgaactgagcacatcaggttcctcccactctaagtcttgtgaccagctgagatgcgggccttacctctccagcggagatattgcggacgctctgtctgtgcacagcgccggatcgtcatcatctgacgtggaagagatcaacatcagtttcgttccagaatcacctgatggccaggaaaaaaagttctgggaatcagcatcacagtcttcgcctgaaacaagtggtatatctagcgcatcttcctccacctctagctcctccgctagtacaactccagtcgcagccacaaggacacacaagcggtccgttagtggcctgtgcaacagctcttctgctctcccactatataaccaacaagtaggtgactgttgtatcattcgagtcagcctggacgtcgacaacggaaacatgtacaaaagcattttggtcacaagtcaagataaggcaccagccgtgatcaggaaggctatggacaaacataaccttgaagaagaagaacccgaagattatgagcttctgcagattctgagcgatgaccgtaagcttaagatcccagaaaacgctaacgtgttctacgctatgaatagcactgcgaactacgattttgtcctaaaaaagcggacattcactaagggcgtgaaggtgaagcacggtgcatcttccacactgcccaggatgaagcaaaagggcttaaaaatagccaagggaatattctag

SEQ ID NO: 33175 - DNA, 930 bp, Artificial Sequence
  derived and/or modified sequence
gtcgttgcagaaaacggtctgtcagaggagaaacctcacctactggtgttcccacctgacctagtggccgaacaatttacattgatggatgctgagtgcaggatcctgaagaatttcagcagcctgtatgcgattctgagcgctctgcagtccaatagtatccataggcttaagaagacctgggaggatgtgtcccgggactcattcagaatctttcaaaagttaagcgagattttctccgatgagaataactacagcttgagccgggaacttcttatcaaggaaggaactagcaaattcgcaaccctggagatgaacccgaagcgtgcgcagaaacgcccaaaggagacgggtattattcaggggaccgtgccatatctcggcaccttccttactgatctcgtgatgctcgatacggcaatgaaagactatttgtatggccgactcattaacttcgaaaagagacgcaaagagttcgaggtcatcgctcagattaaactgttacagtctgcgtgtaacaactactcaatcgccccagacgagcagtttggagcctggtttcgggcagtcgagaggctgagcgaaactgaaagttataacctgagctgtgagttggagccccctagcgagagcgcatccaacactctgcgaaccaagaagaacacggcgatcgtgaagagatggtctgaccggcaggccccatcgactgaactgtcaacctccgggtcttcccacagcaagtcttgcgatcagctgagatgtgggccttacctctcgtccggcgatatcgcagatgctctatcggtccacagcgcgggatccagttcaagcgacgtcgaagagatcaatatctctttcgtgcccgagtcccccgatgggcaggagaagaaattttgggaatccgcctctcagtcctccccagagacatag

SEQ ID NO: 33176 - DNA, 3452 bp, Artificial Sequence
  derived and/or modified sequence
cgagcggccggagcgcggcgcggcgcagacaatgggagcggcgctggcggctgccggggcggccccgagggccgcagagtcctgggcccggcggggaccggaggccgcgccatgagccccgcagccgggcgcacccctgcgccgcgcgcgggcccaggcgagcggcctctgcgagccccgggtcccgccctggggccggcgatgtgccaccgaggctgaggatgatggtagattgccagagctccacgcaggagatcggtgaggagctgatcaacggagtcatctactccatctccctgcgcaaggtgcagctgcaccacggaggcaacaaggggcagcgctggctcgggtatgagaatgagtcggccctgaacctttatgagacttgcaaggtgcggaccgtgaaggctggcacgctggagaagctggtggagcacctggtgccagccttccagggcagcgacctctcctacgtcaccatcttcctgtgtacctatagagccttcaccaccacccaacaggtcctggacctgctgttcaaaaggtacggtagatgtgacgccctcacggcctcctctagatacggctgcatcctcccctattccgacgaggatggtggaccccaggaccaacttaaaaatgccatctcctccatcctgggcacctggctggaccagtactcggaggatttctgtcaacctccggactttccctgcctcaagcagctggtggcctacgtgcagctcaacatgccaggctcagacctggagcgccgtgcccaccttctcctggcccagctggagcactcggaacccattgaggcagagcctgaggctctgtcaccagtgccagctctaaaaccaactccagagctcgagctagctctaacaccagctcgagcacccagcccagtgccggctccagccccggagccagagccagctccaacaccagctccaggttcagagctagaagtagctccagcaccagctccggagctccagcaggctccagagccagctgtgggactagaatcggctccagcgccagctctggaactagagccagctccagaacaggatccagctccctcacaaactctagagctggagccagctccagcaccagttccatcattacagccttcctggccttcacctgtggttgcagagaacgggctgagtgaggagaagcctcacctcttggtgttccctccagatctggtggcagagcagtttacactgatggatgcggagtgccggatcctcaagaacttctcgtcactgtatgccatcctctctgccctgcagagcaactccatccaccgtctgaagaagacgtgggaagacgtttccagggacagtttccggatctttcagaagctgtcagagatcttctcagatgagaacaactactcattgagccgggagctgctcatcaaggagggcacctccaagtttgccaccctggagatgaaccccaagagagcccagaaacggccgaaggagacgggcatcatccagggcaccgttccctacctgggcacgttcctcaccgacctggtgatgctggacactgccatgaaggactatctgtatggcagactcatcaactttgagaagaggaggaaggagttcgaggtgatcgcccagatcaagctgctgcagtcggcctgcaacaactacagcatcgcgccagatgagcaatttggggcctggttccgggccgtggagcggctcagcgagactgagagctacaacctgtcgtgcgagctggagcccccatccgagtcagccagcaacaccctcaggaccaagaagaacacagccattgtcaagcgctggagcgaccgccaggcccccagcactgagctcagtaccagtggcagctcccactccaagtcctgtgaccagctcaggtgtggcccctacctcagcagcggggacatcgctgacgcgctcagcgtgcactcggccggctcctctagctccgacgtggaggagatcaacatcagcttcgtcccggagtctcctgatggccaggaaaagaagttctgggaatcagcctcacagtcatccccggagacctccggcatcagctcagcctccagcagcacctcgtcctcctcagcctccaccacgcccgtggctgccacacgcacccacaagcgctctgtctcagggctctgcaactccagctccgcgctgccgctctacaaccagcaggtgggcgactgctgtatcatccgcgtcagcctggacgtggacaatggcaacatgtacaagagcatcctggtgaccagccaagataaggctccggctgtaatccgcaaggccatggacaaacacaacctggaggaggaggagccggaggactatgagctgctgcagattctctcagatgaccggaagctgaagatccctgaaaacgccaacgtcttctatgccatgaactctaccgccaactatgactttgtcctcaagaagcggaccttcaccaagggagtgaaggtcaagcacggagccagctccaccctccctcgcatgaagcagaaaggactcaagattgccaagggcatcttctgagggcatcctcccagggtctggctggctggtagccaagcacttatggaccagagtggcccaggccagctgggcgccttcctcccacctgccagcccagggtaccccagactccagtttcatcctgaacctctcccgctgctgggattgacgcctgccattggtcaggctgacctggcctcccgtggaccactcgctgccttaggtgccttctgctctctggaaccagaggactagctgacttttgccaaggagcagtgccaacgggcatggcatggtgccctgcctgcccccgggcgccacctctgtacacttccctgacaccttcccaggtgtgggtcactgccacctgtgcccatgggcaccccagagcacccactgtgaccactgcagttctctcatgcccacaggcactggcctgtgaccttcgcaggggtcccggcccctcccaccactctagcctttctcaggctgcaccaaagattccatcatcagggccaactgagagtgagggagtctcacccaccgcttaccccagccctcccctgggagcagagagagaaaccctcttcatggaccagactctgcacccggtgagtgaggacagtcccagctgagtcccatcgatgttgaatctcatgccactgcaagtgccattcaccactgcgtcctgggctttacgagaccatgcaagacgggggttagtgaggaaggaggatttggggtgggggtggggtgattgaatatttgtataaaaagcaaaaagaaaaaaaaaatgtttgtttactgattggggaggggcaatatttatttgttgtaaatagcaaatgctagacttgaatattatattaaaatcctgtttctactata

SEQ ID NO: 33177 - DNA, 3801 bp, Artificial Sequence
  derived and/or modified sequence
ccgagcgcgtccccgagctcacgcggcggggcgcgcccctcgcacctgcgggcgggctggggcggggccgcggctgtccccgcccacccgggcccgagcccggggagccggggcggaaccgagcggcgaggcccgagcggccggagcgcggcgcggcgcagacaatgggagcggcgctggcggctgccggggcggccccgagggccgcagagtcctgggcccggcggggaccggaggccgcgccatgagccccgcagccgggcgcacccctgcgccgcgcgcgggcccaggcgagcggcctctgcgagccccgggtcccgccctggggccggcgatgtgccaccgaggctgaggatgatggtagattgccagagctccacgcaggagatcggtgaggagctgatcaacggagtcatctactccatctccctgcgcaaggtgcagctgcaccacggaggcaacaaggggcagcgctggctcgggtatgagaatgagtcggccctgaacctttatgagacttgcaaggtgcggaccgtgaaggctggcacgctggagaagctggtggagcacctggtgccagccttccagggcagcgacctctcctacgtcaccatcttcctgtgtacctatagagccttcaccaccacccaacaggtcctggacctgctgttcaaaaggtacggtagatgtgacgccctcacggcctcctctagatacggctgcatcctcccctattccgacgaggatggtggaccccaggaccaacttaaaaatgccatctcctccatcctgggcacctggctggaccagtactcggaggatttctgtcaacctccggactttccctgcctcaagcagctggtggcctacgtgcagctcaacatgccaggctcagacctggagcgccgtgcccaccttctcctggcccagctggagcactcggaacccattgaggcagagcctgaggctctgtcaccagtgccagctctaaaaccaactccagagctcgagctagctctaacaccagctcgagcacccagcccagtgccggctccagccccggagccagagccagctccaacaccagctccaggttcagagctagaagtagctccagcaccagctccggagctccagcaggctccagagccagctgtgggactagaatcggctccagcgccagctctggaactagagccagctccagaacaggatccagctccctcacaaactctagagctggagccagctccagcaccagttccatcattacagccttcctggccttcacctgtggttgcagagaacgggctgagtgaggagaagcctcacctcttggtgttccctccagatctggtggcagagcagtttacactgatggatgcggaactgttcaagaaggtggtgccctaccactgcctgggctccatctggtcccagcgggacaagaagggcaaggagcacctggcgcccaccatccgcgccactgtcacccagttcaacagtgtggccaactgtgtcatcaccacctgcctcgggaaccgaagcacgaaagccccagacagggccagggtggtggagcactggatcgaggtggccagggagtgccggatcctcaagaacttctcgtcactgtatgccatcctctctgccctgcagagcaactccatccaccgtctgaagaagacgtgggaagacgtttccagggacagtttccggatctttcagaagctgtcagagatcttctcagatgagaacaactactcattgagccgggagctgctcatcaaggagggcacctccaagtttgccaccctggagatgaaccccaagagagcccagaaacggccgaaggagacgggcatcatccagggcaccgttccctacctgggcacgttcctcaccgacctggtgatgctggacactgccatgaaggactatctgtatggcagactcatcaactttgagaagaggaggaaggagttcgaggtgatcgcccagatcaagctgctgcagtcggcctgcaacaactacagcatcgcgccagatgagcaatttggggcctggttccgggccgtggagcggctcagcgagactgagagctacaacctgtcgtgcgagctggagcccccatccgagtcagccagcaacaccctcaggaccaagaagaacacagccattgtcaagcgctggagcgaccgccaggcccccagcactgagctcagtaccagtggcagctcccactccaagtcctgtgaccagctcaggtgtggcccctacctcagcagcggggacatcgctgacgcgctcagcgtgcactcggccggctcctctagctccgacgtggaggagatcaacatcagcttcgtcccggagtctcctgatggccaggaaaagaagttctgggaatcagcctcacagtcatccccggagacctccggcatcagctcagcctccagcagcacctcgtcctcctcagcctccaccacgcccgtggctgccacacgcacccacaagcgctctgtctcagggctctgcaactccagctccgcgctgccgctctacaaccagcaggtgggcgactgctgtatcatccgcgtcagcctggacgtggacaatggcaacatgtacaagagcatcctggtgaccagccaagataaggctccggctgtaatccgcaaggccatggacaaacacaacctggaggaggaggagccggaggactatgagctgctgcagattctctcagatgaccggaagctgaagatccctgaaaacgccaacgtcttctatgccatgaactctaccgccaactatgactttgtcctcaagaagcggaccttcaccaagggagtgaaggtcaagcacggagccagctccaccctccctcgcatgaagcagaaaggactcaagattgccaagggcatcttctgagggcatcctcccagggtctggctggctggtagccaagcacttatggaccagagtggcccaggccagctgggcgccttcctcccacctgccagcccagggtaccccagactccagtttcatcctgaacctctcccgctgctgggattgacgcctgccattggtcaggctgacctggcctcccgtggaccactcgctgccttaggtgccttctgctctctggaaccagaggactagctgacttttgccaaggagcagtgccaacgggcatggcatggtgccctgcctgcccccgggcgccacctctgtacacttccctgacaccttcccaggtgtgggtcactgccacctgtgcccatgggcaccccagagcacccactgtgaccactgcagttctctcatgcccacaggcactggcctgtgaccttcgcaggggtcccggcccctcccaccactctagcctttctcaggctgcaccaaagattccatcatcagggccaactgagagtgagggagtctcacccaccgcttaccccagccctcccctgggagcagagagagaaaccctcttcatggaccagactctgcacccggtgagtgaggacagtcccagctgagtcccatcgatgttgaatctcatgccactgcaagtgccattcaccactgcgtcctgggctttacgagaccatgcaagacgggggttagtgaggaaggaggatttggggtgggggtggggtgattgaatatttgtataaaaagcaaaaagaaaaaaaaaatgtttgtttactgattggggaggggcaatatttatttgttgtaaatagcaaatgctagacttgaatattatattaaaatcctgtttctactata

SEQ ID NO: 33178 - DNA, 926 bp, Artificial Sequence
  derived and/or modified sequence
gtggttgcagagaacgggctgagtgaggagaagcctcacctcttggtgttccctccagatctggtggcagagcagtttacactgatggatgcggagtgccggatcctcaagaacttctcgtcactgtatgccatcctctctgccctgcagagcaactccatccaccgtctgaagaagacgtgggaagacgtttccagggacagtttccggatctttcagaagctgtcagagatcttctcagatgagaacaactactcattgagccgggagctgctcatcaaggagggcacctccaagtttgccaccctggagatgaaccccaagagagcccagaaacggccgaaggagacgggcatcatccagggcaccgttccctacctgggcacgttcctcaccgacctggtgatgctggacactgccatgaaggactatctgtatggcagactcatcaactttgagaagaggaggaaggagttcgaggtgatcgcccagatcaagctgctgcagtcggcctgcaacaactacagcatcgcgccagatgagcaatttggggcctggttccgggccgtggagcggctcagcgagactgagagctacaacctgtcgtgcgagctggagcccccatccgagtcagccagcaacaccctcaggaccaagaagaacacagccattgtcaagcgctggagcgaccgccaggcccccagcactgagctcagtaccagtggcagctcccactccaagtcctgtgaccagctcaggtgtggcccctacctcagcagcggggacatcgctgacgcgctcagcgtgcactcggccggctcctctagctccgacgtggaggagatcaacatcagcttcgtcccggagtctcctgatggccaggaaaagaagttctgggaatcagcctcacagtcatccccggagac

SEQ ID NO: 33179 - DNA, 1341 bp, Artificial Sequence
  derived and/or modified sequence
atgcccggcagcgacctggagagaagagcccacctgctgctggcccagctggagcacagcgagcccatcgaggccgagcccgaggccctgagccccgtgcccgccctgaagcccacccccgagctggagctggccctgacccccgccagagcccccagccccgtgcccgcccccgcccccgagcccgagcccgcccccacccccgcccccggcagcgagctggaggtggcccccgcccccgcccccgagctgcagcaggcccccgagcccgccgtgggcctggagagcgcccccgcccccgccctggagctggagcccgcccccgagcaggaccccgcccccagccagaccctggagctggagcccgcccccgcccccgtgcccagcctgcagcccagctggcccagccccgtggtggccgagaacggcctgagcgaggagaagccccacctgctggtgttcccccccgacctggtggccgagcagttcaccctgatggacgccgagtgcagaatcctgaagaacttcagcagcctgtacgccatcctgagcgccctgcagagcaacagcatccacagactgaagaagacctgggaggacgtgagcagagacagcttcagaatcttccagaagctgagcgagatcttcagcgacgagaacaactacagcctgagcagagagctgctgatcaaggagggcaccagcaagttcgccaccctggagatgaaccccaagagagcccagaagagacccaaggagaccggcatcatccagggcaccgtgccctacctgggcaccttcctgaccgacctggtgatgctggacaccgccatgaaggactacctgtacggcagactgatcaacttcgagaagagaagaaaggagttcgaggtgatcgcccagatcaagctgctgcagagcgcctgcaacaactacagcatcgcccccgacgagcagttcggcgcctggttcagagccgtggagagactgagcgagaccgagagctacaacctgagctgcgagctggagccccccagcgagagcgccagcaacaccctgagaaccaagaagaacaccgccatcgtgaagagatggagcgacagacaggcccccagcaccgagctgagcaccagcggcagcagccacagcaagagctgcgaccagctgagatgcggcccctacctgagcagcggcgacatcgccgacgccctgagcgtgcacagcgccggcagcagcagcagcgacgtggaggagatcaacatcagcttcgtgcccgagagccccgacggccaggagaagaagttctgggagagcgccagccagagcagccccgagacctag

SEQ ID NO: 33180 - DNA, 2580 bp, Artificial Sequence
  derived and/or modified sequence
atgatggtggactgccagagcagcacccaggagatcggcgaggagctgatcaacggcgtgatctacagcatcagcctgagaaaggtgcagctgcaccacggcggcaacaagggccagagatggctgggctacgagaacgagagcgccctgaacctgtacgagacctgcaaggtgagaaccgtgaaggccggcaccctggagaagctggtggagcacctggtgcccgccttccagggcagcgacctgagctacgtgaccatcttcctgtgcacctacagagccttcaccaccacccagcaggtgctggacctgctgttcaagagatacggcagatgcgacgccctgaccgccagcagcagatacggctgcatcctgccctacagcgacgaggacggcggcccccaggaccagctgaagaacgccatcagcagcatcctgggcacctggctggaccagtacagcgaggacttctgccagccccccgacttcccctgcctgaagcagctggtggcctacgtgcagctgaacatgcccggcagcgacctggagagaagagcccacctgctgctggcccagctggagcacagcgagcccatcgaggccgagcccgaggccctgagccccgtgcccgccctgaagcccacccccgagctggagctggccctgacccccgccagagcccccagccccgtgcccgcccccgcccccgagcccgagcccgcccccacccccgcccccggcagcgagctggaggtggcccccgcccccgcccccgagctgcagcaggcccccgagcccgccgtgggcctggagagcgcccccgcccccgccctggagctggagcccgcccccgagcaggaccccgcccccagccagaccctggagctggagcccgcccccgcccccgtgcccagcctgcagcccagctggcccagccccgtggtggccgagaacggcctgagcgaggagaagccccacctgctggtgttcccccccgacctggtggccgagcagttcaccctgatggacgccgagctgttcaagaaggtggtgccctaccactgcctgggcagcatctggagccagagagacaagaagggcaaggagcacctggcccccaccatcagagccaccgtgacccagttcaacagcgtggccaactgcgtgatcaccacctgcctgggcaacagaagcaccaaggcccccgacagagccagagtggtggagcactggatcgaggtggccagagagtgcagaatcctgaagaacttcagcagcctgtacgccatcctgagcgccctgcagagcaacagcatccacagactgaagaagacctgggaggacgtgagcagagacagcttcagaatcttccagaagctgagcgagatcttcagcgacgagaacaactacagcctgagcagagagctgctgatcaaggagggcaccagcaagttcgccaccctggagatgaaccccaagagagcccagaagagacccaaggagaccggcatcatccagggcaccgtgccctacctgggcaccttcctgaccgacctggtgatgctggacaccgccatgaaggactacctgtacggcagactgatcaacttcgagaagagaagaaaggagttcgaggtgatcgcccagatcaagctgctgcagagcgcctgcaacaactacagcatcgcccccgacgagcagttcggcgcctggttcagagccgtggagagactgagcgagaccgagagctacaacctgagctgcgagctggagccccccagcgagagcgccagcaacaccctgagaaccaagaagaacaccgccatcgtgaagagatggagcgacagacaggcccccagcaccgagctgagcaccagcggcagcagccacagcaagagctgcgaccagctgagatgcggcccctacctgagcagcggcgacatcgccgacgccctgagcgtgcacagcgccggcagcagcagcagcgacgtggaggagatcaacatcagcttcgtgcccgagagccccgacggccaggagaagaagttctgggagagcgccagccagagcagccccgagaccagcggcatcagcagcgccagcagcagcaccagcagcagcagcgccagcaccacccccgtggccgccaccagaacccacaagagaagcgtgagcggcctgtgcaacagcagcagcgccctgcccctgtacaaccagcaggtgggcgactgctgcatcatcagagtgagcctggacgtggacaacggcaacatgtacaagagcatcctggtgaccagccaggacaaggcccccgccgtgatcagaaaggccatggacaagcacaacctggaggaggaggagcccgaggactacgagctgctgcagatcctgagcgacgacagaaagctgaagatccccgagaacgccaacgtgttctacgccatgaacagcaccgccaactacgacttcgtgctgaagaagagaaccttcaccaagggcgtgaaggtgaagcacggcgccagcagcaccctgcccagaatgaagcagaagggcctgaagatcgccaagggcatcttctag

SEQ ID NO: 33181 - DNA, 930 bp, Artificial Sequence
  derived and/or modified sequence
gtggtggccgagaacggcctgagcgaggagaagccccacctgctggtgttcccccccgacctggtggccgagcagttcaccctgatggacgccgagtgcagaatcctgaagaacttcagcagcctgtacgccatcctgagcgccctgcagagcaacagcatccacagactgaagaagacctgggaggacgtgagcagagacagcttcagaatcttccagaagctgagcgagatcttcagcgacgagaacaactacagcctgagcagagagctgctgatcaaggagggcaccagcaagttcgccaccctggagatgaaccccaagagagcccagaagagacccaaggagaccggcatcatccagggcaccgtgccctacctgggcaccttcctgaccgacctggtgatgctggacaccgccatgaaggactacctgtacggcagactgatcaacttcgagaagagaagaaaggagttcgaggtgatcgcccagatcaagctgctgcagagcgcctgcaacaactacagcatcgcccccgacgagcagttcggcgcctggttcagagccgtggagagactgagcgagaccgagagctacaacctgagctgcgagctggagccccccagcgagagcgccagcaacaccctgagaaccaagaagaacaccgccatcgtgaagagatggagcgacagacaggcccccagcaccgagctgagcaccagcggcagcagccacagcaagagctgcgaccagctgagatgcggcccctacctgagcagcggcgacatcgccgacgccctgagcgtgcacagcgccggcagcagcagcagcgacgtggaggagatcaacatcagcttcgtgcccgagagccccgacggccaggagaagaagttctgggagagcgccagccagagcagccccgagacctag

SEQ ID NO: 33182 - protein, 525 aa, Artificial Sequence
  derived and/or modified sequence
MEESVNQMQPLNEKQIANSQDGYVWQVTDMNRLHRFLCFGSEGGTYYIKEQKLGLENAEALIRLIEDGRGCEVIQEIKSFSQEGRTTKQEPMLFALAICSQCSDISTKQAAFKAVSEVCRIPTHLFTFIQFKKDLKESMKCGMWGRALRKAIADWYNEKGGMALALAVTKYKQRNGWSHKDLLRLSHLKPSSEGLAIVTKYITKGWKEVHELYKEKALSVETEKLLKYLEAVEKVKRTRDELEVIHLIEEHRLVREHLLTNHLKSKEVWKALLQEMPLTALLRNLGKMTANSVLEPGNSEVSLVCEKLCNEKLLKKARIHPFHILIALETYKTGHGLRGKLKWRPDEEILKALDAAFYKTFKTVEPTGKRFLLAVDVSASMNQRVLGSILNASTVAAAMCMVVTRTEKDSYVVAFSDEMVPCPVTTDMTLQQVLMAMSQIPAGGTDCSLPMIWAQKTNTPADVFIVFTDNETFAGGVHPAIALREYRKKMDIPAKLIVCGMTSNGFTIADPDDRALQNTLLNKSF

SEQ ID NO: 33183 - DNA, 1578 bp, Artificial Sequence
  derived and/or modified sequence
atggaggagagcgtgaaccagatgcagcccctgaacgagaagcagatcgccaacagccaggacggctacgtgtggcaggtgaccgacatgaacagactgcacagattcctgtgcttcggcagcgagggcggcacctactacatcaaggagcagaagctgggcctggagaacgccgaggccctgatcagactgatcgaggacggcagaggctgcgaggtgatccaggagatcaagagcttcagccaggagggcagaaccaccaagcaggagcccatgctgttcgccctggccatctgcagccagtgcagcgacatcagcaccaagcaggccgccttcaaggccgtgagcgaggtgtgcagaatccccacccacctgttcaccttcatccagttcaagaaggacctgaaggagagcatgaagtgcggcatgtggggcagagccctgagaaaggccatcgccgactggtacaacgagaagggcggcatggccctggccctggccgtgaccaagtacaagcagagaaacggctggagccacaaggacctgctgagactgagccacctgaagcccagcagcgagggcctggccatcgtgaccaagtacatcaccaagggctggaaggaggtgcacgagctgtacaaggagaaggccctgagcgtggagaccgagaagctgctgaagtacctggaggccgtggagaaggtgaagagaaccagagacgagctggaggtgatccacctgatcgaggagcacagactggtgagagagcacctgctgaccaaccacctgaagagcaaggaggtgtggaaggccctgctgcaggagatgcccctgaccgccctgctgagaaacctgggcaagatgaccgccaacagcgtgctggagcccggcaacagcgaggtgagcctggtgtgcgagaagctgtgcaacgagaagctgctgaagaaggccagaatccaccccttccacatcctgatcgccctggagacctacaagaccggccacggcctgagaggcaagctgaagtggagacccgacgaggagatcctgaaggccctggacgccgccttctacaagaccttcaagaccgtggagcccaccggcaagagattcctgctggccgtggacgtgagcgccagcatgaaccagagagtgctgggcagcatcctgaacgccagcaccgtggccgccgccatgtgcatggtggtgaccagaaccgagaaggacagctacgtggtggccttcagcgacgagatggtgccctgccccgtgaccaccgacatgaccctgcagcaggtgctgatggccatgagccagatccccgccggcggcaccgactgcagcctgcccatgatctgggcccagaagaccaacacccccgccgacgtgttcatcgtgttcaccgacaacgagaccttcgccggcggcgtgcaccccgccatcgccctgagagagtacagaaagaagatggacatccccgccaagctgatcgtgtgcggcatgaccagcaacggcttcaccatcgccgaccccgacgacagagccctgcagaacaccctgctgaacaagagcttctag

SEQ ID NO: 33184 - DNA, 1578 bp, Artificial Sequence
  derived and/or modified sequence
atggaggagtctgtgaatcagatgcaacctctcaatgagaaacagatcgccaattctcaggatggctacgtatggcaggttaccgatatgaatagacttcacagatttctttgttttggtagcgaggggggcacttactacatcaaagagcagaaattaggactcgagaatgcagaggccctaatacggcttatcgaagacggccgtggctgtgaagtaatccaggagatcaagtcatttagtcaggagggacgcaccacaaaacaggagcctatgctgtttgccctcgctatttgctcacagtgctccgacataagtaccaaacaggctgcattcaaagccgttagtgaagtgtgtagaatcccaactcatctctttacgttcatccaattcaaaaaagatctgaaggagagtatgaaatgcggtatgtggggcagggcactccggaaggcaattgcggattggtacaatgaaaagggcggtatggctcttgctctagccgtgacaaaatacaagcaacgtaatggatggtcccataaggatctgcttcgcctgtcacatctcaaaccctccagcgaaggccttgcaatcgtaaccaagtatatcaccaagggatggaaagaagtgcacgaactctataaagaaaaggcgctgtcagtggagacagaaaagctcttaaagtacctcgaagctgttgagaaggtcaaacggacacgcgacgagctcgaagtcatccacctgatcgaggaacaccgtctggtaagggaacatctgcttactaatcacttgaaatcaaaagaagtctggaaggctctgctccaagaaatgccgctgacagcgctcctccgcaacctgggaaaaatgactgccaattccgtcctggagccaggtaactccgaggtgagcctggtgtgcgagaaactgtgtaacgagaagctgttgaagaaggcacgaattcatccattccatatactcatcgccctggaaacctataagacgggacacggactccgcggcaaactgaaatggaggcctgacgaggagattctcaaagctttggatgctgccttttacaaaaccttcaaaacggtggagccaacagggaagcgtttcctgctcgccgtcgacgtttcagctagtatgaaccagcgtgtgctcggttcaattctgaatgcaagcaccgttgccgccgccatgtgtatggttgtgacgagaacagaaaaagacagctacgtggttgcattcagtgacgagatggtgccctgccccgtgaccacggacatgactttgcagcaggtactgatggccatgagtcagataccagctggcggcaccgattgtagtttgccgatgatatgggcacagaagacaaatacacctgcagacgtttttatcgtgtttacggacaacgagacatttgcagggggagtacaccccgctattgcactgcgcgagtacagaaagaaaatggatatcccagcgaagctgattgtttgcggtatgacatcaaatggttttacaattgcggaccctgatgatcgcgccctgcaaaacactttattaaataaatccttctag

SEQ ID NO: 33185 - DNA, 1578 bp, Artificial Sequence
  derived and/or modified sequence
atggaggagagcgtgaaccagatgcagcccctgaatgagaagcagatcgccaacagccaggacggctacgtgtggcaggtgacagacatgaaccggctgcaccgcttcctgtgctttggaagtgaaggaggcacctactacatcaaggagcagaagctgggcctggagaatgctgaggccctgatccggctgattgaagatggccggggctgtgaggtgatccaggagatcaagagcttcagccaggagggccgcaccaccaagcaggagcccatgctgtttgccctggccatctgcagccagtgcagcgacatcagcaccaagcaggccgccttcaaggctgtgtctgaggtgtgccgcatccccacccacctgttcaccttcatccagttcaagaaggacctgaaggagagcatgaagtgtggcatgtggggccgggccctgaggaaggccatcgctgactggtacaatgaaaaaggaggcatggccctggccctggccgtgaccaagtacaagcagagaaatggctggagccacaaggacctgctgcggctgagccacctgaagcccagcagcgagggcctggccatcgtgaccaagtacatcaccaagggctggaaggaggtgcatgagctgtacaaggagaaggccctgtctgtggagacagagaagctgctgaagtacctggaggccgtggagaaggtgaagaggaccagagatgagctggaggtgatccacctgattgaggagcaccggctggtgcgggagcacctgctgaccaaccacctgaagagcaaggaggtgtggaaggccctgctgcaggagatgcccctgacagccctgctgaggaacctgggcaagatgacagccaacagcgtgctggagcccggcaacagcgaggtgtccctggtgtgtgagaagctgtgcaatgagaagctgctgaagaaggcccgcatccaccccttccacatcctgattgccctggagacctacaagacaggccacggcctgcggggcaagctgaagtggaggccagatgaggagatcctgaaggccctggatgctgccttctacaagaccttcaagacagtggagcccaccgggaagcgcttcctgctggccgtggatgtgtctgcctccatgaaccagagggtgctgggcagcatcctgaatgccagcacagtggccgccgccatgtgcatggtggtgaccaggacagagaaggacagctatgtggtggccttcagtgatgagatggtgccctgccctgtgaccacagacatgaccctgcagcaggtgctgatggccatgagccagatcccagctgggggcacagactgcagcctgcccatgatctgggcccagaagaccaacaccccagcagatgtgttcatcgtgttcacagacaatgagacctttgctgggggcgtgcacccagccatcgccctgcgggagtacaggaagaagatggacatcccagccaagctgattgtgtgtggcatgaccagcaatggcttcaccatcgctgaccctgatgaccgggccctgcagaacaccctgctgaacaagagcttctag

SEQ ID NO: 33186 - DNA, 1578 bp, Artificial Sequence
  derived and/or modified sequence
atggaggagagcgtgaaccagatgcagcccctgaacgagaagcagatcgccaactcccaagatggatacgtttggcaggttactgacatgaaccgactccaccggtttctttgtttcgggtccgagggtgggacctactatatcaaggagcagaagctgggcctggagaacgccgaggcgctgattcgattgattgaggatgggcgcggatgcgaggttatacaggaaattaagagctttagccaggagggacgcactaccaagcaggaaccgatgctatttgcgctggctatctgcagccagtgtagcgatatttctacaaagcaagccgcttttaaggccgtgagtgaggtttgtagaatacctacccacctgttcaccttcatccagtttaaaaaggatctcaaggaaagtatgaagtgcggaatgtggggccgcgccctaaggaaggcgattgccgattggtacaacgagaaaggaggcatggctctcgccctcgcagttactaaatacaaacagcggaacggctggtcccacaaagatcttttgcgactgtcacacttaaaaccctcctcagagggacttgccatcgtgaccaaatacatcaccaaaggctggaaggaggtccacgagctttataaggaaaaagcgctatccgttgaaaccgaaaaactcctgaaatatcttgaagccgtggagaaagtcaagcgcacccgcgacgagttggaagtgattcacctgattgaagagcatagactcgttagggaacacctgctgactaatcacctgaaaagtaaagaggtgtggaaggccctgttacaggagatgcctttgaccgccttgctgcggaatctgggcaagatgacagctaactccgttttggaaccaggaaactcagaggtttcactggtgtgcgagaagctttgtaacgagaagctcctgaaaaaagccagaatccacccattccatatccttatcgctctcgaaacctacaaaacaggacatggcctgcgcggtaaacttaaatggcggcccgatgaggaaattctgaaggccctggatgcggccttttataagaccttcaagactgtcgagcccacaggaaagcggtttctcttggctgtggatgtatcagcctcgatgaatcagagggtgctaggctctatcctcaatgctagcactgtcgctgccgccatgtgcatggtggttacccggacagaaaaagactcttatgtggtcgcgttctcagacgaaatggtgccttgccccgtgacgacggatatgaccctgcagcaggtacttatggctatgtctcagattcccgccggtgggactgactgtagcctcccgatgatctgggcccagaaaacaaatacccctgcagacgttttcattgtattcacggacaacgagacgtttgctggaggcgtgcaccctgctatcgcattgcgagagtatcgtaaaaagatggatattcccgccaagcttatcgtgtgcgggatgacatcaaatggattcactatcgctgaccctgacgatagagccctgcagaacaccttgcttaacaagagtttctag

SEQ ID NO: 33187 - DNA, 1578 bp, Artificial Sequence
  derived and/or modified sequence
atggaagaatccgtgaaccagatgcagccactgaacgagaagcagattgccaactcccaggatggttatgtgtggcaggttacagatatgaataggctgcaccggtttctatgtttcgggagtgaaggaggaacatactacattaaggagcagaagctggggcttgagaacgcagaggcattaattagactcattgaggatggccgaggatgcgaggtcatccaggagattaaatctttttctcaggaggggcgaacgactaaacaggagcccatgctattcgccttagcaatttgtagccaatgcagcgacatctcgacaaaacaggccgcttttaaggctgtctctgaggtgtgtaggatccccacacatctgttcacatttattcagttcaaaaaggacctgaaggagagcatgaagtgcggtatgtggggtcgagcactgcggaaggccatagccgactggtacaatgaaaaaggaggaatggccctagccttggccgtgacaaagtataaacagcggaacggatggtcacacaaggatttgttacgactgtcccacctcaaaccttctagcgaaggtctggcaattgtaactaagtacattactaagggttggaaagaagtgcatgagctgtacaaagagaaggccttgtccgtggagacagagaagctgctgaagtatcttgaggcagtcgagaaggtgaagcgaacccgtgatgagctcgaagtcattcatttaattgaagaacacagattggtacgcgagcatctgcttacaaatcatctgaagtccaaggaagtgtggaaagctctcctgcaggagatgccactgacggctcttctccgaaatctcggaaagatgaccgcaaattccgttctggaaccaggcaactcagaggtgtctctggtgtgcgaaaagctgtgcaatgagaaactacttaaaaaggcccgtatccaccctttccatattctgattgctctcgaaacctacaagaccggacatgggctgagagggaagcttaagtggcgacctgatgaggagatcctgaaggccttggatgctgcattttacaagacattcaagaccgttgagcccaccggcaaacgctttctgttagccgtggatgtgtccgcgtctatgaatcagcgcgtcctgggctctattctgaatgcttctaccgtggcggcagcgatgtgcatggtggtgactaggactgaaaaagatagctatgtggtggctttcagtgacgagatggtgccttgccccgtgacaacagacatgaccctgcagcaagtgttgatggccatgtctcagatcccagcagggggaacggactgtagtctccctatgatctgggcccagaaaaccaacactcctgccgatgtattcatcgtgttcaccgataatgaaacatttgccggtggtgtccaccctgctatcgcactccgtgagtacagaaagaaaatggacattcctgccaaactgattgtgtgtggcatgacttctaatggctttaccattgctgacccagatgatagggcactccagaatacccttctgaacaagtctttctag

SEQ ID NO: 33188 - DNA, 1857 bp, Artificial Sequence
  derived and/or modified sequence
cacaggccgacgtcgagagggcctgctttactcctcctctttctcctccttctcccgcggcttctgcgcggagaggcgtcgcccgggatctgggttttggaagaaggatctttgtgggaagacagggtgaatttatcacagaggaataacgagggagaggagaaaggtttcctaaagacaaaaaaaaatggaggaatctgtaaaccaaatgcagccactgaatgagaagcagatagccaattctcaggatggatatgtatggcaagtcactgacatgaatcgactacaccggttcttatgtttcggttctgaaggtgggacttattatatcaaagaacagaagttgggccttgaaaatgctgaagctttaattagattgattgaagatggcagaggatgtgaagtgatacaagaaataaagtcatttagtcaagaaggcagaaccacaaagcaagagcctatgctctttgcacttgccatttgttcccagtgctccgacataagcacaaaacaagcagcatttaaagctgtttctgaagtttgtcgcattcctacccatctctttacttttatccagtttaagaaagatctgaaggaaagcatgaaatgtggcatgtggggtcgtgccctccggaaggctatagcggactggtacaatgagaaaggtggcatggcccttgctctggcagttacaaaatataaacagagaaatggctggtctcacaaagatctattaagattgtcacatcttaaaccttccagtgaaggacttgcaattgtgaccaaatatattacaaagggctggaaagaagttcatgaattgtataaagaaaaagcactctctgtggagactgaaaaattattaaagtatctggaggctgtagagaaagtgaagcgcacaagagatgagctagaagtcattcatctaatagaagaacatagattagttagagaacatcttttaacaaatcacttaaagtctaaagaggtatggaaggctttgttacaagaaatgccgcttactgcattactaaggaatctaggaaagatgactgctaattcagtacttgaaccaggaaattcagaagtatctttagtatgtgaaaaactgtgtaatgaaaaactattaaaaaaggctcgtatacatccatttcatattttgatcgcattagaaacttacaagacaggtcatggtctcagagggaaactgaagtggcgccctgatgaagaaattttgaaagcattggatgctgctttttataaaacatttaagacagttgaaccaactggaaaacgtttcttactagctgttgatgtcagtgcttctatgaaccaaagagttttgggtagtatactcaacgctagtacagttgctgcagcaatgtgcatggttgtcacacgaacagaaaaagattcttatgtagttgctttttccgatgaaatggtaccatgtccagtgactacagatatgaccttacaacaggttttaatggctatgagtcagatcccagcaggtggaactgattgctctcttccaatgatctgggctcagaagacaaacacacctgctgatgtcttcattgtattcactgataatgagacctttgctggaggtgtccatcctgctattgctctgagggagtatcgaaagaaaatggatattccagctaaattgattgtttgtggaatgacatcaaatggtttcaccattgcagacccagatgatagagccttgcaaaataccctactaaataaatcattttagacatggagtgcaggtggacactgtgtgaactgtttttggtcagttattgtagaaattgatagatgtaccaaataaactctatgcacattaaa

SEQ ID NO: 33189 - protein, 534 aa, Artificial Sequence
  derived and/or modified sequence
MEESVNQMQPLNEKQIANSQDGYVWQVTDMNRLHRFLCFGSEGGTYYIKEQKLGLENAEALIRLIEDGRGCEVIQEIKSFSQEGRTTKQEPMLFALAICSQCSDISTKQAAFKAVSEVCRIPTHLFTFIQFKKDLKESMKCGMWGRALRKAIADWYNEKGGMALALAVTKYKQRNGWSHKDLLRLSHLKPSSEGLAIVTKYITKGWKEVHELYKEKALSVETEKLLKYLEAVEKVKRTRDELEVIHLIEEHRLVREHLLTNHLKSKEVWKALLQEMPLTALLRNLGKMTANSVLEPGNSEVSLVCEKLCNEKLLKKARIHPFHILIALETYKTGHGLRGKLKWRPDEEILKALDAAFYKTFKTVEPTGKRFLLAVDVSASMNQRVLGSILNASTVAAAMCMVVTRTEKDSYVVAFSDEMVPCPVTTDMTLQQVLMAMSQIPAGGTDCSLPMIWAQKTNTPADVFIVFTDNETFAGGVHPAIALREYRKKMDIPAKLIVCGMTSNGFTIADPDDRGMLDMCGFDTGALDPCKIPY

SEQ ID NO: 33190 - protein, 41 aa, Artificial Sequence
  derived and/or modified sequence
MEESVNQMQPLNEKQIANSQDGYVWQVTDMNRLHRFLCFGS

SEQ ID NO: 33191 - DNA, 1605 bp, Artificial Sequence
  derived and/or modified sequence
atggaggagagcgtgaaccagatgcagcccctgaacgagaagcagatcgccaacagccaggacggctacgtgtggcaggtgaccgacatgaacagactgcacagattcctgtgcttcggcagcgagggcggcacctactacatcaaggagcagaagctgggcctggagaacgccgaggccctgatcagactgatcgaggacggcagaggctgcgaggtgatccaggagatcaagagcttcagccaggagggcagaaccaccaagcaggagcccatgctgttcgccctggccatctgcagccagtgcagcgacatcagcaccaagcaggccgccttcaaggccgtgagcgaggtgtgcagaatccccacccacctgttcaccttcatccagttcaagaaggacctgaaggagagcatgaagtgcggcatgtggggcagagccctgagaaaggccatcgccgactggtacaacgagaagggcggcatggccctggccctggccgtgaccaagtacaagcagagaaacggctggagccacaaggacctgctgagactgagccacctgaagcccagcagcgagggcctggccatcgtgaccaagtacatcaccaagggctggaaggaggtgcacgagctgtacaaggagaaggccctgagcgtggagaccgagaagctgctgaagtacctggaggccgtggagaaggtgaagagaaccagagacgagctggaggtgatccacctgatcgaggagcacagactggtgagagagcacctgctgaccaaccacctgaagagcaaggaggtgtggaaggccctgctgcaggagatgcccctgaccgccctgctgagaaacctgggcaagatgaccgccaacagcgtgctggagcccggcaacagcgaggtgagcctggtgtgcgagaagctgtgcaacgagaagctgctgaagaaggccagaatccaccccttccacatcctgatcgccctggagacctacaagaccggccacggcctgagaggcaagctgaagtggagacccgacgaggagatcctgaaggccctggacgccgccttctacaagaccttcaagaccgtggagcccaccggcaagagattcctgctggccgtggacgtgagcgccagcatgaaccagagagtgctgggcagcatcctgaacgccagcaccgtggccgccgccatgtgcatggtggtgaccagaaccgagaaggacagctacgtggtggccttcagcgacgagatggtgccctgccccgtgaccaccgacatgaccctgcagcaggtgctgatggccatgagccagatccccgccggcggcaccgactgcagcctgcccatgatctgggcccagaagaccaacacccccgccgacgtgttcatcgtgttcaccgacaacgagaccttcgccggcggcgtgcaccccgccatcgccctgagagagtacagaaagaagatggacatccccgccaagctgatcgtgtgcggcatgaccagcaacggcttcaccatcgccgaccccgacgacagaggcatgctggacatgtgcggcttcgacaccggcgccctggacccctgcaagatcccctactag

SEQ ID NO: 33192 - DNA, 1605 bp, Artificial Sequence
  derived and/or modified sequence
atggaggagtcagtgaatcagatgcaacctctgaacgaaaagcagatcgctaattcacaggacggatacgtctggcaggtcacagatatgaatagattgcatcggtttctgtgcttcgggtccgaaggtggcacatactacattaaggagcagaagctgggcctcgagaatgcagaggcattgattcggctcatagaggatggccgcggctgcgaggtgatacaggaaatcaaaagcttttcacaggagggccgcactactaaacaggagcccatgctgtttgctctcgccatctgcagtcagtgcagcgacatctctaccaagcaggccgccttcaaagctgtgagtgaagtctgcaggataccgactcatctgtttacattcattcaattcaagaaggacctaaaagaaagcatgaagtgtgggatgtggggtagagccctgcgcaaggcaatcgctgattggtataatgagaagggaggcatggcactcgctttagctgtgaccaagtacaagcagagaaatggatggagccataaggacctacttcgccttagccacctgaagccgtcatctgagggcctggccattgtgacgaagtatattaccaaaggatggaaagaagtgcatgaactctacaaggagaaggctctgtccgtggagacggagaaactgctcaaatacctggaggcagttgagaaggtgaaacggacgcgagacgagctcgaggtgatccaccttatagaggagcaccgtcttgtgcgggaacacttgttaaccaaccatctgaagtccaaagaagtgtggaaggctctgctgcaggagatgccgttgaccgctttgcttagaaacctgggcaagatgaccgcgaatagtgtgttggagccaggtaattctgaagtctccctcgtttgtgagaaactttgcaacgagaaactcttaaaaaaggccaggattcatccatttcacattctgatagcgctggagacctacaaaaccggacatggacttcgcgggaagttaaagtggcggcccgacgaggagatactgaaggccctggacgcagccttctataagaccttcaaaactgtggagccaaccggaaagcggtttttgctcgccgttgatgtttctgcttccatgaaccagcgtgttctgggctccatactcaacgccagtacggtggcggccgcaatgtgcatggtggtaacacgcaccgaaaaagattcctacgtggtggctttcagcgatgaaatggtgccatgtcccgtcacaacggatatgaccctgcaacaggtccttatggcgatgagccaaataccagctggggggaccgactgcagcctccccatgatttgggcacaaaaaacaaatactcctgcggatgtgtttatcgtttttaccgataatgaaacatttgcaggtggcgtacacccggccatagcactccgtgagtacagaaaaaaaatggatataccagcaaagctgatcgtctgcggaatgacatctaatggattcaccattgccgatcctgatgaccgggggatgctagacatgtgcggcttcgataccggggccctggatccctgtaaaatcccctactag

SEQ ID NO: 33193 - DNA, 1605 bp, Artificial Sequence
  derived and/or modified sequence
atggaggagagcgtgaaccagatgcagcccctgaatgagaagcagatcgccaacagccaggacggctacgtgtggcaggtgacagacatgaaccggctgcaccgcttcctgtgctttggaagtgaaggaggcacctactacatcaaggagcagaagctgggcctggagaatgctgaggccctgatccggctgattgaagatggccggggctgtgaggtgatccaggagatcaagagcttcagccaggagggccgcaccaccaagcaggagcccatgctgtttgccctggccatctgcagccagtgcagcgacatcagcaccaagcaggccgccttcaaggctgtgtctgaggtgtgccgcatccccacccacctgttcaccttcatccagttcaagaaggacctgaaggagagcatgaagtgtggcatgtggggccgggccctgaggaaggccatcgctgactggtacaatgaaaaaggaggcatggccctggccctggccgtgaccaagtacaagcagagaaatggctggagccacaaggacctgctgcggctgagccacctgaagcccagcagcgagggcctggccatcgtgaccaagtacatcaccaagggctggaaggaggtgcatgagctgtacaaggagaaggccctgtctgtggagacagagaagctgctgaagtacctggaggccgtggagaaggtgaagaggaccagagatgagctggaggtgatccacctgattgaggagcaccggctggtgcgggagcacctgctgaccaaccacctgaagagcaaggaggtgtggaaggccctgctgcaggagatgcccctgacagccctgctgaggaacctgggcaagatgacagccaacagcgtgctggagcccggcaacagcgaggtgtccctggtgtgtgagaagctgtgcaatgagaagctgctgaagaaggcccgcatccaccccttccacatcctgattgccctggagacctacaagacaggccacggcctgcggggcaagctgaagtggaggccagatgaggagatcctgaaggccctggatgctgccttctacaagaccttcaagacagtggagcccaccgggaagcgcttcctgctggccgtggatgtgtctgcctccatgaaccagagggtgctgggcagcatcctgaatgccagcacagtggccgccgccatgtgcatggtggtgaccaggacagagaaggacagctatgtggtggccttcagtgatgagatggtgccctgccctgtgaccacagacatgaccctgcagcaggtgctgatggccatgagccagatcccagctgggggcacagactgcagcctgcccatgatctgggcccagaagaccaacaccccagcagatgtgttcatcgtgttcacagacaatgagacctttgctgggggcgtgcacccagccatcgccctgcgggagtacaggaagaagatggacatcccagccaagctgattgtgtgtggcatgaccagcaatggcttcaccatcgctgaccctgatgaccggggcatgctggacatgtgtggctttgacaccggggccctggacccctgcaagatcccctactag

SEQ ID NO: 33194 - DNA, 1605 bp, Artificial Sequence
  derived and/or modified sequence
atggaggagagcgtgaaccagatgcagcccctgaacgagaagcagatcgcgaacagtcaggacggttatgtctggcaggtgacagacatgaaccggctgcatcgctttctgtgctttgggtcagaaggagggacatactacatcaaggagcagaagcttggcctggagaacgcagaggccctgatccgtttgatcgaggatggcaggggatgtgaggtgattcaggaaattaagtctttttctcaggaagggagaaccactaagcaggaacctatgcttttcgctctggcaatttgcagccaatgcagcgacatctctactaaacaggccgctttcaaggcagttagcgaggtttgtagaattcccacacacctattcacctttatacaattcaaaaaggacctgaaggaaagcatgaaatgcggaatgtggggaagagctttgagaaaggccatagcggactggtataatgagaaaggcggaatggcccttgcacttgccgtcactaagtacaagcaacggaacgggtggtcacacaaggatctgctgcggctgtcacacctcaaaccatcctccgagggcctggctatcgtcactaaatatattacgaagggctggaaggaggtgcatgagctgtacaaagaaaaagctttgtcagtcgagactgaaaaacttctgaagtacctcgaagcagtcgagaaggtcaagcgcactcgagacgagctggaggtgatccaccttatagaggagcacagactcgtgcgagaacatctcttgacaaaccatcttaagagcaaggaggtttggaaggccctgctacaggagatgcccctgacagccctgctaagaaacctgggaaagatgacggccaactccgtcctcgagccgggaaacagtgaggtgagtctcgtctgcgagaagctgtgcaacgaaaagctacttaaaaaagcacgcatacaccccttccatatcctcatagctctcgaaacgtataagacaggccatggtctcagaggcaaacttaaatggcgaccagatgaggagatactcaaggcccttgacgctgcattttacaaaaccttcaaaacggtggagccaaccggaaagaggtttctcctcgccgtggatgtctcagcttctatgaatcagagagtgttggggagcattctgaatgcctctacggttgccgccgctatgtgtatggttgtcacgcgaacagagaaggactcttatgtcgtcgccttcagcgacgaaatggtgccgtgtcctgtgacaacagacatgaccctgcaacaagtcttgatggccatgagccagatacccgccggagggacggactgctctctccctatgatttgggctcagaaaactaatacacctgctgacgtgttcatagtatttacggacaatgaaacattcgctggcggtgtacacccggccatcgccctccgggagtaccgaaaaaagatggatatccctgcgaaactgatcgtctgtggaatgacgtctaacggttttacaatcgctgaccctgatgatagaggtatgctcgacatgtgcggttttgacactggagcccttgacccctgcaaaatcccttactag

SEQ ID NO: 33195 - DNA, 1605 bp, Artificial Sequence
  derived and/or modified sequence
atggaggagtccgtgaatcagatgcagcctctcaatgagaaacaaatagctaatagtcaggatggttacgtctggcaggtcaccgatatgaaccgtcttcacagattcctgtgtttcggatccgaagggggaacctactatattaaggagcaaaagttgggcttggagaacgccgaggctttgattagactcattgaggacggaagaggctgtgaagtgattcaggaaatcaagagcttctctcaggagggcaggaccaccaagcaggaacccatgctcttcgccctggccatatgcagtcaatgctcagacatatcaaccaaacaggcagcttttaaagcagtgagcgaggtgtgccggattccaactcacctatttacgttcatccagtttaagaaggacctgaaggaatccatgaaatgcggcatgtggggccgtgctctccggaaggcaattgccgattggtacaatgagaagggcggtatggccttggcgttggcagtaactaaatacaagcagagaaatggttggagtcacaaagatctgctgagattgagtcatctgaagccaagttcagaaggtctcgccatagtgacaaagtacattaccaaaggatggaaggaggtgcacgaactctacaaggagaaggctctctcggtggagacggaaaagctgctaaagtacctggaggccgtggaaaaagtgaagagaacgagggacgagttggaggtcatccaccttatcgaagagcaccgtctcgtgcgggaacacctactgacaaaccacctaaagtctaaagaagtgtggaaggcccttctgcaggagatgccactaactgcgctcctgagaaacctgggtaaaatgactgctaactcagttcttgaacccggaaactctgaggtttccctggtgtgcgaaaagctgtgtaacgagaaactgcttaaaaaagctagaattcacccattccacatcttgattgctctggaaacctacaagaccggacacggactccgtggcaagctgaaatggcgtcctgacgaagagattctcaaggctcttgatgctgctttctacaaaacttttaagactgttgaaccaaccgggaagaggttcctcctggcggtggatgtgagcgcctcaatgaatcagcgggtgctgggctcgattttaaatgccagcacagtggcagcggcaatgtgtatggtggtcactcgcacagagaaagattcctatgtcgtggcttttagcgacgagatggtgccctgcccagtgacaacagatatgaccctccaacaagtgctcatggctatgtcgcagattcctgcaggcggtactgattgcagcctgcctatgatctgggcgcagaaaacgaacacaccagcagacgtcttcattgtctttacggacaatgagactttcgcaggcggagtccatccagccattgccctgagagagtataggaaaaagatggacattccagcgaagttgatcgtgtgtggaatgacaagcaatggctttaccattgccgatcctgatgatagaggtatgctcgacatgtgtggcttcgacacaggcgctctggatccttgtaaaataccctattag

SEQ ID NO: 33196 - DNA, 1898 bp, Artificial Sequence
  derived and/or modified sequence
cacaggccgacgtcgagagggcctgctttactcctcctctttctcctccttctcccgcggcttctgcgcggagaggcgtcgcccgggatctgggttttggaagaaggatctttgtgggaagacagggtgaatttatcacagaggaataacgagggagaggagaaaggtttcctaaagacaaaaaaaaatggaggaatctgtaaaccaaatgcagccactgaatgagaagcagatagccaattctcaggatggatatgtatggcaagtcactgacatgaatcgactacaccggttcttatgtttcggttctgaaggtgggacttattatatcaaagaacagaagttgggccttgaaaatgctgaagctttaattagattgattgaagatggcagaggatgtgaagtgatacaagaaataaagtcatttagtcaagaaggcagaaccacaaagcaagagcctatgctctttgcacttgccatttgttcccagtgctccgacataagcacaaaacaagcagcatttaaagctgtttctgaagtttgtcgcattcctacccatctctttacttttatccagtttaagaaagatctgaaggaaagcatgaaatgtggcatgtggggtcgtgccctccggaaggctatagcggactggtacaatgagaaaggtggcatggcccttgctctggcagttacaaaatataaacagagaaatggctggtctcacaaagatctattaagattgtcacatcttaaaccttccagtgaaggacttgcaattgtgaccaaatatattacaaagggctggaaagaagttcatgaattgtataaagaaaaagcactctctgtggagactgaaaaattattaaagtatctggaggctgtagagaaagtgaagcgcacaagagatgagctagaagtcattcatctaatagaagaacatagattagttagagaacatcttttaacaaatcacttaaagtctaaagaggtatggaaggctttgttacaagaaatgccgcttactgcattactaaggaatctaggaaagatgactgctaattcagtacttgaaccaggaaattcagaagtatctttagtatgtgaaaaactgtgtaatgaaaaactattaaaaaaggctcgtatacatccatttcatattttgatcgcattagaaacttacaagacaggtcatggtctcagagggaaactgaagtggcgccctgatgaagaaattttgaaagcattggatgctgctttttataaaacatttaagacagttgaaccaactggaaaacgtttcttactagctgttgatgtcagtgcttctatgaaccaaagagttttgggtagtatactcaacgctagtacagttgctgcagcaatgtgcatggttgtcacacgaacagaaaaagattcttatgtagttgctttttccgatgaaatggtaccatgtccagtgactacagatatgaccttacaacaggttttaatggctatgagtcagatcccagcaggtggaactgattgctctcttccaatgatctgggctcagaagacaaacacacctgctgatgtcttcattgtattcactgataatgagacctttgctggaggtgtccatcctgctattgctctgagggagtatcgaaagaaaatggatattccagctaaattgattgtttgtggaatgacatcaaatggtttcaccattgcagacccagatgatagaggcatgttggatatgtgcggctttgatactggagctctggatccttgcaaaataccctactaaataaatcattttagacatggagtgcaggtggacactgtgtgaactgtttttggtcagttattgtagaaattgatagatgtaccaaataaactctatgcacattaaa

SEQ ID NO: 33197 - protein, 321 aa, Artificial Sequence
  derived and/or modified sequence
MAAAEAGGDDARCVRLSAERAQALLADVDTLLFDCDGVLWRGETAVPGAPEALRALRARGKRLGFITNNSSKTRAAYAEKLRRLGFGGPAGPGASLEVFGTAYCTALYLRQRLAGAPAPKAYVLGSPALAAELEAVGVASVGVGPEPLQGEGPGDWLHAPLEPDVRAVVVGFDPHFSYMKLTKALRYLQQPGCLLVGTNMDNRLPLENGRFIAGTGCLVRAVEMAAQRQADIIGKPSRFIFDCVSQEYGINPERTVMVGDRLDTDILLGATCGLKTILTLTGVSTLGDVKNNQESDCVSKKKMVPDFYVDSIADLLPALQG

SEQ ID NO: 33198 - DNA, 966 bp, Artificial Sequence
  derived and/or modified sequence
atggccgctgcagaggctgggggagacgatgcacgatgtgttcggctcagtgcagagagggcacaggccctgctcgctgatgtggacactcttctttttgactgtgacggagtcttgtggcggggtgaaacagctgtgcctggcgccccagaggccctgcgcgctttgcgcgcaaggggcaaaaggttaggatttatcaccaataactcatcgaagaccagggcggcctacgcagagaagcttaggcgtcttgggtttggagggcctgcaggccctggtgccagccttgaggtgtttggcactgcatactgcactgcactgtatctgcggcagcggctggccggagctccggcccctaaggcttatgtgctgggctccccagcacttgccgccgagttggaggcagtgggtgttgcatctgtgggggtcgggcctgagcctctccagggagaagggcccggcgactggctacatgcaccgttggaacctgatgtaagagctgtggtcgtcgggttcgacccacacttcagctatatgaagctgactaaggcactgcggtatctgcaacagcctggctgcctcctggtgggcaccaatatggataaccggctgcctctggagaacgggcggtttattgccggtactggctgccttgtgagggccgtggagatggcagctcagcgtcaggctgatatcatcggtaagccatcacggtttattttcgattgcgtgtctcaggagtacgggatcaatccagaacggactgtgatggtaggggatcgtcttgacacagacatattgttgggcgcaacttgtggcctgaagacaatccttaccctaacaggagtctctactttgggagacgtgaagaataaccaggagtcagactgcgtgtcaaagaaaaagatggttcccgacttctacgtcgatagtattgccgatttactccccgcacttcaaggttag

SEQ ID NO: 33199 - DNA, 966 bp, Artificial Sequence
  derived and/or modified sequence
atggctgctgctgaggccggaggagatgatgcccgctgtgtgcggctgtctgctgagcgggcccaggccctgctggctgatgtggacaccctgctgtttgactgtgatggagtgctgtggagaggagaaacagctgtgcctggggcccctgaggccctgcgggccctgcgggcccggggcaagaggctgggcttcatcaccaacaacagcagcaagaccagggctgcctatgcagagaagctgcggcggctgggctttggaggccctgctggccctggggccagcctggaggtgtttggaacagcctactgcacagccctgtacctgcggcagaggctggccggggccccagcccccaaggcctacgtgctgggcagccctgccctggccgctgagctggaggccgtgggcgtggcctctgtgggcgtgggccctgagcccctgcagggcgagggccctggggactggctgcacgcccccctggagccagatgtgcgggctgtggtggtgggctttgacccccacttctcctacatgaagctgaccaaggccctgcgctacctgcagcagcccggctgcctgctggtgggcaccaacatggacaaccggctgcccctggagaatggccgcttcatcgccggcaccggctgcctggtgcgggctgtggagatggccgcccagaggcaggccgacatcatcggcaagcccagccgcttcatctttgactgtgtgtcccaggagtatggcatcaaccctgagaggacagtgatggtgggggaccggctggacacagacatcctgctgggcgccacctgtggcctgaagaccatcctgaccctgactggagtgtccaccctgggagatgtgaagaacaaccaggagagtgactgtgtgtccaagaagaagatggtgcctgacttctacgtggacagcattgctgacctgctgcctgccctgcagggctag

SEQ ID NO: 33200 - DNA, 966 bp, Artificial Sequence
  derived and/or modified sequence
atggccgccgccgaggccggcggcgacgacgcccggtgcgtgcggctgagtgccgagagagcacaggccctcttagctgacgtggacacattgctcttcgactgtgatggagttctgtggcgtggcgaaactgccgtgccaggcgcccccgaagcactgagagctttgcgcgcacgggggaagagactcggattcataacaaacaactctagcaagacacgcgccgcttatgcagaaaagcttcgcaggctcggatttggtggacccgccgggcccggggcatctttagaggtgtttgggaccgcctattgcactgcactgtaccttcgacaaagactggcaggggcgccagctccgaaagcttatgtgctgggttcccctgcccttgccgccgagttggaggcagtgggtgttgcttctgtgggcgtcggtccagagccgttgcagggagaagggcccggcgattggctgcacgcccctctggagccagatgtgagggccgtcgtcgtcggctttgatcctcatttcagctacatgaaactgaccaaggccctgaggtaccttcagcaaccaggatgtttgctggtgggaacgaacatggacaacagattacctcttgaaaatggccgattcatagccggtactggctgcttggtgagggcggtcgagatggccgcacaacgccaggctgacatcatcggtaagccctctcggtttattttcgactgtgtgtcccaggagtacggaatcaatcctgaacgtaccgtgatggtcggcgatcgcctggatactgacatcctgctaggagccacttgtggcctaaagaccatacttacactgaccggagtgtcgactctgggcgatgttaaaaacaatcaggaatccgactgcgtgagtaagaaaaagatggtgcccgatttttatgtagatagtattgccgacctcctgcctgcactgcagggctag

SEQ ID NO: 33201 - DNA, 3136 bp, Artificial Sequence
  derived and/or modified sequence
gctgcgaggagcggccggcgggcggcggcggccggcgggcggcgatggcggcggcggaggccggtggcgacgacgcccgctgcgtgcggctgagcgccgagcgggcacaggcgctgctggccgacgtggacacgctgctgttcgactgcgacggcgtgctgtggcgcggggagaccgccgtgcctggcgcgcccgaggccctgcgggcgctgcgagcccgcggcaagcgcctgggcttcatcaccaacaacagcagcaagacccgcgctgcctacgccgagaagctgcggcgcctgggcttcggcggccccgcggggcccggcgccagcctggaggtcttcggcacggcctactgcaccgcgctctacctgcgccagcgcctggccggcgcccccgcgcccaaggcctacgtgctgggcagcccagccctggccgcggagctggaggccgtgggcgtcgccagcgtgggcgtggggcccgagccactgcagggcgagggtcccggcgactggctgcacgcgccgctggagcccgacgtgcgcgcggtggtggtgggctttgacccgcacttcagctacatgaagctcaccaaggccctgcgctacctgcagcagcccggctgcctgctcgtgggcaccaacatggacaaccggcttccgcttgagaacggccgcttcatcgcgggtaccgggtgtctggtccgagccgtggagatggccgcccagcgccaggccgacatcatcgggaagcccagccgcttcattttcgactgcgtgtcccaggaatacggcatcaaccccgagcgcaccgtcatggtgggagaccgcctggacacagacatcctcctaggcgccacctgtggcctgaagaccatcctgaccctcaccggagtctccactctaggggatgtgaagaataatcaggaaagtgactgcgtgtctaagaagaaaatggtccctgacttctatgttgacagcatagccgaccttttgcctgcccttcaaggttaaagattgagtgtctttaatctgcagaataaaaaaaaagaaattgaaaaccagttacccaaattaataggtggggcttaagcatctgctcggctaagtggcttcaaagagtgtaattggagttaagcaaaggcattcattgttaaccttgtaagtacacgtttgggggacgattttgtttacagatgcttgtaatcgaagatgcacttttaggcttggaaggcgttgtgggctgggttctgggccttgggtggggttggcaggggcaggctctgcacctgtccgggattcaggtaaccagggcctgccgatgggactgaggcgggtctaggggtgtgtgtcctgtattttattgaaaaactcattcagggatccagcccctcagggggcagagggactgattattctgactgttgggagaggcttgcatggaccagagccccatcagtatgactgaaagtccagcggagccttctgtgtccctgtgcctcccagcagggtgggagtggaggaggcggctgctcccaggtggcatctccctgcccttgggtgcaaagtgctgccctcaccactctcccacctcccttacttccttgaaaaccactctgatgtcacaactgagtgtctgttccgtttcagatacccagggctgctgcccagttctgtaaacgcagcccagctaaagctctgctgtctcaagtgtgcatttatacccaggtgatttggacggagcagctaccatggcgtggacgccttcactgaactccgggctgcagtgcagggagctcagagcagtgctgctaccagtttttaactttgaacaactgtgtcaggcaatggatttgaattttaagtgtattaatagctgtgctctgtgtcgtaggcaaaattccactgaaggagcctctgtgccctgcagccggcagcgcggctgaagcatgtgttggccaaggaatgcctgtcatccaggtgccctgcagccagcagcgcggctcaagcatgtgttggccaaggaatgcctgtcagtcatccagggctctgggaggggacgagagttatgtccccaagaacaggaagtcctttacaaagcatccagtctcttcctgtcctccccttccctaggctggggtaggggttagagactggtggcccaggaggtcacctgccttgccctggattccctcttcagtggccagcaggacttggcagggccaccagctcgccaaggttctgggcggggctccagcctctcctgcctgctccttggctctgctgacctttcacaggcctgacagcagactcagcagggccatcccgggatgctgcaccttctggctggctccctaccagcgcctttccctgtacctggcagcttctctcttggccccacagtcacagcactccacttggtcacaaagacttcagagcaataagaggcgtcctgagccttcagcacctcccaggcctgggatatcgggttcagagggtgctgcagagcagcatgagggtggctccacccatgaggctggtgacactgacgctggcttggctaagttggctcaagccgggtctggcctgacagggtgcagtcacaccaggagcgcatggcagatgcagcctcagtgatgcctctcttgccgggtaggggctgggagtccccgtgcatcctgtctctggcccatgaggggctgcagcactgtgggcgccagagcacagattaaactctcaaacccacactggctcaggtgtccttgctctcaccttgcattggcccgggtgatgccgtctcaccacgggtgggaggactcaaagtagatgggtaactggggttccaactccagagctggaatgccaactgcccactcccagcctggttcagaggaagatgttttgaagaatgagggaaagccaggcacaaagggaagccagggaagcaaagggccctggagtgaagctggtgggctgccgtgtcagagcgcccagggcagggagcagagctcagaagtaatgctggcccgggcgcagtggctcacacccgtaatcccaacgctttggaaggctgaggcaggtggattacttgagatcaggagttcaagaccagcctggccaaaatggtgaaaacccatctc

SEQ ID NO: 33202 - DNA, 966 bp, Artificial Sequence
  derived and/or modified sequence
atggccgctgccgaggccggtggcgacgacgcgagatgtgtgcgcctctctgccgagagggcacaagctctgctggctgacgtggacacactacttttcgattgcgatggagtgttgtggcgaggcgagaccgccgtccccggtgctcctgaagctctccgtgcacttagagcccgagggaagaggctcggatttattactaataattcatccaagacaagagctgcctacgccgagaaactgcggagacttggttttggaggtccggctggccctggggctagcctggaggtatttggaactgcatactgtacagccttgtatctgcgccaaagattggctggcgcaccagctcccaaagcctatgtgctgggctctccagccctggctgccgaactggaggccgtgggcgtggccagcgtcggcgttgggcctgagccgctgcagggcgaggggcctggcgattggctgcatgcacctctcgagcccgacgttcgcgcagtggtggtgggatttgatccccacttctcctatatgaaacttaccaaggcgttacgctatctgcagcagccaggttgtctcctcgtcggtacgaacatggataataggttaccattagaaaacggacgctttatagccggaacaggttgtctagttagagctgtggagatggctgcccagaggcaggcggatattattgggaagccaagcagatttatctttgactgcgtgagccaagagtatgggatcaaccccgagaggacagtgatggtgggggaccggctggatacagacattctgctcggcgctacgtgcggcctgaaaaccatccttaccctgaccggggtcagcacattaggcgatgtaaaaaataatcaggaatccgattgcgtgagcaaaaagaaaatggtccctgacttctatgtggatagtatcgctgatctgctcccagccctgcagggctag

SEQ ID NO: 33203 - DNA, 966 bp, Artificial Sequence
  derived and/or modified sequence
atggccgccgccgaggccggcggcgacgacgccagatgcgtgagactgagcgccgagagagcccaggccctgctggccgacgtggacaccctgctgttcgactgcgacggcgtgctgtggagaggcgagaccgccgtgcccggcgcccccgaggccctgagagccctgagagccagaggcaagagactgggcttcatcaccaacaacagcagcaagaccagagccgcctacgccgagaagctgagaagactgggcttcggcggccccgccggccccggcgccagcctggaggtgttcggcaccgcctactgcaccgccctgtacctgagacagagactggccggcgcccccgcccccaaggcctacgtgctgggcagccccgccctggccgccgagctggaggccgtgggcgtggccagcgtgggcgtgggccccgagcccctgcagggcgagggccccggcgactggctgcacgcccccctggagcccgacgtgagagccgtggtggtgggcttcgacccccacttcagctacatgaagctgaccaaggccctgagatacctgcagcagcccggctgcctgctggtgggcaccaacatggacaacagactgcccctggagaacggcagattcatcgccggcaccggctgcctggtgagagccgtggagatggccgcccagagacaggccgacatcatcggcaagcccagcagattcatcttcgactgcgtgagccaggagtacggcatcaaccccgagagaaccgtgatggtgggcgacagactggacaccgacatcctgctgggcgccacctgcggcctgaagaccatcctgaccctgaccggcgtgagcaccctgggcgacgtgaagaacaaccaggagagcgactgcgtgagcaagaagaagatggtgcccgacttctacgtggacagcatcgccgacctgctgcccgccctgcagggctag

SEQ ID NO: 33204 - protein, 200 aa, Artificial Sequence
  derived and/or modified sequence
MALWMRLLPLLALLALWGPDPAAAFVNQHLCGSHLVEALYLVCGERGFFYTPKTRREAEDLQASALSLSSSTSTWPEGLDATARAPPALVVTANIGQAGGSSSRQFRQRALGTSDSPVLFIHCPGAAGTAQGLEYRGRRVTTELVWEEVDSSPQPQGSESLPAQPPAQPAPQPEPQQAREPSPEVSCCGLWPRRPQRSQN

SEQ ID NO: 33205 - DNA, 603 bp, Artificial Sequence
  derived and/or modified sequence
atggccctgtggatgagactgctgcccctgctggccctgctggccctgtggggccccgaccccgccgccgccttcgtgaaccagcacctgtgcggcagccacctggtggaggccctgtacctggtgtgcggcgagagaggcttcttctacacccccaagaccagaagagaggccgaggacctgcaggccagcgccctgagcctgagcagcagcaccagcacctggcccgagggcctggacgccaccgccagagccccccccgccctggtggtgaccgccaacatcggccaggccggcggcagcagcagcagacagttcagacagagagccctgggcaccagcgacagccccgtgctgttcatccactgccccggcgccgccggcaccgcccagggcctggagtacagaggcagaagagtgaccaccgagctggtgtgggaggaggtggacagcagcccccagccccagggcagcgagagcctgcccgcccagccccccgcccagcccgccccccagcccgagccccagcaggccagagagcccagccccgaggtgagctgctgcggcctgtggcccagaagaccccagagaagccagaactag

SEQ ID NO: 33206 - DNA, 603 bp, Artificial Sequence
  derived and/or modified sequence
atggcactatggatgcgactcctccctcttcttgcactgctggccctgtggggacccgatccagccgctgcatttgtgaaccagcacctctgtggatcacacctggtcgaggcactgtacctggtgtgtggagaacgcgggtttttttatacccccaaaacacggcgcgaggccgaagacctgcaggcaagcgcccttagcctttcttcctctacatcaacatggccagaggggctggacgctaccgccagggctccaccagcattggtcgtcaccgcaaatattggccaggccggggggagttcttcacgccagttccgccagagagcattgggaacgtcggatagtcccgtcctcttcatccactgtcccggtgcagccggcactgcccaagggctagagtatcgggggcggagggtgaccacggagctggtttgggaggaagtggattcctcaccgcagcctcaggggtctgagtcacttccagcccagcctccagcccagcctgctccccagccagaaccccagcaggcacgagaaccatcccccgaagtctcatgctgtggtctttggccaagaaggccccagcgctctcagaattag

SEQ ID NO: 33207 - DNA, 603 bp, Artificial Sequence
  derived and/or modified sequence
atggccctgtggatgaggctgctgcccctgctggccctgctggccctgtggggccctgaccctgctgctgcctttgtgaaccagcacctgtgtggcagccacctggtggaggccctgtacctggtgtgtggggagcggggcttcttctacacccccaagacccggcgggaggccgaggacctgcaggccagcgccctgagcctgagcagcagcaccagcacctggccagagggcctggatgccacagcccgggcccccccagccctggtggtgacagccaacatcggccaggccggcggcagcagcagccggcagttccggcagagggccctgggcaccagtgacagccctgtgctcttcatccactgccctggagctgctggaacagcccagggcctggagtaccggggccggcgggtgaccacagagctggtgtgggaggaggtggacagcagcccccagccccagggcagcgagagcctgcctgcccagcccccagcccagcctgccccccagcctgagccccagcaggcccgggagcccagccctgaggtgtcctgctgcggcctgtggccccggcggccccagaggagccagaactag

SEQ ID NO: 33208 - DNA, 603 bp, Artificial Sequence
  derived and/or modified sequence
atggccctgtggatgcggctgctgcccctgctggccctgctggccctgtggggacccgaccccgctgcggcatttgtcaaccagcacttatgtggctcacacctcgtggaggcactgtacctggtgtgcggtgaacgaggatttttctacaccccaaagacccgtagggaggcagaggatctgcaagccagcgctctctccctttcgtccagcacttctacatggccagagggcctagatgccactgcgagggcaccgcctgcactcgttgtgactgctaacataggccaagccggcggatcttcgagccgccagtttcgacagagggctctcggcaccagcgattcacccgtgctgtttatccattgtcccggcgcagccggtacagcgcagggactggaatatcgaggccgtagggttacaactgagctggtatgggaggaggtggattcttccccacaaccacagggatctgagtccctaccggctcaacctcctgcccaacctgcgccacagcccgagccacagcaggcacgcgaaccttccccggaagtcagttgctgtgggctgtggccaaggcgcccccagcgaagccagaattag

SEQ ID NO: 33209 - DNA, 603 bp, Artificial Sequence
  derived and/or modified sequence
atggcactttggatgaggctcctgcccctgctcgcacttctagccctttggggaccagatcctgctgcagcttttgttaatcaacatctgtgcgggtcacatctggtcgaggccttgtatcttgtgtgcggggaacgtggtttcttctacacccccaaaaccagaagagaagccgaggatctccaggccagcgcactttcactgagttcctcaacgtccacctggccagaggggcttgatgccacggcgagagccccacccgcattagtggtaaccgccaatatcggccaggctggcggttcctccagtagacagtttagacagcgggctttgggcacaagcgatagtcctgtcttgttcatacactgccccggagcagcaggaacagcccaagggcttgagtaccgtgggaggagggttactacggagctagtttgggaagaagtggatagcagcccacagccacagggctcggagtcattaccagctcaaccgcctgcacaaccggcacctcagcccgagccacagcaagccagggaaccttctcctgaagtatcatgctgtggactctggccacggaggcctcagcgatcacagaactag

SEQ ID NO: 33210 - DNA, 828 bp, Artificial Sequence
  derived and/or modified sequence
agccctccaggacaggctgcatcagaagaggccatcaagcagatcactgtccttctgccatggccctgtggatgcgcctcctgcccctgctggcgctgctggccctctggggacctgacccagccgcagcctttgtgaaccaacacctgtgcggctcacacctggtggaagctctctacctagtgtgcggggaacgaggcttcttctacacacccaagacccgccgggaggcagaggacctgcaggcctcagctttgtccctctcctcctccacgtcaacctggccagagggtctggacgccacagccagggcaccccctgctttggtggtgactgctaatattggccaggccggcggatcatcgtccaggcagtttcggcagagagccttgggcaccagtgactccccggtcctctttatccactgtccaggagctgcggggactgcgcagggactagagtacaggggccgaagagtcaccaccgagcttgtgtgggaggaggtggattccagcccccagccccagggctctgaatcgctgccagctcagccccctgcccagcctgccccacagcctgagccccagcaggccagagagcccagtcctgaggtgagctgctgtggcctgtggcccaggcgaccccagcgctcccagaactgaggctggcagccagccccagcctcagccccaactgcgaggcagagagggcctgcagggagggatccagcaggtgactcttcaggctgatttgcccatcccagatagaagccgggagtgttctttcaaaggtgtctttaccttagacactcaataaaatggtaacaca

SEQ ID NO: 33211 - DNA, 603 bp, Artificial Sequence
  derived and/or modified sequence
atggctctgtggatgaggcttctaccactgcttgcgctcctcgctctatgggggcccgacccagctgctgccttcgtgaaccagcatctttgcggcagtcacctcgtcgaggctctttacctggtctgtggcgagcgcggatttttttatacacctaaaactcggagagaggcagaggacttacaggcgtcagctctttcgctctccagctctacgagtacttggccagaggggctggacgcaactgcccgcgcaccaccagccctcgtcgtgactgctaacataggtcaggctggcggctcgtcgtccagacaatttcggcaacgcgcactcgggacttctgatagtccggtgttattcatccattgtccgggtgcggccggaactgcccaaggtctcgaataccgcggtagacgtgtcacaactgagttggtatgggaagaagttgattcctccccacagcctcaaggttccgaatccctccctgcacagccccctgcccagccagctccacagccggagccacaacaggcccgagagccctcccctgaagtgtcttgttgcggcctgtggcccagaaggccccagagatcccagaattag

SEQ ID NO: 33212 - DNA, 603 bp, Artificial Sequence
  derived and/or modified sequence
atggctctgtggatgcgcttgctccctctcctagcccttttagcactttggggccccgaccccgcagcggccttcgtgaaccagcatctatgtggaagccaccttgtggaggccctgtatctcgtctgcggcgaacgaggctttttttatacacctaagacaagacgggaggccgaggatctgcaggcttccgcactgtcgctctccagtagcacctcgacttggcctgaaggtctggatgccacagccagagctccccctgctctagtcgttaccgccaatattggacaagccggcgggtcgtcgtccagacaatttcggcaacgcgcactcgggacttctgatagtccggtgttattcatccattgtccgggtgcggccggaactgcccaaggtctcgaataccgcggtagacgtgtcacaactgagttggtatgggaagaagttgattcctccccacagcctcaaggttccgaatccctccctgcacagccccctgcccagccagctccacagccggagccacaacaggcccgagagccctcccctgaagtgtcttgttgcggcctgtggcccagaaggccccagagatcccagaattag

SEQ ID NO: 33213 - DNA, 1867 bp, Artificial Sequence
  derived and/or modified sequence
atgagcaaacgaaagtggcgcggatttcggggcgcccagcaggagcgagcgcagccgccagccgcaagtccgcagccgtgtcccgcgccccacgccggcctccccggcggcagccggagacgagcgccagcaccggcgggacagcagcagatgcgggccgagagccggtcaggggcgcagaggcggaggggatcggcgcggcggggagctcaccgcgaagctggaggctgcgtccgcgggcgcaccaggagctcaggcagcgagcgatcgaacgctctgtggcaggcggtggacgctgctgaagctctggctctgagctcaccgctccgccgtccgtgggaccaagcccagcattttacaaacccagctcctttctccaagggtcctcagagcgcccctccgtcaccccctgcagggcgccgcagacgaggcgctgaccttgcgctcactcccctcgctggggaaggacacactcgctggcgtcagcccggccggcctgggaagtaggactaaggacccgaactgcaaccctccacaccagacagcacagaccaccccaaggctgctcaatctgcccaaagccaaaagtacgtgggggatatgggtccaggttggggtgcttgggagagggccctgggagaggggttcagacggtgcacactccaaaggactgaggcggcgccactgtgttaccattttattgagtgtctaaggtaaagacacctttgaaagaacactcccggcttctatctgggatgggcaaatcagcctgaagagtcacctgctggatccctccctgcaggccctgtcgtggggcaggtacagggactccaatccatgtgcctccagctccaacgctccccaagtcctggagcctcccctgtcaccccagtgcctgaccagtgaatgggtgctgcccccactacagagctccctctggctgaggcagaggccactggctgggcctttctagccacctttcacccctcttgcacacgggaagccccgcaggctcctgaccacaatgggatcctgacgccggagccccttaggccctttgctcagaaggcctctggttattacctcaattctgaacagccaggaggcctgagactgtcacccactttgataaatacagaccgacagaaaggtcaggccattggtgcaagaccccatggccagcagcctggggcggggagaacccgggggtctcacagcccccagcagagcccagctttccttgggtttttaggttcttccccaatgatattttccctttttccctctctacccactttctgccccccatcttctcccctttggctgcccgctctctccctgcccctctccccttctttgccctctttcgtctcccaggagctcccctgccaggacctcggtgccgtggagactgcggggaacctgctctgcccacacctgctctggcccctagacggaagcacctggagccaaccacggaactccagatcccagctgtgtgactgaatccacgccagcctctctgagccaaagctgcttgcagaagggggagatcccagttcgaagactcccgcgcagagcctgtggccctctctgccaggcctcagggtgcctgagacactcacctctctgcctcgcagttggggctgaggctggggctggctgccagcctcagttctgggagcgctggggtcgcctgggccacaggccacagcagctcacctcaggactgggctctctggcctgctggggctcaggctgtggggcaggctgggcagggggctgagctggcagcgattcagagccctggggctgggggctggaatccacctcctcccacacaagctcggtggtgactcttcggccc

SEQ ID NO: 33214 - RNA, 603 nt, Artificial Sequence
  derived and/or modified sequence
auggcucuguggaugaggcuucuaccacugcuugcgcuccucgcucuaugggggcccgacccagcugcugccuucgugaaccagcaucuuugcggcagucaccucgucgaggcucuuuaccuggucuguggcgagcgcggauuuuuuuauacaccuaaaacucggagagaggcagaggacuuacaggcgucagcucuuucgcucuccagcucuacgaguacuuggccagaggggcuggacgcaacugcccgcgcaccaccagcccucgucgugacugcuaacauaggucaggcuggcggcucgucguccagacaauuucggcaacgcgcacucgggacuucugauaguccgguguuauucauccauuguccgggugcggccggaacugcccaaggucucgaauaccgcgguagacgugucacaacugaguugguaugggaagaaguugauuccuccccacagccucaagguuccgaaucccucccugcacagcccccugcccagccagcuccacagccggagccacaacaggcccgagagcccuccccugaagugucuuguugcggccuguggcccagaaggccccagagaucccagaauuag

SEQ ID NO: 33215 - RNA, 603 nt, Artificial Sequence
  derived and/or modified sequence
auggcucuguggaugcgcuugcucccucuccuagcccuuuuagcacuuuggggccccgaccccgcagcggccuucgugaaccagcaucuauguggaagccaccuuguggaggcccuguaucucgucugcggcgaacgaggcuuuuuuuauacaccuaagacaagacgggaggccgaggaucugcaggcuuccgcacugucgcucuccaguagcaccucgacuuggccugaaggucuggaugccacagccagagcucccccugcucuagucguuaccgccaauauuggacaagccggcgggucgucguccagacaauuucggcaacgcgcacucgggacuucugauaguccgguguuauucauccauuguccgggugcggccggaacugcccaaggucucgaauaccgcgguagacgugucacaacugaguugguaugggaagaaguugauuccuccccacagccucaagguuccgaaucccucccugcacagcccccugcccagccagcuccacagccggagccacaacaggcccgagagcccuccccugaagugucuuguugcggccuguggcccagaaggccccagagaucccagaauuag

SEQ ID NO: 33216 - protein, 495 aa, Artificial Sequence
  derived and/or modified sequence
MEALLEGIQNRGHGGGFLTSCEAELQELMKQIDIMVAHKKSEWEGRTHALETCLKIREQELKSLRSQLDVTHKEVGMLHQQVEEHEKIKQEMTMEYKQELKKLHEELCILKRSYEKLQKKQMREFRGNTKNHREDRSEIERLTAKIEEFRQKSLDWEKQRLIYQQQVSSLEAQRKALAEQSEIIQAQLVNRKQKLESVELSSQSEIQHLSSKLERANDTICANELEIERLTMRVNDLVGTSMTVLQEQQQKEEKLRESEKLLEALQEEKRELKAALQSQENLIHEARIQKEKLQEKVKATNTQHAVEAISLESVSATCKQLSQELMEKYEELKRMEAHNNEYKAEIKKLKEQILQGEQSYSSALEGMKMEISHLTQELHQRDITIASTKGSSSDMEKRLRAEMQKAEDKAVEHKEILDQLESLKLENRHLSEMVMKLELGLHECSLPVSPLGSIATRFLEEEELRSHHILERLDAHIEELKRESEKTVRQFTALK

SEQ ID NO: 33217 - DNA, 1488 bp, Artificial Sequence
  derived and/or modified sequence
atggaggccctgctggagggcatccagaacagaggccacggcggcggcttcctgaccagctgcgaggccgagctgcaggagctgatgaagcagatcgacatcatggtggcccacaagaagagcgagtgggagggcagaacccacgccctggagacctgcctgaagatcagagagcaggagctgaagagcctgagaagccagctggacgtgacccacaaggaggtgggcatgctgcaccagcaggtggaggagcacgagaagatcaagcaggagatgaccatggagtacaagcaggagctgaagaagctgcacgaggagctgtgcatcctgaagagaagctacgagaagctgcagaagaagcagatgagagagttcagaggcaacaccaagaaccacagagaggacagaagcgagatcgagagactgaccgccaagatcgaggagttcagacagaagagcctggactgggagaagcagagactgatctaccagcagcaggtgagcagcctggaggcccagagaaaggccctggccgagcagagcgagatcatccaggcccagctggtgaacagaaagcagaagctggagagcgtggagctgagcagccagagcgagatccagcacctgagcagcaagctggagagagccaacgacaccatctgcgccaacgagctggagatcgagagactgaccatgagagtgaacgacctggtgggcaccagcatgaccgtgctgcaggagcagcagcagaaggaggagaagctgagagagagcgagaagctgctggaggccctgcaggaggagaagagagagctgaaggccgccctgcagagccaggagaacctgatccacgaggccagaatccagaaggagaagctgcaggagaaggtgaaggccaccaacacccagcacgccgtggaggccatcagcctggagagcgtgagcgccacctgcaagcagctgagccaggagctgatggagaagtacgaggagctgaagagaatggaggcccacaacaacgagtacaaggccgagatcaagaagctgaaggagcagatcctgcagggcgagcagagctacagcagcgccctggagggcatgaagatggagatcagccacctgacccaggagctgcaccagagagacatcaccatcgccagcaccaagggcagcagcagcgacatggagaagagactgagagccgagatgcagaaggccgaggacaaggccgtggagcacaaggagatcctggaccagctggagagcctgaagctggagaacagacacctgagcgagatggtgatgaagctggagctgggcctgcacgagtgcagcctgcccgtgagccccctgggcagcatcgccaccagattcctggaggaggaggagctgagaagccaccacatcctggagagactggacgcccacatcgaggagctgaagagagagagcgagaagaccgtgagacagttcaccgccctgaagtag

SEQ ID NO: 33218 - DNA, 2056 bp, Artificial Sequence
  derived and/or modified sequence
caggatgtaccaaacgtggaagcggagacggggaggtctgggggtgccacgcaagtccctttcctcccgacacgagtgcagtaaagaaaaacggttatgagcgtaaagtgacagcctcggccgatgggaatagggggaagtccgacactgagcaacgaacgcattcccgcgcctccaaaacctaggccgggggcgctggaaacccttaccggcacccggccaccgcggcagacgcttgctcctgccacgccccccccccctcccccgcatcacgtgtctgcactcgctttcctcggattcccggatgtggttgccaaaacaaaggggatttggtgatggaggctttgttagaaggaatacaaaatcgagggcatggtgggggatttttgacatcttgtgaagcagaactacaggagctcatgaaacagattgacataatggtggctcataaaaaatctgaatgggaaggacgtacacatgctctagaaacttgcttgaaaatccgtgaacaggaacttaagagtcttaggagtcagttggatgtgacacataaggaggttggaatgttgcatcagcaggtagaagaacatgaaaaaatcaagcaagagatgaccatggaatataagcaggagttgaagaaactacatgaagaattatgcatactgaagagaagctatgaaaagcttcagaaaaagcaaatgagggaattcagaggaaataccaaaaatcacagggaagatcggtctgaaattgagaggttaactgcaaaaatagaggaattccgtcagaaatcgctggactgggagaagcaacgcttgatttatcagcaacaggtatcttcactggaggcacaaaggaaggctctggctgaacaatcagagataattcaggctcagcttgtcaatcggaaacagaaattagagtctgtggaactttctagccaatcagaaattcaacacttaagcagtaaactggagcgggctaatgacactatctgtgccaatgagttggaaatagagcgcctcaccatgagggtcaatgacttggttggaaccagtatgactgtcctacaggagcagcagcaaaaagaagaaaaattgagggaatctgaaaaactattagaggctctgcaggaagaaaagagagaattgaaggcagctcttcagtctcaagaaaatctcatacatgaggccagaatacaaaaggagaagttacaagaaaaagtaaaggcaactaacactcaacatgctgtagaagctataagtttggaatctgtgagtgcaacgtgtaaacagctgagccaagaactaatggaaaaatatgaagaactgaagaggatggaagcacataacaatgaatacaaagcagagattaagaagttgaaagaacagattttacagggtgaacaaagttacagttctgcactagaaggaatgaagatggaaatctcccatctaactcaggagttacatcagcgagatatcactattgcttccaccaaaggttcttcctcagacatggaaaagcgactcagagcagagatgcaaaaggcagaagacaaagcagtagagcataaggagattttggatcagctggagtcactcaaattagaaaatcgtcatctttctgaaatggtgatgaaattggaattgggtttacatgagtgttccttgcctgtatctccccttggttcaatagctaccagatttttggaagaggaggaactgaggtctcatcacattctagagcgcttggatgcccatattgaagaactaaaaagagagagtgaaaagacagtgagacaattcacagccttaaagtagcctcttaaaaaaatcactatcttggaaataaaaataaacaccaaagagttactgtcatctgaagtagcagctctttaaaaacatgaagagataaaattataaaaatgatacatctaaagcagtggtgaagaaagctgaaaaactgatacttttgataggcattttctctgcactggtttgtttaaaggacttcttccagcaataagttgaaagaataaaccactttgctagac

SEQ ID NO: 33219 - DNA, 1488 bp, Artificial Sequence
  derived and/or modified sequence
atggaggcccttttggagggtatccaaaaccggggacacggcggaggttttcttacatcctgcgaggctgaattgcaggagcttatgaagcagattgacatcatggttgctcacaaaaaaagtgaatgggaaggccggacacacgctcttgagacctgtctgaagattcgggagcaggagctgaaatctctcaggagtcagctcgatgtgacccataaagaggtggggatgctccaccagcaggtggaggaacacgaaaagatcaaacaggagatgaccatggaatataagcaagagctcaaaaaactacacgaggaactttgcatcttaaagcgttcctacgagaagcttcagaaaaagcagatgcgtgagtttagaggcaatacaaagaaccacagagaagatcggtccgagattgaaagactgacggctaaaatcgaggaatttagacagaagtcactggactgggagaagcaaaggctcatctaccagcagcaggtctccagtctcgaagcccagcggaaagcactagcagagcagtccgagatcattcaggcacagctggtcaacagaaagcaaaagctcgagagcgtcgagttgagcagtcaaagcgagattcaacacttgagctccaagcttgaaagggccaacgatacgatctgtgccaacgaactcgagatcgaaagacttactatgagagtcaacgacctggtgggtacctctatgaccgtgctccaggagcagcaacagaaggaggagaaattgcgcgaatcagagaagctcctagaggccctacaggaggagaagcgcgagctcaaggctgctctacagagccaggaaaatctgatccacgaggcacgaattcagaaggaaaaactgcaggaaaaggtgaaagctaccaatactcagcatgccgtagaggcaatcagcctggagtcagtctctgccacgtgcaaacagctgtcccaagagttgatggaaaagtatgaagagctgaaacgaatggaggcccacaataacgaatacaaagccgagatcaagaaacttaaggaacagattctccaaggcgagcagtcttactcttccgcgctagaggggatgaagatggagatatcacaccttacccaggaactgcatcagcgcgacatcaccatcgcgagcactaagggtagctctagtgacatggagaagcgcctccgggccgagatgcagaaggcggaggacaaagcagtcgaacataaggaaatacttgaccaattagagagcctgaagttggaaaaccgccatctttctgaaatggtcatgaagcttgaacttggcctccacgagtgtagcttgccagtctcacccctaggcagcatcgctacacgatttcttgaagaggaggaattacgaagtcaccatattttagagcgtttagacgcacacatcgaagaactcaaacgagaatccgaaaaaaccgttcgccagttcaccgccctcaaatag

SEQ ID NO: 33220 - DNA, 1488 bp, Artificial Sequence
  derived and/or modified sequence
atggaggccctgctggagggcatccagaacagaggacatggaggcggcttcctgaccagctgtgaggccgagctgcaggagctgatgaagcagattgacatcatggtggcccacaagaagtctgagtgggagggccgcacccacgccctggagacctgcctgaagatccgggagcaggagctgaagagcctgcggagccagctggatgtgacccacaaggaggtgggcatgctgcaccagcaggtggaggagcacgagaagatcaagcaggagatgaccatggagtacaagcaggagctgaagaagctgcacgaggagctgtgcatcctgaagaggagctatgagaagctgcagaagaagcagatgagggagttccggggcaacaccaagaaccaccgggaggacagaagtgaaattgagcggctgacagccaagattgaggagttccggcagaagagcctggactgggagaagcagaggctcatctaccagcagcaggtgagcagcctggaggcccagaggaaggccctggccgagcagagcgagatcatccaggcccagctggtgaacaggaagcagaagctggagagcgtggagctgagcagccagagcgagatccagcacctgagcagcaagctggagcgggccaatgacaccatctgtgccaatgagctggagattgagcggctgaccatgagggtgaatgacctggtgggcacctccatgacagtgctgcaggagcagcagcagaaggaggagaagctgcgggagagcgagaagctgctggaggccctgcaggaggagaagcgggagctgaaggccgccctgcagagccaggagaacctgatccacgaggcccgcatccagaaggagaagctgcaggagaaggtgaaggccaccaacacccagcacgctgtggaggccatcagcctggagagcgtgtctgccacctgcaagcagctgagccaggagctgatggagaagtatgaggagctgaagaggatggaggcccacaacaatgagtacaaggccgagatcaagaagctgaaggagcagatcctgcagggcgagcagagctacagcagcgccctggagggcatgaagatggagatcagccacctgacccaggagctgcaccagagggacatcaccatcgccagcaccaagggcagcagcagtgacatggagaagaggctgcgggcagagatgcagaaggccgaggacaaggctgtggagcacaaggagatcctggaccagctggagagcctgaagctggagaacagacacctgtctgagatggtgatgaagctggagctgggcctgcatgaatgttccctgcctgtgagccccctgggcagcatcgccacccgcttcctggaggaggaggagctgcggagccaccacatcctggagcggctggatgcccacatcgaggagctgaagcgggagagcgagaagacagtgcggcagttcaccgccctgaagtag

SEQ ID NO: 33221 - DNA, 1488 bp, Artificial Sequence
  derived and/or modified sequence
atggaggccctgctggagggcatccagaaccggggccacggcggcggtttcttgaccagctgcgaagctgagctgcaggagcttatgaagcaaatagacatcatggtggctcataaaaaaagtgagtgggagggccggactcacgcccttgagacttgcctgaagatccgggagcaggagttaaaaagcctgagatcccagctcgatgtgactcacaaggaggtgggtatgttgcaccaacaggtggaggaacatgaaaagattaagcaggaaatgaccatggagtacaaacaggaacttaaaaaactccacgaagaactgtgtattttaaagcgcagctacgagaagctccaaaaaaaacagatgcgtgagttcagaggcaatacaaaaaaccatcgcgaagaccgaagtgaaattgagaggctgacagcaaaaatcgaggaattcaggcagaaaagtcttgattgggaaaagcagcgcctcatctatcagcagcaggtgagcagcctagaagcccagagaaaagcgttggccgagcagtctgaaatcatccaagcccaactggtaaatagaaagcagaagctggaatctgtggaactatcaagccaaagtgaaattcagcacctgagctccaagctggagcgcgcaaatgatacaatttgcgcgaatgagcttgagatcgagaggctgacaatgagagtgaacgaccttgttggcacatccatgaccgtgctgcaggaacagcagcagaaggaagaaaagctgcgagaatctgaaaagttgctggaggctctacaggaggagaaacgtgagctaaaggctgctctgcagagtcaagagaacctgattcatgaggcgcggatccaaaaggaaaagctgcaggagaaagtcaaagcaactaatactcaacacgctgtcgaagctattagtctcgaaagtgtatccgccacttgtaaacaactcagccaagagctcatggagaaatatgaagaacttaagagaatggaagcacataacaacgagtataaggcggagatcaagaagctgaaggaacagatacttcagggcgagcagtcatattcatccgccctggagggcatgaagatggaaatttctcacctcacccaagagctgcatcagagggatataactatagccagtactaagggaagtagcagtgatatggagaagagactgcgcgcagagatgcaaaaagctgaggacaaggcagtggagcataaggagattctggatcagctggagagcctgaagcttgagaatcgacatttaagtgaaatggtcatgaaattggagttgggtctccatgaatgcagccttcctgtctcacctctcggctccattgccaccagatttctggaggaagaagaattgcggagccaccacatcctggaacgactcgatgcacacatagaggagcttaagcgagagtccgagaaaactgtgcgccagttcacagctcttaagtag

SEQ ID NO: 33222 - DNA, 1488 bp, Artificial Sequence
  derived and/or modified sequence
atggaagccctcctggaaggcattcaaaaccgagggcatgggggaggttttctgacatcgtgtgaggcggagcttcaggagctgatgaagcaaattgacatcatggtggctcataaaaaatccgaatgggaaggaagaacccacgcacttgaaacttgcttgaagattagggagcaggaacttaagagccttcgttctcagctcgacgtcactcataaagaagttggaatgctacaccaacaggtggaggagcatgagaagattaaacaggagatgaccatggaatacaagcaggaactgaagaagctacacgaggaattgtgtatccttaaaagatcctacgaaaaactccagaagaaacagatgcgggagttccgcggaaacactaagaatcaccgggaggaccgttccgaaatagagcgcctgaccgcgaagattgaagaatttagacagaagagtttggattgggagaaacagcgcctgatttatcagcaacaggtgagctccctggaggcacaacgcaaagcactggcggagcaaagcgaaatcatacaggcccaacttgtgaaccgtaagcagaaacttgagagcgtagaactgagctcccagtcggaaattcagcatctgagcagcaagctggagcgggctaacgatacgatatgcgcgaacgagctggagattgagcggttaacaatgagagtcaacgatctagttgggacttcaatgacagtcctgcaagagcagcaacagaaggaggagaaacttcgcgaaagcgagaaacttctggaggcgctccaggaagaaaaacgagaactgaaggcagcactacaaagtcaggaaaatctaattcatgaagcacggattcagaaagaaaaactacaagaaaaggtgaaagctacaaacactcagcacgccgtcgaggcaatctcgcttgagtcagtgagcgcaacatgtaagcaactgagccaggagctgatggagaagtatgaggagcttaaacggatggaggcacacaacaacgaatataaagcggaaatcaaaaaactaaaagagcagattttacagggagagcaatcttatagcagtgctttagaggggatgaagatggagatatcccatctgacacaagagcttcatcaaagggacatcacaatcgcaagtacgaagggttccagctctgacatggaaaaacgcctccgggctgagatgcagaaagccgaggacaaggctgtggaacacaaagagattttggaccagctagaatctctaaaactggaaaataggcatctgtcggagatggtgatgaaactagagctgggactgcatgagtgtagcctgccggtgtcccctctgggcagcatcgccacccggttccttgaagaggaggagcttcgatcccatcacatccttgagagacttgatgctcatatcgaggaactcaagagggagagtgagaaaaccgtgagacaattcacggcactcaaatag

SEQ ID NO: 33223 - protein, 475 aa, Artificial Sequence
  derived and/or modified sequence
MEALLEGIQNRGHGGGFLTSCEAELQELMKQIDIMVAHKKSEWEGRTHALETCLKIREQELKSLRSQLDVTHKEVGMLHQQVEEHEKIKQEMTMEYKQELKKLHEELCILKRSYEKLQKKQMREFRGNTKNHREDRSEIERLTAKIEEFRQKSLDWEKQRLIYQQQVSSLEAQRKALAEQSEIIQAQLVNRKQKLESVELSSQSEIQHLSSKLERANDTICANELEIERLTMRVNDLVGTSMTVLQEQQQKEEKLRESEKLLEALQEEKRELKAALQSQENLIHEARIQKEKLQEKVKATNTQHAVEAISLESVSATCKQLSQELMEKYEELKRMEAHNNEYKAEIKKLKEQILQGEQSYSSALEGMKMEISHLTQELHQRDITIASTKGSSSDMEKRLRAEMQKAEDKAVEHKEILDQLESLKLENRHLSEMVMKLELGLHERWGFTMLSSLVLNFGIQAIRQPQRPKVLELQV

SEQ ID NO: 33224 - DNA, 1428 bp, Artificial Sequence
  derived and/or modified sequence
atggaggccctgctggagggcatccagaacagaggccacggcggcggcttcctgaccagctgcgaggccgagctgcaggagctgatgaagcagatcgacatcatggtggcccacaagaagagcgagtgggagggcagaacccacgccctggagacctgcctgaagatcagagagcaggagctgaagagcctgagaagccagctggacgtgacccacaaggaggtgggcatgctgcaccagcaggtggaggagcacgagaagatcaagcaggagatgaccatggagtacaagcaggagctgaagaagctgcacgaggagctgtgcatcctgaagagaagctacgagaagctgcagaagaagcagatgagagagttcagaggcaacaccaagaaccacagagaggacagaagcgagatcgagagactgaccgccaagatcgaggagttcagacagaagagcctggactgggagaagcagagactgatctaccagcagcaggtgagcagcctggaggcccagagaaaggccctggccgagcagagcgagatcatccaggcccagctggtgaacagaaagcagaagctggagagcgtggagctgagcagccagagcgagatccagcacctgagcagcaagctggagagagccaacgacaccatctgcgccaacgagctggagatcgagagactgaccatgagagtgaacgacctggtgggcaccagcatgaccgtgctgcaggagcagcagcagaaggaggagaagctgagagagagcgagaagctgctggaggccctgcaggaggagaagagagagctgaaggccgccctgcagagccaggagaacctgatccacgaggccagaatccagaaggagaagctgcaggagaaggtgaaggccaccaacacccagcacgccgtggaggccatcagcctggagagcgtgagcgccacctgcaagcagctgagccaggagctgatggagaagtacgaggagctgaagagaatggaggcccacaacaacgagtacaaggccgagatcaagaagctgaaggagcagatcctgcagggcgagcagagctacagcagcgccctggagggcatgaagatggagatcagccacctgacccaggagctgcaccagagagacatcaccatcgccagcaccaagggcagcagcagcgacatggagaagagactgagagccgagatgcagaaggccgaggacaaggccgtggagcacaaggagatcctggaccagctggagagcctgaagctggagaacagacacctgagcgagatggtgatgaagctggagctgggcctgcacgagagatggggcttcaccatgctgagcagcctggtgctgaacttcggcatccaggccatcagacagccccagagacccaaggtgctggagctgcaggtgtag

SEQ ID NO: 33225 - DNA, 489 bp, Artificial Sequence
  derived and/or modified sequence
atggaggccctgctggagggcatccagaacagaggccacggcggcggcttcctgaccagctgcgaggccgagctgcaggagctgatgaagcagatcgacatcatggtggcccacaagaagagcgagtgggagggcagaacccacgccctggagacctgcctgaagatcagagagcaggagctgaagagcctgagaagccagctggacgtgacccacaaggaggtgggcatgctgcaccagcaggtggaggagcacgagaagatcaagcaggagatgaccatggagtacaagcaggagctgaagaagctgcacgaggagctgtgcatcctgaagagaagctacgagaagctgcagaagaagcagatgagagagttcagaggcaacaccaagaaccacagagaggacagaagcgagatcgagagactgaccgccaagatcgaggagttcagacagaagagcctggactgggagaagcagagactgatctag

SEQ ID NO: 33226 - DNA, 192 bp, Artificial Sequence
  derived and/or modified sequence
atggaggccctgctggagggcatccagaacagaggccacggcggcggcttcctgaccagctgcgaggccgagctgcaggagctgatgaagcagatcgacatcatggtggcccacaagaagagcgagtgggagggcagaacccacgccctggagacctgcctgaagatcagagagcaggagctgaagagctag

SEQ ID NO: 33227 - DNA, 1835 bp, Artificial Sequence
  derived and/or modified sequence
acgcaagtccctttcctcccgacacgagtgcagtaaagaaaaacggttatgagcgtaaagtgacagcctcggccgatgggaatagggggaagtccgacactgagcaacgaacgcattcccgcgcctccaaaacctaggccgggggcgctggaaacccttaccggcacccggccaccgcggcagacgcttgctcctgccacgccccccccccctcccccgcatcacgtgtctgcactcgctttcctcggattcccggatgtggttgccaaaacaaaggggatttggtgatggaggctttgttagaaggaatacaaaatcgagggcatggtgggggatttttgacatcttgtgaagcagaactacaggagctcatgaaacagattgacataatggtggctcataaaaaatctgaatgggaaggacgtacacatgctctagaaacttgcttgaaaatccgtgaacaggaacttaagagtcttaggagtcagttggatgtgacacataaggaggttggaatgttgcatcagcaggtagaagaacatgaaaaaatcaagcaagagatgaccatggaatataagcaggagttgaagaaactacatgaagaattatgcatactgaagagaagctatgaaaagcttcagaaaaagcaaatgagggaattcagaggaaataccaaaaatcacagggaagatcggtctgaaattgagaggttaactgcaaaaatagaggaattccgtcagaaatcgctggactgggagaagcaacgcttgatttatcagcaacaggtatcttcactggaggcacaaaggaaggctctggctgaacaatcagagataattcaggctcagcttgtcaatcggaaacagaaattagagtctgtggaactttctagccaatcagaaattcaacacttaagcagtaaactggagcgggctaatgacactatctgtgccaatgagttggaaatagagcgcctcaccatgagggtcaatgacttggttggaaccagtatgactgtcctacaggagcagcagcaaaaagaagaaaaattgagggaatctgaaaaactattagaggctctgcaggaagaaaagagagaattgaaggcagctcttcagtctcaagaaaatctcatacatgaggccagaatacaaaaggagaagttacaagaaaaagtaaaggcaactaacactcaacatgctgtagaagctataagtttggaatctgtgagtgcaacgtgtaaacagctgagccaagaactaatggaaaaatatgaagaactgaagaggatggaagcacataacaatgaatacaaagcagagattaagaagttgaaagaacagattttacagggtgaacaaagttacagttctgcactagaaggaatgaagatggaaatctcccatctaactcaggagttacatcagcgagatatcactattgcttccaccaaaggttcttcctcagacatggaaaagcgactcagagcagagatgcaaaaggcagaagacaaagcagtagagcataaggagattttggatcagctggagtcactcaaattagaaaatcgtcatctttctgaaatggtgatgaaattggaattgggtttacatgagagatggggttttaccatgttgtccagtctggttttgaacttcgggattcaagcaatccgccagcctcagcgtcccaaagtgctggaattacaagtgtgagctaccaccactggcagttaagaattttaacaatttgtcaatgaaacaagaatctcaattagagtctttatatacaatctgtactgttggaattttcaaataaatattgtaaagaaaatt

SEQ ID NO: 33228 - DNA, 1428 bp, Artificial Sequence
  derived and/or modified sequence
atggaagcgcttctggagggaatccagaaccgcgggcacggaggaggtttcctgacatcatgtgaggctgaactgcaggagctgatgaaacaaattgatataatggtggcacataaaaagtcagagtgggaaggtagaacccatgctctcgagacctgtctgaaaatacgcgaacaagagctgaagtctctgcgtagccagctggatgtcactcataaggaagtgggcatgcttcaccaacaggtggaggagcatgagaagatcaagcaggaaatgactatggaatataaacaggaattgaagaaactccacgaggaactctgtatcctgaaaagaagctacgaaaagctgcaaaaaaaacagatgcgcgagttcaggggcaacacaaagaaccacagggaggacagaagtgagattgagcgactgacggccaaaatagaggagtttagacagaagtccctagattgggagaaacagcgcctgatatatcagcaacaggtcagcagtctggaggcccaaaggaaggcgctggctgagcagtccgaaatcatacaagcccagcttgtcaatagaaagcagaaactggagtcggtggaattaagtagccagagcgagatccaacaccttagctcaaaattagagagagcaaatgatactatctgcgcaaacgaacttgagattgaacgattgaccatgagagtgaacgatctggtggggacaagcatgacagtcctccaggaacagcaacaaaaggaagaaaagctccgagagtccgaaaaactgctggaggccttacaggaagagaaacgcgagcttaaagccgctctacaaagccaggagaacctcatacacgaagctagaatccagaaggaaaaactgcaggagaaagtgaaggccacaaacacacagcatgcggtcgaagccatcagtcttgagagcgtgtccgctacttgcaagcagctgtctcaggagctgatggagaaatacgaagaactaaagcggatggaggcacacaataacgagtataaggccgaaattaagaaactgaaagagcagattcttcagggtgaacagtcatattcctcggcacttgagggcatgaaaatggagatttctcacctgacgcaggaattgcaccaaagggatatcactatagccagtaccaaggggagctcaagtgatatggagaaaagactccgtgctgaaatgcagaaagccgaggataaagcagtcgaacataaagaaatcttggatcaactcgagagtctgaagcttgaaaatcgtcacctgtcagagatggtgatgaaattggagctggggctacacgaacggtggggcttcacaatgctcagctccctcgtcctgaactttggaatacaggccattaggcagcctcagagacctaaggtactggaactccaggtctag

SEQ ID NO: 33229 - DNA, 489 bp, Artificial Sequence
  derived and/or modified sequence
atggaggccttgcttgagggcatacagaacagaggccacggcggagggtttctcacttcatgcgaggcggagttgcaggaattgatgaagcagatcgatattatggtggcccataagaagagcgaatgggagggcaggacgcatgctctggagacgtgtcttaagatacgggaacaggaactgaaaagccttcggagccagctggacgtcacccacaaagaggtggggatgctgcaccagcaggtggaggagcacgaaaagattaagcaagagatgaccatggagtataagcaggaattgaagaagctgcatgaggaactgtgcatcctcaagagatcatacgagaaactgcagaaaaaacagatgagagagttccggggtaacacaaagaaccacagggaggaccgcagcgagatagagaggctgaccgccaaaattgaggaatttaggcaaaaatccctggactgggagaaacagcggttgatatag

SEQ ID NO: 33230 - DNA, 192 bp, Artificial Sequence
  derived and/or modified sequence
atggaagcgctactcgaggggatccagaatcgcggtcatggcggaggcttcctgacctcctgcgaggctgaattgcaggaactcatgaaacagatcgacatcatggtggctcacaaaaagtcagagtgggaaggccgcacccacgcgctcgagacctgtctgaaaatcagagagcaggagctgaaatcatag

SEQ ID NO: 33231 - DNA, 1428 bp, Artificial Sequence
  derived and/or modified sequence
atggaggccctgctggagggcatccagaacagaggacatggaggcggcttcctgaccagctgtgaggccgagctgcaggagctgatgaagcagattgacatcatggtggcccacaagaagtctgagtgggagggccgcacccacgccctggagacctgcctgaagatccgggagcaggagctgaagagcctgcggagccagctggatgtgacccacaaggaggtgggcatgctgcaccagcaggtggaggagcacgagaagatcaagcaggagatgaccatggagtacaagcaggagctgaagaagctgcacgaggagctgtgcatcctgaagaggagctatgagaagctgcagaagaagcagatgagggagttccggggcaacaccaagaaccaccgggaggacagaagtgaaattgagcggctgacagccaagattgaggagttccggcagaagagcctggactgggagaagcagaggctcatctaccagcagcaggtgagcagcctggaggcccagaggaaggccctggccgagcagagcgagatcatccaggcccagctggtgaacaggaagcagaagctggagagcgtggagctgagcagccagagcgagatccagcacctgagcagcaagctggagcgggccaatgacaccatctgtgccaatgagctggagattgagcggctgaccatgagggtgaatgacctggtgggcacctccatgacagtgctgcaggagcagcagcagaaggaggagaagctgcgggagagcgagaagctgctggaggccctgcaggaggagaagcgggagctgaaggccgccctgcagagccaggagaacctgatccacgaggcccgcatccagaaggagaagctgcaggagaaggtgaaggccaccaacacccagcacgctgtggaggccatcagcctggagagcgtgtctgccacctgcaagcagctgagccaggagctgatggagaagtatgaggagctgaagaggatggaggcccacaacaatgagtacaaggccgagatcaagaagctgaaggagcagatcctgcagggcgagcagagctacagcagcgccctggagggcatgaagatggagatcagccacctgacccaggagctgcaccagagggacatcaccatcgccagcaccaagggcagcagcagtgacatggagaagaggctgcgggcagagatgcagaaggccgaggacaaggctgtggagcacaaggagatcctggaccagctggagagcctgaagctggagaacagacacctgtctgagatggtgatgaagctggagctgggcctgcacgagcgctggggcttcaccatgctgagcagcctggtgctgaactttggcatccaggccatccggcagccccagaggcccaaggtgctggagctgcaggtgtag

SEQ ID NO: 33232 - DNA, 489 bp, Artificial Sequence
  derived and/or modified sequence
atggaggccctgctggagggcatccagaacagaggacatggaggcggcttcctgaccagctgtgaggccgagctgcaggagctgatgaagcagattgacatcatggtggcccacaagaagtctgagtgggagggccgcacccacgccctggagacctgcctgaagatccgggagcaggagctgaagagcctgcggagccagctggatgtgacccacaaggaggtgggcatgctgcaccagcaggtggaggagcacgagaagatcaagcaggagatgaccatggagtacaagcaggagctgaagaagctgcacgaggagctgtgcatcctgaagaggagctatgagaagctgcagaagaagcagatgagggagttccggggcaacaccaagaaccaccgggaggacagaagtgaaattgagcggctgacagccaagattgaggagttccggcagaagagcctggactgggagaagcagaggctcatctag

SEQ ID NO: 33233 - DNA, 192 bp, Artificial Sequence
  derived and/or modified sequence
atggaggccctgctggagggcatccagaacagaggacatggaggcggcttcctgaccagctgtgaggccgagctgcaggagctgatgaagcagattgacatcatggtggcccacaagaagtctgagtgggagggccgcacccacgccctggagacctgcctgaagatccgggagcaggagctgaagagctag

SEQ ID NO: 33234 - DNA, 1428 bp, Artificial Sequence
  derived and/or modified sequence
atggaggccctgctggagggcatccagaaccggggccacggcggcggcttccttacctcttgcgaggctgaactacaggagctgatgaaacagatcgatattatggtagcacataagaagtctgaatgggaaggtagaactcacgccctagagacctgcttgaagatcagggaacaggaattaaagtccttgaggagtcaattggacgtcacgcataaagaggtggggatgttgcaccagcaggtagaggaacacgaaaaaatcaagcaagagatgacaatggaatataagcaagaactgaagaagctgcacgaagagctgtgtatcctaaagcgctcttatgagaagctgcagaaaaaacagatgagggaatttagagggaataccaagaaccaccgcgaggacagatccgaaatcgaacgtctaaccgccaaaatcgaggagttccggcagaagtccctcgactgggaaaagcaaaggctgatctaccaacaacaagtgagttccctggaagctcaacgaaaagcactggccgagcagtccgagataattcaggcgcagctggtgaatcggaaacagaaactggagagtgtggagttatcctcccaatctgagatacagcatctgtcctccaaattggagcgtgctaacgatacaatttgcgcaaatgagttagagatcgaaagattaaccatgagggtcaacgatctggttggcacctcaatgactgtactgcaggaacagcagcagaaggaggaaaagctgcgagagtctgagaagctgcttgaggctctgcaagaggagaagagagaattgaaggcagccctccagtcacaggaaaatctgattcacgaagctaggatccagaaagagaagttacaggagaaagtaaaagctaccaatacacagcacgccgtggaggcaatctccttggaaagtgtgagcgcaacctgcaagcagctgtcccaggaacttatggaaaaatatgaggagctcaaacgcatggaagcccataacaatgagtacaaagctgagatcaagaagttgaaagagcaaatcctacagggagagcaaagctactctagtgcccttgaaggaatgaagatggaaatcagccatttgacccaggagttgcaccagcgggatattaccatcgctagcaccaaagggtcatcctctgatatggagaaacgattgcgcgcagagatgcaaaaggccgaagacaaagccgtagagcacaaggagatcctggaccagctcgagtctctgaagctggaaaatcgccatctatcggaaatggtcatgaaactcgaactaggtctccatgagcggtggggtttcaccatgctgtctagcttggtcctgaatttcggaatccaggccattcggcagccacagcgccccaaggtgctggagttgcaggtttag

SEQ ID NO: 33235 - DNA, 489 bp, Artificial Sequence
  derived and/or modified sequence
atggaggccctgctggagggcatccagaaccggggccacggcggcggttttctcacatcatgtgaggccgagcttcaggagctgatgaagcagatcgatattatggtcgcccacaaaaagtccgagtgggaaggccggactcatgcactagagacatgcctcaagatccgcgagcaggagctgaagtctctgcgttctcagctcgacgttacacacaaagaagtcggaatgttgcatcagcaggtggaagagcatgaaaaaatcaaacaagagatgacaatggaatataaacaggaactgaaaaagctgcacgaagagctatgcatactgaaaaggagctacgagaaattgcaaaagaagcagatgagggagtttcggggcaatactaaaaaccaccgcgaggatcgttctgagatcgaacgcctcactgccaagatcgaggaattccgccagaagtctctcgattgggaaaaacagagactgatatag

SEQ ID NO: 33236 - DNA, 192 bp, Artificial Sequence
  derived and/or modified sequence
atggaggccctgctggagggcatccagaaccggggccacggcggcgggtttctgactagctgtgaggccgagcttcaagaactgatgaagcagatcgacatcatggtggcccacaaaaaatcagaatgggaagggagaacccacgctttggaaacttgcctcaaaattagagaacaagagttaaagtcttag

SEQ ID NO: 33237 - DNA, 1428 bp, Artificial Sequence
  derived and/or modified sequence
atggaagccctactcgagggcatccagaaccggggacacggagggggatttctgacctcatgcgaagccgagcttcaggaactgatgaaacagattgatattatggtcgctcataaaaaatcagagtgggagggcaggacccacgccctagagacatgcctgaagatcagggaacaggaactgaaatcgctgagaagccagctggatgtcacgcataaggaggtgggcatgctccatcagcaagtggaggaacacgaaaagatcaaacaggagatgacaatggagtacaaacaggaattgaagaaacttcacgaggaactgtgcatactaaaacggtcctatgagaagcttcaaaagaaacagatgagagaatttcgaggcaacaccaagaatcaccgggaggatcgcagcgagatcgagcgattaacagccaagattgaggaatttcgccagaaatccctggactgggaaaagcagaggctaatctatcaacagcaggtgagcagcctcgaggctcaaagaaaagccctggcagaacagagtgaaattatccaagcccagctcgtaaacagaaagcagaagcttgaatctgtggaacttagcagccagagcgaaattcagcatctgagcagtaagctcgagcgcgcaaacgacactatttgcgcgaacgagcttgagatcgaacgtctgaccatgcgggtgaatgacctcgttggtaccagcatgactgtcctacaggaacagcaacagaaagaggagaagctccgcgaatccgagaagctgctcgaggccctgcaggaagagaagagggagctcaaggcggcattacagagccaggaaaacctgattcacgaggctcgtattcagaaggagaagctgcaggaaaaggttaaagcgacaaacactcaacacgcagtcgaagctatttcacttgaatccgtctccgctacttgtaagcagctgtcccaggagctcatggaaaagtacgaggagttgaaacgcatggaggcgcataataatgagtacaaggccgaaataaaaaaactgaaggaacagattcttcagggtgagcaatcttacagctccgcgcttgagggaatgaagatggagatctcccatctgacacaggaactgcaccagagagacattactatcgcttcaacaaaagggagcagctctgatatggagaagaggctgagagccgagatgcagaaagccgaagacaaggctgtcgaacacaaggagatcctggaccagctggaatcactgaaactcgaaaaccgccacctcagtgagatggtgatgaaattggagctcggcctacatgagcggtggggctttaccatgctgagtagcctggtactaaattttggcatacaggcaatccgccagccccagcggccaaaggtcctggagttacaggtttag

SEQ ID NO: 33238 - DNA, 489 bp, Artificial Sequence
  derived and/or modified sequence
atggaagctctacttgagggcattcagaatagggggcacggaggcggttttctgacctcttgtgaggctgagcttcaggaactgatgaaacaaattgacatcatggtggcgcataaaaagtctgaatgggaagggaggacccacgcactggagacctgcctcaaaattcgggagcaggagcttaaatcgctgcggagtcagcttgatgtgactcacaaggaagtgggtatgctgcatcagcaggtagaggaacatgagaaaatcaaacaggagatgaccatggaatacaagcaggagctgaagaagctccacgaggagttgtgcatactgaagcggtcttatgagaaactacaaaaaaagcaaatgagagaatttcggggtaatacgaaaaatcaccgagaggatcgctctgaaatcgagcgcctcacagcgaaaatcgaggagttcagacagaagtctttggactgggagaaacaaagactgatttag

SEQ ID NO: 33239 - DNA, 192 bp, Artificial Sequence
  derived and/or modified sequence
atggaagcacttttggagggcatccagaaccggggacatggcggaggttttctgacttcctgcgaagccgaactgcaggagttgatgaaacaaattgacattatggtcgctcataaaaagagcgaatgggagggaagaactcatgctctagaaacttgcctgaaaattcgtgagcaagagcttaagagttag

SEQ ID NO: 33240 - DNA, 629 bp, Artificial Sequence
  derived and/or modified sequence
gatgtgggtgagttcatttgctcgcgtgcaggggaagtctggagaaggcattgtttcaattattaaaagtgtgggggcagtgggcggaacaaacgcgccgactacagaggctggacttgccaaaacaaaggggatttggtgatggaggctttgttagaaggaatacaaaatcgagggcatggtgggggatttttgacatcttgtgaagcagaactacaggagctcatgaaacagattgacataatggtggctcataaaaaatctgaatgggaaggacgtacacatgctctagaaacttgcttgaaaatccgtgaacaggaacttaagagtcttaggagtcagttggatgtgacacataaggaggttggaatgttgcatcagcaggtagaagaacatgaaaaaatcaagcaagagatgaccatggaatataagcaggagttgaagaaactacatgaagaattatgcatactgaagagaagctatgaaaagcttcagaaaaagcaaatgagggaattcagaggaaataccaaaaatcacagggaagatcggtctgaaattgagaggttaactgcaaaaatagaggaattccgtcagaaatcgctggactgggagaagcaacgcttgattta

SEQ ID NO: 33241 - DNA, 566 bp, Artificial Sequence
  derived and/or modified sequence
aacggcgggaaggctcaggggcgtgcttgcggcaaccctgtaaccgccggtgcgcaagttggaggggcaaggggctgccgtgtcctggtctggaggcggcccaggctgccttggtgattctggcttcgcggcctcatggcttgcggccggtttgcgcaacggcctgcgaaccaccaggcgcgtccccgccggcttgggtccgccccgaagcccagtccctcggcctggcccgctatgccctgcacactggcggagtctggcgtggcgcagcccggcgtggggttcggccccgccaggtggtcagcccttcctcggagtccaggtggctgggggcgcttcggagagtggccagttgccaaaacaaaggggatttggtgatggaggctttgttagaaggaatacaaaatcgagggcatggtgggggatttttgacatcttgtgaagcagaactacaggagctcatgaaacagattgacataatggtggctcataaaaaatctgaatgggaaggacgtacacatgctctagaaacttgcttgaaaatccgtgaacaggaacttaagagt

SEQ ID NO: 33242 - protein, 665 aa, Artificial Sequence
  derived and/or modified sequence
MQQKTKLFLQALKYSIPHLGKCMQKQHLNHYNFADHCYNRIKLKKYHLTKCLQNKPKISELARNIPSRSFSCKDLQPVKQENEKPLPENMDAFEKVRTKLETQPQEEYEIINVEVKHGGFVYYQEGCCLVRSKDEEADNDNYEVLFNLEELKLDQPFIDCIRVAPDEKYVAAKIRTEDSEASTCVIIKLSDQPVMEASFPNVSSFEWVKDEEDEDVLFYTFQRNLRCHDVYRATFGDNKRNERFYTEKDPSYFVFLYLTKDSRFLTINIMNKTTSEVWLIDGLSPWDPPVLIQKRIHGVLYYVEHRDDELYILTNVGEPTEFKLPPWACGFIMDTNSDPKNCPFQLCSPIRPPKYYTYKFAEGKLFEETGHEDPITKTSRVLRLEAKSKDGKLVPMTVFHKTDSEDLQKKPLLVHVYGAYGMDLKMNFRPERRVLVDDGWILAYCHVRGGGELGLQWHADGRLTKKLNGLADLEACIKTLHGQGFSQPSLTTLTAFSAGGVLAGALCNSNPELVRAVTLEAPFLDVLNTMMDTTLPLTLEELEEWGNPSSDEKHKNYIKRYCPYQNIKPQHYPSIHITAYENDERVPLKGIVSYTEKLKEAIAEHAKDTGEGYQTPNIILDIQPGGNHVIEDSHKKITAQIKFLYEELGLDSTSVFEDLKKYLKF

SEQ ID NO: 33243 - DNA, 1998 bp, Artificial Sequence
  derived and/or modified sequence
atgcaacagaaaacaaaacttttcctgcaggccttaaagtattctattcctcacctgggaaagtgcatgcagaagcagcatctgaatcattacaatttcgccgatcattgttacaatcgcatcaaactcaaaaagtatcatctgactaagtgtctgcagaataaacccaagatctctgaactggcccgaaatattcccagcaggagctttagctgcaaggatctgcagcccgtgaaacaagaaaatgagaaacccttacccgagaacatggatgccttcgagaaggtcagaacaaagctggagacccaaccacaggaagaatatgagattataaacgtggaagtgaagcatggcgggtttgtgtattatcaggaggggtgctgcttagtgcgatcaaaggacgaggaggccgacaatgataactatgaagtcctcttcaacttggaggaactcaagttagaccagcccttcattgactgtatcagagtggctcctgatgagaaatatgtggctgcaaaaattcggactgaagatagcgaggcctctacttgcgtgattatcaagttgagtgaccagcccgtgatggaggcttccttcccaaatgtctcatcattcgaatgggttaaggatgaagaagacgaagacgtactcttctataccttccagagaaatctgcgttgccatgacgtgtacagagccacattcggagacaacaaacggaacgaaaggttttataccgagaaagacccttcatacttcgtatttctctatttaacaaaggatagtagatttctgaccatcaacattatgaataagactaccagtgaggtgtggttaatagacggcctgagcccctgggaccctccagtgctgattcagaagcgcatacacggcgtgctttactatgtggagcatcgggacgatgagctttacattctcaccaacgtgggtgagcccactgaatttaagctccctccatgggcttgtggatttataatggacaccaacagcgatcctaagaactgtccatttcagctgtgctctcccattcgcccccccaaatattatacgtataaatttgccgaaggcaagctttttgaagaaactggccacgaggaccccatcaccaagacaagtcgggtgcttaggctagaggccaaatctaaagatggcaagcttgtgcctatgactgtttttcacaagacggattcggaggatctacaaaaaaaaccgttgctggtgcatgtgtacggagcctatggaatggatctgaaaatgaacttcaggccagagcgcagggtccttgttgatgatggctggatattggcatactgccacgtgaggggcggtggcgagctgggcctgcaatggcacgctgatggacggctgactaaaaagctgaacggcttagcagacttagaggcatgtataaaaacattgcacggccaggggtttagccagccaagcctgacgactcttacagctttcagtgccggcggagtcctggcaggagctctatgcaattccaatcccgaactcgttcgagctgtgaccctggaggcacccttccttgacgttctgaacaccatgatggacaccaccctgccattgaccctggaggagttagaggagtggggaaatcctagcagcgatgaaaaacacaaaaattacattaagcggtactgcccctaccagaatattaagccccaacattacccaagtatccacattactgcatacgagaatgatgaaagggtcccgcttaaaggcatagtatcctacaccgagaagctgaaagaagcgatcgctgaacacgctaaggatactggcgaaggataccagacaccaaacatcatcctcgacatccagcctggggggaatcatgtgatcgaagacagccacaaaaagatcacagcacaaatcaagttcttgtacgaggaactggggctagattcaacctccgtgttcgaagacttgaagaagtacctgaaattctag

SEQ ID NO: 33244 - DNA, 1998 bp, Artificial Sequence
  derived and/or modified sequence
atgcagcagaagaccaagctgttcctgcaggccctgaagtacagcatcccccacctgggcaagtgcatgcagaagcagcacctgaaccactacaactttgctgaccactgctacaaccgcatcaagctgaagaagtaccacctgaccaagtgcctgcagaacaagcccaagatcagcgagctggccaggaacatccccagccgctccttcagctgcaaggacctgcagcctgtgaagcaggagaatgagaagcccctgcctgagaacatggatgcctttgagaaggtgaggaccaagctggagacccagccccaggaggagtatgagatcatcaacgtggaggtgaagcatggaggctttgtgtactaccaggagggctgctgcctggtgcgcagcaaggatgaggaggccgacaatgacaactatgaggtgctcttcaacctggaggagctgaagctggaccagcccttcatcgactgcatccgggtggccccagatgagaagtatgtggccgccaagatcagaacagaagattctgaggccagcacctgtgtgatcatcaagctgagtgaccagcctgtgatggaggccagcttccccaacgtgagcagctttgagtgggtgaaggatgaggaggatgaagatgtgctcttctacaccttccagaggaacctgcgctgccatgatgtgtaccgggccacctttggagacaacaagagaaatgaacgcttctacacagagaaggaccccagctactttgtgttcctgtacctgaccaaggacagccgcttcctgaccatcaacatcatgaacaagaccaccagcgaggtgtggctgattgatggcctgagcccctgggacccccctgtgctgatccagaagagaattcatggagtgctgtactacgtggagcacagagatgatgagctgtacatcctgaccaacgtgggggagcccacagagttcaagctgcccccctgggcctgtggcttcatcatggacaccaacagcgaccccaagaactgccccttccagctgtgcagccccatccggccccccaagtactacacctacaagtttgctgagggcaagctgtttgaggagactggacatgaggaccccatcaccaagaccagccgggtgctgcggctggaggccaagagcaaggatggcaagctggtgcccatgacagtgttccacaagacagacagcgaggacctgcagaagaagcccctgctggtgcacgtgtatggagcctacggcatggacctgaagatgaacttccggcctgagcggcgggtgctggtggatgatggctggatcctggcctactgccacgtgcggggcggcggggagctgggcctgcagtggcatgctgatggccgcctgaccaagaagctgaatggcctggccgacctggaggcctgcatcaagaccctgcacggccagggcttcagccagcccagcctgaccaccctgacagccttctctgctgggggcgtgctggccggggccctgtgcaacagcaaccctgagctggtgcgggctgtgaccctggaggcccccttcctggatgtgctgaacaccatgatggacaccaccctgcccctgaccctggaggagctggaggagtggggcaaccccagcagtgatgagaagcacaagaactacatcaagcgctactgcccctaccagaacatcaagccccagcactaccccagcatccacatcacagcctatgaaaatgatgagcgggtgcccctgaagggcatcgtgtcctacacagagaagctgaaggaggccatcgccgagcacgccaaggacacaggagagggctaccagacccccaacatcatcctggacatccagcccggcggcaaccacgtgattgaggacagccacaagaagatcacagcccagatcaagttcctgtatgaggagctgggcctggacagcacctctgtgtttgaggacctgaagaagtacctgaagttctag

SEQ ID NO: 33245 - DNA, 1998 bp, Artificial Sequence
  derived and/or modified sequence
atgcagcagaagaccaagctgttcctgcaggccctgaagtacagcatcccccatctgggaaagtgcatgcagaaacagcacctgaaccactataacttcgcggatcactgctataataggatcaaactcaagaagtatcacctcaccaaatgtcttcagaataaacccaaaatttccgagctggccaggaacatcccctcacggagcttcagttgtaaagacctgcagcccgtgaaacaggaaaatgagaagcctctcccagagaatatggacgccttcgagaaagtacgcacgaaattagagacgcaaccgcaggaagagtatgagatcatcaatgtggaggttaaacacggaggctttgtctactaccaagagggctgctgcctggttaggtccaaggacgaagaggcagacaacgacaactacgaggtcttatttaatttggaggagctgaaacttgaccaaccattcattgattgcattcgcgtggcacctgatgagaaatacgttgctgccaagattaggacagaagattcagaggcttccacctgcgtgatcatcaagctatccgatcagcctgtgatggaggcatcatttccgaacgtctcgagcttcgagtgggtcaaggacgaggaggacgaagatgtgctgttttacacgttccagcgcaatttgcgctgccacgacgtgtatagggctacgtttggggataacaaacgcaatgagcgattctacacagaaaaggacccctcatacttcgtatttctctatctgactaaagattctcgctttctcaccatcaatatcatgaacaagactacctctgaagtctggctaattgacgggttgtcaccatgggacccgcctgtactcattcagaaacgaattcacggggtcctttactacgtcgaacaccgtgacgacgaattatatatcctcactaacgtaggtgagcccacagaattcaaactgcctccatgggcatgtggctttatcatggatacaaatagtgaccccaaaaactgtccatttcaactttgcagtccaatacgacctcccaagtattatacatataagttcgcggaaggcaaactctttgaagaaaccgggcacgaggatccaatcactaaaactagtagggtgttaagactcgaagccaaatccaaagatggcaaacttgtgccaatgaccgtttttcacaagactgacagcgaggatctccagaagaagcctcttctcgtgcacgtttatggggcctacggtatggatttgaaaatgaacttccgtcccgaacgccgcgtactggtagacgatggctggatactggcctattgtcacgtgagaggcggtggcgagctgggattgcagtggcacgcagatggtaggctaaccaagaaacttaacggcctcgcagacctggaggcctgcataaagacactccatggccaggggtttagccagccttccctcaccacgctcacagcctttagtgccggaggggtgctggccggcgctctttgcaatagcaaccctgagttagtgagggccgtgactctcgaggcgccatttcttgatgttcttaacaccatgatggataccacattgccactgacccttgaggagctggaggagtgggggaaccctagttccgacgagaagcataagaattatatcaaaaggtattgcccttatcagaatatcaagccccagcactatccttctatccatatcaccgcctatgaaaacgatgagagggtgccactaaagggcattgtctcttacaccgaaaaacttaaggaggccatcgccgagcacgccaaagacactggggagggttaccaaacaccaaatatcatacttgacatccagcctggcggaaaccatgttatagaggatagccacaagaagatcaccgcccagatcaaattcctctatgaggagctcggcctcgattctactagtgtcttcgaagacctcaagaaatatctgaaattttag

SEQ ID NO: 33246 - DNA, 1998 bp, Artificial Sequence
  derived and/or modified sequence
atgcagcagaagactaagctgtttctccaggctctgaagtattccatacctcacctcgggaagtgtatgcaaaagcaacacctcaaccattacaactttgccgaccattgctacaatagaatcaaactgaagaaatatcatctaaccaagtgtttacagaacaagcccaaaattagcgaactggcccgaaacattcctagtcggtctttctcttgtaaggacctacagcctgtcaagcaggaaaatgaaaagccactgccggagaacatggatgccttcgaaaaggtgcggacaaaactcgaaactcagccccaagaggaatatgagatcataaatgttgaagtaaaacacggcggatttgtatactaccaggagggatgctgcctggttcgaagtaaggatgaagaggcggacaacgacaactatgaggtactgtttaacctcgaggagctaaagctggaccaaccctttatagattgcattcgggtggctcccgacgaaaagtacgtggcggctaagatcagaacagaagattctgaggctagtacttgcgtgataataaaactgagcgaccagccagttatggaggcatcttttccgaacgtcagcagtttcgagtgggttaaggatgaggaggatgaggatgtcttgttctacaccttccagagaaacttgcgttgtcatgacgtttaccgcgcaacgtttggtgataacaagcggaacgaacgcttttatactgaaaaagacccttcatacttcgtgttcctctaccttaccaaggattcaaggttcctcacgatcaacataatgaacaagacaacatctgaggtctggttgattgacggcctcagcccctgggacccacccgtgctgatccagaagaggatacatggcgtcttgtactacgtcgaacatagggacgatgaactttatatcctgaccaacgtgggcgaacccaccgagtttaagctgccgccatgggcctgcggattcatcatggatactaatagtgatccgaaaaattgtccattccaactgtgcagtcccattaggcccccaaagtactatacttataagtttgctgaaggaaaacttttcgaggagactgggcacgaggatccgattaccaagacctctagggtgctgcggctagaagcgaagagtaaagacggcaagcttgtgcctatgaccgtgtttcataagacagatagtgaggacctccaaaagaaacccctcttggtgcacgtgtacggtgcgtacggtatggacttgaaaatgaactttagacccgagcgacgggttctggtggacgacggatggattctagcttattgccatgtacgcggtggcggagagctggggctgcagtggcacgctgacggccgtttaacaaagaagctgaatgggctcgctgacttagaggcatgcatcaagacactgcacggacagggtttttctcaaccttccctgaccaccctcactgcattttccgcaggcggagttttggccggagcactttgtaacagcaaccccgagttggtgcgcgctgtgactctcgaggcacccttcttggacgtgctgaatacaatgatggacaccaccctccctctcacactcgaagagctggaggaatggggaaatccgtcctctgacgagaagcacaagaattacatcaaaagatactgtccttatcagaatatcaaacctcagcactacccttcgatccacattactgcatacgagaacgatgagcgggtgcctcttaagggaattgtctcctacacagagaagttgaaggaagcaatcgcggagcacgccaaggatacaggagaaggctatcagactcctaacatcattctcgatatccagcccggtggcaatcacgttattgaagactcccacaagaaaattaccgctcagatcaagttcctctatgaagagcttggactcgattccacgagtgtgtttgaggacctgaagaaatacctcaagttctag

SEQ ID NO: 33247 - DNA, 2315 bp, Artificial Sequence
  derived and/or modified sequence
cccaaaaggagcataaaccagggactttgatatcatgcagcagaagaccaaattatttctccaagctttgaagtatagtattcctcaccttggaaaatgcatgcagaaacagcatttgaatcactataacttcgctgatcattgttacaatagaataaaattgaaaaaatatcacctaaccaagtgtcttcagaataaacccaagatatcagagttagcaagaaacatcccaagtcggagcttctcatgtaaggatcttcagcctgttaaacaagaaaacgaaaaaccccttccagaaaacatggatgcatttgaaaaagtgagaacaaaattagaaacacagccacaagaagaatatgaaatcatcaatgtggaagttaaacatggtggttttgtttattaccaagaaggttgttgcttggttcgttccaaagatgaagaagcagacaatgataattatgaagttttattcaatttggaggaacttaagttagaccagcccttcattgattgtatcagagttgctccagatgaaaaatatgtggctgccaagataagaactgaagattctgaagcatctacctgtgtaattataaagctcagcgatcagcccgtaatggaagcttctttcccgaatgtgtccagttttgaatgggtaaaggacgaggaagatgaagatgttttattctacaccttccagaggaaccttcgctgtcatgacgtatatcgagccacttttggtgataacaaacgtaatgaacgcttttacacagaaaaagacccaagctactttgttttcctttatcttacaaaagacagtcgtttcctcaccataaatattatgaacaagactacttctgaagtgtggttgatagatggcctgagcccttgggacccaccagtacttatccagaagcgaatacatggggtcctttactatgttgaacacagagatgatgaattatacattctcactaatgttggagaacctacagaatttaagctccctccttgggcctgtggattcataatggatacaaattctgacccaaagaactgcccctttcaactttgctctccaatacgtcccccaaaatattacacatacaagtttgcagaaggcaaactgtttgaggaaactgggcatgaagacccaatcacaaagactagtcgcgttttacgtctagaagccaaaagcaaggatggaaaattagtgccaatgactgttttccacaaaactgactctgaggacttgcagaagaaacctctcttggtacatgtatatggagcttatggaatggatttgaaaatgaatttcaggcctgagaggcgggtcctggtggatgatggatggatattagcatactgccatgttcgaggtggtggtgagttaggcctccagtggcacgctgatggccgcctaactaaaaaactcaatggccttgctgatttagaggcttgcattaagacgcttcatggccaaggcttttctcagccaagtctaacaaccctgactgctttcagtgctggaggggtgcttgcaggagcattgtgtaattctaatccagagctggtgagagcggtgactttggaggcacctttcttggatgttctcaacaccatgatggacactacacttcctctgacattagaagaattagaagaatgggggaatccttcatctgatgaaaaacacaagaactacataaaacgttactgtccctatcaaaatattaaacctcagcattatccttcaattcacataacggcatatgaaaacgatgaacgggtacctctgaaaggaattgtaagttatactgagaaactcaaggaagccatcgcggagcatgctaaggacacaggtgaaggctatcagacccctaatattattctagatattcagcctggaggcaatcatgtaattgaggattctcacaaaaagattacagcccaaattaaattcctgtacgaggaacttggacttgacagcaccagtgttttcgaggatcttaagaaatacctgaaattctgaaacactgcattcaactgggaattggaaacacactgaaatatttcatagtcttacttccaattgagttagcaaaaaaaaaattaataacttgagacttttaagttattaattttttaaaatgtgcttctccatctaaattttgcttagtctacatctcacttgcttatactattctctccattgatgcacatgcccattaacctaggaaagtaattttcaaatcatgctccttagaaggatgtggagtagagggaagggaaggattggtgatagcagagctcca

SEQ ID NO: 33248 - DNA, 1998 bp, Artificial Sequence
  derived and/or modified sequence
atgcagcagaagaccaagctgttcctgcaggccctgaagtacagcatcccccacctgggcaagtgcatgcagaagcagcacctgaaccactacaacttcgccgaccactgctacaacagaatcaagctgaagaagtaccacctgaccaagtgcctgcagaacaagcccaagatcagcgagctggccagaaacatccccagcagaagcttcagctgcaaggacctgcagcccgtgaagcaggagaacgagaagcccctgcccgagaacatggacgccttcgagaaggtgagaaccaagctggagacccagccccaggaggagtacgagatcatcaacgtggaggtgaagcacggcggcttcgtgtactaccaggagggctgctgcctggtgagaagcaaggacgaggaggccgacaacgacaactacgaggtgctgttcaacctggaggagctgaagctggaccagcccttcatcgactgcatcagagtggcccccgacgagaagtacgtggccgccaagatcagaaccgaggacagcgaggccagcacctgcgtgatcatcaagctgagcgaccagcccgtgatggaggccagcttccccaacgtgagcagcttcgagtgggtgaaggacgaggaggacgaggacgtgctgttctacaccttccagagaaacctgagatgccacgacgtgtacagagccaccttcggcgacaacaagagaaacgagagattctacaccgagaaggaccccagctacttcgtgttcctgtacctgaccaaggacagcagattcctgaccatcaacatcatgaacaagaccaccagcgaggtgtggctgatcgacggcctgagcccctgggacccccccgtgctgatccagaagagaatccacggcgtgctgtactacgtggagcacagagacgacgagctgtacatcctgaccaacgtgggcgagcccaccgagttcaagctgcccccctgggcctgcggcttcatcatggacaccaacagcgaccccaagaactgccccttccagctgtgcagccccatcagaccccccaagtactacacctacaagttcgccgagggcaagctgttcgaggagaccggccacgaggaccccatcaccaagaccagcagagtgctgagactggaggccaagagcaaggacggcaagctggtgcccatgaccgtgttccacaagaccgacagcgaggacctgcagaagaagcccctgctggtgcacgtgtacggcgcctacggcatggacctgaagatgaacttcagacccgagagaagagtgctggtggacgacggctggatcctggcctactgccacgtgagaggcggcggcgagctgggcctgcagtggcacgccgacggcagactgaccaagaagctgaacggcctggccgacctggaggcctgcatcaagaccctgcacggccagggcttcagccagcccagcctgaccaccctgaccgccttcagcgccggcggcgtgctggccggcgccctgtgcaacagcaaccccgagctggtgagagccgtgaccctggaggcccccttcctggacgtgctgaacaccatgatggacaccaccctgcccctgaccctggaggagctggaggagtggggcaaccccagcagcgacgagaagcacaagaactacatcaagagatactgcccctaccagaacatcaagccccagcactaccccagcatccacatcaccgcctacgagaacgacgagagagtgcccctgaagggcatcgtgagctacaccgagaagctgaaggaggccatcgccgagcacgccaaggacaccggcgagggctaccagacccccaacatcatcctggacatccagcccggcggcaaccacgtgatcgaggacagccacaagaagatcaccgcccagatcaagttcctgtacgaggagctgggcctggacagcaccagcgtgttcgaggacctgaagaagtacctgaagttctag

SEQ ID NO: 33249 - protein, 661 aa, Artificial Sequence
  derived and/or modified sequence
MQQKTKLFLQALKYSIPHLGKCMQKQHLNHYNFADHCYNRIKLKKYHLTKCLQNKPKISELARNIPSRSFSCKDLQPVKQENEKPLPENMDAFEKVRTKLETQPQEEYEIINVEVKHGGFVYYQEGCCLVRSKDEEADNDNYEVLFNLEELKLDQPFIDCIRVAPDEKYVAAKIRTEDSEASTCVIIKLSDQPVMEASFPNVSSFEWVKDEEDEDVLFYTFQRNLRCHDVYRATFGDNKRNERFYTEKDPSYFVFLYLTKDSRFLTINIMNKTTSEVWLIDGLSPWDPPVLIQKRIHGVLYYVEHRDDELYILTNVGEPTEFKLMRTAADTPAIMNWDLFFTMKRNTKVIDLDMFKDHCVLFLKHSNLLYVNVIGLADDSVRSLKDGKLVPMTVFHKTDSEDLQKKPLLVHVYGAYGMDLKMNFRPERRVLVDDGWILAYCHVRGGGELGLQWHADGRLTKKLNGLADLEACIKTLHGQGFSQPSLTTLTAFSAGGVLAGALCNSNPELVRAVTLEAPFLDVLNTMMDTTLPLTLEELEEWGNPSSDEKHKNYIKRYCPYQNIKPQHYPSIHITAYENDERVPLKGIVSYTEKLKEAIAEHAKDTGEGYQTPNIILDIQPGGNHVIEDSHKKITAQIKFLYEELGLDSTSVFEDLKKYLKF

SEQ ID NO: 33250 - protein, 151 aa, Artificial Sequence
  derived and/or modified sequence
MQQKTKLFLQALKYSIPHLGKCMQKQHLNHYNFADHCYNRIKLKKYHLTKCLQNKPKISELARNIPSRSFSCKDLQPVKQENEKPLPENMDAFEKVRTKLETQPQEEYEIINVEVKHGGFVYYQEGCCLVRSKDEEADNDNYEVLFNLEEL

SEQ ID NO: 33251 - DNA, 1986 bp, Artificial Sequence
  derived and/or modified sequence
atgcaacaaaagactaaactcttcctgcaggctctgaaatatagcatcccccatctgggtaaatgtatgcagaagcagcacctgaatcactataactttgctgatcattgctacaatcgcatcaagttgaaaaagtatcaccttactaaatgcctgcagaataagcctaaaatttcggaattagcaaggaacatcccaagtcgctcgttcagctgcaaagacctacaaccagttaaacaggagaatgagaaaccgctgcctgaaaatatggatgcattcgaaaaagttcgcacgaagctggaaacacagccccaggaggagtatgagattataaatgtggaagtgaagcacggtggttttgtgtattaccaggagggatgctgcctcgtgaggagcaaggacgaggaagcggacaacgacaattacgaagtgctgttcaatctggaagaactgaagcttgatcagccattcatcgactgcatccgcgtagctccagacgagaagtacgtggcagccaaaatcagaacagaggactctgaggcaagcacatgtgtaataatcaagctgtcggaccaaccagtgatggaggcctcatttcccaatgtcagctccttcgagtgggtgaaagatgaggaggatgaagatgtcctgttctacacattccagcgcaatctgagatgccatgatgtatatagagctacgtttggtgataacaagcgcaacgaaaggttctacactgagaaagacccaagttactttgtgttcctatacctcactaaggactctaggtttcttaccatcaatatcatgaataagactacaagtgaagtgtggctgattgacgggcttagcccttgggatccaccagtgcttattcagaagcgcatacacggcgtgctttactacgtggagcaccgagatgacgagctgtacatacttacaaacgtgggggaacccaccgagtttaaactcatgagaacagcggcagacacccccgctatcatgaattgggatctcttttttaccatgaagcggaacacaaaagtcatagatctagacatgttcaaggaccactgcgtgctcttcctgaaacacagcaatctcctgtacgtcaatgttatcggcctagcagacgattctgtgaggagcctcaaggacgggaagctggtgcctatgactgttttccacaaaactgattcagaagatcttcagaagaagcctttgcttgtgcatgtgtatggtgcttacgggatggaccttaaaatgaactttcgacctgagcgaagggtgctggttgatgatgggtggatcctggcatactgccatgttcggggcggaggggagcttgggctacagtggcacgcagacggccgccttactaaaaagctcaacggtctggccgacctcgaagcctgtatcaagacattacatggccaagggttcagccaacccagcctcacgacactgaccgccttctcagccggcggcgtgctcgccggggcgctatgtaactctaaccccgagttggtccgcgcagtgacccttgaggcacccttccttgatgtcttgaatacaatgatggatactacactgccactgaccctcgaagagctggaggaatggggaaaccccagtagcgacgaaaaacacaaaaactacatcaagcggtattgcccatatcagaacataaagccccagcattatcccagtatccatatcactgcctacgaaaacgatgagagggttccgctgaagggcatcgtttcttacacagagaaactgaaagaggcgatcgctgagcatgctaaagacacaggtgagggctatcagaccccaaatattattctagatatacaaccaggaggtaaccacgtgattgaagattcccataaaaagattaccgcccagattaagtttctctacgaagagctcggactggattccacttccgtatttgaggatctgaagaaatacctgaaattttag

SEQ ID NO: 33252 - DNA, 456 bp, Artificial Sequence
  derived and/or modified sequence
atgcagcaaaagacaaagttattcttgcaagcacttaaatatagtattcctcacttgggaaaatgtatgcagaaacagcacctgaaccactataatttcgcagatcactgttataacagaatcaagctgaagaagtaccatctgactaagtgccttcagaataaacctaaaatttcggaactggcccgtaatattccgagtaggagtttctcctgcaaagacctgcagccagtaaaacaggaaaacgagaaaccgctccctgagaatatggacgcatttgagaaggtgaggaccaagttagagacgcaaccacaagaggagtacgagatcattaacgttgaagttaaacacggagggtttgtgtactaccaggaagggtgctgcctagtccgctcaaaggacgaggaagccgacaatgataactatgaggtactcttcaacctggaagagctgtag

SEQ ID NO: 33253 - DNA, 1986 bp, Artificial Sequence
  derived and/or modified sequence
atgcagcagaagaccaagctgttcctgcaggccctgaagtacagcatcccccacctgggcaagtgcatgcagaagcagcacctgaaccactacaactttgctgaccactgctacaaccgcatcaagctgaagaagtaccacctgaccaagtgcctgcagaacaagcccaagatcagcgagctggccaggaacatccccagccgctccttcagctgcaaggacctgcagcctgtgaagcaggagaatgagaagcccctgcctgagaacatggatgcctttgagaaggtgaggaccaagctggagacccagccccaggaggagtatgagatcatcaacgtggaggtgaagcatggaggctttgtgtactaccaggagggctgctgcctggtgcgcagcaaggatgaggaggccgacaatgacaactatgaggtgctcttcaacctggaggagctgaagctggaccagcccttcatcgactgcatccgggtggccccagatgagaagtatgtggccgccaagatcagaacagaagattctgaggccagcacctgtgtgatcatcaagctgagtgaccagcctgtgatggaggccagcttccccaacgtgagcagctttgagtgggtgaaggatgaggaggatgaagatgtgctcttctacaccttccagaggaacctgcgctgccatgatgtgtaccgggccacctttggagacaacaagagaaatgaacgcttctacacagagaaggaccccagctactttgtgttcctgtacctgaccaaggacagccgcttcctgaccatcaacatcatgaacaagaccaccagcgaggtgtggctgattgatggcctgagcccctgggacccccctgtgctgatccagaagagaattcatggagtgctgtactacgtggagcacagagatgatgagctgtacatcctgaccaacgtgggggagcccacagagttcaagctgatgaggacagctgctgacaccccagccatcatgaactgggacctcttcttcaccatgaagaggaacaccaaggtgattgacctggacatgttcaaggaccactgtgtgctcttcctgaagcacagcaacctgctgtatgtgaatgtcatcggcctggctgatgacagcgtgcgcagcctgaaggatggcaagctggtgcccatgacagtgttccacaagacagacagcgaggacctgcagaagaagcccctgctggtgcacgtgtatggagcctacggcatggacctgaagatgaacttccggcctgagcggcgggtgctggtggatgatggctggatcctggcctactgccacgtgcggggcggcggggagctgggcctgcagtggcatgctgatggccgcctgaccaagaagctgaatggcctggccgacctggaggcctgcatcaagaccctgcacggccagggcttcagccagcccagcctgaccaccctgacagccttctctgctgggggcgtgctggccggggccctgtgcaacagcaaccctgagctggtgcgggctgtgaccctggaggcccccttcctggatgtgctgaacaccatgatggacaccaccctgcccctgaccctggaggagctggaggagtggggcaaccccagcagtgatgagaagcacaagaactacatcaagcgctactgcccctaccagaacatcaagccccagcactaccccagcatccacatcacagcctatgaaaatgatgagcgggtgcccctgaagggcatcgtgtcctacacagagaagctgaaggaggccatcgccgagcacgccaaggacacaggagagggctaccagacccccaacatcatcctggacatccagcccggcggcaaccacgtgattgaggacagccacaagaagatcacagcccagatcaagttcctgtatgaggagctgggcctggacagcacctctgtgtttgaggacctgaagaagtacctgaagttctag

SEQ ID NO: 33254 - DNA, 456 bp, Artificial Sequence
  derived and/or modified sequence
atgcagcagaagaccaagctgttcctgcaggccctgaagtacagcatcccccacctgggcaagtgcatgcagaagcagcacctgaaccactacaactttgctgaccactgctacaaccgcatcaagctgaagaagtaccacctgaccaagtgcctgcagaacaagcccaagatcagcgagctggccaggaacatccccagccgctccttcagctgcaaggacctgcagcctgtgaagcaggagaatgagaagcccctgcctgagaacatggatgcctttgagaaggtgaggaccaagctggagacccagccccaggaggagtatgagatcatcaacgtggaggtgaagcatggaggctttgtgtactaccaggagggctgctgcctggtgcgcagcaaggatgaggaggccgacaatgacaactatgaggtgctcttcaacctggaggagctgtag

SEQ ID NO: 33255 - DNA, 1986 bp, Artificial Sequence
  derived and/or modified sequence
atgcagcagaagaccaagctgttcctgcaggccctgaagtacagcattccacatttggggaaatgtatgcagaagcaacatctcaatcattacaattttgccgaccactgctacaatcgaattaagttaaagaaatatcacctgacaaaatgccttcagaacaaaccaaagattagcgaattggccagaaatatcccatcccgttcattctcctgcaaggacctccaacctgtgaagcaggagaacgagaaacccctgcctgagaatatggacgcttttgaaaaagtgagaactaagctcgagactcagcctcaagaagaatacgagatcattaatgtagaagtgaaacacggcggttttgtgtattatcaagaagggtgttgcctcgtgcgctccaaggatgaggaagccgacaacgacaattatgaggttctttttaacctggaggaactgaagctcgaccagccttttatcgactgtatcagagtggctcccgacgaaaaatatgtcgctgccaagattagaacagaggactcggaagcctccacgtgtgtcatcataaaactgagcgatcagccagtgatggaagcctcctttccaaacgtttctagtttcgaatgggtgaaagatgaagaggatgaggatgttttgttctatacctttcagcgcaacttgcggtgtcatgacgtgtacagggctactttcggggacaacaaacgtaatgagcgattttatactgagaaagatccaagttactttgtgttcttatatctcaccaaggatagccggtttttgaccatcaacatcatgaataagaccacctcggaggtgtggctcatcgacggtctgagcccatgggatccccccgtgctcatccagaagcgaatccatggcgtactgtactacgtggaacatcgggacgatgagctttatattctaaccaacgttggagagcctacagagtttaagctcatgcgcacagccgctgacacaccagcgattatgaattgggacctgttctttactatgaaaagaaacacaaaggtaatcgaccttgatatgtttaaggatcactgtgtgctgttcctcaagcattccaatctgttgtatgtcaacgtcatcggactagcggatgatagcgtgcgtagtcttaaggacggcaagctcgtccccatgaccgtcttccacaagacagatagcgaagatctgcagaagaagccactccttgttcatgtctatggcgcttacggcatggatctcaagatgaatttcaggcccgagagacgagtgctcgtcgatgacggttggatcctggcctactgccatgtccggggcgggggggagttgggtctgcaatggcacgcagatgggcggctgacaaaaaagctgaacggtcttgcggacctggaggcatgcattaaaacactacatggtcaaggtttttcacaaccctccctaacgaccctcaccgctttctcagccggcggcgtcctggccggagctctctgtaacagcaatcccgagctcgtgcgcgctgtaacattggaggcaccttttctggatgttctgaacacgatgatggacactactttgcccctgaccttagaggagctggaagagtggggtaatcccagctctgacgaaaagcacaaaaactacatcaaaaggtattgtccctaccaaaacataaagccccaacattatccatccattcacattaccgcgtacgagaatgatgaacgggtgcccctgaaaggaatcgtgagctatactgagaagctgaaagaagccattgcagaacatgctaaggataccggagaaggataccaaacgcctaacattatcctggatatccagccaggcggaaatcacgtgatcgaggacagtcacaaaaagatcaccgcccagatcaaattcctgtacgaagagctgggcctcgattctacctcagtgttcgaggacctgaaaaagtaccttaagttttag

SEQ ID NO: 33256 - DNA, 456 bp, Artificial Sequence
  derived and/or modified sequence
atgcagcagaagaccaagctgttcctgcaggccctgaagtacagcattccacatcttgggaaatgtatgcagaaacagcatctgaaccattataattttgctgaccattgctataaccgcataaagctgaagaagtaccatcttaccaaatgtctgcagaacaaaccaaagatttcagaactggcacggaatattccgtccaggagcttctcatgcaaggatcttcagccggtgaagcaggaaaacgagaagccactgcccgaaaacatggatgcattcgaaaaggtgcgtactaagctagagacgcagccccaagaggaatacgaaatcataaatgtggaggtgaaacacggcggcttcgtgtactatcaggagggatgctgtcttgtgagatctaaggatgaagaggcagacaacgacaactacgaggtcctttttaacctggaagagctgtag

SEQ ID NO: 33257 - DNA, 1986 bp, Artificial Sequence
  derived and/or modified sequence
atgcagcagaaaacaaagctgtttctgcaagcccttaaatatagtatcccccatcttggaaagtgcatgcagaagcagcacctgaaccattataattttgcagatcactgttacaatcgcattaaactgaaaaagtaccacttaactaagtgtctgcaaaataagcccaaaatcagcgaactagctcgaaatatccctagtcgaagctttagttgtaaagacctacagcctgttaaacaagagaatgagaagcccttgcccgagaacatggatgcgttcgagaaggttcgaactaaactcgagacgcagccacaggaagagtatgagatcatcaatgtcgaggtgaagcatggaggtttcgtgtactatcaagaagggtgctgcctcgtgaggagcaaggatgaagaggcagacaatgataattacgaagtactctttaatttggaagagctcaagttggaccaaccttttatcgattgtattcgcgtggcccctgatgaaaaatacgtggccgctaagatcagaaccgaggatagcgaggcatctacctgtgtgatcattaagctgagcgatcagcctgtgatggaagcgtcttttcccaacgtgagctcattcgagtgggtcaaagatgaggaagatgaagatgtgctcttttacacctttcagaggaacctccggtgccatgatgtctatcgtgccacattcggagacaataagcggaacgaacgattttacactgaaaaagacccttcatacttcgtgtttctgtatcttacgaaagatagtagattcctgacgattaacatcatgaataagacaacaagcgaggtgtggctgatcgatgggctgtccccatgggatccccctgttctgatccagaagaggatccacggcgtgctttactatgttgaacatcgagatgatgagctgtacatactcacgaacgtgggagaaccaacagaatttaagctgatgcgtacggctgctgatactccagcgataatgaattgggatttgttttttacaatgaaacgaaacacaaaggtgatcgacctggacatgtttaaggaccactgtgtcctgtttttaaagcatagcaatctgttatacgtgaatgtgatcggtctcgcagatgactctgtcaggagtcttaaggatggaaaactcgtgccgatgactgtttttcacaagaccgacagcgaggatctccagaagaaacctttgctggtgcacgtctacggagcatacggaatggatttgaaaatgaacttccgccctgaacggagagtgctcgttgacgacggctggatcctggcctactgtcatgtccgtggagggggagaactgggcctgcagtggcacgcggacgggcgactgacaaaaaagctgaatggactggcagacctggaggcatgcattaagacacttcacggacaaggtttttcccagccgtccctaacaaccctcactgcattttctgccggaggcgtcctggccggagcactgtgcaacagtaacccagaattggtgcgtgctgtcacgttagaggcaccttttctcgacgtcctcaacactatgatggataccacgttgcccctcacactagaggaactggaggaatggggaaatccatccagcgacgagaagcataaaaattacattaagcgatattgcccctatcagaacataaaacctcagcactacccatcaatccatattacagcgtacgaaaacgacgaaagagtacctttgaaaggtatcgtttcatacaccgagaaactgaaggaggccattgcagagcacgcaaaagacactggtgagggttatcaaacgccaaatatcatcttggatatccagccaggagggaatcatgtgattgaagattcccacaagaaaattacagcccagatcaagttcctatatgaagagttaggactggatagcacgtcagtttttgaggatttaaaaaaatatctgaaattttag

SEQ ID NO: 33258 - DNA, 456 bp, Artificial Sequence
  derived and/or modified sequence
atgcaacagaagacaaagttgtttctgcaggcactgaagtattcgattccacatcttgggaaatgtatgcaaaaacagcatctcaaccactacaacttcgctgaccactgttataatcgaatcaaactgaaaaagtaccacttgacaaaatgtcttcagaataagccaaagatctccgaactagctcgaaatatcccctcgaggagtttctcctgcaaggacttgcagcctgttaaacaggaaaatgaaaaacccctgcccgagaacatggacgcattcgagaaggtacgtactaaactggaaacccagccacaggaagagtatgagattatcaacgtggaagttaaacacggcggattcgtatattaccaggaagggtgctgtctggtgcggtctaaagacgaggaagctgacaacgacaactacgaagtgctgtttaacctggaagaactgtag

SEQ ID NO: 33259 - DNA, 2308 bp, Artificial Sequence
  derived and/or modified sequence
cccaaaaggagcataaaccagggactttgatatcatgcagcagaagaccaaattatttctccaagctttgaagtatagtattcctcaccttggaaaatgcatgcagaaacagcatttgaatcactataacttcgctgatcattgttacaatagaataaaattgaaaaaatatcacctaaccaagtgtcttcagaataaacccaagatatcagagttagcaagaaacatcccaagtcggagcttctcatgtaaggatcttcagcctgttaaacaagaaaacgaaaaaccccttccagaaaacatggatgcatttgaaaaagtgagaacaaaattagaaacacagccacaagaagaatatgaaatcatcaatgtggaagttaaacatggtggttttgtttattaccaagaaggttgttgcttggttcgttccaaagatgaagaagcagacaatgataattatgaagttttattcaatttggaggaacttaagttagaccagcccttcattgattgtatcagagttgctccagatgaaaaatatgtggctgccaagataagaactgaagattctgaagcatctacctgtgtaattataaagctcagcgatcagcccgtaatggaagcttctttcccgaatgtgtccagttttgaatgggtaaaggacgaggaagatgaagatgttttattctacaccttccagaggaaccttcgctgtcatgacgtatatcgagccacttttggtgataacaaacgtaatgaacgcttttacacagaaaaagacccaagctactttgttttcctttatcttacaaaagacagtcgtttcctcaccataaatattatgaacaagactacttctgaagtgtggttgatagatggcctgagcccttgggacccaccagtacttatccagaagcgaatacatggggtcctttactatgttgaacacagagatgatgaattatacattctcactaatgttggagaacctacagaatttaagctaatgagaacagcggctgatacccctgcaattatgaattgggatttattttttacaatgaagagaaatacaaaagtgatagacttggacatgtttaaggatcactgtgttctatttctgaagcacagcaatctcctttatgttaatgtgattggtctggctgatgattcagttcggtctctaaaggatggaaaattagtgccaatgactgttttccacaaaactgactctgaggacttgcagaagaaacctctcttggtacatgtatatggagcttatggaatggatttgaaaatgaatttcaggcctgagaggcgggtcctggtggatgatggatggatattagcatactgccatgttcgaggtggtggtgagttaggcctccagtggcacgctgatggccgcctaactaaaaaactcaatggccttgctgatttagaggcttgcattaagacgcttcatggccaaggcttttctcagccaagtctaacaaccctgactgctttcagtgctggaggggtgcttgcaggagcattgtgtaattctaatccagagctggtgagagcggtgactttggaggcacctttcttggatgttctcaacaccatgatggacactacacttcctctgacattagaagaattagaagaatgggggaatccttcatctgatgaaaaacacaagaactacataaaacgttactgtccctatcaaaatattaaacctcagcattatccttcaattcacataacggcatatgaaaacgatgaacgggtacctctgaaaggaattgtaagttatactgagaaactcaaggaagccatcgcggagcatgctaaggacacaggtgaaggctatcagacccctaatattattctagatattcagcctggaggcaatcatgtaattgaggattctcacaaaaagattacagcccaaattaaattcctgtacgaggaacttggacttgacagcaccagtgttttcgaggatcttaagaaatacctgaaattctgaaacactgcattcaactgggaattggaaacacactgaaatatttcatagtcttacttccaattgagttagcaaaaaaaaaattaataacttgagacttttaagttattaattttttaaaatgtgcttctccatctaaattttgcttagtctacatctcacttgcttatactattctctccattgatgcacatgcccattaacctaggaaagtaattttcaaatcatgctccttagaaggatgtggagtagagggaagggaaggattggtgatagcagagctccaggcct

SEQ ID NO: 33260 - DNA, 660 bp, Artificial Sequence
  derived and/or modified sequence
cagacttcggctggacttgcctgcggtgacacctgctcccctctgagagcttcaggttctccggcctgccttcactggtttgtgtccagagccggactgattctctcaatttgcatgaagaaactgaggcccggagacacagttaagtgtaggagctaagacctcaacccagccccaaaaggagcataaaccagggactttgatatcatgcagcagaagaccaaattatttctccaagctttgaagtatagtattcctcaccttggaaaatgcatgcagaaacagcatttgaatcactataacttcgctgatcattgttacaatagaataaaattgaaaaaatatcacctaaccaagtgtcttcagaataaacccaagatatcagagttagcaagaaacatcccaagtcggagcttctcatgtaaggatcttcagcctgttaaacaagaaaacgaaaaaccccttccagaaaacatggatgcatttgaaaaagtgagaacaaaattagaaacacagccacaagaagaatatgaaatcatcaatgtggaagttaaacatggtggttttgtttattaccaagaaggttgttgcttggttcgttccaaagatgaagaagcagacaatgataattatgaagttttattcaatttggaggaactt

SEQ ID NO: 33261 - DNA, 1986 bp, Artificial Sequence
  derived and/or modified sequence
atgcagcagaagaccaagctgttcctgcaggccctgaagtacagcatcccccacctgggcaagtgcatgcagaagcagcacctgaaccactacaacttcgccgaccactgctacaacagaatcaagctgaagaagtaccacctgaccaagtgcctgcagaacaagcccaagatcagcgagctggccagaaacatccccagcagaagcttcagctgcaaggacctgcagcccgtgaagcaggagaacgagaagcccctgcccgagaacatggacgccttcgagaaggtgagaaccaagctggagacccagccccaggaggagtacgagatcatcaacgtggaggtgaagcacggcggcttcgtgtactaccaggagggctgctgcctggtgagaagcaaggacgaggaggccgacaacgacaactacgaggtgctgttcaacctggaggagctgaagctggaccagcccttcatcgactgcatcagagtggcccccgacgagaagtacgtggccgccaagatcagaaccgaggacagcgaggccagcacctgcgtgatcatcaagctgagcgaccagcccgtgatggaggccagcttccccaacgtgagcagcttcgagtgggtgaaggacgaggaggacgaggacgtgctgttctacaccttccagagaaacctgagatgccacgacgtgtacagagccaccttcggcgacaacaagagaaacgagagattctacaccgagaaggaccccagctacttcgtgttcctgtacctgaccaaggacagcagattcctgaccatcaacatcatgaacaagaccaccagcgaggtgtggctgatcgacggcctgagcccctgggacccccccgtgctgatccagaagagaatccacggcgtgctgtactacgtggagcacagagacgacgagctgtacatcctgaccaacgtgggcgagcccaccgagttcaagctgatgagaaccgccgccgacacccccgccatcatgaactgggacctgttcttcaccatgaagagaaacaccaaggtgatcgacctggacatgttcaaggaccactgcgtgctgttcctgaagcacagcaacctgctgtacgtgaacgtgatcggcctggccgacgacagcgtgagaagcctgaaggacggcaagctggtgcccatgaccgtgttccacaagaccgacagcgaggacctgcagaagaagcccctgctggtgcacgtgtacggcgcctacggcatggacctgaagatgaacttcagacccgagagaagagtgctggtggacgacggctggatcctggcctactgccacgtgagaggcggcggcgagctgggcctgcagtggcacgccgacggcagactgaccaagaagctgaacggcctggccgacctggaggcctgcatcaagaccctgcacggccagggcttcagccagcccagcctgaccaccctgaccgccttcagcgccggcggcgtgctggccggcgccctgtgcaacagcaaccccgagctggtgagagccgtgaccctggaggcccccttcctggacgtgctgaacaccatgatggacaccaccctgcccctgaccctggaggagctggaggagtggggcaaccccagcagcgacgagaagcacaagaactacatcaagagatactgcccctaccagaacatcaagccccagcactaccccagcatccacatcaccgcctacgagaacgacgagagagtgcccctgaagggcatcgtgagctacaccgagaagctgaaggaggccatcgccgagcacgccaaggacaccggcgagggctaccagacccccaacatcatcctggacatccagcccggcggcaaccacgtgatcgaggacagccacaagaagatcaccgcccagatcaagttcctgtacgaggagctgggcctggacagcaccagcgtgttcgaggacctgaagaagtacctgaagttctag

SEQ ID NO: 33262 - DNA, 456 bp, Artificial Sequence
  derived and/or modified sequence
atgcagcagaagaccaagctgttcctgcaggccctgaagtacagcatcccccacctgggcaagtgcatgcagaagcagcacctgaaccactacaacttcgccgaccactgctacaacagaatcaagctgaagaagtaccacctgaccaagtgcctgcagaacaagcccaagatcagcgagctggccagaaacatccccagcagaagcttcagctgcaaggacctgcagcccgtgaagcaggagaacgagaagcccctgcccgagaacatggacgccttcgagaaggtgagaaccaagctggagacccagccccaggaggagtacgagatcatcaacgtggaggtgaagcacggcggcttcgtgtactaccaggagggctgctgcctggtgagaagcaaggacgaggaggccgacaacgacaactacgaggtgctgttcaacctggaggagctgtag

SEQ ID NO: 33263 - protein, 415 aa, Artificial Sequence
  derived and/or modified sequence
MAEIPLYFVDLQDDLDDYGFEDYGTDCDNMRVTAFLDIPGQDNLPPLTRLEKYAFSENTFNRQIIARGLLDIFRDFGNNEEDFLTVMEIVVRLSEDAEPTVRTELMEQIPPIAIFLQENRSNFPVVLSEYLIPIVVRYLTDPNNQIICKMASMLSKSTVERLLLPRFCELCGDRKLFQVRKVCAANFGDICHAVGQEATEKFLIPKFFELCSDAVWGMRKACAECFTAVSHSSSPGVRRTQLFPLFIRLVSDPCRWVHQAAFQSLGPFTSTFANPSRAGLYLREDGALSIWPLTQDLDSGFASGSPAPSSGGNTSPASLTRSAKPVRSEPELPVEGTSAKTSDCPHSSSSSDGPAESPVESCVSAGAEWTRVSPETSACSKLSDMNDLPISSYPGSDSWACPGNTEDVFSHFLYW

SEQ ID NO: 33264 - protein, 950 aa, Artificial Sequence
  derived and/or modified sequence
MADLSLLQEDLQEDADGFGVDDYSSESDVIIIPSALDFVSQDEMLTPLGRLDKYAASENIFNRQMVARSLLDTLREVCDDERDCIAVLERISRLADDSEPTVRAELMEQVPHIALFCQENRPSIPYAFSKFLLPIVVRYLADQNNQVRKTSQAALLALLEQELIERFDVETKVCPVLIELTAPDSNDDVKTEAVAIMCKMAPMVGKDITERLILPRFCEMCCDCRMFHVRKVCAANFGDICSVVGQQATEEMLLPRFFQLCSDNVWGVRKACAECFMAVSCATCQEIRRTKLSALFINLISDPSRWVRQAAFQSLGPFISTFANPSSSGQYFKEESKSSEEMSVENKNRTRDQEAPEDVQVRPEDTPSDLSVSNSSVILENTMEDHAAEASGKPLGEISVPLDSSLLCTLSSESHQEAASNENDKKPGNYKSMLRPEVGTTSQDSALLDQELYNSFHFWRTPLPEIDLDIELEQNSGGKPSPEGPEEESEGPVPSSPNITMATRKELEEMIENLEPHIDDPDVKAQVEVLSAALRASSLDAHEETISIEKRSDLQDELDINELPNCKINQEDSVPLISDAVENMDSTLHYIHSDSDLSNNSSFSPDEERRTKVQDVVPQALLDQYLSMTDPSRAQTVDTEIAKHCAYSLPGVALTLGRQNWHCLRETYETLASDMQWKVRRTLAFSIHELAVILGDQLTAADLVPIFNGFLKDLDEVRIGVLKHLHDFLKLLHIDKRREYLYQLQEFLVTDNSRNWRFRAELAEQLILLLELYSPRDVYDYLRPIALNLCADKVSSVRWISYKLVSEMVKKLHAATPPTFGVDLINELVENFGRCPKWSGRQAFVFVCQTVIEDDCLPMDQFAVHLMPHLLTLANDRVPNVRVLLAKTLRQTLLEKDYFLASASCHQEAVEQTIMALQMDRDSDVKYFASIHPASTKISEDAMSTASSTY

SEQ ID NO: 33265 - DNA, 1248 bp, Artificial Sequence
  derived and/or modified sequence
atggccgagatccccctgtacttcgtggacctgcaggacgacctggacgactacggcttcgaggactacggcaccgactgcgacaacatgagagtgaccgccttcctggacatccccggccaggacaacctgccccccctgaccagactggagaagtacgccttcagcgagaacaccttcaacagacagatcatcgccagaggcctgctggacatcttcagagacttcggcaacaacgaggaggacttcctgaccgtgatggagatcgtggtgagactgagcgaggacgccgagcccaccgtgagaaccgagctgatggagcagatcccccccatcgccatcttcctgcaggagaacagaagcaacttccccgtggtgctgagcgagtacctgatccccatcgtggtgagatacctgaccgaccccaacaaccagatcatctgcaagatggccagcatgctgagcaagagcaccgtggagagactgctgctgcccagattctgcgagctgtgcggcgacagaaagctgttccaggtgagaaaggtgtgcgccgccaacttcggcgacatctgccacgccgtgggccaggaggccaccgagaagttcctgatccccaagttcttcgagctgtgcagcgacgccgtgtggggcatgagaaaggcctgcgccgagtgcttcaccgccgtgagccacagcagcagccccggcgtgagaagaacccagctgttccccctgttcatcagactggtgagcgacccctgcagatgggtgcaccaggccgccttccagagcctgggccccttcaccagcaccttcgccaaccccagcagagccggcctgtacctgagagaggacggcgccctgagcatctggcccctgacccaggacctggacagcggcttcgccagcggcagccccgcccccagcagcggcggcaacaccagccccgccagcctgaccagaagcgccaagcccgtgagaagcgagcccgagctgcccgtggagggcaccagcgccaagaccagcgactgcccccacagcagcagcagcagcgacggccccgccgagagccccgtggagagctgcgtgagcgccggcgccgagtggaccagagtgagccccgagaccagcgcctgcagcaagctgagcgacatgaacgacctgcccatcagcagctaccccggcagcgacagctgggcctgccccggcaacaccgaggacgtgttcagccacttcctgtactggtag

SEQ ID NO: 33266 - DNA, 1248 bp, Artificial Sequence
  derived and/or modified sequence
atggcagagatacccttatatttcgttgatctccaggacgacttggacgactatggattcgaggattacggtacagattgcgacaacatgcgggtgaccgcgttcctggacatacccggccaggacaacctcccgccactgactcgtttagagaaatacgcgtttagtgagaatacatttaatagacagattattgccagaggtctgctggacatctttcgggactttggcaataatgaggaggatttcctgactgtgatggagatagtggtgaggctgagtgaggatgctgagcctaccgtcagaaccgagttgatggaacagataccccccatcgccatttttctgcaggaaaaccggtccaattttccagtcgtgttaagtgagtaccttattcctattgtcgtccgatatctcacagatccaaacaatcagataatctgtaagatggccagcatgctaagtaagagtactgtggagagactgctgttgccaagattctgtgagctttgcggcgatcggaagctgttccaggtgcgcaaggtctgcgctgctaacttcggtgacatctgtcacgccgtcggccaggaggccactgagaaattcttgattccgaagttttttgagctgtgttctgacgccgtatggggaatgagaaaggcctgtgcagagtgctttactgctgtcagccacagttcgagccccggcgtaaggagaactcagctattccctctatttatccgcttggtgagcgacccatgtagatgggtccaccaagctgccttccagagcctcggcccattcactagcacattcgctaatccttcccgcgcggggttgtatctacgcgaggacggtgccctgtctatttggcccctgacccaggacctagattccggctttgcctctggatcacccgccccgtccagtggcgggaacaccagtcccgctagtctaactagaagcgctaagccggtgaggagtgaacctgagttacccgtggagggaacttcggcaaaaacctcagattgcccccattcgtctagttcatctgacggccccgcggagtctcctgtggagtcttgtgtgagcgcaggcgcggagtggacgcgagtttctcctgaaacaagtgcctgctctaagctctcggacatgaacgacctgccgatttcaagctatcccggaagcgactcttgggcctgcccgggtaacaccgaagacgtttttagccactttctgtattggtag

SEQ ID NO: 33267 - DNA, 1248 bp, Artificial Sequence
  derived and/or modified sequence
atggccgagatccccctgtactttgtggacctgcaggatgacctggatgattatggctttgaagattatggaacagactgtgacaacatgagggtgacagccttcctggacatccctggccaggacaacctgccccccctgacccggctggagaagtatgccttcagcgagaacaccttcaaccggcagatcatcgcccggggcctgctggacatcttccgggactttggaaataatgaggaggacttcctgactgtgatggagatcgtggtgcggctgtctgaagatgctgagcccaccgtgaggacagagctgatggagcagatcccccccatcgccatcttcctgcaggagaacagaagcaacttccctgtggtgctgtctgagtacctgatccccatcgtggtgcgctacctgacagaccccaacaaccagatcatctgcaagatggcctccatgctgagcaagagcacagtggagcggctgctgctgccccgcttctgtgagctgtgtggggacaggaagctgttccaggtgaggaaggtgtgtgccgccaactttggagacatctgccacgctgtgggccaggaggccacagagaagttcctgatccccaagttctttgagctgtgcagtgatgctgtgtggggcatgaggaaggcctgtgccgagtgcttcaccgctgtgagccacagcagcagccctggggtgcggaggacccagctgttccccctcttcatccggctggtgtctgacccctgccgctgggtgcaccaggccgccttccagagcctgggccccttcaccagcacctttgccaaccccagccgggccggcctgtacctgcgggaggatggagccctgagcatctggcccctgacccaggacctggacagcggctttgccagcggcagccctgcccccagcagcggcggcaacaccagccctgccagcctgaccaggtctgccaagcctgtgcgctctgagcctgagctgcctgtggagggcaccagcgccaagaccagtgactgcccccacagcagcagcagcagtgatggccctgctgagagccctgtggagagctgtgtgtctgctggagctgagtggaccagggtgtccccagagaccagcgcctgcagcaagctgagtgacatgaatgacctgcccatcagcagctacccaggcagtgacagctgggcctgccccggcaacacagaagatgtgttcagccacttcctgtactggtag

SEQ ID NO: 33268 - DNA, 1248 bp, Artificial Sequence
  derived and/or modified sequence
atggccgagatccccctgtacttcgtggacctgcaggacgacctggatgattacggttttgaggattacggcaccgattgcgacaacatgcgcgttacggcttttctggatatccccgggcaagacaatctccccccccttacaaggcttgagaaatatgcattctcggagaataccttcaataggcagattattgcccgaggattgcttgatatcttccgggatttcggtaataatgaagaggattttttgacagtgatggagattgtcgtgcgcctctccgaagacgcggaaccaactgtgaggaccgagctgatggagcaaattcctccgatcgctattttcctgcaggagaataggagtaacttcccagtggttctttcagaatacctcattcccatcgtggtgaggtaccttacagatcccaataaccagattatttgcaaaatggcttctatgctgtcaaaatcaacggtagaacgcttactgctgcctcgcttctgcgagctctgcggggatcgtaaactcttccaggtgcgaaaagtgtgcgccgccaacttcggcgatatctgccacgctgtcggtcaggaggccactgaaaagttcttaatccccaaattttttgagctctgtagcgacgcagtatggggcatgcggaaggcttgcgcagagtgcttcacagctgtgtcacactcctcttcacccggcgtcaggaggacacaactgttccctctgttcatcagactagtgtccgatccctgccgatgggtacaccaggcggcctttcaatcccttggaccctttacctccacctttgccaacccttccagggcaggcctttatctccgagaggatggggccctctccatatggcctctcacccaggacctggatagcgggttcgcgagcggaagccctgcaccttctagcggcggcaacactagcccagcaagcttaactagatccgccaagcccgtcagaagtgaaccagagcttccagttgaagggaccagcgccaagacctcagattgcccccattcttcatcttcatccgacggacccgctgagtcccctgtagagtcctgtgttagcgctggggcggagtggacccgcgtgtcgcctgagacctccgcgtgttcgaagctgagcgatatgaatgacttacccatttcgtcgtatcctggttccgatagctgggcctgtcctggtaacaccgaggacgttttcagccacttcctgtactggtag

SEQ ID NO: 33269 - DNA, 1248 bp, Artificial Sequence
  derived and/or modified sequence
atggctgagatccctctgtatttcgtcgatctacaagacgacctggatgactatggtttcgaggattacgggaccgattgcgataatatgcgcgtgacagcttttctggacatccccggacaggacaatcttccacccttgactcggctggagaaatatgcattctccgaaaacaccttcaaccggcagatcatcgctcgtggactcttggacattttcagagactttggaaacaacgaagaggactttctcacagtgatggaaatcgttgtgaggctgtctgaagatgcagagcccacagtcagaactgagctgatggaacagatccccccaattgctatttttctgcaagagaacagatctaatttccctgttgtcctctcagagtatctgattccaatcgttgttcgctacctgaccgaccctaataatcagattatttgcaaaatggcttcgatgctgtctaagagtacagtggaacgcctgcttctccctcgattctgcgaactgtgtggcgaccgcaaactgtttcaagtgagaaaagtctgcgcagccaattttggagacatctgccatgccgtgggccaggaggccacggagaaattcctcatccctaaatttttcgagctgtgttccgatgcggtgtggggcatgagaaaggcctgcgcggaatgcttcacagccgtgagccacagctccagcccaggcgtgcggcgaacccagctttttccgctgtttattcgcctcgtctccgacccctgtaggtgggtacatcaagcagcgttccagtctcttggaccattcacgtctactttcgcaaaccctagccgcgctggtttatatctccgcgaggacggcgctctgtctatctggcctctcactcaggacctggattcaggcttcgcctcagggtctcctgctccaagctctggagggaatacgtctcctgcctctctaaccagatccgctaagcccgtgaggtccgagccagaactcccagtagaaggtacctctgctaagacttccgactgccctcactctagttccagttctgatggacctgccgagtccccggtagagtcttgtgtgtcagcgggtgcagagtggactagggtctcccctgaaacttctgcctgtagcaagctgtctgacatgaacgacttacccatcagttcctacccgggatccgactcttgggcctgtccagggaatacagaggacgtcttctcacacttcctgtactggtag

SEQ ID NO: 33270 - DNA, 2541 bp, Artificial Sequence
  derived and/or modified sequence
atgcccatcccaagatggcggagatccccctgtactttgtggacttgcaggatgacttagacgactatggatttgaagactatggtacagattgcgacaacatgagagtaacggccttcttggacattccaggccaggataacctgcctccactcactcgcctggagaagtatgctttcagcgagaacaccttcaaccggcagattattgccagagggctgcttgatatcttccgggacttcggtaacaatgaagaagacttcctcacggtaatggagattgtagtcagattgtcagaagatgcagagcccacagtgcggactgagctgatggaacagattcctcctattgccatttttttacaagaaaacagatcaaattttccagtggtgctctctgaatatctcatacctattgtagtgaggtacctcacagatccaaacaatcagataatctgcaaaatggcttcaatgctgagtaagagtaccgttgaacgcctgctactcccccgattctgtgaactgtgtggtgacaggaagctctttcaagttcggaaggtttgtgctgcaaattttggtgatatttgtcatgctgttggacaagaagccactgagaaatttttgatcccaaagttctttgagctctgctctgatgctgtttggggcatgcggaaagcctgtgcagaatgcttcacggctgtgtcgcacagctcctcccctggggtccgcagaacccagctcttcccgctcttcatcagacttgtcagcgacccctgccgatgggtgcaccaggctgccttccagtccctcggccccttcacttccacctttgcaaacccctccagggctggcctttatcttcgagaggatggcgccctgagcatctggccactcacccaggatttggactctggttttgcctctggctcccctgctcccagcagtggtggtaacacttcccctgccagtttaactcgttcagcaaagcctgtgcggagcgagccagagctacctgtggaagggacctcagcgaaaaccagtgattgcccacacagcagtagctcctctgacggcccagcggaaagccctgtggaaagctgtgtgtcggctggagctgagtggaccagggtttccccagagaccagcgcctgctcaaagctttctgacatgaatgacctccccatcagcagctaccctggatcagattcctgggcctgcccagggaacactgaggatgtgttcagtcattttctttattggtgaactcctctccctgacataagcaaggacttagagctgcttctgagtgaggctgggcctcaggaggacgactgcagcagacctggggttgtgcacaacagctgtgtggcccggagtgagattcagaaagtccttggtagcttgcaggagcatctgatgaatgatccagatgttcaagctcaagttcaggtattatccgctgcactgagagctgcacagctcgactgcgtgaatgaagctgagagcaagccaacagcaggcctaaaggaagtgtccatttcacatcccagctctgcctctgacaatcagatcgctctggcggcctcatcatctcaggatgagctctttgtggccaggatattacaaagcccagatccaggtggacccagaaatggaaccagtgaccatctggagactgaccagaggcaggatcccaccccacttgaagagaataaatctaaattacaggatgtaatacctcagccgctgctagatcagtatgtgtccatgactgacccagctcgagcccagactgtcgatactgacatagccaaacactgtgcctacagcctcccaggggtggcactgaccctgggcaggcaaaattggcactgcctgaaagatacatatgaaacactggcttctgatgtacagtggaaggtacggcgagccctagccttctccattcacgagctggctgtgattcttggggatcagttaacagcagctgacctggtgcctatcttcaatggatttttaaaggatctggatgaagtgcgaataggagttcttagacacctgtatgattttctaaagttgcttcatgaagacaagaggagagactatctttatcagcttcaagaatttgtagtgactgataacagcaggaattggaggtttcgatatgaactagcagaacagctgatactgattctggaactctatagtcccaatgatgtttatgattacctaatgcacattgccttaaagttgtgtgcagatcaagtttctgaagttcggtggatctccttcaaactagtcgtggcaattctgcagaagttctattccaacagtgaaagtgcattggggttaaatttcatcaatgagctcatcataaggttccggcactgttctaaattctgaaatgacttctttgggattaaagaagtgtatgtttctagaagactgcggaaaacatcatttctttggctgtgactttcttggagcaggcagtggtgagcaaggagtgtgtccccgtggaccagttcatggagcacctgct

SEQ ID NO: 33271 - DNA, 2853 bp, Artificial Sequence
  derived and/or modified sequence
atggctgatttaagcctgttgcaagaagacctgcaggaagacgcagacggctttggagtagacgactactcctccgaatccgatgtgatcatcatccccagcgcgctggacttcgtgtctcaagatgagatgttgacacccttggggcgcctagacaaatatgcggcctccgaaaacatttttaatagacaaatggtggcacggtctctcctggacacactgcgcgaggtatgcgacgacgagcgcgattgcatcgccgttctagagaggatttctaggctggcagatgattccgaacctacagttagagcagaactgatggaacaggtcccccacatcgccctgttctgccaagagaatcgtccatctatcccctacgcgttcagcaaattcctcctccctatcgtcgtgagatacctggctgaccagaataaccaggtccggaagactagtcaagctgctctcctggccctgctggagcaggagctgatcgagagattcgacgtggaaacgaaggtctgtcctgtcttaattgaactcacagcaccagacagcaacgatgatgttaagacagaagccgtagcgatcatgtgcaaaatggcaccaatggtcgggaaggacatcaccgagcggctaattctccctaggttctgtgagatgtgctgcgactgtagaatgttccacgtacggaaggtttgcgcagctaatttcggggatatttgttcggtcgtcggccaacaggctacagaagaaatgcttttgccacgttttttccagttgtgttcggataacgtatggggagtacgcaaagcttgtgctgaatgcttcatggcggtatcttgtgctacatgtcaggagataaggcgcactaagctgtctgctttgtttatcaatctgataagcgaccctagcagatgggtccggcaggccgcttttcagtctctgggcccgtttatctctacgttcgcaaatccatcttcatcgggtcagtacttcaaggaggagtcgaagagctcagaagaaatgtcagttgagaataagaaccgcactcgagatcaagaggccccggaagatgttcaggtgcggcccgaagacactccttctgatctatctgttagtaactcctccgtcattctggagaatactatggaggatcacgccgccgaggcatccggcaagccgttgggcgaaattagcgtcccactcgactctagtctgctttgcaccttgagctctgaatcacatcaagaggccgcaagcaatgaaaacgataagaagccggggaattacaaaagcatgctcagaccagaagttgggactacttcacaggattctgctctgcttgatcaggaattatataactccttccacttctggaggacccctctccccgaaatcgacctagacatcgagctcgaacaaaactcaggcggaaaaccatcaccggaaggccctgaagaagaatcggaaggccctgtgcctagcagccctaacataacaatggccacgcgcaaagagttggaggagatgatagagaatctggaaccacatatagacgatccagatgtaaaagcacaggtggaagtccttagcgccgctctcagggctagttcactggacgcacacgaggaaacaatttccatcgaaaaacgcagcgatctgcaggacgaacttgatattaacgaactcccgaactgcaagattaaccaggaagatagtgtgcctctgatatccgacgccgtagaaaatatggattcaacgttacactacatccacagtgattctgatctgagtaataactccagcttcagcccagacgaggaacggcggactaaggtccaggacgtagtgccacaagcgctactggaccagtatctgtccatgaccgacccttccagagcacaaacagttgatactgagattgcaaagcattgcgcatattccctgcctggagtggctctgactctgggacgtcagaattggcactgcctcagggaaacttacgaaaccctggccagtgacatgcaatggaaagtgcgccgcacacttgcgttcagtatccatgaattggcagtgatcttgggcgaccagctcacagctgcggacctcgtacctatctttaacgggttcttaaaagacctggacgaggtgcgcattggggtgttaaagcatctccatgactttctgaagctgctccacattgataagcggcgggagtatctataccaactgcaggaatttctggtcaccgacaatagccggaattggaggttcagggcagagctggccgagcaactgatcctgttactggagctatacagtcccagagacgtatacgattatcttaggcctatcgcactaaacttgtgcgccgataaggtgtcctccgtgagatggatcagctacaagctggtttctgagatggtgaaaaagctgcacgcggcgacccctccaacttttggggtagatctaataaacgagctcgttgagaactttggccgctgccctaagtggtcggggaggcaggctttcgtcttcgtctgccagacagttattgaggacgactgtctcccgatggaccagtttgctgtacacctcatgccacatctccttacattggccaatgaccgagtgcccaacgttagagtgttgctggccaaaactctgaggcaaactctgctcgagaaggattatttcctggcaagcgccagctgtcaccaagaggccgttgaacagactatcatggcgcttcagatggatagagatagtgacgtgaaatactttgctagcatacatcccgccagtacgaagatctcagaggacgccatgagcacagcctcgtctacgtactag

SEQ ID NO: 33272 - DNA, 2853 bp, Artificial Sequence
  derived and/or modified sequence
atggctgacctgagcctgctgcaggaggacctgcaggaggatgctgatggcttcggcgtggatgactacagcagcgagagtgatgtgatcatcatccccagcgccctggactttgtgtcccaggatgagatgctgacccccctgggccgcctggacaagtatgctgccagcgagaacatcttcaaccggcagatggtggcccggagcctgctggacaccctgcgggaggtgtgtgatgatgagcgggactgcatcgctgtgctggagcgcatcagccggctggctgatgacagcgagcccaccgtgcgggcagagctgatggagcaggtgccccacatcgccctcttctgccaggagaaccggcccagcatcccctatgccttcagcaagttcctgctgcccatcgtggtgcgctacctggccgaccagaacaaccaggtgaggaagaccagccaggccgccctgctggccctgctggagcaggagctgattgaaagatttgatgtggagaccaaggtgtgccctgtgctgattgagctgacagccccagacagcaatgatgatgtgaagacagaagctgtggccatcatgtgcaagatggcccccatggtgggcaaggacatcacagagcggctcatcctgccccgcttctgtgagatgtgctgtgactgcaggatgttccacgtgaggaaggtgtgtgccgccaactttggagacatctgcagcgtggtgggccagcaggccacagaggagatgctgctgccccgcttcttccagctgtgcagcgacaacgtgtggggcgtgaggaaggcctgtgccgagtgcttcatggctgtgtcctgtgccacctgccaggagatccggaggaccaagctgagcgccctcttcatcaacctgatcagtgaccccagccgctgggtgcggcaggccgccttccagagcctgggccccttcatcagcacctttgccaaccccagcagcagcggccagtacttcaaggaggagagcaagagcagcgaggagatgtctgtggagaacaagaacagaacccgggaccaggaggccccagaagatgtgcaggtgcggcctgaggacacccccagcgacctgtctgtgagcaacagcagcgtcatcctggagaacaccatggaggaccatgctgctgaggccagcggcaagcccctgggggagatctctgtgcccctggacagcagcctgctgtgcaccctgagcagcgagagccaccaggaggccgccagcaatgaaaatgacaagaagccaggcaactacaagtccatgctgcggcctgaggtgggcaccaccagccaggacagcgccctgctggaccaggagctgtacaacagcttccacttctggaggacccccctgcctgagattgacctggacatcgagctggagcagaacagcggcggcaagcccagccctgagggccctgaggaggagagcgagggccctgtgcccagcagccccaacatcaccatggccaccaggaaggagctggaggagatgattgagaacctggagccccacattgatgatcctgatgtgaaggcccaggtggaggtgctgtctgctgccctgcgggccagcagcctggatgcccacgaggagaccatcagcattgagaagagaagtgacctgcaggatgagctggacatcaatgagctgcccaactgcaagatcaaccaggaggacagcgtgcccctcatcagtgatgctgtggagaacatggacagcaccctgcactacatccacagcgacagcgacctgagcaacaacagcagcttctccccagatgaggagaggaggaccaaggtgcaggatgtggtgccccaggccctgctggaccagtacctgtccatgacagaccccagccgggcccagacagtggacacagaaattgccaagcactgtgcctacagcctgcccggggtggccctgaccctgggccggcagaactggcactgcctgcgggagacctatgagaccctggccagtgacatgcagtggaaggtgcggaggaccctggccttcagcatccacgagctggccgtcatcctgggggaccagctgacagctgctgacctggtgcccatcttcaacggcttcctgaaggacctggatgaggtgagaattggagtgctgaagcacctgcatgacttcctgaagctgctgcacatcgacaagagaagagagtacctgtaccagctgcaggagttcctggtgacagacaacagcaggaactggaggttccgggcagagctggccgagcagctgatcctgctgctggagctgtacagccccagagatgtgtatgactacctgcggcccatcgccctgaacctgtgtgccgacaaggtgtcctctgtgcgctggatctcctacaagctggtgtctgagatggtgaagaagctgcacgccgccaccccacccaccttcggcgtggacctgatcaatgagctggtggagaactttggccgctgccccaagtggagcggccggcaggcctttgtgtttgtgtgccagacagtgattgaagatgactgcctgcccatggaccagtttgctgtgcacctgatgccccacctgctgaccctggccaatgacagagtgcccaacgtgcgggtgctgctggccaagaccctgcggcagaccctgctggagaaggactacttcctggccagcgccagctgccaccaggaggccgtggagcagaccatcatggccctgcagatggaccgggacagtgatgtgaagtactttgccagcatccacccagccagcaccaagatcagtgaagatgccatgagcacagccagcagcacctactag

SEQ ID NO: 33273 - DNA, 2853 bp, Artificial Sequence
  derived and/or modified sequence
atggccgacctgagcctgctgcaggaggacctgcaggaggacgccgatgggtttggggtcgacgattattcgtcggagtctgatgtcatcatcattccaagcgctctggacttcgtctcccaggacgaaatgctgactccccttggccggcttgacaagtacgctgcgagcgagaatatcttcaacaggcagatggtggctaggagcctgctggacaccctgcgagaggtgtgcgacgatgagagggattgcatcgccgtgctggagcgcattagtcgtttagccgacgactctgagccaacggtgagggccgagctgatggagcaggtgccccacatcgccctgttttgccaggaaaatagacccagtattccttatgctttttccaaatttttgctcccaatagtcgtgcggtatttggccgatcagaataaccaggtgagaaagaccagccaagctgcactgctcgcactgttggaacaggagctgattgagcgcttcgatgtggagaccaaggtctgccctgtgctgatcgagttgactgcccccgactccaatgatgacgtaaagaccgaggccgtggccatcatgtgcaagatggctccaatggtcggcaaggacattactgaacgcctgattcttccgcgcttttgtgagatgtgttgcgattgtcggatgttccacgttcgcaaagtctgcgccgctaactttggtgatatctgttcagtagtgggacagcaggctaccgaggaaatgttgttgcctaggttctttcagctgtgttctgacaatgtatggggtgtgagaaaggcctgcgctgagtgctttatggccgtgagctgtgcaacatgccaggagataagacgaaccaaactgagtgccctctttatcaacctgatctcagacccatcaaggtgggtacgccaggctgcgtttcagtcactggggcccttcatcagcactttcgccaatccaagttcgtccggccagtacttcaaagaagagtcgaaaagtagcgaagagatgtccgtggaaaataagaatcggacccgagatcaggaagcacccgaagacgttcaggttaggcccgaggatactccgtcggacctatcagtatctaatagttcagtgatcttggaaaacaccatggaggatcatgcggccgaagcttcaggtaagccactgggagaaatttccgttcctctggactcatctctcctttgcaccctttccagcgagagccaccaagaggccgcctcgaacgagaatgacaaaaagccagggaactataagtccatgctgaggcccgaagtggggaccacgagccaggattctgcgcttctcgatcaggagttgtataattcctttcacttctggagaacccccctgcccgaaatcgatctggacatcgaactcgagcagaacagcggaggcaagccttcccccgaagggcccgaggaggagagcgaaggccctgtgccttcctcgcccaacatcaccatggcgaccagaaaggaacttgaggaaatgatcgagaatctggagccacatatcgacgacccagatgttaaggctcaagtggaggtgttatcagcagccctgcgcgcttcgagtcttgatgctcacgaggagaccattagtatcgagaagaggtctgatctgcaggacgagctagacatcaatgaactgcctaactgcaaaattaaccaagaggatagtgttcccctcatatccgatgctgtcgaaaatatggatagtacactgcattatatccatagcgattccgatctgtcgaacaactcctccttcagccctgatgaagaacggagaacaaaggtacaggatgttgtgccacaggctctccttgaccaatacttgtcaatgacagaccccagtcgcgctcagacagtcgataccgagatcgctaaacactgcgcatattccctgccaggggttgccctgactctaggacggcagaattggcactgtctgcgcgaaacatatgagaccctggcatcagatatgcagtggaaggtacgacggaccttagcattcagcattcatgaactggcagtgatacttggggaccaacttactgccgccgaccttgtgcctattttcaatgggtttttaaaggatctggatgaggtgcgcattggtgtgttgaagcatcttcacgatttcttgaaactcctccacattgataagcggcgagagtacctttatcagttgcaggaatttcttgttaccgacaactcaagaaattggcggttcagggctgagctggcagaacagctcattctactcctggagctatattctcccagagacgtctatgactacctgagacccatagcactgaacctatgcgcagacaaggtgagcagcgttcgttggatcagttataagctagtgagcgagatggtcaagaaattacatgcagcgacccctccaacctttggcgtagatctgattaacgagctagtagaaaactttggccggtgccctaagtggtccggccgccaggctttcgttttcgtctgccagacggtgattgaagacgattgcctgcctatggatcagtttgctgtgcacctaatgcctcatctgctgacactggccaacgatcgagtgccaaacgtaagggtactgctggctaagaccctgcggcaaactttactggaaaaagattacttcctggcgtcggcaagctgccaccaggaagccgtagaacagacaatcatggctctccagatggaccgagacagtgacgttaagtactttgccagtattcacccagcctcaacaaaaatctcagaggacgctatgagcactgcttcctcaacctactag

SEQ ID NO: 33274 - DNA, 2853 bp, Artificial Sequence
  derived and/or modified sequence
atggcggatctctcactgctacaggaagatctgcaggaagacgcagacggcttcggcgtggacgattactcgagtgaatcggacgtcattatcattccaagcgccctggacttcgttagccaggatgaaatgctgacacccctgggcagacttgacaagtatgcagcaagcgagaacattttcaaccgccagatggtcgcacgctccctgctggacacactgcgcgaggtgtgtgacgatgaacgggattgcatcgcagtgctggagcgcatttcacggctggcagacgattctgagccaactgtgcgggcagagctgatggaacaggtgcctcatatcgctctgttttgccaggagaatcggcctagcattccttacgcattttccaagtttctcctacctatcgttgtgcgctatttagcggaccagaataaccaggtgagaaaaacgtcccaagctgcattactggctcttttggaacaagaactcatcgagaggttcgacgtggagaccaaggtgtgccctgtgctgatcgagcttacagctcctgactcaaacgacgacgtaaagacggaggcggtggccatcatgtgtaagatggccccaatggtggggaaggacataaccgagcgcctgatccttccgcgtttttgtgagatgtgctgcgattgcagaatgtttcatgtgagaaaggtttgtgccgctaactttggcgacatctgcagtgtggtcggccaacaggcgaccgaagagatgctgttgcctcgcttctttcaactgtgtagtgacaatgtctggggcgtgcgcaaggcctgcgccgagtgcttcatggccgtgtcctgcgcaacatgccaggaaataaggcggaccaagttgtcagcactgttcattaatttgatcagtgatccttcccggtgggtcaggcaggcagccttccagagcctcggaccattcatctcgacttttgcgaacccctctagctctggacagtactttaaggaggagagtaagtcctctgaagagatgtctgtggagaacaagaacagaacgagagaccaggaagcccctgaggacgtgcaggtgagacccgaagatactcccagcgacttgagcgtgagcaatagtagcgtgatccttgaaaatacaatggaggaccatgctgcagaggctagtggtaaacctctcggggaaatatctgttccacttgatagctcattgctgtgcactctgagtagcgagtcccaccaggaggccgcatcaaatgagaatgacaagaagccagggaactacaaaagtatgctgcgacccgaggttgggaccacctctcaagactcagctttgctggaccaggagctttataactccttccacttttggcgcacccccctccccgagatcgacctcgatatcgaattggaacaaaactcaggtggcaaaccatcccccgagggccctgaagaggaatccgaaggccctgtgccaagctctcctaatatcacaatggcgacgcgtaaggagcttgaggagatgatcgaaaatcttgaacctcacatcgacgacccggacgttaaggcccaggtggaggttctgtccgcggctctccgggcatcaagtcttgatgcgcacgaggaaaccatctccattgagaaacgctctgatctgcaagacgaactcgacattaatgaactgcccaactgcaagattaatcaggaagattcagtgcccctcatatcggacgcagtggaaaatatggattcgacattgcactatatccacagtgatagtgacctgagtaacaacagttctttctctccagatgaggagcggagaacaaaagtgcaagatgtggttccacaggcactcctcgatcagtacctcagtatgacggacccgtctagggcgcagacggtggataccgaaatcgctaaacattgtgcttactcattgccaggagtggctctaacactcgggaggcagaactggcactgcctcagagagacatatgagaccctggccagcgacatgcagtggaaggtcagaaggaccctcgctttctcgatacacgagctagctgtgattctcggtgatcagctgacagctgctgacttggttccaatctttaacggcttccttaaagacttggacgaggtgcgcatcggcgtcctaaagcacctgcatgatttcctgaagctgctccatatcgacaagcggcgagagtacctgtatcagctgcaggaatttttggtgaccgacaactccagaaattggcggtttagggccgagctggccgaacagctaatacttttacttgaactatactctcccagagacgtgtacgactacctgcgccctatcgccctcaatctatgcgcagacaaagttagttctgtccgctggatatcctacaaacttgtgtccgagatggtgaaaaaactccacgcagccactccccctacgttcggggtcgatctgatcaatgagctggtcgaaaatttcggacggtgccctaagtggtcaggtaggcaggccttcgtatttgtctgccagaccgtcatagaagacgattgcctgcccatggatcagttcgcagtccacttaatgccccatctcttaactctagccaatgatagagtcccaaacgtacgagtccttttggccaaaaccttgaggcagacactccttgagaaagattactttctggcttctgcttcctgccaccaggaagccgtcgaacagaccatcatggcgctccaaatggatcgggattctgatgtgaagtactttgcctctatccatcctgccagcactaagatctcagaggacgcaatgtcgactgcgtcttccacttactag

SEQ ID NO: 33275 - DNA, 3925 bp, Artificial Sequence
  derived and/or modified sequence
ccggctccccggctcgcgccgctccatgtagccccggctccccgggcggccgcggaggagggggcgaccacaagatggcggacctctcgctgcttcaggaggacctgcaggaggacgcagacggatttggtgtggatgactacagctcagagtctgatgtgattattataccttcagccctggactttgtctcacaagatgaaatgttgacgcccctggggagattggacaagtatgctgcaagtgagaacatatttaacagacaaatggtggcccggagtttgctcgataccttgagggaagtctgcgatgatgaaagagattgtattgctgttttggaaagaattagcagattggccgatgattcagaaccaactgtgagagcggagctgatggaacaggtgcctcacatcgcactgttttgtcaagaaaaccggccttcaataccatatgctttttcaaaattcttactacctattgtggttagataccttgcagatcagaataatcaggtgaggaaaacaagtcaggcagctttgctggctctgttggagcaggagctcattgaacgatttgatgtggagaccaaagtgtgccctgtcctcatagagctgacagccccagatagcaatgatgatgtgaaaacagaagctgtggctataatgtgcaaaatggctcccatggttgggaaggatattacagagcgtcttatcctccctaggttttgtgagatgtgctgcgattgcagaatgtttcacgttcgaaaggtctgtgctgccaattttggagatatttgcagtgtagttggccagcaagctactgaagaaatgttgctgcccagatttttccagctttgttctgataatgtatggggagtccgaaaggcttgtgctgaatgcttcatggcggtttcatgtgcaacatgtcaagaaatccgacggaccaaattatcagcactttttattaatttgatcagtgatccttcacgttgggttcgccaagcagcttttcagtctctgggacctttcatatctacttttgctaatccatctagctcaggccagtattttaaagaagaaagcaaaagttcagaagagatgtcagtagaaaacaaaaataggaccagagatcaagaagccccagaggatgtacaagtcaggccagaggatactccttcagatctcagtgttagtaattccagtgtcatactggaaaacacgatggaagaccatgctgctgaggcatccgggaagcctctaggtgaaattagtgttccactggacagctctttactttgtactttgtcctcagaatctcaccaggaagcagctagtaatgagaatgataaaaaacctggtaactacaaatctatgttacgaccagaggttggcaccacttcacaagattcagctctcttagatcaggaattgtataactccttccatttctggaggactcctcttcctgaaatagatctagacatagagcttgaacagaactctgggggaaaacccagcccagagggaccagaggaagaatctgagggccctgtgcccagttctccaaacatcaccatggccaccagaaaggaactggaagaaatgatagaaaatctagagccccacattgatgatccagatgttaaagcacaagtggaagtgctgtccgctgcactacgtgcttccagcctggatgcacatgaagagaccatcagtatagaaaagagaagtgatttgcaagatgaactggatataaatgagctaccaaattgtaaaataaatcaagaagattctgtgcctttaatcagcgatgctgttgagaatatggactccactcttcactatattcacagcgattcagacttgagcaacaatagcagttttagccctgatgaggaaaggagaactaaagtacaagatgttgtacctcaggcgttgttagatcagtatttatctatgactgacccttctcgtgcacagacggttgacactgaaattgctaagcactgtgcatatagcctccctggtgtggccttgacactcggaagacagaattggcactgcctgagagagacgtatgagactctggcctcagacatgcagtggaaagttcgacgaactctagcattctccatccacgagcttgcagttattcttggagatcaattgacagctgcagatctggttccaatttttaatggatttttaaaagacctcgatgaagtcaggataggtgttcttaaacacttgcatgattttctgaagcttcttcatattgacaaaagaagagaatatctttatcaacttcaggagtttttggtgacagataatagtagaaattggcggtttcgagctgaactggctgaacagctgattttacttctagagttatatagtcccagagatgtttatgactatttacgtcccattgctctgaatctgtgtgcagacaaagtttcttctgttcgttggatttcctacaagttggtcagcgagatggtgaagaagctgcacgcggcaacaccaccaacgttcggagtggacctcatcaatgagcttgtggagaactttggcagatgtcccaagtggtctggtcggcaagcctttgtctttgtctgccagactgtcattgaggatgactgccttcccatggaccagtttgctgtgcatctcatgccgcatctgctaaccttagcaaatgacagggttcctaacgtgcgagtgctgcttgcaaagacattaagacaaactctactagaaaaagactatttcttggcctctgccagctgccaccaggaggctgtggagcagaccatcatggctcttcagatggaccgtgacagcgatgtcaagtattttgcaagcatccaccctgccagtaccaaaatctccgaagatgccatgagcacagcgtcctcaacctactagaaggcttgaatctcggtgtctttcctgcttccatgagagccgaggttcagtgggcattcgccacgcatgtgacctgggatagctttcgggggaggagagaccttcctctcctgcggacttcattgcaggtgcaagttgcctacacccaataccagggatttcaagagtcaagagaaagtacagtaaacactattatcttatcttgactttaaggggaaataatttctcagaggattataattgtcaccgaagccttaaatccttctgtcttcctgactgaatgaaacttgaattggcagagcattttccttatggaagggatgagattcccagagacctgcattgctttctcctggttttatttaacaatcgacaaatgaaattcttacagcctgaaggcagacgtgtgcccagatgtgaaagagaccttcagtatcagccctaactcttctctcccaggaaggacttgctgggctctgtggccagctgtccagcccagccctgtgtgtgaatcgtttgtgacgtgtgcaaatgggaaaggaggggtttttacatctcctaaaggacctgatgccaacacaagtaggattgacttaaactcttaagcgcagcatattgctgtacacatttacagaatggttgctgagtgtctgtgtctgattttttcatgctggtcatgacctgaaggaaatttattagacgtataatgtatgtctggtgtttttaacttgatcatgatcagctctgaggtgcaacttcttcacatactgtacatacctgtgaccactcttgggagtgctgcagtctttaatcatgctgtttaaactgttgtggcacaagttctcttgtccaaataaaatttattaataagatctatagagagagatatatacacttttgattgttttctagatgtctaccaataaatgcaatttgtgacctgtattaatgatttaaagtggggaaactagattaaaatatttgtcttttaactagtt

SEQ ID NO: 33276 - DNA, 2853 bp, Artificial Sequence
  derived and/or modified sequence
atggccgacctgagcctgctgcaggaggacctgcaggaggacgccgacggcttcggcgtggacgactacagcagcgagagcgacgtgatcatcatccccagcgccctggacttcgtgagccaggacgagatgctgacccccctgggcagactggacaagtacgccgccagcgagaacatcttcaacagacagatggtggccagaagcctgctggacaccctgagagaggtgtgcgacgacgagagagactgcatcgccgtgctggagagaatcagcagactggccgacgacagcgagcccaccgtgagagccgagctgatggagcaggtgccccacatcgccctgttctgccaggagaacagacccagcatcccctacgccttcagcaagttcctgctgcccatcgtggtgagatacctggccgaccagaacaaccaggtgagaaagaccagccaggccgccctgctggccctgctggagcaggagctgatcgagagattcgacgtggagaccaaggtgtgccccgtgctgatcgagctgaccgcccccgacagcaacgacgacgtgaagaccgaggccgtggccatcatgtgcaagatggcccccatggtgggcaaggacatcaccgagagactgatcctgcccagattctgcgagatgtgctgcgactgcagaatgttccacgtgagaaaggtgtgcgccgccaacttcggcgacatctgcagcgtggtgggccagcaggccaccgaggagatgctgctgcccagattcttccagctgtgcagcgacaacgtgtggggcgtgagaaaggcctgcgccgagtgcttcatggccgtgagctgcgccacctgccaggagatcagaagaaccaagctgagcgccctgttcatcaacctgatcagcgaccccagcagatgggtgagacaggccgccttccagagcctgggccccttcatcagcaccttcgccaaccccagcagcagcggccagtacttcaaggaggagagcaagagcagcgaggagatgagcgtggagaacaagaacagaaccagagaccaggaggcccccgaggacgtgcaggtgagacccgaggacacccccagcgacctgagcgtgagcaacagcagcgtgatcctggagaacaccatggaggaccacgccgccgaggccagcggcaagcccctgggcgagatcagcgtgcccctggacagcagcctgctgtgcaccctgagcagcgagagccaccaggaggccgccagcaacgagaacgacaagaagcccggcaactacaagagcatgctgagacccgaggtgggcaccaccagccaggacagcgccctgctggaccaggagctgtacaacagcttccacttctggagaacccccctgcccgagatcgacctggacatcgagctggagcagaacagcggcggcaagcccagccccgagggccccgaggaggagagcgagggccccgtgcccagcagccccaacatcaccatggccaccagaaaggagctggaggagatgatcgagaacctggagccccacatcgacgaccccgacgtgaaggcccaggtggaggtgctgagcgccgccctgagagccagcagcctggacgcccacgaggagaccatcagcatcgagaagagaagcgacctgcaggacgagctggacatcaacgagctgcccaactgcaagatcaaccaggaggacagcgtgcccctgatcagcgacgccgtggagaacatggacagcaccctgcactacatccacagcgacagcgacctgagcaacaacagcagcttcagccccgacgaggagagaagaaccaaggtgcaggacgtggtgccccaggccctgctggaccagtacctgagcatgaccgaccccagcagagcccagaccgtggacaccgagatcgccaagcactgcgcctacagcctgcccggcgtggccctgaccctgggcagacagaactggcactgcctgagagagacctacgagaccctggccagcgacatgcagtggaaggtgagaagaaccctggccttcagcatccacgagctggccgtgatcctgggcgaccagctgaccgccgccgacctggtgcccatcttcaacggcttcctgaaggacctggacgaggtgagaatcggcgtgctgaagcacctgcacgacttcctgaagctgctgcacatcgacaagagaagagagtacctgtaccagctgcaggagttcctggtgaccgacaacagcagaaactggagattcagagccgagctggccgagcagctgatcctgctgctggagctgtacagccccagagacgtgtacgactacctgagacccatcgccctgaacctgtgcgccgacaaggtgagcagcgtgagatggatcagctacaagctggtgagcgagatggtgaagaagctgcacgccgccaccccccccaccttcggcgtggacctgatcaacgagctggtggagaacttcggcagatgccccaagtggagcggcagacaggccttcgtgttcgtgtgccagaccgtgatcgaggacgactgcctgcccatggaccagttcgccgtgcacctgatgccccacctgctgaccctggccaacgacagagtgcccaacgtgagagtgctgctggccaagaccctgagacagaccctgctggagaaggactacttcctggccagcgccagctgccaccaggaggccgtggagcagaccatcatggccctgcagatggacagagacagcgacgtgaagtacttcgccagcatccaccccgccagcaccaagatcagcgaggacgccatgagcaccgccagcagcacctactag

SEQ ID NO: 33277 - protein, 541 aa, Artificial Sequence
  derived and/or modified sequence
MEALLEGIQNRGHGGGFLTSCEAELQELMKQIDIMVAHKKSEWEGRTHALETCLKIREQELKSLRSQLDVTHKEVGMLHQQVEEHEKIKQEMTMEYKQELKKLHEELCILKRSYEKLQKKQMREFRGNTKNHREDRSEIERLTAKIEEFRQKSLDWEKQRLIYQQQVSSLEAQRKALAEQSEIIQAQLVNRKQKLESVELSSQSEIQHLSSKLERANDTICANELEIERLTMRVNDLVGTSMTVLQEQQQKEEKLRESEKLLEALQEEKRELKAALQSQENLIHEARIQKEKLQEKVKATNTQHAVEAIRPREESLAEKKYTSQGQGDLDSVLSQLNFTHTSEDLLQAEVTCLEGSLESVSATCKQLSQELMEKYEELKRMEAHNNEYKAEIKKLKEQILQGEQSYSSALEGMKMEISHLTQELHQRDITIASTKGSSSDMEKRLRAEMQKAEDKAVEHKEILDQLESLKLENRHLSEMVMKLELGLHECSLPVSPLGSIATRFLEEEELRSHHILERLDAHIEELKRESEKTVRQFTALK

SEQ ID NO: 33278 - DNA, 1626 bp, Artificial Sequence
  derived and/or modified sequence
atggaggccctgctggagggcatccagaacagaggccacggcggcggcttcctgaccagctgcgaggccgagctgcaggagctgatgaagcagatcgacatcatggtggcccacaagaagagcgagtgggagggcagaacccacgccctggagacctgcctgaagatcagagagcaggagctgaagagcctgagaagccagctggacgtgacccacaaggaggtgggcatgctgcaccagcaggtggaggagcacgagaagatcaagcaggagatgaccatggagtacaagcaggagctgaagaagctgcacgaggagctgtgcatcctgaagagaagctacgagaagctgcagaagaagcagatgagagagttcagaggcaacaccaagaaccacagagaggacagaagcgagatcgagagactgaccgccaagatcgaggagttcagacagaagagcctggactgggagaagcagagactgatctaccagcagcaggtgagcagcctggaggcccagagaaaggccctggccgagcagagcgagatcatccaggcccagctggtgaacagaaagcagaagctggagagcgtggagctgagcagccagagcgagatccagcacctgagcagcaagctggagagagccaacgacaccatctgcgccaacgagctggagatcgagagactgaccatgagagtgaacgacctggtgggcaccagcatgaccgtgctgcaggagcagcagcagaaggaggagaagctgagagagagcgagaagctgctggaggccctgcaggaggagaagagagagctgaaggccgccctgcagagccaggagaacctgatccacgaggccagaatccagaaggagaagctgcaggagaaggtgaaggccaccaacacccagcacgccgtggaggccatcagacccagagaggagagcctggccgagaagaagtacaccagccagggccagggcgacctggacagcgtgctgagccagctgaacttcacccacaccagcgaggacctgctgcaggccgaggtgacctgcctggagggcagcctggagagcgtgagcgccacctgcaagcagctgagccaggagctgatggagaagtacgaggagctgaagagaatggaggcccacaacaacgagtacaaggccgagatcaagaagctgaaggagcagatcctgcagggcgagcagagctacagcagcgccctggagggcatgaagatggagatcagccacctgacccaggagctgcaccagagagacatcaccatcgccagcaccaagggcagcagcagcgacatggagaagagactgagagccgagatgcagaaggccgaggacaaggccgtggagcacaaggagatcctggaccagctggagagcctgaagctggagaacagacacctgagcgagatggtgatgaagctggagctgggcctgcacgagtgcagcctgcccgtgagccccctgggcagcatcgccaccagattcctggaggaggaggagctgagaagccaccacatcctggagagactggacgcccacatcgaggagctgaagagagagagcgagaagaccgtgagacagttcaccgccctgaagtag

SEQ ID NO: 33279 - DNA, 1626 bp, Artificial Sequence
  derived and/or modified sequence
atggaagcactgctggaaggtatccagaatagaggtcatggtggggggttcctgacatcgtgcgaggcggaactgcaggagttgatgaagcagattgatataatggttgcacacaaaaaatctgaatgggagggtcgtacccatgccctcgaaacctgcctcaaaattagggaacaggagctgaagagtctgcggagtcagctcgatgtgacacataaggaggttggcatgctgcatcaacaggtcgaagagcacgagaagataaaacaggaaatgacaatggagtacaaacaggagctgaagaagctgcacgaagaactttgtatcctcaaacggtcctatgagaaactgcagaagaaacagatgcgcgaatttagaggcaatacgaaaaatcacagagaggaccgtagcgagattgagcggctcacagctaagattgaggagttccggcagaagtcattagactgggaaaagcagcgtctcatttaccagcagcaggtcagttcgttggaagctcagagaaaggccctcgctgaacagagcgaaatcatccaggcccagctcgtcaacagaaaacagaaactggaatcggtagaactgtcctctcagtcagagatccagcatctgagctctaagctggaaagggccaatgacaccatttgcgccaacgaactggagatagagagactgactatgagagttaacgatttagtgggcaccagcatgaccgtactacaagagcagcagcagaaagaggagaagctaagggagtcggaaaagctgctggaagccttgcaggaagagaagagggaactaaaagcagccctgcaaagtcaagaaaatctcattcacgaagcaagaattcaaaaggaaaagctccaggagaaagtaaaggccactaacacccagcatgcagtggaggccattaggccaagggaagagtccctggccgagaagaaatacaccagtcagggacagggtgacctggactccgtgctgtctcaactgaacttcacacataccagcgaggacctcctgcaggctgaggttacttgtttggagggatcattggagtctgtaagtgccacctgcaagcagctttcccaggaactgatggagaagtacgaagaattgaagaggatggaagctcataacaacgagtataaggccgaaattaaaaagttgaaggagcaaattctgcagggagaacagtcctattcatctgctttagagggcatgaagatggagattagtcatttgacccaggagctccaccagcgggatattactatcgctagtaccaaaggcagctcctctgatatggagaagcggctgcgtgccgaaatgcagaaggcagaggataaggctgttgagcataaagagattcttgaccagttggagagcctcaagttagagaatagacatttatctgaaatggtgatgaagctcgaactggggttgcatgagtgttcccttccagtgagtcccttagggtccatagctacccgcttcctggaggaggaggaactacgaagccaccacattttagaacgtctggacgcccacatcgaagagctcaagagggagagcgagaagacagtccgacagttcacggctcttaaatag

SEQ ID NO: 33280 - DNA, 1626 bp, Artificial Sequence
  derived and/or modified sequence
atggaggccctgctggagggcatccagaacagaggacatggaggcggcttcctgaccagctgtgaggccgagctgcaggagctgatgaagcagattgacatcatggtggcccacaagaagtctgagtgggagggccgcacccacgccctggagacctgcctgaagatccgggagcaggagctgaagagcctgcggagccagctggatgtgacccacaaggaggtgggcatgctgcaccagcaggtggaggagcacgagaagatcaagcaggagatgaccatggagtacaagcaggagctgaagaagctgcacgaggagctgtgcatcctgaagaggagctatgagaagctgcagaagaagcagatgagggagttccggggcaacaccaagaaccaccgggaggacagaagtgaaattgagcggctgacagccaagattgaggagttccggcagaagagcctggactgggagaagcagaggctcatctaccagcagcaggtgagcagcctggaggcccagaggaaggccctggccgagcagagcgagatcatccaggcccagctggtgaacaggaagcagaagctggagagcgtggagctgagcagccagagcgagatccagcacctgagcagcaagctggagcgggccaatgacaccatctgtgccaatgagctggagattgagcggctgaccatgagggtgaatgacctggtgggcacctccatgacagtgctgcaggagcagcagcagaaggaggagaagctgcgggagagcgagaagctgctggaggccctgcaggaggagaagcgggagctgaaggccgccctgcagagccaggagaacctgatccacgaggcccgcatccagaaggagaagctgcaggagaaggtgaaggccaccaacacccagcacgctgtggaggccatccggccccgggaggagagcctggccgagaagaagtacaccagccagggccagggcgacctggacagcgtgctgagccagctgaacttcacccacaccagcgaggacctgctgcaggccgaggtgacctgcctggagggcagcctggagagcgtgtctgccacctgcaagcagctgagccaggagctgatggagaagtatgaggagctgaagaggatggaggcccacaacaatgagtacaaggccgagatcaagaagctgaaggagcagatcctgcagggcgagcagagctacagcagcgccctggagggcatgaagatggagatcagccacctgacccaggagctgcaccagagggacatcaccatcgccagcaccaagggcagcagcagtgacatggagaagaggctgcgggcagagatgcagaaggccgaggacaaggctgtggagcacaaggagatcctggaccagctggagagcctgaagctggagaacagacacctgtctgagatggtgatgaagctggagctgggcctgcatgaatgttccctgcctgtgagccccctgggcagcatcgccacccgcttcctggaggaggaggagctgcggagccaccacatcctggagcggctggatgcccacatcgaggagctgaagcgggagagcgagaagacagtgcggcagttcaccgccctgaagtag

SEQ ID NO: 33281 - DNA, 2028 bp, Artificial Sequence
  derived and/or modified sequence
gttcatttgctcgcgtgcaggggaagtctggagaaggcattgtttcaattattaaaagtgtgggggcagtgggcggaacaaacgcgccgactacagaggctggacgtaagcttagcggtggcgcgcgtgcgcagcgccggcccgagttgccaaaacaaaggggatttggtgatggaggctttgttagaaggaatacaaaatcgagggcatggtgggggatttttgacatcttgtgaagcagaactacaggagctcatgaaacagattgacataatggtggctcataaaaaatctgaatgggaaggacgtacacatgctctagaaacttgcttgaaaatccgtgaacaggaacttaagagtcttaggagtcagttggatgtgacacataaggaggttggaatgttgcatcagcaggtagaagaacatgaaaaaatcaagcaagagatgaccatggaatataagcaggagttgaagaaactacatgaagaattatgcatactgaagagaagctatgaaaagcttcagaaaaagcaaatgagggaattcagaggaaataccaaaaatcacagggaagatcggtctgaaattgagaggttaactgcaaaaatagaggaattccgtcagaaatcgctggactgggagaagcaacgcttgatttatcagcaacaggtatcttcactggaggcacaaaggaaggctctggctgaacaatcagagataattcaggctcagcttgtcaatcggaaacagaaattagagtctgtggaactttctagccaatcagaaattcaacacttaagcagtaaactggagcgggctaatgacactatctgtgccaatgagttggaaatagagcgcctcaccatgagggtcaatgacttggttggaaccagtatgactgtcctacaggagcagcagcaaaaagaagaaaaattgagggaatctgaaaaactattagaggctctgcaggaagaaaagagagaattgaaggcagctcttcagtctcaagaaaatctcatacatgaggccagaatacaaaaggagaagttacaagaaaaagtaaaggcaactaacactcaacatgctgtagaagctataaggccacgggaagaatctctggcagaaaagaagtacacctctcaagggcagggggacttagacagtgtgctctcccagttgaattttacccatactagtgaggaccttctgcaggcagaggtgacttgtcttgaaggcagtttggaatctgtgagtgcaacgtgtaaacagctgagccaagaactaatggaaaaatatgaagaactgaagaggatggaagcacataacaatgaatacaaagcagagattaagaagttgaaagaacagattttacagggtgaacaaagttacagttctgcactagaaggaatgaagatggaaatctcccatctaactcaggagttacatcagcgagatatcactattgcttccaccaaaggttcttcctcagacatggaaaagcgactcagagcagagatgcaaaaggcagaagacaaagcagtagagcataaggagattttggatcagctggagtcactcaaattagaaaatcgtcatctttctgaaatggtgatgaaattggaattgggtttacatgagtgttccttgcctgtatctccccttggttcaatagctaccagatttttggaagaggaggaactgaggtctcatcacattctagagcgcttggatgcccatattgaagaactaaaaagagagagtgaaaagacagtgagacaattcacagccttaaagtagcctcttaaaaaaatcactatcttggaaataaaaataaacaccaaagagttactgtcatctgaagtagcagctctttaaaaacatgaagagataaaattataaaaatgatacatctaaagcagtggtgaagaaagctgaaaaactgatacttttgataggcattttctctgcactggtttgtttaaaggacttcttccagcaataagttgaaagaataaaccactttgctag

SEQ ID NO: 33282 - DNA, 1626 bp, Artificial Sequence
  derived and/or modified sequence
atggaggccctgctggagggcatccagaaccggggccacggcggcggctttctgaccagctgtgaagcagagttacaggagctgatgaagcagatcgatattatggtggctcataaaaaatctgaatgggagggccggacacacgcacttgagacctgccttaagatacgcgagcaggaattgaagtcactgcgaagccagctggatgtcacacataaagaggtgggcatgctccaccagcaggtagaggagcacgagaagatcaagcaggaaatgacaatggagtacaaacaggagctcaagaagctgcatgaagaactctgcattctgaagcggtcatatgaaaagttgcagaagaagcagatgcgtgaattccgcggcaacaccaaaaaccaccgcgaggatcgtagcgaaatagagcgcctgacagctaaaatagaggagtttcgacagaagtctttagattgggaaaagcagaggttgatctaccagcagcaagtatcaagcctcgaagcacaacgtaaggccctggccgaacagagtgagattatccaggcacagctcgtcaatcgaaaacagaagctagagtctgtggagctcagcagtcagagcgagatccaacatctttcatccaaattggagagggccaatgatacaatttgtgccaatgaattggagattgaacgtctgactatgcgcgtcaatgacctcgtgggtacaagcatgactgtactacaggagcagcaacagaaggaagaaaaactaagagagtcagaaaagttgctggaggcgctccaggaggaaaaacgtgagctgaaagccgccctccaatcacaggaaaatctcattcacgaggctcggatccagaaggagaagttgcaagagaaggtgaaggccaccaatacccagcacgccgtggaggctattcgcccgcgcgaagaatccctggcggagaagaagtacacatctcaaggacagggggatctggattctgtgctatcacaactgaatttcacccacacatctgaggacctgctgcaggcggaagtgacttgtttagaagggagtcttgaaagcgtgtcagccacgtgcaaacagctaagccaggagctcatggaaaagtacgaagagttaaaacgtatggaggctcacaataatgagtacaaggcagagattaaaaagttaaaggagcagattctgcagggagagcagtcatattcctccgcattggaaggcatgaagatggagatttcccacttgacacaggagctgcaccagagagacatcaccatcgcttccaccaagggcagttcaagcgatatggagaagcggctgagggccgagatgcagaaggcggaggataaagccgtggagcacaaagagatcttggaccagctggaaagcctcaaattggaaaacagacacctttccgagatggtgatgaaactagaactggggttgcacgaatgctccctgcccgtgtccccactgggtagcattgcaacccggttcctcgaggaagaggaattgaggtcgcaccacatcctcgagagactcgacgctcacattgaggagttgaagagggagtcggagaaaaccgtgcgccagttcactgctctaaagtag

SEQ ID NO: 33283 - DNA, 1626 bp, Artificial Sequence
  derived and/or modified sequence
atggaagctctgctcgagggcattcaaaaccgcggacacgggggaggatttctgacaagctgtgaggcagagctccaggaattgatgaagcagattgacattatggttgctcataaaaagtccgagtgggaaggacgaacacacgccctggagacatgcttgaagataagggagcaagagttaaaatccctgagaagtcagctcgatgtaactcataaggaggtcgggatgttgcaccagcaagtggaagagcacgagaaaataaaacaggagatgaccatggagtataagcaggaactgaaaaagcttcacgaggaactatgtatcctgaaacgctcgtatgaaaagctgcagaagaagcaaatgcgggagtttaggggaaacacaaaaaatcaccgggaggaccgcagtgaaatcgaacgactgaccgctaagatcgaagagttcaggcagaagtctcttgactgggagaagcagagactgatttatcaacagcaggtgagctcgctggaggcccaaagaaaggctctggccgagcagtccgagatcatccaggctcagctggtgaaccggaaacagaaattagaatccgtcgagctgtcttctcagtctgaaatccagcacttgtcaagcaaactcgagagagctaatgacactatctgcgcgaatgagctagaaatcgagcgcctcacgatgcgggtgaacgacctggtgggcacgtcgatgacagtcctgcaggaacagcagcagaaggaggagaaacttagagagagtgaaaagcttctagaagctctgcaggaggaaaaaagagaactgaaggcggcattgcaatcccaggagaacctcatacatgaagctcgtatccagaaagagaaactccaggaaaaggtgaaagcgacgaatactcagcatgctgtggaggccatccgtccccgtgaggagagcctcgctgagaagaaatacacatcccaaggacagggggacttagatagcgtgttatcgcagctgaacttcactcacacatccgaggatctattgcaagcagaggtgacctgcctcgaaggaagcttggaatctgtctcagccacatgcaagcagctgtcccaggagctgatggaaaagtatgaagaattaaagcggatggaggcccacaataatgaatataaggccgagattaagaagttgaaggaacagatattgcaaggggaacagagttactcaagcgcacttgagggtatgaagatggagatctcccatttgactcaggagctccatcagcgcgacattactatcgcttccactaagggctcatcaagtgacatggaaaaacgcctgcgtgctgaaatgcagaaggctgaggataaagccgtagagcataaggaaatcctggaccagctcgagtctctaaagctagagaaccgtcatctgagtgaaatggtcatgaaactcgaactggggctccacgaatgctctttgcctgtttcccccttagggtctatcgctacaagattcctggaggaggaggagctgcggagtcaccacatcctcgagcgcctggatgctcacatcgaggagttaaaaagggagtccgagaaaacagttcgacagtttactgctctgaaatag

SEQ ID NO: 33284 - DNA, 600 bp, Artificial Sequence
  derived and/or modified sequence
atgagaaccgccgacagagaggccagacccggcctgcccagcctgctgctgctgctgctggccggcgccggcctgagcgccgccagcccccccgccgcccccagattcaacgtgagcctggacagcgtgcccgagctgagatggctgcccgtgctgagacactacgacctggacctggtgagagccgccatggcccaggtgatcggcgacagagtgcccaagtgggtgcacgtgctgatcggcaaggtggtgctggagctggagagattcctgccccagcccttcaccggcgagatcagaggcatgtgcgacttcatgaacctgagcctggccgactgcctgctggtgaacctggcctacgagagcagcgtgttctgcaccagcatcgtggcccaggacagcagaggccacatctaccacggcagaaacctggactaccccttcggcaacgtgctgagaaagctgaccgtggacgtgcagttcctgaagaacggccagatcgccttcaccggcaccaccttcatcggctacgtgggcctgtggaccggccagagcccccacaagttcaccgtgagcggcgacgagagagacccccactag

SEQ ID NO: 33285 - DNA, 972 bp, Artificial Sequence
  derived and/or modified sequence
atgagaaccgccgacagagaggccagacccggcctgcccagcctgctgctgctgctgctggccggcgccggcctgagcgccgccagcccccccgccgcccccagattcaacgtgagcctggacagcgtgcccgagctgagatggctgcccgtgctgagacactacgacctggacctggtgagagccgccatggcccaggtgatcggcgacagagtgcccaagtgggtgcacgtgctgatcggcaaggtggtgctggagctggagagattcctgccccagcccttcaccggcgagatcagaggcatgtgcgacttcatgaacctgagcctggccgactgcctgctggtgaacctggcctacgagagcagcgtgttctgcaccagcatcgtggcccaggacagcagaggccacatctaccacggcagaaacctggactaccccttcggcaacgtgctgagaaagctgaccgtggacgtgcagttcctgaagaacggccagatcgccttcaccggcaccaccttcatcggctacgtgggcctgtggaccggccagagcccccacaagttcaccgtgagcggcgacgagagagacaagggctggtggtgggagaacgccatcgccgccctgttcagaagacacatccccgtgagctggctgatcagagccaccctgagcgagagcgagaacttcgaggccgccgtgggcaagctggccaagacccccctgatcgccgacgtgtactacatcgtgggcggcaccagccccagagagggcgtggtgatcaccagaaacagagacggccccgccgacatctggcccctggaccccctgaacggcgcctggttcagagtggagaccaactacgaccactggaagcccgcccccaaggaggacgacagaagaaccagcgccatcaaggccctgaacgccaccggccaggccaacctgagcctggaggccctgttccagtag

SEQ ID NO: 33286 - DNA, 600 bp, Artificial Sequence
  derived and/or modified sequence
atgaggactgcggaccgagaagctcggcccggactgccctccctgttgctacttctgttggccggggccggcctctccgccgcctcccccccagcggccccaaggttcaacgtgtcactggactccgtgcccgaactgcgctggctgcccgtcctgagacactacgacctggacttggttagagccgcaatggcccaggtgatcggggatcgtgtccccaaatgggtgcacgtactcattggcaaggtggtcctggagctcgaaagatttctgcctcagccattcacgggagagattcgcgggatgtgtgacttcatgaatttgtccctagcagactgcttgctcgttaatctcgcctacgagtcgtcagtgttctgtacatcgatagtagctcaggacagcagaggacatatctatcatggcaggaacctggattatcccttcggaaacgtactacgcaagctcaccgtcgatgtccagtttctgaagaatggacaaatagctttcacgggcacaacatttatcggctatgtggggctgtggacagggcagtctcctcataagtttacagtaagcggcgatgagcgagacccacattag

SEQ ID NO: 33287 - DNA, 972 bp, Artificial Sequence
  derived and/or modified sequence
atgcgtacagccgatagggaagctagaccaggacttccttccctgctgcttctcctgctggctggggctggactatccgccgcatcacccccggccgcccccaggtttaatgtgagtctcgacagcgtccctgagttaaggtggctgcccgtgctccgacactacgacctcgacctggttcgagctgcaatggcacaagtaatcggcgacagggttcccaagtgggtacatgtgctgattgggaaagtggtgctggagctcgaaaggttcttaccccagccttttactggggaaattcgtggtatgtgcgatttcatgaacctgtcactggccgattgcttactggtcaacctcgcttatgaatccagcgtgttttgtacatcaatcgttgcccaggattccagaggacatatataccatggtcggaacctcgactatccatttgggaacgtcctccgtaaactgactgtggacgtgcaattcctcaagaacggtcaaatcgcattcaccggaactacattcatagggtacgtcggtttatggacagggcaaagcccacacaaatttacagtgtccggggatgaaagagacaaagggtggtggtgggagaacgccatcgcggcgctctttaggaggcatattccggtgagctggctcataagagccaccctcagtgagtctgagaacttcgaagctgcagtgggtaagcttgctaagacgccacttattgctgacgtgtattacatcgtcggagggacctcccccagagagggcgtggtcatcacccggaaccgagacggccccgcagacatttggcctctcgatccccttaatggagcctggtttagggtagaaactaactacgaccactggaaaccagccccaaaagaagatgataggcgcacatcagctattaaggctctgaacgctacgggacaagctaatttgagtttggaagccctcttccagtag

SEQ ID NO: 33288 - DNA, 972 bp, Artificial Sequence
  derived and/or modified sequence
atgcggacggcagacagagaagcccgcccggggctgccatccctcctcctgctgctcctggcaggcgccgggctgagcgccgcctcccccccagcggccccccgtttcaacgttagtttggatagcgttccagaactgcgttggttgcccgtgctcagacattacgatctggacctggtgcgggcggctatggcgcaggtgataggcgacagggtgccaaagtgggtccacgtgctgatcggaaaagtcgtacttgagctcgagaggttcctgcctcagcctttcaccggggaaatcagaggaatgtgcgatttcatgaacttatctcttgctgactgtctacttgtgaacttagcctacgagagcagcgtgttttgcacctctattgtggcacaagattctcggggtcatatctatcatggccgaaatctcgattaccctttcggaaacgtgctgaggaaattgactgtggacgtccaattcctgaagaatggtcagatagcctttactggcactacctttataggctacgtgggactctggacagggcaatctccacataaattcacagtcagcggcgatgaacgtgataagggatggtggtgggagaacgcaattgccgccttgttccggcgtcatatccccgtttcctggctgatccgagctacgctcagcgagagcgaaaatttcgaagcagctgtgggaaagctggcaaaaacgccgctgatcgcggacgtgtactacattgtggggggcacctccccccgcgaaggggtggtgattacgcgaaacagagatggacctgctgatatctggcccctggatccgttgaacggcgcctggtttcgagttgagaccaattacgaccactggaagcccgccccaaaggaagacgaccgaagaacatctgcgatcaaggctctgaacgccactgggcaagccaatctgtcactggaagctctttttcaatag

SEQ ID NO: 33289 - DNA, 600 bp, Artificial Sequence
  derived and/or modified sequence
atgaggacagctgaccgggaggcccggcccggcctgcccagcctgctgctgctgctgctggccggggccggcctgtctgctgccagccccccagctgccccccgcttcaacgtgtccctggacagcgtgcctgagctgcgctggctgcctgtgctgcggcactatgacctggacctggtgcgggccgccatggcccaggtgattggagacagagtgcccaagtgggtgcacgtgctgattggcaaggtggtgctggagctggagcgcttcctgccccagcccttcaccggggagatccggggcatgtgtgacttcatgaacctgagcctggccgactgcctgctggtgaacctggcctatgagagctctgtgttctgcaccagcatcgtggcccaggacagccggggccacatctaccacggcaggaacctggactacccctttggaaatgtgctgaggaagctgactgtggatgtgcagttcctgaagaatggccagatcgccttcaccggcaccaccttcatcggctacgtgggcctgtggacaggccagagcccccacaagttcaccgtgtctggagatgagcgggacccccactag

SEQ ID NO: 33290 - DNA, 972 bp, Artificial Sequence
  derived and/or modified sequence
atgaggacagctgaccgggaggcccggcccggcctgcccagcctgctgctgctgctgctggccggggccggcctgtctgctgccagccccccagctgccccccgcttcaacgtgtccctggacagcgtgcctgagctgcgctggctgcctgtgctgcggcactatgacctggacctggtgcgggccgccatggcccaggtgattggagacagagtgcccaagtgggtgcacgtgctgattggcaaggtggtgctggagctggagcgcttcctgccccagcccttcaccggggagatccggggcatgtgtgacttcatgaacctgagcctggccgactgcctgctggtgaacctggcctatgagagctctgtgttctgcaccagcatcgtggcccaggacagccggggccacatctaccacggcaggaacctggactacccctttggaaatgtgctgaggaagctgactgtggatgtgcagttcctgaagaatggccagatcgccttcaccggcaccaccttcatcggctacgtgggcctgtggacaggccagagcccccacaagttcaccgtgtctggagatgagcgggacaagggctggtggtgggagaatgccatcgccgccctcttcagaagacacatccctgtgtcctggctgatccgggccaccctgtctgagagcgagaactttgaggccgctgtgggcaagctggccaagacccccctgattgctgatgtgtactacatcgtgggcggcaccagcccccgggagggcgtggtgatcaccaggaacagagatggccctgctgacatctggcccctggaccccctgaatggagcctggttccgggtggagaccaactatgaccactggaagccagcccccaaggaggatgacaggaggaccagcgccatcaaggccctgaatgccaccggccaggccaacctgagcctggaggccctcttccagtag

SEQ ID NO: 33291 - DNA, 600 bp, Artificial Sequence
  derived and/or modified sequence
atgcggaccgccgaccgggaggcccggcccggcctgcccagcctgttgctcctcctattagcaggtgcgggactgtcagcagccagcccaccagctgccccccggttcaatgtatctctcgacagcgtgcccgagttacgctggctgccggtcctccgccattatgatcttgacctggtgagagccgcaatggcacaggtcatcggagaccgggtgcctaagtgggtccacgtcttgataggaaaagtggtgctggaactggagcgttttttacctcagcccttcacaggcgaaatcagaggaatgtgtgatttcatgaacctgtctcttgccgactgcctgctcgtaaaccttgcttacgagtcaagtgtgttctgcacctctatagtcgcccaggattctcgtgggcatatctaccatggaagaaatctggactatcccttcggtaacgtgttgaggaaactgaccgttgacgtgcagtttcttaagaacggccaaatcgcattcaccggaacaactttcatcgggtacgtgggcctgtggacagggcaatccccacacaaatttaccgtctcaggagatgaaagggacccacactag

SEQ ID NO: 33292 - DNA, 972 bp, Artificial Sequence
  derived and/or modified sequence
atgcggaccgccgaccgggaggcccggcccggcctgcccagcctgctcctgctgctgcttgccggcgctggcttgtcagccgcgtctcctccggcagccccccggtttaatgttagccttgattctgtccctgaactgagatggctccctgtgctgagacattatgatcttgacctagtgagggctgccatggctcaggtcatcggggatagggtgccgaaatgggtgcacgtgcttatcggcaaggttgtcctcgaattagaacgctttctgccgcagccttttaccggcgagattcgcggcatgtgcgacttcatgaacctgagcctggccgactgccttctcgttaacttggcctacgaatcctctgtgttctgcacctccatagtcgcccaagattcccgcggacatatttatcacgggagaaatttggactaccccttcggcaacgttcttcgcaagctgacagtggatgtacagtttttgaagaatggacagatcgcatttaccggcaccaccttcattggctacgtgggcctgtggaccggacagtccccacacaagttcacagtgtcaggagacgaaagagataaggggtggtggtgggaaaatgctattgcagcactctttagaaggcacatcccagtgtcttggctgatccgagctaccttaagtgaaagtgagaacttcgaagctgccgtaggaaagctggccaagacgcccctcatcgccgatgtctactatatcgttggcggtacgtcccctcgcgagggagtggttattacaagaaaccgggatggtcccgcggatatatggcctttggatccactcaacggtgcttggttcagggtggaaacaaactacgaccactggaagccagcacctaaggaggatgacaggaggacgtcagctattaaggcccttaacgcaaccggacaggctaatctttccctggaggccctgttccagtag

SEQ ID NO: 33293 - DNA, 661 bp, Artificial Sequence
  derived and/or modified sequence
acggcttacccgggctccgacagcggctgcaggtctccaagttgcggccgctggagcccgagccatgcggaccgcggaccgggaggcgcgcccggggcttccgtccctgctgctgctgctgctggccggggccgggctgtcagccgcctcgcccccagcagcgccgcgcttcaacgtgagcctggactcggtccccgagctgcgctggctgcccgtgctgcggcactacgacttggacttggtgcgcgccgcgatggcgcaagtcatcggggacagagtccccaagtgggtgcacgtgttaatcggaaaagtggtcctggagctggagcgcttcctgccccagcccttcaccggcgagatccgcggcatgtgtgacttcatgaacctcagcctggcggactgccttctggtcaacctggcctacgagtcctccgtgttctgcaccagtattgtggctcaagactccagaggccacatttaccatggtcggaatttggattatccttttgggaatgtcttacgcaagctgacagtggatgtgcaattcttaaagaatgggcagattgcattcacaggaactacttttattggctatgtaggattatggactggccagagcccacacaagtttacagtttctggtgatgaacgagaccctcac

SEQ ID NO: 33294 - DNA, 1731 bp, Artificial Sequence
  derived and/or modified sequence
acggcttacccgggctccgacagcggctgcaggtctccaagttgcggccgctggagcccgagccatgcggaccgcggaccgggaggcgcgcccggggcttccgtccctgctgctgctgctgctggccggggccgggctgtcagccgcctcgcccccagcagcgccgcgcttcaacgtgagcctggactcggtccccgagctgcgctggctgcccgtgctgcggcactacgacttggacttggtgcgcgccgcgatggcgcaagtcatcggggacagagtccccaagtgggtgcacgtgttaatcggaaaagtggtcctggagctggagcgcttcctgccccagcccttcaccggcgagatccgcggcatgtgtgacttcatgaacctcagcctggcggactgccttctggtcaacctggcctacgagtcctccgtgttctgcaccagtattgtggctcaagactccagaggccacatttaccatggtcggaatttggattatccttttgggaatgtcttacgcaagctgacagtggatgtgcaattcttaaagaatgggcagattgcattcacaggaactacttttattggctatgtaggattatggactggccagagcccacacaagtttacagtttctggtgatgaacgagataaaggctggtggtgggagaatgctatcgctgccctgtttcggagacacattcccgtcagctggctgatccgcgctaccctgagtgagtcggaaaacttcgaagcagctgttggcaagttggccaagactccccttattgctgatgtttattacattgttggtggcacgtccccccgggagggggtggtcatcacgaggaacagagatggcccagcagacatttggcctctagatcctttgaatggagcgtggttccgagttgagacaaattacgaccactggaagccagcacccaaggaagatgaccggagaacatctgccatcaaggcccttaatgctacaggacaagcaaacctcagcctggaggcacttttccagtgagcaagaagaacccatcaggtgattgtcaggcctctgagcccaagctaagccatcatatgccctgtgacctgcacgtatacatccagatggcctgaagcaactgaagatccacaaaagaagagaaaatagccagttcctgccttaactgatgacatttcaccattgtgatttgttcctgccccaccctaactgatcaattgactttgtgacaagacaccctccccacccttgcaataatgtactttgtgatattcccccgcccttgtgaatgtactttgtacgatacaccctccccacccttgagaaggtactttgtaatatcctctccgcccttgagaatgtactttgtaagatccacttcctgcctgcaaaaaattgctccgaactccaccgtctatcccaaacctataagaactaatgataatcctaccaccctttgctgactccttttttggactcagcccacgtgcacccaggtgattaaaaagctttattgctcacatgaagcctatttggtggtctcttcacacagatgtgtgtgacagtgataacagtgtcacgtggtttaactacaatgtgtccagatattgaattttgtttaagcctgcttgggatttgttgtgctccccaaatttcaagtttgtgtcttttgttcaattttggaaaatagtcagctatctcagaattgctcacct

SEQ ID NO: 33295 - DNA, 972 bp, Artificial Sequence
  derived and/or modified sequence
atgcggaccgccgaccgggaggcccggcccggcctgcccagcctgttgctgttgcttttggcaggcgccgggctgagcgcggcctctccccctgccgcacccagattcaacgtatctttggactcagtccctgagctgagatggttgcctgtgctccggcactatgacctggacctggtgcgagccgcaatggcccaggtcatcggggaccgcgtaccaaagtgggtccatgtgctgattgggaaggtggtgttggagcttgagcgcttcctgccacagcccttcacaggagaaattagagggatgtgcgacttcatgaatctgtccctagccgattgcctgctcgtgaatctggcctatgagagctcggtgttttgtacgtccatagtcgctcaggactctaggggccatatctatcatggtcgcaatctcgattaccccttcggtaacgtactgagaaaactgactgtcgatgtccaatttctgaagaacggacagatagccttcactggaacaacttttatagggtacgtgggattgtggaccggccagtcaccccataagttcactgtttccggcgacgaaagagacaagggatggtggtgggaaaatgccattgctgctctgtttcgaagacatatccctgtgtcatggttgatcagggccaccctttccgagtcagagaacttcgaagcagccgtggggaagctggcgaaaactcctctaatcgcagatgtgtattatattgtcggaggcacctccccccgggagggcgtcgttataacaaggaacagagatggtcccgctgatatctggccactcgaccccttgaacggcgcttggtttcgggttgagactaattacgatcattggaagcccgccccaaaggaagacgacagaaggacttccgctatcaaggcactcaacgcgaccggccaggccaacttgtctctcgaggccctcttccagtag

SEQ ID NO: 33296 - DNA, 600 bp, Artificial Sequence
  derived and/or modified sequence
atgaggaccgcggatagggaagcgaggcctggactcccgtctctgttactcctcctcctcgccggagccggtctgtccgccgctagccccccagccgcacctaggtttaatgtgagtctggacagcgtgcctgagctgagatggctgcccgtcctccgccactacgatctcgatctggtcagagccgctatggctcaggtgattggcgacagggttcctaaatgggtacacgttcttatcggcaaggtggttttagagctggagaggtttctgccccagcctttcaccggagagattcgaggcatgtgtgatttcatgaacctgtctttagctgactgcctgctggtgaatctggcctacgaatcctccgtgttttgcacttccatcgtggcccaggactcccggggacatatctaccacgggaggaacctggactatcccttcggcaatgttctcagaaagctgactgtagacgtgcaattcttaaagaatgggcagatcgcctttactggaaccacattcatcgggtatgtcggcctgtggacggggcagtctccccacaaatttacggtgtccggcgacgaacgcgacccccattag

SEQ ID NO: 33297 - DNA, 972 bp, Artificial Sequence
  derived and/or modified sequence
atgcgaacagcggacagagaagccaggcccggattgccatctctcttgctcctcctgctcgcgggagctgggctgagtgccgcatcaccaccggctgcccctaggtttaatgtctctttggactccgtccctgaacttcgctggctgcctgttcttagacactacgatctggatctggtgcgcgcagccatggcacaagttataggcgatagggttcccaaatgggtccatgtgctcatcggcaaggtcgtgttagagctggagcgattcttgcctcagcccttcacgggcgagatccgcggtatgtgcgactttatgaacctgtctctcgcagattgtctgcttgtgaacctcgcctacgagagttcagtcttttgcaccagcatagttgcccaggattctagaggtcacatttatcatgggagaaacctcgattacccttttggcaatgtgcttcgcaagttaaccgttgacgtgcagtttttgaagaatggacaaatcgcttttacaggtacaacttttatcggatacgtgggcctatggacgggtcagtcccctcacaaattcacggtaagcggagacgagcgcgataagggctggtggtgggaaaacgctattgctgccctgttccggaggcacatcccagtgagctggctcatccgagcgactttaagcgaatctgagaactttgaagccgctgtcgggaagcttgctaagactcctctgattgcagatgtctactacattgtcggcggaacgtctcctcgcgaaggcgtagtcattactcggaacagagatggccctgcggacatttggcccctcgatccgttgaatggcgcatggttcagagtggagacaaactatgaccattggaagcctgccccaaaggaagatgatcggcgtacatctgccattaaagccctcaacgcaactggccaggccaatctgtcgctggaggccctattccagtag

SEQ ID NO: 33298 - DNA, 972 bp, Artificial Sequence
  derived and/or modified sequence
atgcgcactgctgatcgcgaagctcgtccaggactcccctcacttcttctgctcctcttggcaggagcgggtctgtccgccgctagtcctcccgctgctcctcgattcaatgtgtctctcgacagcgtaccagaattacgttggctccccgtgctaagacactacgatctcgatctggtcagagctgcaatggcccaagtcatcggtgacagggtccccaagtgggtgcatgtgttaattggaaaggtggtcctggagctagagcggtttctcccacaacccttcaccggcgagatcagggggatgtgcgattttatgaacctaagccttgccgattgtctcctagtgaacctcgcctatgaaagctcagttttctgcaccagcatagttgctcaggactctcggggtcacatctaccacggcagaaatctggactatccttttggtaatgtccttagaaagctcacagtggatgtacaattccttaaaaacggccagattgcattcaccggcacaaccttcatcgggtatgtaggcttgtggacaggacagagcccacataagttcacggtgtcaggcgatgaacgggataagggttggtggtgggagaacgcgattgccgctctgtttcgcagacatatacccgtttcttggcttatacgggcaaccctctcagagagcgagaatttcgaggccgctgtgggcaagttggctaagactcccttgatagctgatgtttattacattgtcggaggcacctcaccccgtgagggggtcgtcatcactagaaatcgggacggccctgcagatatctggccattggaccctcttaatggcgcttggttccgtgtcgagacgaactacgatcactggaaaccggcacctaaggaagacgacagacggacgtctgccatcaaagctttgaatgccaccggacaggccaatttgtcactcgaagcactgtttcaatag

SEQ ID NO: 33299 - DNA, 1300 bp, Artificial Sequence
  derived and/or modified sequence
gttgcggccgctggagcccgagccatgcggaccgcggaccgggaggcgcgcccggggcttccgtccctgctgctgctgctgctggccggggccgggctgtcagccgcctcgcccccagcagcgccgcgcttcaacgtgagcctggactcggtccccgagctgcgctggctgcccgtgctgcggcactacgacttggacttggtgcgcgccgcgatggcgcaagtcatcggggacagagtccccaagtgggtgcacgtgttaatcggaaaagtggtcctggagctggagcgcttcctgccccagcccttcaccggcgagatccgcggcatgtgtgacttcatgaacctcagcctggcggactgccttctggtcaacctggcctacgagtcctccgtgttctgcaccagtattgtggctcaagactccagaggccacatttaccatggtcggaatttggattatccttttgggaatgtcttacgcaagctgacagtggatgtgcaattcttaaagaatgggcagattgcattcacaggaactacttttattggctatgtaggattatggactggccagagcccacacaagtttacagtttctggtgatgaacgagataaaggctggtggtgggagaatgctatcgctgccctgtttcggagacacattcccgtcagctggctgatccgcgctaccctgagtgagtcggaaaacttcgaagcagctgttggcaagttggccaagactccccttattgctgatgtttattacattgttggtggcacgtccccccgggagggggtggtcatcacgaggaacagagatggcccagcagacatttggcctctagatcctttgaatggagcgtggttccgagttgagacaaattacgaccactggaagccagcacccaaggaagatgaccggagaacatctgccatcaaggcccttaatgctacaggacaagcaaacctcagcctggaggcacttttccagtgaaagcaggccaggtgcggtggctcacgcctgtaatcccagccctttgggaggccaaggcgggtggatcacttgaggtcaggagttcaagaccagcctggccaacatggtgaaacctcgtctctactaaaaatacaaaaatcaaccaggcatgacggtgcacgcctgttatcacagctacttgggaagcagcggctggagaattgcttgaacctgggaagtcgaggctgcaagtgagctgagatcatgccatggcagtctagcctgggcaacagagcgagactctgtttcaaaaaaaaaaagaaaa

SEQ ID NO: 33300 - protein, 1486 aa, Artificial Sequence
  derived and/or modified sequence
MSLTSWFLVSSGGTRHRLPREMIFVGRDDCELMLQSRSVDKQHAVINYDASTDEHLVKDLGSLNGTFVNDVRIPEQTYITLKLEDKLRFGYDTNLFTVVQGEMRVPEEALKHEKFTIQLQLSQKSSESELSKSASAKSIDSKVADAATEVQHKTTEALKSEEKAMDISAMPRGTPLYGQPSWWGDDEVDEKRAFKTNGKPEEKNHEAGTSGCGIDAKQVEEQSAAANEEVLFPFCREPSYFEIPTKEFQQPSQITESTIHEIPTKDTPSSHITGAGHASFTIEFDDSTPGKVTIRDHVTKFTSDQRHKSKKSSPGTQDLLGIQTGMMAPENKVADWLAQNNPPQMLWERTEEDSKSIKSDVPVYLKRLKGNKHDDGTQSDSENAGAHRRCSKRATLEEHLRRHHSEHKKLQKVQATEKHQDQAVVFGVDDNQDYNRPVINEKHKDLIKDWALSSAAAVMEERKPLTTSGFHHSEEGTSSSGSKRWVSQWASLAANHTRHDQEERIMEFSAPLPLENETEISESGMTVRSTGSATSLASQGERRRRTLPQLPNEEKSLESHRAKVVTQRSEIGEKQDTELQEKETPTQVYQKDKQDADRPLSKMNRAVNGETLKTGGDNKTLLHLGSSAPGKEKSETDKETSLVKQTLAKLQQQEQREEAQWTPTKLSSKNVSGQTDKCREETFKQESQPPEKNSGHSTSKGDRVAQSESKRRKAEEILKSQTPKGGDKKESSKSLVRQGSFTIEKPSPNIPIELIPHINKQTSSTPSSLALTSASRIRERSESLDPDSSMDTTLILKDTEAVMAFLEAKLREDNKTDEGPDTPSYNRDNSISPESDVDTASTISLVTGETERKSTQKRKSFTSLYKDRCSTGSPSKDVTKSSSSGAREKMEKKTKSRSTDVGSRADGRKFVQSSGRIRQPSVDLTDDDQTSSVPHSAISDIMSSDQETYSCKPHGRTPLTSADEHVHSKLEGSKVTKSKTSPVVSGSSSKSTTLPRPRPTRTSLLRRARLGEASDSELADADKASVASEVSTTSSTSKPPTGRRNISRIDLLAQPRRTRLGSLSARSDSEATISRSSASSRTAEAIIRSGARLVPSDKFSPRIRANSISRLSDSKVKSMTSAHGSASVNSRWRRFPTDYASTSEDEFGSNRNSPKHTRLRTSPALKTTRLQSAGSAMPTSSSFKHRIKEQEDYIRDWTAHREEIARISQDLALIAREINDVAGEIDSVTSSGTAPSTTVSTAATTPGSAIDTREELVDRVFDESLNFRKIPPLVHSKTPEGNNGRSGDPRPQAAEPPDHLTITRRRTWSRDEVMGDNLLLSSVFQFSKKIRQSIDKTAGKIRILFKDKDRNWDDIESKLRAESEVPIVKTSSMEISSILQELKRVEKQLQAINAMIDPDGTLEALNNMGFPSAMLPSPPKQKSSPVNNHHSPGQTPTLGQPEARALHPAAVSAAAEFENAESEADFSIHFNRFNPDGEEEDVTVQE

SEQ ID NO: 33301 - DNA, 4461 bp, Artificial Sequence
  derived and/or modified sequence
atgagcctaacttcttggtttctggtgagctcaggcggtactaggcaccgtctgcctcgagagatgatctttgtagggcgcgacgactgcgaattaatgctccagtctagatccgtcgataagcagcacgccgtgatcaattatgatgcatcaactgacgagcatctcgtcaaggatctggggtctctgaacggaacttttgtgaatgacgtcaggatcccggaacaaacatatattaccctgaagttagaagacaagcttcggtttggttacgacacgaacctttttaccgtggtgcagggcgaaatgcgtgttccagaggaagcgctgaaacacgaaaagtttaccattcaactgcaactctctcagaaatccagcgaaagcgagctgtccaaatccgccagcgctaaatcgattgatagtaaggtggcagacgctgctaccgaagtccagcataagacaactgaagcactaaaatctgaggagaaagccatggacataagcgccatgcccagggggactcctttgtatggccaaccgtcctggtggggcgacgatgaagtggacgagaaacgtgctttcaagacaaatgggaagccagaagagaagaaccatgaggccgggacttccggctgcggaatagatgcaaagcaggtggaagagcagagcgccgcagcaaatgaagaagtcctgtttcccttctgtcgtgagcctagctacttcgaaatccctacaaaagagttccagcagccctctcagataaccgaaagcaccatccacgagatcccaactaaggacaccccatcaagccacattaccggagcaggacatgccagttttaccattgaatttgatgattccacacccggcaaagtaacaatacgtgatcatgttacaaagtttacctctgaccagcggcacaaatccaaaaaaagctcacccggaacacaggatctgctcggcatacagactggcatgatggccccagagaacaaggtggccgactggctcgcccaaaataacccaccccagatgctgtgggagcgaaccgaagaggactcgaaatctataaaatctgacgttcctgtttacttgaaaaggttgaagggcaataaacatgacgacggcactcagtcagactctgagaacgctggggctcatcggaggtgttccaaacgtgccacgctcgaggagcacctgaggaggcatcattccgagcacaaaaagttgcagaaagttcaggctactgagaaacatcaggaccaggctgtggtatttggtgttgatgataaccaagactacaatcgccctgtcatcaacgagaaacacaaggatttaattaaagactgggccctctcctctgcagcagctgttatggaagaaagaaaacctctgactaccagtggctttcaccactcggaggagggaacctcctcctcaggaagtaaaagatgggtcagccagtgggcatcgttggcagccaatcatacacgacatgaccaggaagaacggatcatggaattcagcgctcctctgccattggaaaacgagacagagatcagtgagagcggcatgaccgtcaggagcaccggctcagcaacctccttagcaagccagggagagcgcaggcggcgaaccttgcctcaacttcctaacgaggagaagtcactggagtcacacagagccaaagtggtcacccagcgttcagagattggcgaaaagcaggacacggaattacaggaaaaggagacccctacccaagtttatcagaaagataaacaagatgccgaccgaccactgtccaagatgaatcgagctgtaaatggggaaactctaaaaactggcggggataacaagacccttttgcacctggggagctccgctcccggaaaggagaaaagtgagaccgacaaggaaaccagcctggtgaagcagacacttgctaagctgcagcagcaagagcagcgggaagaagctcagtggacccctactaagctgagttcgaagaatgtttcagggcagacggataagtgccgggaagaaacatttaaacaagagagccaacctcctgagaagaactccggtcactctactagtaagggggaccgcgtagcacagtcagagagtaagaggcgtaaggcagaagagatcctcaagtcccagacccccaaggggggcgataaaaaggaaagttcaaagagtctagtcaggcaggggagctttaccattgaaaagccgagcccgaatatcccgattgagttgatccctcatattaataagcagacttccagcaccccaagctctctggctctgaccagcgccagccgcatccgagaacggtccgaaagccttgacccagatagctcaatggatactacattaattttgaaagacactgaggccgtcatggcttttcttgaggccaaactgagagaagataataagaccgacgaaggacctgacactccaagctacaatagagataactccattagccccgagtcagatgtggatacagcatcaaccattagcctggtcactggagaaaccgaacggaagagtacgcagaagaggaaaagcttcacttctctctacaaagataggtgctcaaccggctccccatccaaggacgtgacaaagtcttcctcttccggggctcgggagaaaatggaaaaaaagaccaagtcccggagtaccgacgtggggtcacgggctgacggacgcaagtttgtgcagtcatcaggcaggatacgacagccttctgtggatctcacagatgatgatcagacctcaagcgtgccccacagcgcaatatctgacatcatgagcagcgaccaagaaacttatagttgtaagccacacggccgtacgccattgaccagtgctgacgagcacgtgcacagtaagctggaaggctctaaagtcaccaagtctaagacctccccagtggtgtccggcagtagtagcaagagcaccaccctcccaagacccaggcccaccaggacatctttgctgagaagagccagacttggtgaggcaagtgacagcgagcttgcagacgcagacaaggcttccgtggcttccgaagtcagcactacctcatccacgtctaaacctccaacaggaagacggaacatttctcggatcgacctcttggcacagccccggcgtactaggctaggctccctgtccgcacggtcggatagcgaggctaccataagtaggtccagcgcttcctctcgaacagccgaggccatcatccgctctggcgctagattggtacctagtgataaatttagcccaaggatacgggccaattccattagcaggctgtcagactccaaggtcaagtctatgacgtccgcccatggcagcgcctccgtgaattcaaggtggcgccgattcccaactgactacgcaagcaccagtgaggacgaattcggatccaatagaaactcacctaaacacaccaggctacgcacttctccagcactaaagacaactaggctgcagtccgccggctccgccatgcccaccagtagtagtttcaagcacagaattaaggaacaggaagattatattcgagactggaccgcccacagggaggaaatcgcccgaatctcccaagacttagccttgatcgctcgggagatcaatgatgttgccggcgagatcgattcagtgacaagctccgggactgctcccagtaccacggtctccactgctgctaccacccccggctcagccatcgacacccgagaggaactagttgatagggtgtttgacgagagcctaaacttcagaaagatcccaccactggtgcatagtaaaacccctgagggtaacaacggccgaagcggagatcctcggccacaggctgccgagcctccagatcacttgaccattacccgcaggcgaacgtggtctcgagatgaagtgatgggggacaacctgcttttgtcttcggtgttccaattctctaaaaaaatccgtcagtctatcgataaaacagcaggcaaaatacgcattctgttcaaggataaggatagaaactgggacgatattgagagcaaactgcgcgcagagagtgaggtccccatcgtgaagactagtagcatggaaattagtagtatcctgcaggagctgaaaagagtagaaaagcagcttcaggctattaacgctatgatcgatccggacggcacgctggaggccctaaacaatatgggtttcccatcggcgatgctccccagccctcccaaacagaaatcgtcacccgtgaataatcatcattcccccgggcaaactcctaccctgggacagcccgaggccagggcccttcaccccgccgcagtgtctgctgctgccgagttcgagaacgctgagtcggaggccgatttcagcatccacttcaatagattcaaccccgatggagaggaggaagacgtgacggtacaggagtag

SEQ ID NO: 33302 - DNA, 4461 bp, Artificial Sequence
  derived and/or modified sequence
atgagcctgacctcctggttcctggtgtcctctgggggcaccaggcaccggctgccccgggagatgatctttgtgggcagagatgactgtgagctgatgctgcagagccgctctgtggacaagcagcacgccgtcatcaactatgatgccagcacagatgagcacctggtgaaggacctgggcagcctgaatggcacctttgtgaatgatgtgcgcatccctgagcagacctacatcaccctgaagctggaggacaagctgcgcttcggctatgacaccaacctcttcaccgtggtgcagggcgagatgagggtgcctgaggaggccctgaagcatgagaagttcaccatccagctgcagctgagccagaagagcagcgagagcgagctgagcaagagcgccagcgccaagagcattgacagcaaggtggctgatgctgccacagaggtgcagcacaagaccacagaggccctgaagtctgaggagaaggccatggacatcagcgccatgccccggggcacccccctgtatggccagcccagctggtggggagatgatgaggtggatgagaagagggccttcaagaccaacgggaagccagaggagaagaaccatgaagctggcaccagcggctgcggcattgatgccaagcaggtggaggagcagagcgctgctgccaatgaggaggtgctcttccccttctgccgggagcccagctactttgagatccccaccaaggagttccagcagcccagccagatcacagagagcaccatccacgagatccccaccaaggacacccccagcagccacatcactggagctggccacgccagcttcaccatcgagtttgatgacagcaccccaggcaaggtgaccatccgggaccacgtgaccaagttcaccagtgaccagaggcacaagagcaagaagagcagccctggcacccaggacctgctgggcatccagacaggcatgatggcccctgagaacaaggtggccgactggctggcccagaacaaccccccccagatgctgtgggagaggacagaggaggacagcaagagcatcaagagtgatgtgcctgtgtacctgaagaggctgaagggcaacaagcatgatgatggcacccagagcgacagtgaaaatgctggggcccaccggcgctgcagcaagagggccaccctggaggagcacctgcggcggcaccacagcgagcacaagaagctgcagaaggtgcaggccacagagaagcaccaggaccaggccgtggtgtttggagtggatgacaaccaggactacaacagacctgtgatcaatgagaagcacaaggacctgatcaaggactgggccctgagcagcgctgctgctgtgatggaggagaggaagcccctgaccaccagcggcttccaccacagcgaggagggcaccagcagcagcggcagcaagcgctgggtgtcccagtgggccagcctggccgccaaccacaccaggcatgaccaggaggagcgcatcatggagttcagcgcccccctgcccctggagaatgaaacagagatcagcgagagcggcatgacagtgcgcagcacaggcagcgccaccagcctggccagccagggcgagaggagaagaaggaccctgccccagctgcccaatgaggagaagagcctggagagccaccgggccaaggtggtgacccagaggagtgaaattggagagaagcaggacacagagctgcaggagaaggagacccccacccaggtgtaccagaaggacaagcaggatgctgaccggcccctgagcaagatgaacagagctgtgaatggagagaccctgaagacaggaggagacaacaagaccctgctgcacctgggcagcagcgcccctgggaaggagaagtcagaaacagacaaggagaccagcctggtgaagcagaccctggccaagctgcagcagcaggagcagcgggaggaggcccagtggacccccaccaagctgagcagcaagaatgtgtctggccagacagacaagtgccgggaggagaccttcaagcaggagagccagcccccagagaagaacagcggccacagcaccagcaagggggacagagtggcccagagcgagagcaagaggaggaaggccgaggagatcctgaagagccagacccccaagggcggggacaagaaggagagcagcaagagcctggtgcggcagggcagcttcaccatcgagaagcccagccccaacatccccatcgagctgatcccccacatcaacaagcagaccagcagcacccccagcagcctggccctgaccagcgccagccgcatccgggagaggtctgagagcctggaccctgacagctccatggacaccaccctcatcctgaaggacacagaagctgtgatggccttcctggaggccaagctgcgggaggacaacaagacagatgagggccctgacacccccagctacaacagagacaacagcatcagccctgagagtgatgtggacacagccagcaccatcagcctggtgactggagaaacagagaggaagagcacccagaagaggaagagcttcaccagcctgtacaaggaccgctgcagcacaggcagccccagcaaggatgtgaccaagagcagcagcagcggggcccgggagaagatggagaagaagaccaagagccgcagcacagatgtgggcagcagagcagatggcaggaagtttgtgcagagcagcggccgcatccggcagcccagcgtggacctgacagatgatgaccagaccagctctgtgccccacagcgccatcagtgacatcatgagcagtgaccaggagacctacagctgcaagccccacggccgcacccccctgaccagcgcagatgaacatgtgcacagcaagctggagggcagcaaggtgaccaagagcaagaccagccctgtggtgtctggcagcagcagcaagagcaccaccctgccccggccccggcccaccaggaccagcctgctgcggcgggcccggctgggggaggccagtgacagcgagctggctgatgctgacaaggcctctgtggccagcgaggtgtccaccaccagcagcaccagcaagcccccaactggaagaagaaacatcagcagaattgacctgctggcccagcccaggaggacccggctgggcagcctgagcgcccggagtgacagcgaggccaccatcagccgcagcagcgccagcagcaggacagctgaggccatcatccgcagcggggcccggctggtgcccagcgacaagttcagcccccgcatccgggccaacagcatcagccggctgagtgacagcaaggtgaagtccatgaccagcgcccacggcagcgcctctgtgaacagccgctggaggcgcttccccacagattatgccagcaccagtgaagatgaatttggcagcaacagaaacagccccaagcacacccggctgcggaccagccctgccctgaagaccacccggctgcagagcgctggcagcgccatgcccaccagcagcagcttcaagcaccgcatcaaggagcaggaggactacatccgggactggacagcccaccgggaggagatcgcccgcatcagccaggacctggccctgattgcccgggagatcaatgatgtggccggggagattgattctgtgaccagcagcggcacagcccccagcaccaccgtgtccacagctgccaccaccccaggcagcgccatcgacacccgggaggagctggtggacagagtgtttgatgagagcctgaacttcaggaagatcccccccctggtgcacagcaagaccccagagggcaacaacggccgcagcggggacccccggccccaggccgctgagcccccagaccacctgaccatcaccaggaggaggacctggagcagagatgaggtgatgggagacaacctgctgctgagcagcgtcttccagttcagcaagaagatccggcagagcattgacaagacagctgggaagatccgcatcctcttcaaggacaaggacaggaactgggatgacatcgagagcaagctgcgggcagagagcgaggtgcccatcgtgaagaccagctccatggagatcagcagcatcctgcaggagctgaagagggtggagaagcagctgcaggccatcaatgccatgattgatcctgatggcaccctggaggccctgaacaacatgggcttccccagcgccatgctgcccagcccccccaagcagaagagcagccctgtgaacaaccaccacagccctggccagacccccaccctgggccagcctgaggcccgggccctgcaccctgctgctgtgtctgctgctgctgagtttgaaaatgctgagagcgaggccgacttcagcatccacttcaaccgcttcaacccagatggagaggaggaggatgtgacagtgcaggagtag

SEQ ID NO: 33303 - DNA, 4461 bp, Artificial Sequence
  derived and/or modified sequence
atgagcctgaccagctggttcctggtgagcagcggcggcacccggcacaggttacccagggagatgatttttgtcgggagagatgactgcgaactgatgctccaatctagatcagttgacaagcaacacgccgtgattaattatgacgcctctactgatgaacaccttgtgaaagacctgggctcccttaacggcactttcgtcaatgacgtaagaataccggagcagacctacatcactctgaaactcgaagataagttgcgatttggatatgacacaaaccttttcacagtggtgcagggggagatgagggtccccgaagaggcgttgaaacatgaaaaatttactatacagctgcagctttcacagaagtcaagtgagagcgaactgtccaagtcagcctcagccaagagcatcgatagcaaagttgctgacgctgctaccgaagtgcaacacaagactacagaggcactgaagtcggaggaaaaagccatggatatttccgcgatgccacgcggtaccccactgtacggccagcccagctggtggggagatgatgaagtggatgagaagagggctttcaagacaaatggtaaacccgaagaaaaaaatcacgaggccggcacatccggctgcgggatcgacgccaagcaggtggaggagcagtcagccgctgcaaacgaggaggtgttgtttcccttctgccgggaacctagctactttgagatacctacaaaggaatttcagcagccgagtcagattaccgagtctaccatccacgagatcccgactaaggacacccccagttctcatattacgggagctggccatgcatcctttaccattgagttcgatgatagtacaccgggtaaagtcactatccgggaccatgtgaccaaattcactagcgaccagcgccacaagtccaagaagtcatcacccggtacccaggatctgttgggcattcaaaccggtatgatggcccctgagaataaagtagccgattggctggcacaaaataatccacctcagatgctctgggagcgaacggaggaggactccaagtcaatcaagtcagatgtgcctgtatacctcaaaaggttaaaggggaacaagcacgatgacggtacgcagtccgattcggagaatgccggtgcccatcgccgctgctcaaagagagccacattggaggagcacctgcgtagacaccactctgagcacaagaagctgcagaaggtccaggcaacagaaaagcaccaggaccaggctgtcgtgttcggcgtggatgataaccaggactataatcgacccgtgataaatgagaagcataaagacttgattaaggactgggctttatcaagtgccgctgctgtgatggaagaaaggaagccactgacaactagcggattccatcacagcgaagagggcaccagctcctcgggatcaaagagatgggtctcccagtgggcaagcttggccgccaaccatactaggcacgaccaggaagagcggatcatggaattctccgcacctctgcccttggagaatgaaacggaaatcagtgagagcgggatgactgtccgctccacaggctccgctacttcgttggcaagccaaggggagagacggagacgaacattgcctcagctccccaacgaggagaagagtctggagtcccatcgggccaaggtagtgacacaacgtagtgagattggcgagaaacaggacaccgaactccaagaaaaagaaacacccacacaggtgtaccagaaggataagcaggacgcagaccgaccgctgagcaagatgaaccgcgcagttaatggtgagaccctcaagacggggggagacaacaagaccttactgcacctgggatcttctgctccaggtaaggagaagagcgagaccgataaggaaaccagcctggtcaagcagaccctggccaagctgcaacagcaggaacagcgtgaggaagctcagtggacccccaccaagctcagctccaaaaacgtgagtgggcaaacagacaagtgccgggaggagacctttaaacaggagagccaaccaccagaaaagaactcggggcattcaacttccaaaggtgatagggtggcccagtccgagagcaaaaggaggaaggcggaggaaatcctgaagtcccaaacccctaaagggggcgataaaaaagagtcatccaagagtttggttagacagggaagcttcactatcgagaaaccctcaccaaatatccctatcgaactcattccacatatcaacaaacagacgtccagtacaccaagcagcctcgccttgaccagtgcgagtcgcatccgtgagcgaagcgagtcactggatccggattcctctatggatacaaccctcattcttaaggacactgaggcagttatggccttcctggaggcaaaactccgagaggacaataagaccgatgaaggtcccgacactccctcatacaaccgtgataattccattagtccagagtctgatgtggataccgcctcaactatctccctggtcaccggagagaccgaaagaaagtccacccagaagcggaagtcttttacctccctctataaagataggtgtagtactggaagcccctcaaaggacgtaactaagtcaagcagttccggagccagggaaaagatggaaaagaagaccaaatccaggtccactgatgtgggctcccgcgccgacggtcgcaaattcgtgcagtcctctggtcggattcgccaaccatctgtggatttaacagacgacgaccaaacaagcagcgttcctcattcagctatcagcgatattatgtccagcgaccaagaaacgtacagttgtaagccccacgggagaacccctcttacaagtgccgatgaacatgtgcactccaagttagagggaagtaaagtgactaagagtaagacttccccagtggtgtcaggaagttcatccaagagcacaacgcttccaaggccgagaccaacacgaaccagcctgctgcggagagcacgactcggcgaagcttcagactctgaactggcagacgccgacaaggcaagcgtggcaagtgaagtctccaccacaagcagcactagcaaaccacccacaggcaggcgcaacatttctcgcattgatctgttggcacagccccgtagaacacggctgggttccctgagcgcccgatctgacagcgaggcgaccataagtcgctcaagtgcatcaagccgcaccgctgaggccattatacgttcgggcgcccgtctcgtgccaagtgataaattctcgcctagaattagagccaacagcatttcacggctgtctgattctaaagtgaaatccatgacgtctgcacacggcagcgccagcgtgaatagccgatggcgaagatttcccaccgactatgcaagcacgtccgaggatgaattcggtagcaaccggaactctccaaaacacacccgccttcgtaccagccccgctcttaaaacaacccggctgcagtctgccggctccgctatgcccacctcatcttccttcaagcaccggatcaaggagcaggaagactacattcgagattggactgcccacagggaagaaattgcaaggatatcgcaggatctggcccttatcgcgcgtgaaattaacgatgtcgcaggagagatcgactccgtcacttcaagtggcacggcgccttcaaccactgtgtccacagcagctacaacgccaggttcagcaatagatactagagaagagctggtggatcgtgtgttcgatgagtctttgaatttccgtaaaatcccccctctggtccactcaaagacccccgaagggaacaatggaagaagtggcgatcccagaccccaggctgcagagccccccgaccatctcacaataacgcggcgcaggacctggtcaagagatgaggtgatgggagacaacttgctgctgagttcagtattccaattctccaaaaagatacgccaatcaattgataaaacggcgggcaagattaggattctttttaaggataaagatagaaattgggatgacattgaatctaagctgagagcagagtccgaggtgcctattgtcaagaccagttccatggaaatcagcagtatcctgcaggagctgaaacgcgtcgaaaagcagctccaggctattaacgccatgatcgatccagacggaacccttgaagcacttaacaacatggggttcccaagtgccatgctcccgtctccgccgaagcaaaaatcctccccagtgaacaaccaccatagccccgggcagactccgactcttggacagccggaagcccgggccctccaccctgccgcggtgagtgccgccgctgagtttgagaacgcagagagcgaagctgacttctcaattcattttaataggtttaatcccgatggcgaggaagaggatgtaaccgtacaagagtag

SEQ ID NO: 33304 - DNA, 4461 bp, Artificial Sequence
  derived and/or modified sequence
atgtccctgacaagctggtttctggtatccagtggcggaactagacacagattaccacgggagatgatttttgttggcagagacgactgcgagttgatgcttcagagtcgctctgtggacaaacagcatgctgtcatcaactatgacgcttctaccgatgagcacttggtgaaggacctcggctccctgaatgggacattcgtcaacgacgtgcgtatccctgagcaaacgtatattacactgaagttggaggacaagctgcgttttgggtacgatactaatctgtttactgtggttcaaggggagatgcgggttcctgaggaggccctgaaacatgagaagttcaccattcagctgcagttatctcagaaatcgtcagaaagcgaacttagtaagtcagcctccgccaaaagcattgatagcaaggtcgcagacgccgctaccgaagtgcagcacaaaacaaccgaggccctgaagtccgaagagaaggccatggatatttctgccatgcctagaggtacacctctctatggccagcccagctggtggggcgacgacgaggttgacgaaaagagagcctttaaaactaacggaaagcccgaggaaaaaaaccacgaggcgggtacttccggatgtggaatagacgctaagcaagtggaagaacaatctgctgctgctaatgaggaggtcctcttcccattctgcagagagccctcttactttgaaatacctactaaagagtttcagcaaccctcccaaataactgaaagcacaatccacgagattcccaccaaagatacccccagcagtcacatcactggcgcaggacacgcatcttttacaattgagtttgacgactccaccccaggcaaggtgaccatacgagatcatgtgaccaaatttacaagtgaccagagacacaaatccaagaagagctcccctggtactcaggacctgcttgggattcagactggtatgatggctcctgaaaataaagtggctgactggctggcccagaacaaccctccacagatgttatgggaaaggacagaagaggatagcaagtctatcaagtccgatgtgcccgtgtatctgaaaaggctgaaaggcaataagcacgatgacggcacgcagagcgactctgagaatgcaggcgctcatagaaggtgtagcaagcgcgctactctcgaagagcatcttcgcaggcaccacagcgagcacaaaaaactccagaaggtgcaagctaccgaaaaacaccaagatcaagcagtggtgtttggcgtggatgacaatcaggactataaccgacctgtgatcaacgaaaaacacaaggaccttattaaggactgggcactctcctccgcggctgcagtgatggaggagagaaagcccttaacaacctccggcttccaccactcggaagagggcacctcttcctccggaagtaagagatgggtgtcacagtgggcatcgctggccgcaaatcatacgcggcacgatcaagaagagagaattatggagttcagtgccccacttcctctagagaacgagaccgagatatctgagagtgggatgacagtgcggtccacgggaagcgccacaagtctggcatcccagggcgaacgacggcgacggacgttgcctcagctacctaacgaggagaaatccctggaatcccacagggctaaagtcgtgacacaaaggtccgaaattggggaaaaacaggataccgagctgcaggagaaagaaacccccacccaagtctatcagaaggataagcaagatgcagacagacccctttcaaagatgaatcgggctgtgaatggagagacccttaagacaggaggggacaataagacactgctgcatctgggcagctctgcacctggaaaggagaaatccgagacagacaaggagaccagtctcgtgaagcagacactcgcgaaactgcagcagcaggagcaacgcgaggaagcccagtggacccccaccaagttatctagcaagaatgtcagtggacagacagacaagtgtcgcgaggaaacatttaagcaagagtctcaaccaccggagaaaaatagcggccattcaacaagtaagggggaccgggtggcccagtccgaaagcaaacgcaggaaagctgaagagattttaaaaagccagacccccaaaggcggagataaaaaggaaagttctaagagcctggttaggcagggcagttttactatagaaaagcctagcccaaacatccccatcgagcttattcctcacatcaacaagcagacatcctcgacaccatccagcctggctctaacgagtgcctcacggatcagggagaggagcgagagcctggacccggattccagcatggatacaactcttattcttaaggatacagaggccgtcatggcctttcttgaggccaaattgcgcgaggacaacaaaacagacgagggacctgacacgcctagttacaaccgggacaactcaatctctcccgaatcggacgtggacacggcatctacaatctctctggtcacaggcgagactgagagaaaatcgactcagaagagaaagagttttaccagcctgtataaggacaggtgcagtactggatcgccatccaaagacgtgacaaagtcctcctcatccggagcacgcgaaaaaatggaaaagaaaaccaaaagtcggtcaactgatgtgggttcacgcgcagacggcaggaaatttgtgcagtcctctggccgaattcggcagccgagcgttgatctgactgacgacgatcagacttctagcgtcccccatagtgccatttctgatattatgtcgagtgaccaggaaacctactcatgcaagccacatggcagaactcctctgacaagtgctgacgagcacgtccacagtaagctcgaagggagtaaggtgactaagtccaaaactagccctgtggtcagtggttcttcatctaaaagtactactctgccgagaccgcgtccgaccagaacttccctgttgcggagagctcggcttggcgaggctagcgattctgagctggcagacgccgataaggcaagcgtggcctcagaagtctcgactacctcatcaaccagtaaacctccgaccggaaggagaaacatcagcagaattgaccttctggctcaaccaagaaggacacgacttggttctctgtcggctcggagcgatagtgaggcaaccataagccgctcgtcagcaagctccagaacagccgaagccataatccgctctggggcaaggctggtcccaagtgacaagttcagtcccagaatcagagcgaattcaatctcaaggctttcagattctaaggtgaagtcgatgacaagtgcgcacggttccgccagtgttaactccagatggcgtcgattccccacagattacgctagcacaagtgaagatgagtttggatctaatcgcaactccccaaagcatactagactgagaacaagccctgctctgaaaactaccaggttacaaagtgctgggtcagccatgcctacctcctcctcatttaaacatcgtattaaggagcaagaagactacatcagagactggacagcacaccgggaggaaattgctaggatcagtcaggatctggccctgatcgccagggagataaacgacgtggccggtgagattgactcagtcacctcctcgggcacagcaccctccactaccgttagcacggcagcaacgactccaggtagcgccatcgatacccgcgaggaacttgtcgaccgtgtttttgacgagagtctgaattttcggaagattccccctctagtgcacagtaagacaccggagggcaataatgggaggtcaggagacccgcgacctcaggccgctgagccccctgaccaccttaccattacccggagacgcacatggtctagggacgaggtgatgggagataacctccttctgagttccgtatttcagtttagtaagaaaatccgccagtccatcgacaagacagccggaaagataagaatactcttcaaagacaaagacagaaactgggacgatattgagagtaaactgagggccgaatcagaggtacccatagttaagacttcctcgatggagatttcttctatcctccaggagctaaaacgcgttgagaaacaactgcaagcgatcaacgccatgattgacccagatggcactctggaggctttaaataatatgggttttccttctgctatgctcccttctcctcctaagcagaagtcaagccctgtgaataaccatcacagcccaggccagacacctactcttgggcagcctgaggccagagcgctgcatccagcagctgtctctgccgcagctgagtttgaaaatgctgaatctgaagctgacttttccatccactttaaccgttttaatccagatggggaggaggaggacgtgacggtgcaggagtag

SEQ ID NO: 33305 - DNA, 6805 bp, Artificial Sequence
  derived and/or modified sequence
ttggaactgggcaggaggggatagggtccggctcctcgccctttcccgaggcgcctgcgcactaggcagtcggtctttgccgttaccgctatgtgtggggcgtgtgtggaataacgttattgcccagcggagctgagggccccggagctcgaccgcagcggcagcgacgacaacagcggcgacgacgacgacgacgaggtggggggaggacggcgtgcgagagactcacgggacgcgacgcgccccgcctcccccgtccggtccctctctccacggtaaggggatgacgtagctttgccaaagacttagaagctaagcagaaaatgagcttaacatcctggtttttggtgagcagtggaggcactcgccacaggctgccacgagaaatgatttttgttggaagagatgactgtgagctcatgttgcagtctcgtagtgtggataagcaacacgctgtcatcaactatgatgcgtctacggatgagcatttagtgaaggatttgggcagcctcaatgggacttttgtgaatgatgtaaggattccggaacagacttatatcaccttgaaacttgaagataagctgagatttggatatgatacaaatcttttcactgtagtacaaggagaaatgagggtccctgaagaagctcttaagcatgagaagtttaccattcagcttcagttgtcccaaaaatcttcagaatcagaattatccaaatctgcaagtgccaaaagcatagattcaaaggtagcagacgctgctactgaagtgcagcacaaaactactgaagcactgaaatccgaggaaaaagccatggatatttctgctatgccccgtggtactccattatatgggcagccgtcatggtggggggatgatgaggtggatgaaaaaagagctttcaagacaaatggcaaacctgaagaaaaaaaccatgaagctggaacatcagggtgcggcatagatgccaagcaagttgaggaacaatctgcagctgcaaatgaagaagtactttttcctttctgtagggaaccaagttattttgaaatccctacaaaagaattccagcaaccatcacaaataacagaaagcactattcatgaaatcccaacaaaagacacgccaagttcccatataacaggtgcagggcatgcttcatttaccattgaatttgatgacagtaccccagggaaggtaactattagagaccatgtgacaaagtttacttctgatcagcgccacaagtccaagaagtcttctcctggaactcaagacttgctggggattcaaacaggaatgatggcacccgaaaacaaagttgctgactggctagcacaaaacaaccctcctcaaatgctatgggaaagaacagaagaggattctaaaagcattaaaagtgatgttccagtgtacttgaaaaggttgaaaggaaataaacatgatgatggtacgcaaagtgattcagagaacgctggggctcacaggcgctgtagcaaacgtgcaactcttgaggaacacttaagacgccaccattcagaacacaaaaagctacagaaggtccaggctactgaaaagcatcaagaccaagctgttgtgtttggagtagatgacaatcaggattataataggcctgttatcaacgaaaaacataaagatctaataaaagattgggctctcagttctgctgcagcagtaatggaagaaagaaaaccactgactacatctggatttcaccactcagaggaaggcacatcttcatctggaagcaaacgttgggtttcacagtgggctagtttggctgccaatcatacaaggcatgatcaagaagaaaggataatggaattttctgcacctcttcctttagagaatgagacagagatcagtgagtctggcatgacagtgagaagtactggctctgcaacttccttggctagccagggagagagaaggagacgaactcttccccagcttccaaatgaagaaaagtctcttgagagccacagagcaaaggttgtaacacagaggtcagagataggagaaaaacaagacacagaacttcaggagaaagaaacacctacacaggtataccagaaagataaacaagatgctgacagacccttgagtaaaatgaacagggcagtaaatggagagactctcaaaactggtggagataataaaaccctacttcacttaggcagctctgctcctggaaaagagaaaagtgaaactgataaggaaacttctttggtaaagcaaacattagcaaaacttcaacaacaagaacaaagggaggaggctcagtggacacctactaaattgtcttccaaaaatgtttcaggtcagacagataaatgtagggaggaaacttttaaacaagaatcacaacctccagaaaaaaattcaggacattctacaagcaaaggagacagagtggcacaaagtgagagcaagagaagaaaagctgaggaaattctgaaaagtcagactccaaagggaggagacaagaaggaatcctccaagtcattagtgcgacaagggagcttcactatagaaaaacccagcccaaacatacccatagaacttattccccatataaataaacagacttcctctactccttcttctttagcattaacatctgcaagtagaatacgagaaagaagtgagtctttggatcctgattctagtatggacacaacccttattctaaaagacacagaagcagtaatggcttttctagaagctaaactacgtgaagataataaaactgatgaaggaccagatactcccagttataatagagacaattctatttcaccagaatctgatgtagatacagctagtacaatcagtctggttactggagaaactgaaagaaagtcaacccaaaagcgaaagagtttcactagcctctataaagataggtgttccacaggttctccttccaaagatgttacaaaatcatcatcttcaggtgctagggaaaaaatggaaaagaaaacaaaaagtcgttccacagatgtgggttcaagagcagatggtcgtaaatttgttcagtccagtgggagaataagacagccctcagtagacttaacagatgatgaccaaacctctagtgtacctcattctgccatctctgatattatgtcatctgatcaagaaacttactcttgtaaacctcatggacggactccacttacctcagctgatgagcatgtacattccaaactggaaggaagtaaagtaacgaaatctaagacttctccggtggtatctggttcatctagtaaatcaaccacccttccaaggccacgacctaccaggacttccctcttgcgcagagcacgacttggtgaagcttcagacagtgaacttgctgatgctgacaaagcatctgttgcttctgaagtatccacaacaagttctacatcaaaacctcccacaggaaggcgtaacatctctcggattgatttattggctcagcctcgtagaacacgacttggctcactgtcagctcgtagtgactctgaagcaacaatttctagaagtagtgcctcttcgaggaccgcagaagccatcattagaagtggagccagactagtaccatcagataaattttctcctagaattagagctaacagtatctctcgactctcagactccaaggtcaaaagtatgacctcagctcatggctctgcttcagtaaattcaagatggaggcgctttcctactgattatgcttccacctcagaagatgaatttggatcaaaccgtaattcccctaaacatacccgtctacgtacttctccagccctgaaaaccactcgcttgcagagcgctggatcagcaatgcctactagttcttcattcaaacaccggattaaagagcaggaagactacatccgagattggactgctcatcgagaagagatagccaggatcagccaagatcttgctctcattgctcgggagatcaacgatgtagcaggagagatagattcagtgacttcatcaggcactgcccctagtaccacagtaagcactgctgccaccacccctggctctgccatagacactagagaagagttggttgatcgtgtttttgatgaaagcctcaacttccgaaagattcctccattagttcattccaaaacaccagaaggaaacaacggtcgatctggtgatccaagacctcaagcagcagagcctcccgatcacttaacaattacaaggcggagaacctggagcagggatgaagtcatgggagataatctgctgctgtcatccgtctttcagttctctaagaagataagacaatctatagataagacagctggaaagatcagaatattatttaaagacaaagatcggaattgggatgacatagaaagcaaattaagagccgaaagtgaagtccctattgtgaaaacctcaagcatggagatttcttctatcttacaggaactgaaaagagtagaaaagcagctgcaagcaatcaatgctatgattgatcctgatggaactttggaggctctgaacaacatgggatttcccagtgctatgttgccatctccaccgaaacagaagtccagccctgtgaataaccaccacagcccgggtcagacaccaacacttggccaaccagaagctagggctcttcatcctgctgctgtttcagccgcagctgaatttgagaatgctgaatctgaggctgatttcagtatacatttcaatagattcaaccccgatggggaagaggaagatgttacagtacaagaatgactttctcttgattgttgaaaaatcattacctgtggaatggctaggaatattggaagcagcatagtgttgatgtacgcaaaacaagacagcttggtcagctacaatcttggaatccctgtcttcttaattttatttatttatttttgacgtataatgtagtatatcaatcctttcaaactatttagataaccacttgatgcacaaataggaaaaagcagattgtggcagtgtcgccttttgtggttttatgattttcaaattgaatttaatgattacaccctttcccttcatagatcttttttcttttttttaagccatgctgtgacctacaagcaaactaaatagccaacatttctgaacccctaagtctcctgtgccaagctgctccctgaaatggacttcttcatctgtacagatttgttaaaccattctatttgcttcttaataataggatttatattagtactcattaccattggacacaatgacataagtactctccacagtaaagcagacctttcacaacagtcactctgtgtcctaaaattttccaacatagatgtgatttatataactttgttgatacgtaaattgtcttggggtttacggaaattaactattatgtttgcactaagatttgctgggagtggtaggtggacatatctatatatcaataaggactaaccgtcttttttgtacataggagattgataatactgtatttgttttaagcccacagtgttttactccactttcaaaaagatcaatttggcactttttttcattttttttaatggaaataagatttggtctctcattttaggttaaatgataactagaaagattaaactagacagatagtttaggtggagtatatttttaaaactcagaacatgtatattggtcctgtgttaccaagtttatatgtgacagttgaaaaagaaattcccttgaaatgatcatgaggttaaaattttcttcattaggggacttggagaaccagtagtcgtaagattagttgatagtttcactcccaagcaatgaattgcttctgtgtgtttccctgtaggactcaatagtaaatgctgtctgtcttacacatttataaggaccctgcaagacgacgacaaaggcctttggcctgtgctactaaacaagaagcctatgaaaaatttcttctttaaacttgttttttctctttccagtaagttcacatttggataattttaaaaagaaaagtaattacctttgtgtttccagaacactataattggggtgtatcttaattcagttaaatattattagtagacctggattttcccccttgaccccatcagtctataaaggttaaactgcaacttttatgaaatggtctttaatatttccacaataatcctgtgctatatttgttttaagaaacaaagtaactctatacacttcaagactttacaggattttttaaatcctgtattgttggatcaattaataaagatgcaaaaaaactttatagagatgtaaaaacaaaactataatggatctcctatttttctttaaatacaaaaaaaaaaaggtaaatgaactattctccttgtaaagctaaattccccattctgtctaataaaggaagactgaaaaaaggttttaaagaacataaatggaaagatacaaatgctttgaaggaataaacgaaatgttaaaacagggtcaatccatttgaagaaaaagttggacaaaataatcagcattgctccctcttttatttaatatttgggtactgattatatccacatggaagtagaaggtaaggagtttaggaaaatactagaatctactctgcttacattcttgtttaagtgtttacacagtttggttcaattataaacatttggccttttactatgttatttttattttgtatgaatacattatcctccttatttatttttgttacatttattacttatgttattttgttatgcatttacaactccatttttaaataaagtgtttctggaacttta

SEQ ID NO: 33306 - DNA, 4461 bp, Artificial Sequence
  derived and/or modified sequence
atgagcctgaccagctggttcctggtgagcagcggcggcaccagacacagactgcccagagagatgatcttcgtgggcagagacgactgcgagctgatgctgcagagcagaagcgtggacaagcagcacgccgtgatcaactacgacgccagcaccgacgagcacctggtgaaggacctgggcagcctgaacggcaccttcgtgaacgacgtgagaatccccgagcagacctacatcaccctgaagctggaggacaagctgagattcggctacgacaccaacctgttcaccgtggtgcagggcgagatgagagtgcccgaggaggccctgaagcacgagaagttcaccatccagctgcagctgagccagaagagcagcgagagcgagctgagcaagagcgccagcgccaagagcatcgacagcaaggtggccgacgccgccaccgaggtgcagcacaagaccaccgaggccctgaagagcgaggagaaggccatggacatcagcgccatgcccagaggcacccccctgtacggccagcccagctggtggggcgacgacgaggtggacgagaagagagccttcaagaccaacggcaagcccgaggagaagaaccacgaggccggcaccagcggctgcggcatcgacgccaagcaggtggaggagcagagcgccgccgccaacgaggaggtgctgttccccttctgcagagagcccagctacttcgagatccccaccaaggagttccagcagcccagccagatcaccgagagcaccatccacgagatccccaccaaggacacccccagcagccacatcaccggcgccggccacgccagcttcaccatcgagttcgacgacagcacccccggcaaggtgaccatcagagaccacgtgaccaagttcaccagcgaccagagacacaagagcaagaagagcagccccggcacccaggacctgctgggcatccagaccggcatgatggcccccgagaacaaggtggccgactggctggcccagaacaaccccccccagatgctgtgggagagaaccgaggaggacagcaagagcatcaagagcgacgtgcccgtgtacctgaagagactgaagggcaacaagcacgacgacggcacccagagcgacagcgagaacgccggcgcccacagaagatgcagcaagagagccaccctggaggagcacctgagaagacaccacagcgagcacaagaagctgcagaaggtgcaggccaccgagaagcaccaggaccaggccgtggtgttcggcgtggacgacaaccaggactacaacagacccgtgatcaacgagaagcacaaggacctgatcaaggactgggccctgagcagcgccgccgccgtgatggaggagagaaagcccctgaccaccagcggcttccaccacagcgaggagggcaccagcagcagcggcagcaagagatgggtgagccagtgggccagcctggccgccaaccacaccagacacgaccaggaggagagaatcatggagttcagcgcccccctgcccctggagaacgagaccgagatcagcgagagcggcatgaccgtgagaagcaccggcagcgccaccagcctggccagccagggcgagagaagaagaagaaccctgccccagctgcccaacgaggagaagagcctggagagccacagagccaaggtggtgacccagagaagcgagatcggcgagaagcaggacaccgagctgcaggagaaggagacccccacccaggtgtaccagaaggacaagcaggacgccgacagacccctgagcaagatgaacagagccgtgaacggcgagaccctgaagaccggcggcgacaacaagaccctgctgcacctgggcagcagcgcccccggcaaggagaagagcgagaccgacaaggagaccagcctggtgaagcagaccctggccaagctgcagcagcaggagcagagagaggaggcccagtggacccccaccaagctgagcagcaagaacgtgagcggccagaccgacaagtgcagagaggagaccttcaagcaggagagccagccccccgagaagaacagcggccacagcaccagcaagggcgacagagtggcccagagcgagagcaagagaagaaaggccgaggagatcctgaagagccagacccccaagggcggcgacaagaaggagagcagcaagagcctggtgagacagggcagcttcaccatcgagaagcccagccccaacatccccatcgagctgatcccccacatcaacaagcagaccagcagcacccccagcagcctggccctgaccagcgccagcagaatcagagagagaagcgagagcctggaccccgacagcagcatggacaccaccctgatcctgaaggacaccgaggccgtgatggccttcctggaggccaagctgagagaggacaacaagaccgacgagggccccgacacccccagctacaacagagacaacagcatcagccccgagagcgacgtggacaccgccagcaccatcagcctggtgaccggcgagaccgagagaaagagcacccagaagagaaagagcttcaccagcctgtacaaggacagatgcagcaccggcagccccagcaaggacgtgaccaagagcagcagcagcggcgccagagagaagatggagaagaagaccaagagcagaagcaccgacgtgggcagcagagccgacggcagaaagttcgtgcagagcagcggcagaatcagacagcccagcgtggacctgaccgacgacgaccagaccagcagcgtgccccacagcgccatcagcgacatcatgagcagcgaccaggagacctacagctgcaagccccacggcagaacccccctgaccagcgccgacgagcacgtgcacagcaagctggagggcagcaaggtgaccaagagcaagaccagccccgtggtgagcggcagcagcagcaagagcaccaccctgcccagacccagacccaccagaaccagcctgctgagaagagccagactgggcgaggccagcgacagcgagctggccgacgccgacaaggccagcgtggccagcgaggtgagcaccaccagcagcaccagcaagccccccaccggcagaagaaacatcagcagaatcgacctgctggcccagcccagaagaaccagactgggcagcctgagcgccagaagcgacagcgaggccaccatcagcagaagcagcgccagcagcagaaccgccgaggccatcatcagaagcggcgccagactggtgcccagcgacaagttcagccccagaatcagagccaacagcatcagcagactgagcgacagcaaggtgaagagcatgaccagcgcccacggcagcgccagcgtgaacagcagatggagaagattccccaccgactacgccagcaccagcgaggacgagttcggcagcaacagaaacagccccaagcacaccagactgagaaccagccccgccctgaagaccaccagactgcagagcgccggcagcgccatgcccaccagcagcagcttcaagcacagaatcaaggagcaggaggactacatcagagactggaccgcccacagagaggagatcgccagaatcagccaggacctggccctgatcgccagagagatcaacgacgtggccggcgagatcgacagcgtgaccagcagcggcaccgcccccagcaccaccgtgagcaccgccgccaccacccccggcagcgccatcgacaccagagaggagctggtggacagagtgttcgacgagagcctgaacttcagaaagatcccccccctggtgcacagcaagacccccgagggcaacaacggcagaagcggcgaccccagaccccaggccgccgagccccccgaccacctgaccatcaccagaagaagaacctggagcagagacgaggtgatgggcgacaacctgctgctgagcagcgtgttccagttcagcaagaagatcagacagagcatcgacaagaccgccggcaagatcagaatcctgttcaaggacaaggacagaaactgggacgacatcgagagcaagctgagagccgagagcgaggtgcccatcgtgaagaccagcagcatggagatcagcagcatcctgcaggagctgaagagagtggagaagcagctgcaggccatcaacgccatgatcgaccccgacggcaccctggaggccctgaacaacatgggcttccccagcgccatgctgcccagcccccccaagcagaagagcagccccgtgaacaaccaccacagccccggccagacccccaccctgggccagcccgaggccagagccctgcaccccgccgccgtgagcgccgccgccgagttcgagaacgccgagagcgaggccgacttcagcatccacttcaacagattcaaccccgacggcgaggaggaggacgtgaccgtgcaggagtag

SEQ ID NO: 33307 - protein, 1460 aa, Artificial Sequence
  derived and/or modified sequence
MSLTSWFLVSSGGTRHRLPREMIFVGRDDCELMLQSRSVDKQHAVINYDASTDEHLVKDLGSLNGTFVNDVRIPEQTYITLKLEDKLRFGYDTNLFTVVQGEMRVPEEALKHEKFTIQLQLSQKSSESELSKSASAKSIDSKVADAATEVQHKTTEALKSEEKAMDISAMPRGTPLYGQPSWWGDDEVDEKRAFKTNGKPEEKNHEAGTSGCGIDAKQVEEQSAAANEEVLFPFCREPSYFEIPTKEFQQPSQITESTIHEIPTKDTPSSHITGAGHASFTIEFDDSTPGKVTIRDHVTKFTSDQRHKSKKSSPGTQDLLGIQTGMMAPENKVADWLAQNNPPQMLWERTEEDSKSIKSDVPVYLKRLKGNKHDDGTQSDSENAGAHRRCSKRATLEEHLRRHHSEHKKLQKVQATEKHQDQAVVFGVDDNQDYNRPVINEKHKDLIKDWALSSAAAVMEERKPLTTSGFHHSEEGTSSSGSKRWVSQWASLAANHTRHDQEERIMEFSAPLPLENETEISESGMTVRSTGSATSLASQGERRRRTLPQLPNEEKSLESHRAKVVTQRSEIGEKQDTELQEKETPTQVYQKDKQDADRPLSKMNRAVNGETLKTGGDNKTLLHLGSSAPGKEKSETDKETSLVKQTLAKLQQQEQREEAQWTPTKLSSKNVSGQTDKCREETFKQESQPPEKNSGHSTSKGDRVAQSESKRRKAEEILKSQTPKGGDKKESSKSLVRQGSFTIEKPSPNIPIELIPHINKQTSSTPSSLALTSASRIRERSESLDPDSSMDTTLILKDTEAVMAFLEAKLREDNKTDEGPDTPSYNRDNSISPESDVDTASTISLVTGETERKSTQKRKSFTSLYKDRCSTGSPSKDVTKSSSSGAREKMEKKTKSRSTDVGSRADGRKFVQSSGRIRQPSVDLTDDDQTSSVPHSAISDIMSSDQETYSCKPHGRTPLTSADEHVHSKLEGSKVTKSKTSPVVSGSSSKSTTLPRPRPTRTSLLRRARLGEASDSELADADKASVASEVSTTSSTSKPPTGRRNISRIDLLAQPRRTRLGSLSARSDSEATISRSSASSRTAEAIIRSGARLVPSDKFSPRIRANSISRLSDSKVKSMTSAHGSASALKTTRLQSAGSAMPTSSSFKHRIKEQEDYIRDWTAHREEIARISQDLALIAREINDVAGEIDSVTSSGTAPSTTVSTAATTPGSAIDTREEVGDLHGEMHKLVDRVFDESLNFRKIPPLVHSKTPEGNNGRSGDPRPQAAEPPDHLTITRRRTWSRDEVMGDNLLLSSVFQFSKKIRQSIDKTAGKIRILFKDKDRNWDDIESKLRAESEVPIVKTSSMEISSILQELKRVEKQLQAINAMIDPDGTLEALNNMGFPSAMLPSPPKQKSSPVNNHHSPGQTPTLGQPEARALHPAAVSAAAEFENAESEADFSIHFNRFNPDGEEEDVTVQE

SEQ ID NO: 33308 - DNA, 4383 bp, Artificial Sequence
  derived and/or modified sequence
atgtctctcacaagctggtttctggtgtcgtcaggcggaacccggcatagactgccacgagagatgatatttgtaggccgggacgattgtgaacttatgctgcagtcaaggtcagtggataagcaacatgctgtgatcaactacgatgcgtccacggacgaacatctggtgaaagatttaggctctttgaacgggacattcgtcaacgatgtcagaatcccagaacagacatacatcacactcaaactggaagataagctccgcttcggatacgacaccaatttatttaccgtggtccagggagagatgagagtgcctgaggaagcgctcaaacatgagaaatttaccatccagcttcagttatcccaaaaatcctccgagtccgaactctctaaaagtgcgtccgcgaagagcattgactccaaggtggctgacgcagcaactgaagtacagcacaaaacaaccgaagcactgaagtccgaagagaaagccatggacataagcgctatgccccgggggacaccactatatgggcaacctagctggtggggggacgatgaggttgatgaaaagcgcgccttcaagacaaatggaaagcctgaagaaaaaaaccacgaggccggcacctccggctgtggtattgacgccaagcaggtcgaagaacagtccgctgcagccaatgaggaggtgctcttccctttctgccgggaacctagttactttgaaattcctaccaaggaattccagcagccttcacagataactgaaagtaccattcatgagatcccaacaaaagacacaccttcaagccatatcactggcgccgggcatgcctctttcaccatagagttcgatgacagcacaccaggaaaggtcactattcgggatcacgtgacaaagttcactagtgaccagagacacaaaagtaagaagtcttctcccggcactcaggacctgttgggcatccagacagggatgatggcgccagagaataaagtggccgactggctggcgcagaataacccaccacagatgctgtgggaaaggaccgaggaagacagtaaatccattaagtctgacgtgcctgtttacctgaaaaggctgaagggcaacaagcacgacgacggcactcagtcagactcagaaaatgcaggggcgcacagaagatgcagtaaaagggctacattggaggaacatctgcgacggcaccactctgaacacaagaagttgcagaaggtgcaagccactgagaagcaccaggatcaagccgtcgtgttcggggtcgacgacaaccaggattataatcgcccggtgatcaacgaaaagcacaaggacctgatcaaggactgggcgctgagtagtgccgcagctgtgatggaggagagaaagccactgaccacctcgggatttcaccactctgaagaaggaacctcttcaagtggctctaagcgatgggtgtcacagtgggccagcttggccgccaaccacactaggcacgaccaggaggagcggattatggagttttcagctcctcttcctttagaaaatgagaccgaaattagcgagtcgggcatgacggtacgcagcactgggtctgccactagtctggccagccagggagaaagaaggagacgcaccctcccccagctacccaacgaagagaaatccttggagagccatcgagcgaaggtggtcactcagaggagcgaaataggagagaagcaggataccgaactccaagaaaaagaaactccgacacaggtgtatcaaaaagataaacaggatgccgatcggcctctgtctaaaatgaaccgggccgtgaatggcgaaactttaaagacaggcggcgataataaaaccctcctgcaccttggctcctctgctcccggtaaggaaaaatccgaaacagacaaagagacttccctcgtgaagcagactctcgcgaaactgcagcagcaggagcagagggaagaagcgcagtggaccccaacaaagcttagctcaaagaatgtctccgggcagactgacaaatgtagggaggaaaccttcaagcaggaaagtcaaccgcccgagaagaactcggggcactcaacttcgaagggcgatagggtagctcagagtgagtccaagcgcaggaaggcagaagaaatacttaaatcacagacccccaaggggggggacaaaaaggagtcttctaagtcactggtgagacagggttcattcacgatagagaaaccttcgcctaacatccctattgaacttatcccgcacataaataagcagacttcctcaacaccgtcttccctcgcgctgacctctgctagccgcattcgggagagatcagagagcctcgatcccgatagttctatggacacgacgctcatcttaaaagacaccgaagccgtaatggcattcctggaagctaaattaagagaggataacaagactgatgagggtccggacacaccttcttataatcgagataattccatctctcctgaatcggacgtagatactgcttcaaccattagtctggtgaccggcgagactgaacgcaaatctacccagaagcgcaagtcttttacctctctgtataaagataggtgttcgacagggtcacctagtaaggacgtgaccaaatccagtagtagtggtgcccgcgagaagatggagaagaaaaccaaatcccgctccacagacgtgggtagtcgtgcagatggcaggaagttcgtgcagtctagtgggcggattcgccagccgtccgtggatctaacagacgatgatcagacttcctctgtgcctcactccgctatctccgacatcatgtcctctgaccaggaaacatatagttgtaagccgcacggaagaactccgctgacaagcgcagacgagcacgtccattcaaaactggaagggagcaaagtgacaaagagtaaaacttctcccgtggtcagtggttctagctcaaagagtaccaccttaccccgaccacgccccacaaggaccagcctccttcgccgggccaggctcggggaggcatctgatagtgagctggcagatgctgataaggcctccgtcgccagtgaagttagcacaacttcgtccacctctaagccaccaacaggacgtcgaaacatatctagaatcgatcttctggcccagccacgcagaactagactggggagtctttcagcgcgcagtgactccgaggctacgatatctagaagctcagcaagttccaggaccgctgaggccattattcgctcaggcgctcgactcgtaccctccgataaattttccccacggatcagagcaaacagcatctctcggctctcggattctaaggtcaagtctatgacatcagcccacggctctgcatccgccttgaaaaccacgagactgcagtcagcagggagtgcaatgccaactagctcatcgtttaagcacaggattaaggaacaagaggactacatccgggattggaccgctcaccgcgaggagattgcccgaatcagccaggacttggctctgatcgcaagggaaataaacgatgttgccggcgagattgattcagtgacctcatctggaaccgccccttctacaactgtgagcacagcagcgactacccccgggagtgccatagatacacgagaagaggtgggcgatctgcacggtgagatgcataaactcgtcgaccgcgtgttcgatgagtcactaaacttcaggaaaattcctccactggtccacagtaagacacccgagggcaataatgggcggtctggagacccaagaccacaggcagccgaaccacccgaccaccttaccatcacacggaggagaacatggtctcgcgatgaggttatgggagataatcttttgctgagctcggtgttccaattctctaaaaagattcgccagagcatcgacaaaaccgccggaaaaattcgaatcttgtttaaggacaaagaccgcaattgggacgatatagagagtaaactgcgcgcagaatcagaggtgcccatagtcaagacctcaagcatggaaatctcctccatactacaggaactcaagcgagtcgagaagcagcttcaggccataaatgctatgatagaccctgatggcaccctggaagccttgaacaacatgggcttcccatccgcaatgctccctagccctcccaaacagaagagctcacctgtgaataaccaccacagccccggccagacgccgaccttaggccaaccagaagctcgcgccctgcacccagccgcagtgtccgcagctgccgaatttgagaacgccgaaagcgaggcagacttctctatccatttcaacaggtttaacccagacggagaggaggaggatgtcaccgtacaggagtag

SEQ ID NO: 33309 - DNA, 1407 bp, Artificial Sequence
  derived and/or modified sequence
atgtctagcgatcaggaaacctacagttgcaagcctcatggccgtaccccactcacatctgccgatgagcacgtacatagtaaattggaaggctcgaaagttacaaagtctaagaccagtcccgtggtaagcggctcaagctcaaaatccaccacccttccgagaccaaggcccacgagaacctctctgttgaggagagcccgactcggagaggccagtgatagcgagctggccgacgcagacaaggctagcgtcgcctctgaggtgtccaccactagctctacttccaagcctcctacggggcgaagaaatatctcgcgcatcgatctgctcgcacaacctagacgaactcgcctggggagcctatcggctcgctctgactctgaggcgaccatctccagatcgagcgcctcctccaggaccgcggaagccataatccgaagtggcgcccgcctagtgccaagtgataaattttcaccccgtatccgggctaattccatttctcggctttcagatagcaaagtaaagtccatgacttctgcgcatggatccgcttccgcgctgaaaacaacgcggctgcagtccgcgggctcagccatgccaacttccagctctttcaagcaccgcattaaggaacaggaggactacatccgggattggaccgctcaccgtgaagagattgcacgcatttctcaagacctcgccttaatcgccagggaaatcaacgacgtcgcaggagaaatcgactccgttacgtcttccggaactgccccgtccactactgtctccaccgccgctacaactccgggttccgccattgatacgcgagaagaggtcggagatttacatggagagatgcacaaattggtcgaccgggtgtttgacgagtctttgaattttcgaaaaatccccccacttgttcactccaaaactcctgagggcaataatggtcgctcgggagacccccggcctcaagcagcagagccgcccgatcacctgactattaccaggcggcgtacttggagcagggatgaagtgatgggagataatttgcttctgtctagcgtgtttcagttctcaaagaaaatcaggcagtcaattgataagacagcagggaaaatcagaattttattcaaagataaggaccgcaactgggatgatattgaatccaaattgcgtgccgagagcgaagtgcccatcgtgaagacaagctctatggaaatctcgtcgatcctgcaggaattaaagcgagtggagaaacagctgcaggccataaacgctatgatcgacccggatgggacattagaggccctgaacaacatgggttttccttcagcgatgcttcctagccccccaaagcagaaatctagccctgtcaataaccaccactctcctgctatgctgtag

SEQ ID NO: 33310 - DNA, 4383 bp, Artificial Sequence
  derived and/or modified sequence
atgagcctgacctcctggttcctggtgtcctctgggggcaccaggcaccggctgccccgggagatgatctttgtgggcagagatgactgtgagctgatgctgcagagccgctctgtggacaagcagcacgccgtcatcaactatgatgccagcacagatgagcacctggtgaaggacctgggcagcctgaatggcacctttgtgaatgatgtgcgcatccctgagcagacctacatcaccctgaagctggaggacaagctgcgcttcggctatgacaccaacctcttcaccgtggtgcagggcgagatgagggtgcctgaggaggccctgaagcatgagaagttcaccatccagctgcagctgagccagaagagcagcgagagcgagctgagcaagagcgccagcgccaagagcattgacagcaaggtggctgatgctgccacagaggtgcagcacaagaccacagaggccctgaagtctgaggagaaggccatggacatcagcgccatgccccggggcacccccctgtatggccagcccagctggtggggagatgatgaggtggatgagaagagggccttcaagaccaacgggaagccagaggagaagaaccatgaagctggcaccagcggctgcggcattgatgccaagcaggtggaggagcagagcgctgctgccaatgaggaggtgctcttccccttctgccgggagcccagctactttgagatccccaccaaggagttccagcagcccagccagatcacagagagcaccatccacgagatccccaccaaggacacccccagcagccacatcactggagctggccacgccagcttcaccatcgagtttgatgacagcaccccaggcaaggtgaccatccgggaccacgtgaccaagttcaccagtgaccagaggcacaagagcaagaagagcagccctggcacccaggacctgctgggcatccagacaggcatgatggcccctgagaacaaggtggccgactggctggcccagaacaaccccccccagatgctgtgggagaggacagaggaggacagcaagagcatcaagagtgatgtgcctgtgtacctgaagaggctgaagggcaacaagcatgatgatggcacccagagcgacagtgaaaatgctggggcccaccggcgctgcagcaagagggccaccctggaggagcacctgcggcggcaccacagcgagcacaagaagctgcagaaggtgcaggccacagagaagcaccaggaccaggccgtggtgtttggagtggatgacaaccaggactacaacagacctgtgatcaatgagaagcacaaggacctgatcaaggactgggccctgagcagcgctgctgctgtgatggaggagaggaagcccctgaccaccagcggcttccaccacagcgaggagggcaccagcagcagcggcagcaagcgctgggtgtcccagtgggccagcctggccgccaaccacaccaggcatgaccaggaggagcgcatcatggagttcagcgcccccctgcccctggagaatgaaacagagatcagcgagagcggcatgacagtgcgcagcacaggcagcgccaccagcctggccagccagggcgagaggagaagaaggaccctgccccagctgcccaatgaggagaagagcctggagagccaccgggccaaggtggtgacccagaggagtgaaattggagagaagcaggacacagagctgcaggagaaggagacccccacccaggtgtaccagaaggacaagcaggatgctgaccggcccctgagcaagatgaacagagctgtgaatggagagaccctgaagacaggaggagacaacaagaccctgctgcacctgggcagcagcgcccctgggaaggagaagtcagaaacagacaaggagaccagcctggtgaagcagaccctggccaagctgcagcagcaggagcagcgggaggaggcccagtggacccccaccaagctgagcagcaagaatgtgtctggccagacagacaagtgccgggaggagaccttcaagcaggagagccagcccccagagaagaacagcggccacagcaccagcaagggggacagagtggcccagagcgagagcaagaggaggaaggccgaggagatcctgaagagccagacccccaagggcggggacaagaaggagagcagcaagagcctggtgcggcagggcagcttcaccatcgagaagcccagccccaacatccccatcgagctgatcccccacatcaacaagcagaccagcagcacccccagcagcctggccctgaccagcgccagccgcatccgggagaggtctgagagcctggaccctgacagctccatggacaccaccctcatcctgaaggacacagaagctgtgatggccttcctggaggccaagctgcgggaggacaacaagacagatgagggccctgacacccccagctacaacagagacaacagcatcagccctgagagtgatgtggacacagccagcaccatcagcctggtgactggagaaacagagaggaagagcacccagaagaggaagagcttcaccagcctgtacaaggaccgctgcagcacaggcagccccagcaaggatgtgaccaagagcagcagcagcggggcccgggagaagatggagaagaagaccaagagccgcagcacagatgtgggcagcagagcagatggcaggaagtttgtgcagagcagcggccgcatccggcagcccagcgtggacctgacagatgatgaccagaccagctctgtgccccacagcgccatcagtgacatcatgagcagtgaccaggagacctacagctgcaagccccacggccgcacccccctgaccagcgcagatgaacatgtgcacagcaagctggagggcagcaaggtgaccaagagcaagaccagccctgtggtgtctggcagcagcagcaagagcaccaccctgccccggccccggcccaccaggaccagcctgctgcggcgggcccggctgggggaggccagtgacagcgagctggctgatgctgacaaggcctctgtggccagcgaggtgtccaccaccagcagcaccagcaagcccccaactggaagaagaaacatcagcagaattgacctgctggcccagcccaggaggacccggctgggcagcctgagcgcccggagtgacagcgaggccaccatcagccgcagcagcgccagcagcaggacagctgaggccatcatccgcagcggggcccggctggtgcccagcgacaagttcagcccccgcatccgggccaacagcatcagccggctgagtgacagcaaggtgaagtccatgaccagcgcccacggcagcgccagcgccctgaagaccacccggctgcagagcgctggcagcgccatgcccaccagcagcagcttcaagcaccgcatcaaggagcaggaggactacatccgggactggacagcccaccgggaggagatcgcccgcatcagccaggacctggccctgattgcccgggagatcaatgatgtggccggggagattgattctgtgaccagcagcggcacagcccccagcaccaccgtgtccacagctgccaccaccccaggcagcgccatcgacacccgggaggaggtgggggacctgcacggggagatgcacaagctggtggacagagtgtttgatgagagcctgaacttcaggaagatcccccccctggtgcacagcaagaccccagagggcaacaacggccgcagcggggacccccggccccaggccgctgagcccccagaccacctgaccatcaccaggaggaggacctggagcagagatgaggtgatgggagacaacctgctgctgagcagcgtcttccagttcagcaagaagatccggcagagcattgacaagacagctgggaagatccgcatcctcttcaaggacaaggacaggaactgggatgacatcgagagcaagctgcgggcagagagcgaggtgcccatcgtgaagaccagctccatggagatcagcagcatcctgcaggagctgaagagggtggagaagcagctgcaggccatcaatgccatgattgatcctgatggcaccctggaggccctgaacaacatgggcttccccagcgccatgctgcccagcccccccaagcagaagagcagccctgtgaacaaccaccacagccctggccagacccccaccctgggccagcctgaggcccgggccctgcaccctgctgctgtgtctgctgctgctgagtttgaaaatgctgagagcgaggccgacttcagcatccacttcaaccgcttcaacccagatggagaggaggaggatgtgacagtgcaggagtag

SEQ ID NO: 33311 - DNA, 1407 bp, Artificial Sequence
  derived and/or modified sequence
atgagcagtgaccaggagacctacagctgcaagccccacggccgcacccccctgaccagcgcagatgagcacgtgcacagcaagctggagggcagcaaggtgaccaagagcaagaccagccctgtggtgtctggcagcagcagcaagagcaccaccctgccccggccccggcccaccaggaccagcctgctgcggcgggcccggctgggggaggccagtgacagcgagctggctgatgctgacaaggcctctgtggccagcgaggtgtccaccaccagcagcaccagcaagccacccaccggcagaagaaacatcagcagaattgacctgctggcccagcccaggaggacccggctgggcagcctgagcgcccggagtgacagcgaggccaccatcagccgcagcagcgccagcagcaggacagctgaggccatcatccgcagcggggcccggctggtgcccagcgacaagttcagcccccgcatccgggccaacagcatcagccggctgagtgacagcaaggtgaagtccatgaccagcgcccacggcagcgccagcgccctgaagaccacccggctgcagagcgctggcagcgccatgcccaccagcagcagcttcaagcaccgcatcaaggagcaggaggactacatccgggactggacagcccaccgggaggagatcgcccgcatcagccaggacctggccctgattgcccgggagatcaatgatgtggccggggagattgacagcgtgaccagcagcggcacagcccccagcaccaccgtgtccacagctgccaccaccccaggcagcgccatcgacacccgggaggaggtgggggacctgcatggagagatgcacaagctggtggacagagtgtttgatgagagcctgaacttcaggaagatcccccccctggtgcacagcaagaccccagagggcaacaacggccgcagcggggacccccggccccaggccgctgagcccccagaccacctgaccatcaccaggaggaggacctggagcagagatgaggtgatgggagacaacctgctgctgagctctgtgttccagttcagcaagaagatccggcagagcattgacaagacagctgggaagatccgcatcctcttcaaggacaaggacaggaactgggatgacatcgagagcaagctgcgggcagagagcgaggtgcccatcgtgaagaccagctccatggagatcagcagcatcctgcaggagctgaagagggtggagaagcagctgcaggccatcaatgccatgattgatcctgatggcaccctggaggccctgaacaacatgggcttccccagcgccatgctgcccagcccccccaagcagaagagcagccctgtgaacaaccaccacagccctgccatgctgtag

SEQ ID NO: 33312 - DNA, 4383 bp, Artificial Sequence
  derived and/or modified sequence
atgagcctgaccagctggttcctggtgagcagcggcggcacccggcaccggttaccacgagaaatgatcttcgtcggcagggacgattgtgaattaatgttacaatctcgcagtgtggacaagcaacatgccgtcattaactatgacgcctccacggatgagcacctggtgaaagaccttggcagcctgaacggcacctttgtcaatgatgtgcgtattcccgaacagacttacattaccctgaaactggaggataagcttagattcggttacgacacgaatctgttcacagttgtgcaaggagaaatgagggtgccggaggaagccttaaaacatgagaagtttacaattcagctgcagctttctcagaagagcagcgaatcagagctttccaaatctgcctcagccaagtcgattgactctaaggttgctgacgcggccactgaagttcagcacaagaccacagaggctttgaagagcgaggagaaagccatggacattagcgcaatgcctcgcggaacaccactttatggccagccctcttggtggggggacgatgaggtcgatgagaaaagagcttttaaaaccaacgggaaacctgaagaaaagaatcatgaagctggaaccagcgggtgcggcatcgacgcaaagcaggtcgaggagcagtccgccgccgcaaacgaggaggtacttttcccattctgccgagaaccttcgtatttcgagatccctacaaaggagttccagcaacccagtcagatcactgaatcaaccatccacgagatccctaccaaggacacaccatcatctcatatcacgggcgccggacacgccagttttacaatagagttcgatgactctacacccgggaaagttacaatacgcgatcatgtcaccaaattcaccagtgaccagaggcacaagagtaagaagagttccccaggcacccaggacctcctgggcattcaaaccggtatgatggccccggagaacaaggtcgccgactggttagcccagaataaccctccccagatgctttgggaaaggactgaagaggactctaaatccataaagagcgatgtccctgtctacctcaaacgcctgaagggaaacaagcacgacgacggaactcagagcgactctgagaacgctggggcgcacagacggtgcagtaagcgggccacactggaggagcatctccgcaggcatcacagtgaacacaaaaaacttcagaaagtccaggctacggagaagcaccaggatcaggctgtggtcttcggcgtggacgataatcaggactacaatagaccggtgatcaacgagaagcataaggatctcatcaaggattgggcattgagttctgcagcagccgttatggaagagcgcaagccactgacgactagtggctttcatcattcagaggagggcaccagtagttcaggttcgaaacgctgggtgagccagtgggcctccctcgccgctaaccacactcgccacgatcaggaggaaaggattatggagttcagtgccccactgccacttgaaaatgaaactgaaatatcagaaagtggtatgacagttcgctcgacgggatctgcaacatccctcgcttcgcaaggagagaggcgtaggcggacactgccacagttgcccaatgaagagaaatccttggaaagccatagagccaaggtggtcacccagcggtcagagatcggagagaagcaggataccgaattgcaggagaaggaaacacctactcaggtgtaccagaaagataagcaagacgctgaccggcctctgtccaagatgaatagagctgttaatggagaaactcttaaaactggtggtgacaataagacgctgctgcatttggggtcctccgctccaggaaaggaaaaaagcgagaccgataaggaaactagcctggtgaagcagactcttgctaagctgcagcagcaggagcagcgggaggaagcacagtggactcccaccaagctgagttcgaagaacgtgtccgggcagacagataagtgtcgggaggaaaccttcaagcaggagagccagccaccagagaaaaactcaggccacagcacatccaagggtgatcgagtggcccagagtgagagtaagaggcggaaggccgaggaaatcctgaagagccagactcccaaaggaggagacaaaaaagagtccagcaagagtcttgtccgacagggaagcttcactatcgagaagcccagcccaaacatccctattgaactcattccacacataaataagcagacttcatccacaccatcatctcttgctctgactagcgctagccgaattcgcgaacgctcagaatccttagaccctgacagtagtatggacactaccttaattctcaaagataccgaggcggtaatggccttcctagaagccaaattgcgtgaagataataagactgatgaagggcctgacaccccgtcttataaccgggataatagcataagccccgagtctgacgtggataccgccagtactataagtctggtgacaggcgaaacagagcgcaagtccacccagaagcgcaagtcttttacaagcttgtataaggatcgctgctcaaccggctcaccttccaaagatgtgacaaagtcctcatccagtggtgcacgagaaaaaatggaaaagaagacaaaatcccggtctacagatgtcggttcaagagccgatggacgcaaatttgttcagtccagcggacgtattcgccagccttccgtggatctgaccgacgacgatcaaacaagttctgtgccacattctgccattagcgatataatgtcctccgaccaggaaacttatagctgcaaacctcacggcagaactcctcttacttccgcggatgagcatgttcacagcaagctggaaggttccaaggtgaccaaaagtaagactagtccagtagtctcgggctcctcctctaaatccaccacactcccaagacccagacctactcggacatctcttttacgtagggcgcgtcttggggaagcaagcgactctgagcttgccgacgccgataaggctagcgttgccagcgaggtttccacaacctcaagcaccagcaagccgccaaccggccgacggaatatcagcaggatcgacctcttggctcagcccaggcgcactcggctgggctctctttccgctcggtccgattctgaggctaccataagccgctccagtgcttcctcaaggacggccgaggcaattatccgatccggcgccaggctggtgccgagcgataagttcagcccccgcatccgtgctaacagcattagcaggctgagtgattcaaaggttaagtccatgacgtctgcccacggctctgccagtgccttgaagacgacgcggttgcaatccgccgggtcagcgatgccaacaagctccagctttaagcaccggatcaaggagcaggaggactacattagagattggactgctcaccgtgaggaaattgcacgcatcagtcaggacctcgctctcattgcaagagaaatcaacgacgtagccggcgagatcgacagcgtcacatcaagcggcaccgctccctccactacagtgtcaaccgctgctactacaccggggagtgcgatcgatactagagaagaagtcggagacctccacggcgagatgcacaagctcgtggaccgtgtgtttgacgaaagcctgaacttccgcaaaatacctcctctggtgcatagtaagacaccagagggaaataatggacggtccggagaccccaggccccaggcagcagaacccccagatcaccttacaatcacacggaggcggacctggagtcgggatgaagtcatgggcgataacctgctcctctcctcggtttttcagttctctaagaaaatccgccagagcatcgataaaactgcaggaaaaattagaatccttttcaaggataaggaccggaactgggacgatattgaatcaaaactgcgggctgagagtgaagtgcccatcgtgaagaccagttccatggagatcagctccatccttcaggagctgaagagagtcgagaagcaactgcaggctatcaacgccatgatcgatcctgacggaaccctcgaggctttaaataatatgggtttcccttcagcaatgttgccaagtcctcccaagcagaagtctagtccggtcaacaatcaccacagtcccggacagacacctacactgggacagcctgaggccagggctctgcaccctgccgccgtctctgccgccgcagagttcgagaatgccgagtccgaagctgacttctccatacatttcaacaggttcaacccagacggtgaggaagaggacgtgaccgtccaggaatag

SEQ ID NO: 33313 - DNA, 1407 bp, Artificial Sequence
  derived and/or modified sequence
atgagcagcgaccaggagacctacagctgcaagccccacggccggacaccactcacttcggcagatgaacatgttcacagcaaattagagggttccaaagttactaaatctaagacttcgccagtcgtgtccggtagtagtagcaagtcaacaaccttgccgaggccaagacccacaagaacctctttactccggagagctcgccttggcgaggcctctgactctgagttagcggatgcagacaaagcatccgtggcgtcagaggtgtctacaacctctagcacatctaagcccccaaccggacgacgcaacatcagtcggattgatctgttggctcagcctcgcaggacaaggctcggatccctgagcgccagatctgacagcgaggctactatctcccgaagcagtgcgagctctaggaccgctgaggccatcatccggagtggcgcccggttggtcccctctgataagttttcaccacgaattcgtgccaactcaatctccagacttagcgacagcaaggtgaaatcgatgaccagcgctcacggatccgcgagtgcactgaaaacaactaggctccagtctgccggatcagccatgcccacgtcaagttcattcaagcaccgcattaaggagcaggaagactacattcgcgattggacagcacaccgggaagaaatcgcaaggattagccaggatctcgccttgattgcacgggaaatcaacgacgtcgcaggcgaaatcgattccgtcacttcatccggtaccgccccttcaacgactgtgtccacagcagccacaactcctgggagcgcaattgatacacgcgaggaggtgggggatctccacggagaaatgcacaagctcgtcgatcgcgtgttcgatgagagtctgaacttccgcaagattccacctctggtgcatagcaagacgcctgaaggaaacaacgggagatctggcgaccctcgaccacaagcggccgagcctcctgatcacctgaccataactcggcgccgaacatggtcccgcgatgaggtgatgggggacaatctcctgttgagcagtgtctttcaatttagtaagaagatccgacagtccatcgacaagactgccggcaagatcagaatactttttaaggacaaagaccgcaactgggacgatattgagagcaagcttcgcgctgaaagcgaggtcccaattgttaagacatcatcaatggaaatcagctctatcctacaggagttgaagagagtggagaagcaactacaggccattaacgccatgatcgatcccgacggcacccttgaggccctcaataacatgggcttccccagcgctatgctgccaagtcctcctaaacagaagagctcccccgtcaataatcaccacagccctgccatgctttag

SEQ ID NO: 33314 - DNA, 4383 bp, Artificial Sequence
  derived and/or modified sequence
atgtccctgacctcctggttccttgtgtcctctggcggtacaaggcaccgtctgccacgggagatgattttcgtgggtcgcgatgattgcgagctcatgcttcaaagtcgctcagtggacaagcagcatgcagtcattaattacgatgcatccaccgacgagcatctggttaaggacctcggaagcctcaatggaaccttcgtgaatgacgtgagaatcccggagcagacctacataactttgaaactcgaagacaagttgcggttcggctacgatactaatcttttcactgtcgtgcagggagagatgagggtgcccgaagaggctctcaagcatgaaaaattcaccatacaattacaattgtcccagaaatcatccgagagtgaattgagtaagtcggcgagtgcaaagtccattgatagtaaagttgctgatgctgccacagaggtacaacacaagacaacggaagcccttaagagtgaagaaaaggcaatggacatttccgcaatgccccgaggaactcctttgtacgggcaaccgtcctggtggggagacgacgaagtggatgaaaaacgggcattcaaaaccaatggtaaacccgaagagaaaaaccacgaagctggcacgtcaggctgtggcatcgacgccaaacaggtggaagagcaaagcgccgctgcaaatgaggaagtcctctttcctttctgcagggaaccctcgtactttgagattcccacaaaagaatttcaacagccatcacaaatcacggagagcacaatacacgaaatcccaacaaaagacaccccatcctctcatatcaccggagccggacacgcatcattcacgattgaatttgacgactcgacgccaggtaaagtgaccatcagagaccacgtgactaagttcaccagcgaccaacgacacaagtctaaaaagagctcgcctggaacacaggacctcctcgggatccaaacaggcatgatggcgcctgaaaataaggtagcagactggctggcgcaaaacaatcctccccagatgctctgggagaggacagaagaggactctaaatctataaagtccgacgtgccagtctacctaaagagactgaagggcaacaaacatgacgatggtactcagtctgactccgagaatgcgggtgcccatcgtcgctgctccaagcgtgcgaccttggaagagcacttacgaagacaccattctgaacacaagaaactgcagaaagtgcaggccactgaaaaacaccaggatcaggctgtggttttcggcgttgacgataaccaggattacaatcggccagtaattaatgaaaagcataaagacctgatcaaagattgggctctctcatcggcggctgcagtcatggaggaacgaaagcctctcaccacttctggcttccatcattcagaggaggggacctcttcatcgggatcaaagcgctgggtgtcacagtgggcaagtctcgctgccaaccacacacgccacgaccaggaagagcgcatcatggaattttctgcgccactcccattagagaatgaaaccgaaatctctgagagcggcatgaccgttcgaagcactgggagcgccacctcactagcctctcagggtgagcgtaggcgaaggactctacctcagctgccgaatgaggagaagtccctggagtctcacagagcaaaggtagtcacacagcggtccgaaatcggcgagaagcaggacacggaactgcaggaaaaggagacgccaacgcaagtgtaccagaaagataagcaggatgctgataggcccctgtcgaagatgaatcgggctgtaaatggcgagactctcaaaacaggaggcgacaacaaaaccttattgcacttgggatcctccgccccaggtaaggaaaagtcagaaacagataaagagacctccttggtgaagcagacgttggcgaagctccagcaacaagagcagagggaggaggcacagtggacccccactaaactgtccagcaaaaatgtcagtggacagaccgataagtgtcgagaggaaactttcaaacaggagagccagcctcccgagaaaaatagcgggcactccacttctaagggcgaccgggtggcccagagcgaatctaagaggcgcaaggctgaggagattctcaagtctcagacccccaagggcggagacaaaaaggaaagttctaagagccttgttagacaagggtccttcacaatagagaaaccaagtcccaacatcccaatcgaactgatcccccacatcaataagcagacctcatccacccccagttcactggcgttaacttccgcctctagaatcagagagagatcagagtctctagaccccgactcatccatggacaccaccctcatacttaaagacaccgaggccgtcatggctttcctcgaagcgaaattacgagaagataacaagaccgatgaaggccctgacactccctcctataatcgtgacaatagtatatcacccgaatccgatgttgatactgcctctactatttctctggtaaccggcgagaccgagcggaaatctacacagaaaaggaaaagttttacttctctgtataaagatcggtgtagcacaggctcaccgtcaaaggacgtgacaaagtcaagcagctcaggcgcaagggaaaaaatggaaaagaagaccaaatccaggagtaccgatgttggctcgagggcagacggtaggaaatttgtccagtcctctggaaggatacggcagcctagtgtggacctgacggatgacgatcagacatcaagtgtccctcacagtgcaatctccgatataatgtctagcgaccaggaaacttatagctgcaagccgcatgggaggacaccactcacctccgctgacgagcacgtgcatagcaagctggaggggtcaaaggtcacaaagtcaaaaacctccccagtagtaagcggatctagttcaaagtctaccacattgccccgacccaggcctacccgcacctccctgctcagacgggctagactcggagaggcctcagactccgagctagcagatgcagataaggcctctgtggcaagcgaggtatccactacaagtagcacatccaagcccccaactggcaggagaaatatctcacgcatcgatctcctagctcaaccgaggaggacaaggctgggaagcttgtccgctcggtccgactctgaagccacaatttctaggtctagcgcttctagcaggaccgctgaggcaatcattcgctcaggagcgagattagttcctagcgacaaattctcccccaggatccgggcaaattctatcagcaggctctccgatagcaaagtgaaatccatgacttcagcccatggatccgctagcgctctgaaaaccacaagactccagagcgctggcagtgccatgccgacctcctcctcttttaaacacaggataaaggagcaggaagactatatccgggattggaccgcccatagggaggagattgcaagaatctcacaggatctggctctgatagcccgagaaatcaatgatgtcgccggagagatagactcagtcacttcaagcggcactgccccttccaccacagtgagcactgcggctactactccaggctctgcgatcgatacgcgcgaggaggtgggagacctccacggcgagatgcataagctagttgatagggtcttcgatgagtctctcaattttcggaaaattccacccctggttcacagcaagacaccggagggtaataacgggaggtcaggggacccacgccctcaagcggctgaacctcctgatcacctgacaatcacacggaggaggacatggagcagagacgaagtcatgggcgataacctgctactttctagtgtcttccagttttctaagaaaatccgtcagagcattgataaaaccgccggaaagatccggatcttatttaaggataaagataggaactgggacgacattgagagtaaactaagagccgagtcggaggtgccgatcgtgaagaccagttcaatggagattagctccattctccaggagcttaaacgagtagagaagcagttacaggcgatcaacgccatgattgacccggatgggacactcgaggcgctgaataatatgggcttcccttcagccatgctgccatcaccaccaaaacagaagagcagtcccgtgaataatcaccatagccccggacagactcccacccttggccagcccgaagccagggccctccaccccgctgccgtgtctgccgctgctgagttcgagaacgcggagtcagaggcagacttcagcatacactttaatagatttaacccagacggcgaagaggaggacgtgacagtgcaagagtag

SEQ ID NO: 33315 - DNA, 1407 bp, Artificial Sequence
  derived and/or modified sequence
atgagctcggaccaggagacttatagttgtaaaccacacggcagaactccgcttacttcagctgatgagcacgtgcactcaaagctggaggggagcaaggtcacaaaatctaagacctcaccagtggtgagtggctctagttcaaaatctaccacccttcctagaccacgcccaacccgcactagtctgttaaggagagctcgccttggcgaggcttccgattctgaactcgcggatgctgacaaggcctcagtggcctctgaggtttccactacatcatcgacaagcaaacctccaaccggcaggcggaacatatcccgcattgacttgctcgctcagccaagaagaacacgactcgggtctctcagcgcccgttcagactctgaggccaccatttcaagaagctcagcctcttcccgcactgcggaagcaattatccgcagcggagctcgcctggtgccgtccgataagttctctcctcgcattcgggctaacagtatttcccgactctcagatagtaaggttaaaagtatgaccagcgcccacggcagcgctagcgctctcaagacaacgcgcctgcagagcgcagggtcagcaatgcctacctcatccagttttaaacacagaataaaagagcaggaggattatatccgtgattggaccgcccatcgagaggaaattgctcggatctcccaggatcttgcattaattgccagggaaatcaacgatgtcgccggagagattgactccgtcactagctctggcacggctcctagtactaccgtgtcgacggcagctaccactcccggtagcgccattgatactcgggaagaggtaggggatttgcacggggaaatgcataagctggtagaccgtgtctttgacgagtcgctcaactttcgcaagatcccccctctcgtgcactccaagacacctgagggcaataacggcaggtctggggaccctaggccacaggcagccgaaccccctgatcatcttacgatcacccgcagacgaacctggtcacgagatgaggttatgggggacaatctcctgctctcttcggtcttccagttcagtaaaaagatacgacagtcgatcgataagacagcagggaaaattagaattttgtttaaagataaagatcgtaactgggacgatatcgaatctaagttgcgcgcagaatcggaggtgcctattgttaagacctcatctatggagatcagctccatcctgcaggagctcaaacgtgtcgagaaacagctgcaggcaatcaacgcaatgattgaccccgacgggacccttgaagctctcaacaatatggggttccccagtgctatgctcccatctccccctaaacagaaatcctcccccgtgaataatcaccattcgcccgctatgctgtag

SEQ ID NO: 33316 - DNA, 6727 bp, Artificial Sequence
  derived and/or modified sequence
ttggaactgggcaggaggggatagggtccggctcctcgccctttcccgaggcgcctgcgcactaggcagtcggtctttgccgttaccgctatgtgtggggcgtgtgtggaataacgttattgcccagcggagctgagggccccggagctcgaccgcagcggcagcgacgacaacagcggcgacgacgacgacgacgaggtggggggaggacggcgtgcgagagactcacgggacgcgacgcgccccgcctcccccgtccggtccctctctccacggtaaggggatgacgtagctttgccaaagacttagaagctaagcagaaaatgagcttaacatcctggtttttggtgagcagtggaggcactcgccacaggctgccacgagaaatgatttttgttggaagagatgactgtgagctcatgttgcagtctcgtagtgtggataagcaacacgctgtcatcaactatgatgcgtctacggatgagcatttagtgaaggatttgggcagcctcaatgggacttttgtgaatgatgtaaggattccggaacagacttatatcaccttgaaacttgaagataagctgagatttggatatgatacaaatcttttcactgtagtacaaggagaaatgagggtccctgaagaagctcttaagcatgagaagtttaccattcagcttcagttgtcccaaaaatcttcagaatcagaattatccaaatctgcaagtgccaaaagcatagattcaaaggtagcagacgctgctactgaagtgcagcacaaaactactgaagcactgaaatccgaggaaaaagccatggatatttctgctatgccccgtggtactccattatatgggcagccgtcatggtggggggatgatgaggtggatgaaaaaagagctttcaagacaaatggcaaacctgaagaaaaaaaccatgaagctggaacatcagggtgcggcatagatgccaagcaagttgaggaacaatctgcagctgcaaatgaagaagtactttttcctttctgtagggaaccaagttattttgaaatccctacaaaagaattccagcaaccatcacaaataacagaaagcactattcatgaaatcccaacaaaagacacgccaagttcccatataacaggtgcagggcatgcttcatttaccattgaatttgatgacagtaccccagggaaggtaactattagagaccatgtgacaaagtttacttctgatcagcgccacaagtccaagaagtcttctcctggaactcaagacttgctggggattcaaacaggaatgatggcacccgaaaacaaagttgctgactggctagcacaaaacaaccctcctcaaatgctatgggaaagaacagaagaggattctaaaagcattaaaagtgatgttccagtgtacttgaaaaggttgaaaggaaataaacatgatgatggtacgcaaagtgattcagagaacgctggggctcacaggcgctgtagcaaacgtgcaactcttgaggaacacttaagacgccaccattcagaacacaaaaagctacagaaggtccaggctactgaaaagcatcaagaccaagctgttgtgtttggagtagatgacaatcaggattataataggcctgttatcaacgaaaaacataaagatctaataaaagattgggctctcagttctgctgcagcagtaatggaagaaagaaaaccactgactacatctggatttcaccactcagaggaaggcacatcttcatctggaagcaaacgttgggtttcacagtgggctagtttggctgccaatcatacaaggcatgatcaagaagaaaggataatggaattttctgcacctcttcctttagagaatgagacagagatcagtgagtctggcatgacagtgagaagtactggctctgcaacttccttggctagccagggagagagaaggagacgaactcttccccagcttccaaatgaagaaaagtctcttgagagccacagagcaaaggttgtaacacagaggtcagagataggagaaaaacaagacacagaacttcaggagaaagaaacacctacacaggtataccagaaagataaacaagatgctgacagacccttgagtaaaatgaacagggcagtaaatggagagactctcaaaactggtggagataataaaaccctacttcacttaggcagctctgctcctggaaaagagaaaagtgaaactgataaggaaacttctttggtaaagcaaacattagcaaaacttcaacaacaagaacaaagggaggaggctcagtggacacctactaaattgtcttccaaaaatgtttcaggtcagacagataaatgtagggaggaaacttttaaacaagaatcacaacctccagaaaaaaattcaggacattctacaagcaaaggagacagagtggcacaaagtgagagcaagagaagaaaagctgaggaaattctgaaaagtcagactccaaagggaggagacaagaaggaatcctccaagtcattagtgcgacaagggagcttcactatagaaaaacccagcccaaacatacccatagaacttattccccatataaataaacagacttcctctactccttcttctttagcattaacatctgcaagtagaatacgagaaagaagtgagtctttggatcctgattctagtatggacacaacccttattctaaaagacacagaagcagtaatggcttttctagaagctaaactacgtgaagataataaaactgatgaaggaccagatactcccagttataatagagacaattctatttcaccagaatctgatgtagatacagctagtacaatcagtctggttactggagaaactgaaagaaagtcaacccaaaagcgaaagagtttcactagcctctataaagataggtgttccacaggttctccttccaaagatgttacaaaatcatcatcttcaggtgctagggaaaaaatggaaaagaaaacaaaaagtcgttccacagatgtgggttcaagagcagatggtcgtaaatttgttcagtccagtgggagaataagacagccctcagtagacttaacagatgatgaccaaacctctagtgtacctcattctgccatctctgatattatgtcatctgatcaagaaacttactcttgtaaacctcatggacggactccacttacctcagctgatgagcatgtacattccaaactggaaggaagtaaagtaacgaaatctaagacttctccggtggtatctggttcatctagtaaatcaaccacccttccaaggccacgacctaccaggacttccctcttgcgcagagcacgacttggtgaagcttcagacagtgaacttgctgatgctgacaaagcatctgttgcttctgaagtatccacaacaagttctacatcaaaacctcccacaggaaggcgtaacatctctcggattgatttattggctcagcctcgtagaacacgacttggctcactgtcagctcgtagtgactctgaagcaacaatttctagaagtagtgcctcttcgaggaccgcagaagccatcattagaagtggagccagactagtaccatcagataaattttctcctagaattagagctaacagtatctctcgactctcagactccaaggtcaaaagtatgacctcagctcatggctctgcttcagccctgaaaaccactcgcttgcagagcgctggatcagcaatgcctactagttcttcattcaaacaccggattaaagagcaggaagactacatccgagattggactgctcatcgagaagagatagccaggatcagccaagatcttgctctcattgctcgggagatcaacgatgtagcaggagagatagattcagtgacttcatcaggcactgcccctagtaccacagtaagcactgctgccaccacccctggctctgccatagacactagagaagaggtaggagatcttcatggagaaatgcataagttggttgatcgtgtttttgatgaaagcctcaacttccgaaagattcctccattagttcattccaaaacaccagaaggaaacaacggtcgatctggtgatccaagacctcaagcagcagagcctcccgatcacttaacaattacaaggcggagaacctggagcagggatgaagtcatgggagataatctgctgctgtcatccgtctttcagttctctaagaagataagacaatctatagataagacagctggaaagatcagaatattatttaaagacaaagatcggaattgggatgacatagaaagcaaattaagagccgaaagtgaagtccctattgtgaaaacctcaagcatggagatttcttctatcttacaggaactgaaaagagtagaaaagcagctgcaagcaatcaatgctatgattgatcctgatggaactttggaggctctgaacaacatgggatttcccagtgctatgttgccatctccaccgaaacagaagtccagccctgtgaataaccaccacagcccgggtcagacaccaacacttggccaaccagaagctagggctcttcatcctgctgctgtttcagccgcagctgaatttgagaatgctgaatctgaggctgatttcagtatacatttcaatagattcaaccccgatggggaagaggaagatgttacagtacaagaatgactttctcttgattgttgaaaaatcattacctgtggaatggctaggaatattggaagcagcatagtgttgatgtacgcaaaacaagacagcttggtcagctacaatcttggaatccctgtcttcttaattttatttatttatttttgacgtataatgtagtatatcaatcctttcaaactatttagataaccacttgatgcacaaataggaaaaagcagattgtggcagtgtcgccttttgtggttttatgattttcaaattgaatttaatgattacaccctttcccttcatagatcttttttcttttttttaagccatgctgtgacctacaagcaaactaaatagccaacatttctgaacccctaagtctcctgtgccaagctgctccctgaaatggacttcttcatctgtacagatttgttaaaccattctatttgcttcttaataataggatttatattagtactcattaccattggacacaatgacataagtactctccacagtaaagcagacctttcacaacagtcactctgtgtcctaaaattttccaacatagatgtgatttatataactttgttgatacgtaaattgtcttggggtttacggaaattaactattatgtttgcactaagatttgctgggagtggtaggtggacatatctatatatcaataaggactaaccgtcttttttgtacataggagattgataatactgtatttgttttaagcccacagtgttttactccactttcaaaaagatcaatttggcactttttttcattttttttaatggaaataagatttggtctctcattttaggttaaatgataactagaaagattaaactagacagatagtttaggtggagtatatttttaaaactcagaacatgtatattggtcctgtgttaccaagtttatatgtgacagttgaaaaagaaattcccttgaaatgatcatgaggttaaaattttcttcattaggggacttggagaaccagtagtcgtaagattagttgatagtttcactcccaagcaatgaattgcttctgtgtgtttccctgtaggactcaatagtaaatgctgtctgtcttacacatttataaggaccctgcaagacgacgacaaaggcctttggcctgtgctactaaacaagaagcctatgaaaaatttcttctttaaacttgttttttctctttccagtaagttcacatttggataattttaaaaagaaaagtaattacctttgtgtttccagaacactataattggggtgtatcttaattcagttaaatattattagtagacctggattttcccccttgaccccatcagtctataaaggttaaactgcaacttttatgaaatggtctttaatatttccacaataatcctgtgctatatttgttttaagaaacaaagtaactctatacacttcaagactttacaggattttttaaatcctgtattgttggatcaattaataaagatgcaaaaaaactttatagagatgtaaaaacaaaactataatggatctcctatttttctttaaatacaaaaaaaaaaaggtaaatgaactattctccttgtaaagctaaattccccattctgtctaataaaggaagactgaaaaaaggttttaaagaacataaatggaaagatacaaatgctttgaaggaataaacgaaatgttaaaacagggtcaatccatttgaagaaaaagttggacaaaataatcagcattgctccctcttttatttaatatttgggtactgattatatccacatggaagtagaaggtaaggagtttaggaaaatactagaatctactctgcttacattcttgtttaagtgtttacacagtttggttcaattataaacatttggccttttactatgttatttttattttgtatgaatacattatcctccttatttatttttgttacatttattacttatgttattttgttatgcatttacaactccatttttaaataaagtgtttctggaacttta

SEQ ID NO: 33317 - DNA, 608 bp, Artificial Sequence
  derived and/or modified sequence
gtgtggcgcctgcgcagtaagggatcgttggaactgggcaggaggggatagggtccggctcctcgccctttcccgaggcgcctgcgcactaggcagtcggtctttgccgttaccgctatgtgtggggcgtgtgtggaataacgttattgcccagcggagctgagggccccggagctcgaccgcagcggcagcgacgacaacagcggcgacgacgacgacgacgaggtggggggaggacggcgtgcgagagactcacgggacgcgacgcgccccgcctcccccgtccggtccctctctccacggatgacgtagctttgccaaagacttagaagctaagcagaaaatgagcttaacatcctggtttttggtgagcagtggaggcactcgccacaggctgccacgagaaatgatttttgttggaagagatgactgtgagctcatgttgcagtctcgtagtgtggataagcaacacgctgtcatcaactatgatgcgtctacggatgagcatttagtgaaggatttgggcagcctcaatgggacttttgtgaatgatgtaaggattccggaacagacttatatcaccttgaaacttgaagataagctgagat

SEQ ID NO: 33318 - DNA, 4638 bp, Artificial Sequence
  derived and/or modified sequence
gggcaagctggaaaagcgtgtgggtgagaccctcgcacaaccccttttcattgtctgtgtgtggcgcctgcgcagtaagggatcgttggaactgggcaggaggggatagggtccggctcctcgccctttcccgaggcgcctgcgcactaggcagtcggtctttgccgttaccgctatgtgtggggcgtgtgtggaataacgttattgcccagcggagctgagggccccggagctcgaccgcagcggcagcgacgacaacagcggcgacgacgacgacgacgaggtggggggaggacggcgtgcgagagactcacgggacgcgacgcgccccgcctcccccgtccggtccctctctccacggtaaggggatgacgtagctttgccaaagacttagaagctaagcagaaaatgagcttaacatcctggtttttggtgagcagtggaggcactcgccacaggctgccacgagaaatgatttttgttggaagagatgactgtgagctcatgttgcagtctcgtagtgtggataagcaacacgctgtcatcaactatgatgcgtctacggatgagcatttagtgaaggatttgggcagcctcaatgggacttttgtgaatgatgtaaggattccggaacagacttatatcaccttgaaacttgaagataagctgagatttggatatgatacaaatcttttcactgtagtacaaggagaaatgagggtccctgaagaagctcttaagcatgagaagtttaccattcagcttcagttgtcccaaaaatcttcagaatcagaattatccaaatctgcaagtgccaaaagcatagattcaaaggtagcagacgctgctactgaagtgcagcacaaaactactgaagcactgaaatccgaggaaaaagccatggatatttctgctatgccccgtggtactccattatatgggcagccgtcatggtggggggatgatgaggtggatgaaaaaagagctttcaagacaaatggcaaacctgaagaaaaaaaccatgaagctggaacatcagggtgcggcatagatgccaagcaagttgaggaacaatctgcagctgcaaatgaagaagtactttttcctttctgtagggaaccaagttattttgaaatccctacaaaagaattccagcaaccatcacaaataacagaaagcactattcatgaaatcccaacaaaagacacgccaagttcccatataacaggtgcagggcatgcttcatttaccattgaatttgatgacagtaccccagggaaggtaactattagagaccatgtgacaaagtttacttctgatcagcgccacaagtccaagaagtcttctcctggaactcaagacttgctggggattcaaacaggaatgatggcacccgaaaacaaagttgctgactggctagcacaaaacaaccctcctcaaatgctatgggaaagaacagaagaggattctaaaagcattaaaagtgatgttccagtgtacttgaaaaggttgaaaggaaataaacatgatgatggtacgcaaagtgattcagagaacgctggggctcacaggcgctgtagcaaacgtgcaactcttgaggaacacttaagacgccaccattcagaacacaaaaagctacagaaggtccaggctactgaaaagcatcaagaccaagctgttgtgtttggagtagatgacaatcaggattataataggcctgttatcaacgaaaaacataaagatctaataaaagattgggctctcagttctgctgcagcagtaatggaagaaagaaaaccactgactacatctggatttcaccactcagaggaaggcacatcttcatctggaagcaaacgttgggtttcacagtgggctagtttggctgccaatcatacaaggcatgatcaagaagaaaggataatggaattttctgcacctcttcctttagagaatgagacagagatcagtgagtctggcatgacagtgagaagtactggctctgcaacttccttggctagccagggagagagaaggagacgaactcttccccagcttccaaatgaagaaaagtctcttgagagccacagagcaaaggttgtaacacagaggtcagagataggagaaaaacaagacacagaacttcaggagaaagaaacacctacacaggtataccagaaagataaacaagatgctgacagacccttgagtaaaatgaacagggcagtaaatggagagactctcaaaactggtggagataataaaaccctacttcacttaggcagctctgctcctggaaaagagaaaagtgaaactgataaggaaacttctttggtaaagcaaacattagcaaaacttcaacaacaagaacaaagggaggaggctcagtggacacctactaaattgtcttccaaaaatgtttcaggtcagacagataaatgtagggaggaaacttttaaacaagaatcacaacctccagaaaaaaattcaggacattctacaagcaaaggagacagagtggcacaaagtgagagcaagagaagaaaagctgaggaaattctgaaaagtcagactccaaagggaggagacaagaaggaatcctccaagtcattagtgcgacaagggagcttcactatagaaaaacccagcccaaacatacccatagaacttattccccatataaataaacagacttcctctactccttcttctttagcattaacatctgcaagtagaatacgagaaagaagtgagtctttggatcctgattctagtatggacacaacccttattctaaaagacacagaagcagtaatggcttttctagaagctaaactacgtgaagataataaaactgatgaaggaccagatactcccagttataatagagacaattctatttcaccagaatctgatgtagatacagctagtacaatcagtctggttactggagaaactgaaagaaagtcaacccaaaagcgaaagagtttcactagcctctataaagataggtgttccacaggttctccttccaaagatgttacaaaatcatcatcttcaggtgctagggaaaaaatggaaaagaaaacaaaaagtcgttccacagatgtgggttcaagagcagatggtcgtaaatttgttcagtccagtgggagaataagacagccctcagtagacttaacagatgatgaccaaacctctagtgtacctcattctgccatctctgatattatgtcatctgatcaagaaacttactcttgtaaacctcatggacggactccacttacctcagctgatgagcatgtacattccaaactggaaggaagtaaagtaacgaaatctaagacttctccggtggtatctggttcatctagtaaatcaaccacccttccaaggccacgacctaccaggacttccctcttgcgcagagcacgacttggtgaagcttcagacagtgaacttgctgatgctgacaaagcatctgttgcttctgaagtatccacaacaagttctacatcaaaacctcccacaggaaggcgtaacatctctcggattgatttattggctcagcctcgtagaacacgacttggctcactgtcagctcgtagtgactctgaagcaacaatttctagaagtagtgcctcttcgaggaccgcagaagccatcattagaagtggagccagactagtaccatcagataaattttctcctagaattagagctaacagtatctctcgactctcagactccaaggtcaaaagtatgacctcagctcatggctctgcttcagccctgaaaaccactcgcttgcagagcgctggatcagcaatgcctactagttcttcattcaaacaccggattaaagagcaggaagactacatccgagattggactgctcatcgagaagagatagccaggatcagccaagatcttgctctcattgctcgggagatcaacgatgtagcaggagagatagattcagtgacttcatcaggcactgcccctagtaccacagtaagcactgctgccaccacccctggctctgccatagacactagagaagaggtaggagatcttcatggagaaatgcataagttggttgatcgtgtttttgatgaaagcctcaacttccgaaagattcctccattagttcattccaaaacaccagaaggaaacaacggtcgatctggtgatccaagacctcaagcagcagagcctcccgatcacttaacaattacaaggcggagaacctggagcagggatgaagtcatgggagataatctgctgctgtcatccgtctttcagttctctaagaagataagacaatctatagataagacagctggaaagatcagaatattatttaaagacaaagatcggaattgggatgacatagaaagcaaattaagagccgaaagtgaagtccctattgtgaaaacctcaagcatggagatttcttctatcttacaggaactgaaaagagtagaaaagcagctgcaagcaatcaatgctatgattgatcctgatggaactttggaggctctgaacaacatgggatttcccagtgctatgttgccatctccaccgaaacagaagtccagccctgtgaataaccaccacagcccggccatgctgtga

SEQ ID NO: 33319 - DNA, 4383 bp, Artificial Sequence
  derived and/or modified sequence
atgagcctgaccagctggttcctggtgagcagcggcggcaccagacacagactgcccagagagatgatcttcgtgggcagagacgactgcgagctgatgctgcagagcagaagcgtggacaagcagcacgccgtgatcaactacgacgccagcaccgacgagcacctggtgaaggacctgggcagcctgaacggcaccttcgtgaacgacgtgagaatccccgagcagacctacatcaccctgaagctggaggacaagctgagattcggctacgacaccaacctgttcaccgtggtgcagggcgagatgagagtgcccgaggaggccctgaagcacgagaagttcaccatccagctgcagctgagccagaagagcagcgagagcgagctgagcaagagcgccagcgccaagagcatcgacagcaaggtggccgacgccgccaccgaggtgcagcacaagaccaccgaggccctgaagagcgaggagaaggccatggacatcagcgccatgcccagaggcacccccctgtacggccagcccagctggtggggcgacgacgaggtggacgagaagagagccttcaagaccaacggcaagcccgaggagaagaaccacgaggccggcaccagcggctgcggcatcgacgccaagcaggtggaggagcagagcgccgccgccaacgaggaggtgctgttccccttctgcagagagcccagctacttcgagatccccaccaaggagttccagcagcccagccagatcaccgagagcaccatccacgagatccccaccaaggacacccccagcagccacatcaccggcgccggccacgccagcttcaccatcgagttcgacgacagcacccccggcaaggtgaccatcagagaccacgtgaccaagttcaccagcgaccagagacacaagagcaagaagagcagccccggcacccaggacctgctgggcatccagaccggcatgatggcccccgagaacaaggtggccgactggctggcccagaacaaccccccccagatgctgtgggagagaaccgaggaggacagcaagagcatcaagagcgacgtgcccgtgtacctgaagagactgaagggcaacaagcacgacgacggcacccagagcgacagcgagaacgccggcgcccacagaagatgcagcaagagagccaccctggaggagcacctgagaagacaccacagcgagcacaagaagctgcagaaggtgcaggccaccgagaagcaccaggaccaggccgtggtgttcggcgtggacgacaaccaggactacaacagacccgtgatcaacgagaagcacaaggacctgatcaaggactgggccctgagcagcgccgccgccgtgatggaggagagaaagcccctgaccaccagcggcttccaccacagcgaggagggcaccagcagcagcggcagcaagagatgggtgagccagtgggccagcctggccgccaaccacaccagacacgaccaggaggagagaatcatggagttcagcgcccccctgcccctggagaacgagaccgagatcagcgagagcggcatgaccgtgagaagcaccggcagcgccaccagcctggccagccagggcgagagaagaagaagaaccctgccccagctgcccaacgaggagaagagcctggagagccacagagccaaggtggtgacccagagaagcgagatcggcgagaagcaggacaccgagctgcaggagaaggagacccccacccaggtgtaccagaaggacaagcaggacgccgacagacccctgagcaagatgaacagagccgtgaacggcgagaccctgaagaccggcggcgacaacaagaccctgctgcacctgggcagcagcgcccccggcaaggagaagagcgagaccgacaaggagaccagcctggtgaagcagaccctggccaagctgcagcagcaggagcagagagaggaggcccagtggacccccaccaagctgagcagcaagaacgtgagcggccagaccgacaagtgcagagaggagaccttcaagcaggagagccagccccccgagaagaacagcggccacagcaccagcaagggcgacagagtggcccagagcgagagcaagagaagaaaggccgaggagatcctgaagagccagacccccaagggcggcgacaagaaggagagcagcaagagcctggtgagacagggcagcttcaccatcgagaagcccagccccaacatccccatcgagctgatcccccacatcaacaagcagaccagcagcacccccagcagcctggccctgaccagcgccagcagaatcagagagagaagcgagagcctggaccccgacagcagcatggacaccaccctgatcctgaaggacaccgaggccgtgatggccttcctggaggccaagctgagagaggacaacaagaccgacgagggccccgacacccccagctacaacagagacaacagcatcagccccgagagcgacgtggacaccgccagcaccatcagcctggtgaccggcgagaccgagagaaagagcacccagaagagaaagagcttcaccagcctgtacaaggacagatgcagcaccggcagccccagcaaggacgtgaccaagagcagcagcagcggcgccagagagaagatggagaagaagaccaagagcagaagcaccgacgtgggcagcagagccgacggcagaaagttcgtgcagagcagcggcagaatcagacagcccagcgtggacctgaccgacgacgaccagaccagcagcgtgccccacagcgccatcagcgacatcatgagcagcgaccaggagacctacagctgcaagccccacggcagaacccccctgaccagcgccgacgagcacgtgcacagcaagctggagggcagcaaggtgaccaagagcaagaccagccccgtggtgagcggcagcagcagcaagagcaccaccctgcccagacccagacccaccagaaccagcctgctgagaagagccagactgggcgaggccagcgacagcgagctggccgacgccgacaaggccagcgtggccagcgaggtgagcaccaccagcagcaccagcaagccccccaccggcagaagaaacatcagcagaatcgacctgctggcccagcccagaagaaccagactgggcagcctgagcgccagaagcgacagcgaggccaccatcagcagaagcagcgccagcagcagaaccgccgaggccatcatcagaagcggcgccagactggtgcccagcgacaagttcagccccagaatcagagccaacagcatcagcagactgagcgacagcaaggtgaagagcatgaccagcgcccacggcagcgccagcgccctgaagaccaccagactgcagagcgccggcagcgccatgcccaccagcagcagcttcaagcacagaatcaaggagcaggaggactacatcagagactggaccgcccacagagaggagatcgccagaatcagccaggacctggccctgatcgccagagagatcaacgacgtggccggcgagatcgacagcgtgaccagcagcggcaccgcccccagcaccaccgtgagcaccgccgccaccacccccggcagcgccatcgacaccagagaggaggtgggcgacctgcacggcgagatgcacaagctggtggacagagtgttcgacgagagcctgaacttcagaaagatcccccccctggtgcacagcaagacccccgagggcaacaacggcagaagcggcgaccccagaccccaggccgccgagccccccgaccacctgaccatcaccagaagaagaacctggagcagagacgaggtgatgggcgacaacctgctgctgagcagcgtgttccagttcagcaagaagatcagacagagcatcgacaagaccgccggcaagatcagaatcctgttcaaggacaaggacagaaactgggacgacatcgagagcaagctgagagccgagagcgaggtgcccatcgtgaagaccagcagcatggagatcagcagcatcctgcaggagctgaagagagtggagaagcagctgcaggccatcaacgccatgatcgaccccgacggcaccctggaggccctgaacaacatgggcttccccagcgccatgctgcccagcccccccaagcagaagagcagccccgtgaacaaccaccacagccccggccagacccccaccctgggccagcccgaggccagagccctgcaccccgccgccgtgagcgccgccgccgagttcgagaacgccgagagcgaggccgacttcagcatccacttcaacagattcaaccccgacggcgaggaggaggacgtgaccgtgcaggagtag

SEQ ID NO: 33320 - DNA, 1407 bp, Artificial Sequence
  derived and/or modified sequence
atgagcagcgaccaggagacctacagctgcaagccccacggcagaacccccctgaccagcgccgacgagcacgtgcacagcaagctggagggcagcaaggtgaccaagagcaagaccagccccgtggtgagcggcagcagcagcaagagcaccaccctgcccagacccagacccaccagaaccagcctgctgagaagagccagactgggcgaggccagcgacagcgagctggccgacgccgacaaggccagcgtggccagcgaggtgagcaccaccagcagcaccagcaagccccccaccggcagaagaaacatcagcagaatcgacctgctggcccagcccagaagaaccagactgggcagcctgagcgccagaagcgacagcgaggccaccatcagcagaagcagcgccagcagcagaaccgccgaggccatcatcagaagcggcgccagactggtgcccagcgacaagttcagccccagaatcagagccaacagcatcagcagactgagcgacagcaaggtgaagagcatgaccagcgcccacggcagcgccagcgccctgaagaccaccagactgcagagcgccggcagcgccatgcccaccagcagcagcttcaagcacagaatcaaggagcaggaggactacatcagagactggaccgcccacagagaggagatcgccagaatcagccaggacctggccctgatcgccagagagatcaacgacgtggccggcgagatcgacagcgtgaccagcagcggcaccgcccccagcaccaccgtgagcaccgccgccaccacccccggcagcgccatcgacaccagagaggaggtgggcgacctgcacggcgagatgcacaagctggtggacagagtgttcgacgagagcctgaacttcagaaagatcccccccctggtgcacagcaagacccccgagggcaacaacggcagaagcggcgaccccagaccccaggccgccgagccccccgaccacctgaccatcaccagaagaagaacctggagcagagacgaggtgatgggcgacaacctgctgctgagcagcgtgttccagttcagcaagaagatcagacagagcatcgacaagaccgccggcaagatcagaatcctgttcaaggacaaggacagaaactgggacgacatcgagagcaagctgagagccgagagcgaggtgcccatcgtgaagaccagcagcatggagatcagcagcatcctgcaggagctgaagagagtggagaagcagctgcaggccatcaacgccatgatcgaccccgacggcaccctggaggccctgaacaacatgggcttccccagcgccatgctgcccagcccccccaagcagaagagcagccccgtgaacaaccaccacagccccgccatgctgtag

SEQ ID NO: 33321 - protein, 953 aa, Artificial Sequence
  derived and/or modified sequence
MSSGLWSQEKVTSPYWEERIFYLLLQECSVTDKQTQKLLKVPKGSIGQYIQDRSVGHSRIPSAKGKKNQIGLKILEQPHAVLFVDEKDVVEINEKFTELLLAITNCEERFSLFKNRNRLSKGLQIDVGCPVKVQLRSGEEKFPGVVRFRGPLLAERTVSGIFFGVELLEEGRGQGFTDGVYQGKQLFQCDEDCGVFVALDKLELIEDDDTALESDYAGPGDTMQVELPPLEINSRVSLKVGETIESGTVIFCDVLPGKESLGYFVGVDMDNPIGNWDGRFDGVQLCSFACVESTILLHINDIIPESVTQERRPPKLAFMSRGVGDKGSSSHNKPKATGSTSDPGNRNRSELFYTLNGSSVDSQPQSKSKNTWYIDEVAEDPAKSLTEISTDFDRSSPPLQPPPVNSLTTENRFHSLPFSLTKMPNTNGSIGHSPLSLSAQSVMEELNTAPVQESPPLAMPPGNSHGLEVGSLAEVKENPPFYGVIRWIGQPPGLNEVLAGLELEDECAGCTDGTFRGTRYFTCALKKALFVKLKSCRPDSRFASLQPVSNQIERCNSLAFGGYLSEVVEENTPPKMEKEGLEIMIGKKKGIQGHYNSCYLDSTLFCLFAFSSVLDTVLLRPKEKNDVEYYSETQELLRTEIVNPLRIYGYVCATKIMKLRKILEKVEAASGFTSEEKDPEEFLNILFHHILRVEPLLKIRSAGQKVQDCYFYQIFMEKNEKVGVPTIQQLLEWSFINSNLKFAEAPSCLIIQMPRFGKDFKLFKKIFPSLELNITDLLEDTPRQCRICGGLAMYECRECYDDPDISAGKIKQFCKTCNTQVHLHPKRLNHKYNPVSLPKDLPDWDWRHGCIPCQNMELFAVLCIETSHYVAFVKYGKDDSAWLFFDSMADRDGGQNGFNIPQVTPCPEVGEYLKMSLEDLHSLDSRRIQGCARRLLCDAYMCMYQSPTMSLYK

SEQ ID NO: 33322 - DNA, 2862 bp, Artificial Sequence
  derived and/or modified sequence
atgagcagcggcctgtggagccaggagaaggtgaccagcccctactgggaggagagaatcttctacctgctgctgcaggagtgcagcgtgaccgacaagcagacccagaagctgctgaaggtgcccaagggcagcatcggccagtacatccaggacagaagcgtgggccacagcagaatccccagcgccaagggcaagaagaaccagatcggcctgaagatcctggagcagccccacgccgtgctgttcgtggacgagaaggacgtggtggagatcaacgagaagttcaccgagctgctgctggccatcaccaactgcgaggagagattcagcctgttcaagaacagaaacagactgagcaagggcctgcagatcgacgtgggctgccccgtgaaggtgcagctgagaagcggcgaggagaagttccccggcgtggtgagattcagaggccccctgctggccgagagaaccgtgagcggcatcttcttcggcgtggagctgctggaggagggcagaggccagggcttcaccgacggcgtgtaccagggcaagcagctgttccagtgcgacgaggactgcggcgtgttcgtggccctggacaagctggagctgatcgaggacgacgacaccgccctggagagcgactacgccggccccggcgacaccatgcaggtggagctgccccccctggagatcaacagcagagtgagcctgaaggtgggcgagaccatcgagagcggcaccgtgatcttctgcgacgtgctgcccggcaaggagagcctgggctacttcgtgggcgtggacatggacaaccccatcggcaactgggacggcagattcgacggcgtgcagctgtgcagcttcgcctgcgtggagagcaccatcctgctgcacatcaacgacatcatccccgagagcgtgacccaggagagaagaccccccaagctggccttcatgagcagaggcgtgggcgacaagggcagcagcagccacaacaagcccaaggccaccggcagcaccagcgaccccggcaacagaaacagaagcgagctgttctacaccctgaacggcagcagcgtggacagccagccccagagcaagagcaagaacacctggtacatcgacgaggtggccgaggaccccgccaagagcctgaccgagatcagcaccgacttcgacagaagcagcccccccctgcagcccccccccgtgaacagcctgaccaccgagaacagattccacagcctgcccttcagcctgaccaagatgcccaacaccaacggcagcatcggccacagccccctgagcctgagcgcccagagcgtgatggaggagctgaacaccgcccccgtgcaggagagcccccccctggccatgccccccggcaacagccacggcctggaggtgggcagcctggccgaggtgaaggagaacccccccttctacggcgtgatcagatggatcggccagccccccggcctgaacgaggtgctggccggcctggagctggaggacgagtgcgccggctgcaccgacggcaccttcagaggcaccagatacttcacctgcgccctgaagaaggccctgttcgtgaagctgaagagctgcagacccgacagcagattcgccagcctgcagcccgtgagcaaccagatcgagagatgcaacagcctggccttcggcggctacctgagcgaggtggtggaggagaacaccccccccaagatggagaaggagggcctggagatcatgatcggcaagaagaagggcatccagggccactacaacagctgctacctggacagcaccctgttctgcctgttcgccttcagcagcgtgctggacaccgtgctgctgagacccaaggagaagaacgacgtggagtactacagcgagacccaggagctgctgagaaccgagatcgtgaaccccctgagaatctacggctacgtgtgcgccaccaagatcatgaagctgagaaagatcctggagaaggtggaggccgccagcggcttcaccagcgaggagaaggaccccgaggagttcctgaacatcctgttccaccacatcctgagagtggagcccctgctgaagatcagaagcgccggccagaaggtgcaggactgctacttctaccagatcttcatggagaagaacgagaaggtgggcgtgcccaccatccagcagctgctggagtggagcttcatcaacagcaacctgaagttcgccgaggcccccagctgcctgatcatccagatgcccagattcggcaaggacttcaagctgttcaagaagatcttccccagcctggagctgaacatcaccgacctgctggaggacacccccagacagtgcagaatctgcggcggcctggccatgtacgagtgcagagagtgctacgacgaccccgacatcagcgccggcaagatcaagcagttctgcaagacctgcaacacccaggtgcacctgcaccccaagagactgaaccacaagtacaaccccgtgagcctgcccaaggacctgcccgactgggactggagacacggctgcatcccctgccagaacatggagctgttcgccgtgctgtgcatcgagaccagccactacgtggccttcgtgaagtacggcaaggacgacagcgcctggctgttcttcgacagcatggccgacagagacggcggccagaacggcttcaacatcccccaggtgaccccctgccccgaggtgggcgagtacctgaagatgagcctggaggacctgcacagcctggacagcagaagaatccagggctgcgccagaagactgctgtgcgacgcctacatgtgcatgtaccagagccccaccatgagcctgtacaagtag

SEQ ID NO: 33323 - DNA, 8591 bp, Artificial Sequence
  derived and/or modified sequence
gtcggaggtaaatactagggcggtgggtgtggggagccggggccggcccgggacgcgggctggggagccggggcgaggggcgacgccccgccgcccgagtttccccctttctagggtgaggatggttctacacagccacccggagttccttagttgaaaggtgcgccctgctgtgacagcatggacaccacgttgctgaaaacatgctttgggactgccactgaatttatcttttgcggttttatgacaaagttattagtagtttcccttttttgaattagtattttgaagttaatatcacaatgagttcaggcttatggagccaagaaaaagtcacttcaccctactgggaagagcggattttttacttgcttcttcaagaatgcagcgttacagacaaacaaacacaaaagctccttaaagtaccgaagggaagtataggacagtatattcaagatcgttctgtggggcattcaaggattccttctgcaaaaggcaagaaaaatcagattggattaaaaattctagagcaacctcatgcagttctctttgttgatgaaaaggatgttgtagagataaatgaaaagttcacagagttacttttggcaattaccaattgtgaggagaggttcagcctgtttaaaaacagaaacagactaagtaaaggcctccaaatagacgtgggctgtcctgtgaaagtacagctgagatctggggaagaaaaatttcctggagttgtacgcttcagaggacccctgttagcagagaggacagtctccggaatattctttggagttgaattgctggaagaaggtcgtggtcaaggtttcactgacggggtgtaccaagggaaacagctttttcagtgtgatgaagattgtggcgtgtttgttgcattggacaagctagaactcatagaagatgatgacactgcattggaaagtgattacgcaggtcctggggacacaatgcaggtcgaacttcctcctttggaaataaactccagagtttctttgaaggttggagaaacaatagaatctggaacagttatattctgtgatgttttgccaggaaaagaaagcttaggatattttgttggtgtggacatggataaccctattggcaactgggatggaagatttgatggagtgcagctttgtagttttgcgtgtgttgaaagtacaattctattgcacatcaatgatatcatcccagagagtgtgacgcaggaaaggaggcctcccaaacttgcctttatgtcaagaggtgttggggacaaaggttcatccagtcataataaaccaaaggctacaggatctacctcagaccctggaaatagaaacagatctgaattattttataccttaaatgggtcttctgttgactcacaaccacaatccaaatcaaaaaatacatggtacattgatgaagttgcagaagaccctgcaaaatctcttacagagatatctacagactttgaccgttcttcaccaccactccagcctcctcctgtgaactcactgaccaccgagaacagattccactctttaccattcagtctcaccaagatgcccaataccaatggaagtattggccacagtccactttctctgtcagcccagtctgtaatggaagagctaaacactgcacccgtccaagagagtccacccttggccatgcctcctgggaactcacatggtctagaagtgggctcattggctgaagttaaggagaaccctcctttctatggggtaatccgttggatcggtcagccaccaggactgaatgaagtgctcgctggactggaactggaagatgagtgtgcaggctgtacggatggaaccttcagaggcactcggtatttcacctgtgccctgaagaaggcgctgtttgtgaaactgaagagctgcaggcctgactctaggtttgcatcattgcagccggtttccaatcagattgagcgctgtaactctttagcatttggaggctacttaagtgaagtagtagaagaaaatactccaccaaaaatggaaaaagaaggcttggagataatgattgggaagaagaaaggcatccagggtcattacaattcttgttacttagactcaaccttattctgcttatttgcttttagttctgttctggacactgtgttacttagacccaaagaaaagaacgatgtagaatattatagtgaaacccaagagctactgaggacagaaattgttaatcctctgagaatatatggatatgtgtgtgccacaaaaattatgaaactgaggaaaatacttgaaaaggtggaggctgcatcaggatttacctctgaagaaaaagatcctgaggaattcttgaatattctgtttcatcatattttaagggtagaacctttgctaaaaataagatcagcaggtcaaaaggtacaagattgttacttctatcaaatttttatggaaaaaaatgagaaagttggcgttcccacaattcagcagttgttagaatggtcttttatcaacagtaacctgaaatttgcagaggcaccatcatgtctgattattcagatgcctcgatttggaaaagactttaaactatttaaaaaaatttttccttctctggaattaaatataacagatttacttgaagacactcccagacagtgccggatatgtggagggcttgcaatgtatgagtgtagagaatgctacgacgatccggacatctcagctggaaaaatcaagcagttttgtaaaacctgcaacactcaagtccaccttcatccgaagaggctgaatcataaatataacccagtgtcacttcccaaagacttacccgactgggactggagacacggctgcatcccttgccagaatatggagttatttgctgttctctgcatagaaacaagccactatgttgcttttgtgaagtatgggaaggacgattctgcctggctcttctttgacagcatggccgatcgggatggtggtcagaatggcttcaacattcctcaagtcaccccatgcccagaagtaggagagtacttgaagatgtctctggaagacctgcattccttggactccaggagaatccaaggctgtgcacgaagactgctttgtgatgcatatatgtgcatgtaccagagtccaacaatgagtttgtacaaataactggggtcatcgggaaaggcaaagaaactgaaggcagagtcctaacgttgcatcttattcgagctggcagttctgttcacgtccattgccggcaatggatgtctttgtggtgatgatccttcagaaaaggatgcctctgtttaaaaacaaattgcttttgtgtccctgaagtatttaataagaagcattttgcactctagaaagtatgtttgtgttggttttttaagaagtctaaatgaagttattaatacctgaagctttaagttaagtgcattgatcatatgatatttttggaagcatacaattttaattgtggaagtttaaagcctcttttagtccattgagaatgtaaataaatgtgtcttctttatggaccaaggatatgaaatcatttttcttttgtagctaacggttgccttgaggaagaaataatttggttttattaagagtctactctcaatccagttattagagatgtactgagtttgatttgttaatcctttctatatactgctgatcttgcatgtctacaatctgctcagtttttctgtgtttctgcaatagtggtcagaaaaatacttaaattcccttaatggtgttgttttctatttgttctggttttgagataaatgagtgattctgtccccaaatgtccatttttgaagtgattttcctggaggattagggtatttagcagttgaagctcttcattcatagtagttactgtcagctaacaggttttttaaggcttttaactattaatattttatggaatggggcaaagtaaattgatgaaagaattggagtgataatagtcctttacaaacatacagtccataagaaaatgaatttggcatatagaattattacaatttcctgggagagatggatatttaaacctctattattttagacaagactgtctagaacttaagtttgatctgtcagccagtactcccattaaattcagtgtagtttcacttgatagaatcagatatgttatcgaaatgttagcagcagcttcatcctccttctgattaaagtaagtagaaatgggatgttttgtttaataacagccatagtgtgtgtttagaccacagcggatgttgtagaccaggaccatagatgatacatgtcagtgctgtggaatgtgcattctctgagtgttgttttgtggtatcattgtctttcctgaatgactttctaactgtgcagaaaggcagaaaagtcatcatatgtatatgtcatatgactttataaaatatttaatgtgacaaaaagtggaaagaatctttacaaaccctgcaattacttttttaaaggcacttttactctttggttttatcattccattttgctaatatttactagctttataaattacagtaaggtacaaaaactcatcttgtaatattttcatttttgaagtgaaaaagtacatatattttgcacaaggttttatactgctaagtgcttggttggggtggtgagatgatgattagatcaggggtgaggctgagagactctgggtttagggctagccctgcctccatctcccttgggtaaaatgaagggtgtggggtaaaagatgcataaggccttttctagctctgacagcctagaagtccaatcaccctgtaataaatatgtgttgaatgaagaaatgggtgaatgagcttgtcaatgtgattttaaaaaattgactacctggaggaatgattaggaatctaaatgaagccagccctcggtatctgcaggtttctcatccatggattcaaccaactgcaaatggaaaatacgattttttttaaaaaaaggatggttacatccgtattgaacatgtacagacttttttcttgtcattattctctgaacaatacaagaactctttatgtagcatttacatttattaggtattataagtaatctagagattatttaattaaaatatacaggaggatgtgtgtcagttatatgcaaattctgtaccattttgtatcagggaattgagcatcttcagatgttggtatctgcagggatcctggaaccaaacccctgcagatactaagggctgacgatctaggtaagactggatttaacagttggaaaaaaaaaaaaaaaaggagagagaagacagttcctttcctgtagaaattaaaacaaaatacaaattgaggaagctctgctacccaggctgtcatggtagagaacttgaagaagacctgtttggatggacacctggtttcaaaagtcaggtgtggagactgttaaatgggagggcctcatccataaatgatttctggcaacgtcttcttcaggtggagcttgacgtctttttaatgttacttggggagggagtgctcattaagggatgccagggccagctctggtggttcctggggaggctgcgtccttccctgcttctgcatgtcatgaggcagcaggaaggtttcccctgcacctgtctgtcctggctccctctgggtagccccctactgttctgtgcttcagcacagcctggtttgtcaagaggcacatagttggggctgggctgcatggcacaggggcttatgtgcctgctggttatttaattttcagccttaagttttctttaatattttcctgttggctatttaaaggttttggttatcttttattccttatctacaatcaagatgacaatgtaattgaattatcttatttataacacggttcgtgattcatgattcatgattacaagtagaaaatatgtcatgttcctcacctccaaataaatatgtgtgtgtctgtgtgtgtgtatatatgtatgtggcggagagggagagagtggggaaggagagcagtgttatcatacatagagaggctaaatgtgtcccatccctcactgtcagctttataaaggagtttgactccatccacagaagaatgttttataagactaggaaaacacgttgaaaactaggataaacagcaacaaaaatcaactaaatatgttgttactgttgctaaggattttctccttagaataatttaggatttttaaaaatttctgtttgccaaatgctgtagataaatggccagattcttcctatccctaggattcctttattattttttttcacagattttgagaacaagggggagagatagtatggaagattaagattccattaatcttatagaactgtgttgtcacccaaattcctgcttgtttgaacatggcatcttcatagattcaggattcactaccctctatagctggatcttgaaaattatctggccagataattttgcatctgcttggatgattgtagactgagatgtgagtggaggataaagtattagacttttgctgagtaactgccaaccaagaagtatttatcggacacttactaggtgcctaggattgtatcagagggaatatgaaatgtgtccctgccctacctagttttaacgacagaatatctattaaaggctacttagctgaagggtaagggtgacaggtctaggggaagctttgggaggtggtgtgctgtgacagaaaaagtggcagagtagggacgagagacctgcattctagccctgtttctgtcacttgctctgtacacttagacaacagcttgacctcttgagctttagtttcctcctctgcataatgagagggttagactactgaattgtatgggaaaaaaatacaaattcctgggtcctaggccatgcctgctgaatccgactgttcaggaagaggcctaggaaatctgtgagggaatccccaggggaatctcgtgaccagccaggtgtgaaatctgctaactggaagatctcaaagcttccttcactttttgtgattttgtggtcatgtaacgttactgtattattctacgtaaatgtgggtacttggatgtttatcatactgtttctctgtgtttacatactaatttgtgtaagaaatgcattttagtctgtgtacctcaacctgctgtttgtttcctagaggtgttagtagtctttaaatacaagtaagacttaagaggatatttgatgttatttacctggatattttcttccccttttatttatttagaggaaattgagattctaggagccaaaaaaatgaaaacaaaattctaaggcaaagttaaagaaaaaaattacattatttcttaccatttgctactttataatgaaaatttaaaaattatatgggaagatttttctctgggataacaaatccttgtcataaagtaagaggtctttttaaagtaggtaggctataaggcctgtaatttaaaataatactcctttctctagggtttggtgcaattctccattaatgaagataacatttgaattccccaaagcaggtgaggagtcggggaggagaaagcgatgttaaaatgaaaactcactgcaaaagaggaggcagaggaagaaggaatgtaaaccccttaaagcagatgtgtgtggggccttatgaagaccaggattctgcgggtgtcaggggattgcccctcttgacagagactagggttttagactgaggcttcctgcagggtgttcgcattgcccttctccgttccccttcagacctttctggggagaagaggtgggaggaggggagaaagactgttcatcttattctgaatcctggagcagctgaaggttttctcttgagtcaggatgcagtggtaatgcattaaccagcaagtgtggccaaggataatgaaaaagtgggaaaggaaggtcctcctcctccctgattgtagcatccagcagtctctgtagccaggttactcaagaaccacatttgatttcctggccctttgccttggcagtgatggcatttttatttcactgtgttttaaagtcttcatttatttttataacatgggttagggagaagggccacaaatggagggattgtcctttcaagcaccacagcttcagataaaattagtactttcaaatattgtccactttaacttaaaaaattctagagggattatattggagactcaactgcccttggttttagtttataaaatggcctagtactgtggaattttaattttagaaagtcttagcatcagatcataaacattcattaaaagaactcacatcccatctgaaacttcccaggggagttgggattcttagtagattggtagaaaggggctcattttctactgcatttcccatttttggtatcttgttcagcatgttttatttttatttcttgtctgcagaacatcctatatttatgagaacattctttaagaagaccaccacatagaataccccttcctatcagctcgctctgatttagccttaattttgttaaattttttagagatgaatgaagtgctgctgtggaaagaaatgtacatatactatttctgtatcattaaaattacatttttatggttc

SEQ ID NO: 33324 - DNA, 8567 bp, Artificial Sequence
  derived and/or modified sequence
gtgcggttcggaggcggggcaggtgggggcgggcccaggtagcaggtttggctgcgcgggggccgcgcgtcggagtttccccctttctagggtgaggatggttctacacagccacccggagttccttagttgaaaggtgcgccctgctgtgacagcatggacaccacgttgctgaaaacatgctttgggactgccactgaatttatcttttgcggttttatgacaaagttattagtagtttcccttttttgaattagtattttgaagttaatatcacaatgagttcaggcttatggagccaagaaaaagtcacttcaccctactgggaagagcggattttttacttgcttcttcaagaatgcagcgttacagacaaacaaacacaaaagctccttaaagtaccgaagggaagtataggacagtatattcaagatcgttctgtggggcattcaaggattccttctgcaaaaggcaagaaaaatcagattggattaaaaattctagagcaacctcatgcagttctctttgttgatgaaaaggatgttgtagagataaatgaaaagttcacagagttacttttggcaattaccaattgtgaggagaggttcagcctgtttaaaaacagaaacagactaagtaaaggcctccaaatagacgtgggctgtcctgtgaaagtacagctgagatctggggaagaaaaatttcctggagttgtacgcttcagaggacccctgttagcagagaggacagtctccggaatattctttggagttgaattgctggaagaaggtcgtggtcaaggtttcactgacggggtgtaccaagggaaacagctttttcagtgtgatgaagattgtggcgtgtttgttgcattggacaagctagaactcatagaagatgatgacactgcattggaaagtgattacgcaggtcctggggacacaatgcaggtcgaacttcctcctttggaaataaactccagagtttctttgaaggttggagaaacaatagaatctggaacagttatattctgtgatgttttgccaggaaaagaaagcttaggatattttgttggtgtggacatggataaccctattggcaactgggatggaagatttgatggagtgcagctttgtagttttgcgtgtgttgaaagtacaattctattgcacatcaatgatatcatcccagagagtgtgacgcaggaaaggaggcctcccaaacttgcctttatgtcaagaggtgttggggacaaaggttcatccagtcataataaaccaaaggctacaggatctacctcagaccctggaaatagaaacagatctgaattattttataccttaaatgggtcttctgttgactcacaaccacaatccaaatcaaaaaatacatggtacattgatgaagttgcagaagaccctgcaaaatctcttacagagatatctacagactttgaccgttcttcaccaccactccagcctcctcctgtgaactcactgaccaccgagaacagattccactctttaccattcagtctcaccaagatgcccaataccaatggaagtattggccacagtccactttctctgtcagcccagtctgtaatggaagagctaaacactgcacccgtccaagagagtccacccttggccatgcctcctgggaactcacatggtctagaagtgggctcattggctgaagttaaggagaaccctcctttctatggggtaatccgttggatcggtcagccaccaggactgaatgaagtgctcgctggactggaactggaagatgagtgtgcaggctgtacggatggaaccttcagaggcactcggtatttcacctgtgccctgaagaaggcgctgtttgtgaaactgaagagctgcaggcctgactctaggtttgcatcattgcagccggtttccaatcagattgagcgctgtaactctttagcatttggaggctacttaagtgaagtagtagaagaaaatactccaccaaaaatggaaaaagaaggcttggagataatgattgggaagaagaaaggcatccagggtcattacaattcttgttacttagactcaaccttattctgcttatttgcttttagttctgttctggacactgtgttacttagacccaaagaaaagaacgatgtagaatattatagtgaaacccaagagctactgaggacagaaattgttaatcctctgagaatatatggatatgtgtgtgccacaaaaattatgaaactgaggaaaatacttgaaaaggtggaggctgcatcaggatttacctctgaagaaaaagatcctgaggaattcttgaatattctgtttcatcatattttaagggtagaacctttgctaaaaataagatcagcaggtcaaaaggtacaagattgttacttctatcaaatttttatggaaaaaaatgagaaagttggcgttcccacaattcagcagttgttagaatggtcttttatcaacagtaacctgaaatttgcagaggcaccatcatgtctgattattcagatgcctcgatttggaaaagactttaaactatttaaaaaaatttttccttctctggaattaaatataacagatttacttgaagacactcccagacagtgccggatatgtggagggcttgcaatgtatgagtgtagagaatgctacgacgatccggacatctcagctggaaaaatcaagcagttttgtaaaacctgcaacactcaagtccaccttcatccgaagaggctgaatcataaatataacccagtgtcacttcccaaagacttacccgactgggactggagacacggctgcatcccttgccagaatatggagttatttgctgttctctgcatagaaacaagccactatgttgcttttgtgaagtatgggaaggacgattctgcctggctcttctttgacagcatggccgatcgggatggtggtcagaatggcttcaacattcctcaagtcaccccatgcccagaagtaggagagtacttgaagatgtctctggaagacctgcattccttggactccaggagaatccaaggctgtgcacgaagactgctttgtgatgcatatatgtgcatgtaccagagtccaacaatgagtttgtacaaataactggggtcatcgggaaaggcaaagaaactgaaggcagagtcctaacgttgcatcttattcgagctggcagttctgttcacgtccattgccggcaatggatgtctttgtggtgatgatccttcagaaaaggatgcctctgtttaaaaacaaattgcttttgtgtccctgaagtatttaataagaagcattttgcactctagaaagtatgtttgtgttggttttttaagaagtctaaatgaagttattaatacctgaagctttaagttaagtgcattgatcatatgatatttttggaagcatacaattttaattgtggaagtttaaagcctcttttagtccattgagaatgtaaataaatgtgtcttctttatggaccaaggatatgaaatcatttttcttttgtagctaacggttgccttgaggaagaaataatttggttttattaagagtctactctcaatccagttattagagatgtactgagtttgatttgttaatcctttctatatactgctgatcttgcatgtctacaatctgctcagtttttctgtgtttctgcaatagtggtcagaaaaatacttaaattcccttaatggtgttgttttctatttgttctggttttgagataaatgagtgattctgtccccaaatgtccatttttgaagtgattttcctggaggattagggtatttagcagttgaagctcttcattcatagtagttactgtcagctaacaggttttttaaggcttttaactattaatattttatggaatggggcaaagtaaattgatgaaagaattggagtgataatagtcctttacaaacatacagtccataagaaaatgaatttggcatatagaattattacaatttcctgggagagatggatatttaaacctctattattttagacaagactgtctagaacttaagtttgatctgtcagccagtactcccattaaattcagtgtagtttcacttgatagaatcagatatgttatcgaaatgttagcagcagcttcatcctccttctgattaaagtaagtagaaatgggatgttttgtttaataacagccatagtgtgtgtttagaccacagcggatgttgtagaccaggaccatagatgatacatgtcagtgctgtggaatgtgcattctctgagtgttgttttgtggtatcattgtctttcctgaatgactttctaactgtgcagaaaggcagaaaagtcatcatatgtatatgtcatatgactttataaaatatttaatgtgacaaaaagtggaaagaatctttacaaaccctgcaattacttttttaaaggcacttttactctttggttttatcattccattttgctaatatttactagctttataaattacagtaaggtacaaaaactcatcttgtaatattttcatttttgaagtgaaaaagtacatatattttgcacaaggttttatactgctaagtgcttggttggggtggtgagatgatgattagatcaggggtgaggctgagagactctgggtttagggctagccctgcctccatctcccttgggtaaaatgaagggtgtggggtaaaagatgcataaggccttttctagctctgacagcctagaagtccaatcaccctgtaataaatatgtgttgaatgaagaaatgggtgaatgagcttgtcaatgtgattttaaaaaattgactacctggaggaatgattaggaatctaaatgaagccagccctcggtatctgcaggtttctcatccatggattcaaccaactgcaaatggaaaatacgattttttttaaaaaaaggatggttacatccgtattgaacatgtacagacttttttcttgtcattattctctgaacaatacaagaactctttatgtagcatttacatttattaggtattataagtaatctagagattatttaattaaaatatacaggaggatgtgtgtcagttatatgcaaattctgtaccattttgtatcagggaattgagcatcttcagatgttggtatctgcagggatcctggaaccaaacccctgcagatactaagggctgacgatctaggtaagactggatttaacagttggaaaaaaaaaaaaaaaaggagagagaagacagttcctttcctgtagaaattaaaacaaaatacaaattgaggaagctctgctacccaggctgtcatggtagagaacttgaagaagacctgtttggatggacacctggtttcaaaagtcaggtgtggagactgttaaatgggagggcctcatccataaatgatttctggcaacgtcttcttcaggtggagcttgacgtctttttaatgttacttggggagggagtgctcattaagggatgccagggccagctctggtggttcctggggaggctgcgtccttccctgcttctgcatgtcatgaggcagcaggaaggtttcccctgcacctgtctgtcctggctccctctgggtagccccctactgttctgtgcttcagcacagcctggtttgtcaagaggcacatagttggggctgggctgcatggcacaggggcttatgtgcctgctggttatttaattttcagccttaagttttctttaatattttcctgttggctatttaaaggttttggttatcttttattccttatctacaatcaagatgacaatgtaattgaattatcttatttataacacggttcgtgattcatgattcatgattacaagtagaaaatatgtcatgttcctcacctccaaataaatatgtgtgtgtctgtgtgtgtgtatatatgtatgtggcggagagggagagagtggggaaggagagcagtgttatcatacatagagaggctaaatgtgtcccatccctcactgtcagctttataaaggagtttgactccatccacagaagaatgttttataagactaggaaaacacgttgaaaactaggataaacagcaacaaaaatcaactaaatatgttgttactgttgctaaggattttctccttagaataatttaggatttttaaaaatttctgtttgccaaatgctgtagataaatggccagattcttcctatccctaggattcctttattattttttttcacagattttgagaacaagggggagagatagtatggaagattaagattccattaatcttatagaactgtgttgtcacccaaattcctgcttgtttgaacatggcatcttcatagattcaggattcactaccctctatagctggatcttgaaaattatctggccagataattttgcatctgcttggatgattgtagactgagatgtgagtggaggataaagtattagacttttgctgagtaactgccaaccaagaagtatttatcggacacttactaggtgcctaggattgtatcagagggaatatgaaatgtgtccctgccctacctagttttaacgacagaatatctattaaaggctacttagctgaagggtaagggtgacaggtctaggggaagctttgggaggtggtgtgctgtgacagaaaaagtggcagagtagggacgagagacctgcattctagccctgtttctgtcacttgctctgtacacttagacaacagcttgacctcttgagctttagtttcctcctctgcataatgagagggttagactactgaattgtatgggaaaaaaatacaaattcctgggtcctaggccatgcctgctgaatccgactgttcaggaagaggcctaggaaatctgtgagggaatccccaggggaatctcgtgaccagccaggtgtgaaatctgctaactggaagatctcaaagcttccttcactttttgtgattttgtggtcatgtaacgttactgtattattctacgtaaatgtgggtacttggatgtttatcatactgtttctctgtgtttacatactaatttgtgtaagaaatgcattttagtctgtgtacctcaacctgctgtttgtttcctagaggtgttagtagtctttaaatacaagtaagacttaagaggatatttgatgttatttacctggatattttcttccccttttatttatttagaggaaattgagattctaggagccaaaaaaatgaaaacaaaattctaaggcaaagttaaagaaaaaaattacattatttcttaccatttgctactttataatgaaaatttaaaaattatatgggaagatttttctctgggataacaaatccttgtcataaagtaagaggtctttttaaagtaggtaggctataaggcctgtaatttaaaataatactcctttctctagggtttggtgcaattctccattaatgaagataacatttgaattccccaaagcaggtgaggagtcggggaggagaaagcgatgttaaaatgaaaactcactgcaaaagaggaggcagaggaagaaggaatgtaaaccccttaaagcagatgtgtgtggggccttatgaagaccaggattctgcgggtgtcaggggattgcccctcttgacagagactagggttttagactgaggcttcctgcagggtgttcgcattgcccttctccgttccccttcagacctttctggggagaagaggtgggaggaggggagaaagactgttcatcttattctgaatcctggagcagctgaaggttttctcttgagtcaggatgcagtggtaatgcattaaccagcaagtgtggccaaggataatgaaaaagtgggaaaggaaggtcctcctcctccctgattgtagcatccagcagtctctgtagccaggttactcaagaaccacatttgatttcctggccctttgccttggcagtgatggcatttttatttcactgtgttttaaagtcttcatttatttttataacatgggttagggagaagggccacaaatggagggattgtcctttcaagcaccacagcttcagataaaattagtactttcaaatattgtccactttaacttaaaaaattctagagggattatattggagactcaactgcccttggttttagtttataaaatggcctagtactgtggaattttaattttagaaagtcttagcatcagatcataaacattcattaaaagaactcacatcccatctgaaacttcccaggggagttgggattcttagtagattggtagaaaggggctcattttctactgcatttcccatttttggtatcttgttcagcatgttttatttttatttcttgtctgcagaacatcctatatttatgagaacattctttaagaagaccaccacatagaataccccttcctatcagctcgctctgatttagccttaattttgttaaattttttagagatgaatgaagtgctgctgtggaaagaaatgtacatatactatttctgtatcattaaaattacatttttatggttc

SEQ ID NO: 33325 - DNA, 2862 bp, Artificial Sequence
  derived and/or modified sequence
atgtcaagtggtctttggagtcaggaaaaggtaacctctccgtactgggaagagaggatattctacctactgctgcaggagtgctccgtcacagataagcaaacacagaagttgttgaaagtccctaaggggtccatcgggcaatacatacaggacagatctgttggtcacagtagaatcccttctgccaaggggaaaaagaatcagattggactgaagatattggagcagcctcatgctgtgctttttgtcgacgagaaagacgtcgttgagattaatgagaaatttacggaactccttttggccatcaccaactgcgaagaaaggttctctctgttcaaaaatcgtaatagacttagcaaaggcctgcagatagacgtgggctgcccagtcaaagtgcagctccgctctggtgaagagaaattccctggcgtagtgagatttagagggccactgctcgctgagagaaccgtcagtggcattttcttcggagtggagctgctagaggaaggacgtggccaagggtttacggacggagtatatcaggggaaacaactttttcagtgtgacgaggattgcggtgttttcgtcgccctggataaactagaactgatcgaagatgacgatacagccttggagtcagactacgctgggcccggcgacactatgcaggtagagttgccaccactcgagatcaattctcgggttagcctgaaagtcggcgagaccattgaatccggaacggtcattttctgcgatgtcctgccaggtaaggagagtctggggtattttgttggggtcgacatggataaccctataggcaattgggatgggagattcgatggtgttcagctttgttcattcgcctgtgtggagagcaccatcttactgcatattaatgacatcatccctgaatcagtgacacaggagcgtaggcctcctaaactggcattcatgagccgaggtgtgggggataagggaagctcgtcccacaataaaccgaaggccactggctcaacctcggatccagggaatagaaataggagtgagctgttttatactcttaatggatcttccgtcgacagccaaccccagagtaagtccaaaaacacatggtacatcgatgaagtggcagaggaccccgcaaagtcactaacggagattagtaccgacttcgaccgctccagtcctccgctccagcctcctccggttaactctcttactacagagaaccgcttccactctcttccctttagtctgacaaaaatgcccaacaccaatggtagcatcggacatagcccactgtccctgtctgcacagagcgttatggaggaattaaatacggcacccgtccaggagagcccgccactcgccatgcctcctgggaattcccacggacttgaggtgggcagcttggccgaggtgaaggaaaatccacccttctacggggtaatacgctggatcggccagcctcccggcttgaatgaagtactcgccggattggagctggaagacgagtgcgctggatgcacggacggaacatttcggggaaccaggtattttacctgcgctctcaagaaagctttgtttgtgaaactgaagagttgtcgtcccgattcgcggttcgcttccctccagcccgtttcaaatcagattgaacggtgtaactctctggcattcggtggctacctcagtgaggtggtggaagagaacacaccgccaaaaatggagaaagaagggctggagattatgatcggcaaaaagaagggaattcagggacattacaattcttgctatctggattcaacactgttttgtttgttcgctttctctagcgtccttgatactgtactcctgcgccccaaagaaaaaaacgacgttgagtattacagtgaaacacaggaattgctcaggacagagatagtaaatccgctgaggatatacgggtacgtgtgtgcgaccaagatcatgaagctgcgtaaaatcctggagaaagtggaagctgcttccggtttcacctcagaggaaaaagatccagaagaattcctcaacatcctgttccaccatatcttacgggtggaacccctcttaaagatccgatccgctggtcagaaagttcaggattgttacttctaccagatcttcatggaaaaaaatgagaaggtcggggtacctacgatccaacagctccttgagtggagcttcataaatagtaatctgaagtttgcagaggcaccctcttgcctgatcattcaaatgccaagattcggtaaagacttcaagctgtttaagaaaatttttccaagcctggagctgaacatcacagacctgttggaggacaccccccggcagtgtcgcatttgcggcgggttagccatgtacgaatgtcgcgagtgttatgacgatccagacatcagcgccggcaaaatcaaacaattctgtaagacctgcaacacgcaggtccatctgcatccaaaacgactgaatcacaagtataacccggtgtcattgcccaaagatctgccggattgggactggaggcatggttgtatcccatgccagaatatggaactctttgctgtactgtgcatcgagacatctcattatgtcgcatttgttaaatacgggaaggatgattcggcgtggctgtttttcgatagcatggccgaccgcgacggtggccagaatggatttaacataccccaggtcactccgtgtcctgaggtgggagagtatctcaagatgtcactagaggacctccatagccttgacagcagaaggattcagggctgcgctcggcggctgctctgtgatgcttacatgtgcatgtaccagagcccaacaatgtcactttataagtag

SEQ ID NO: 33326 - DNA, 2862 bp, Artificial Sequence
  derived and/or modified sequence
atgtccagcgggctgtggagccaggaaaaagtgacaagcccctattgggaggaaaggatcttttacctgctgctacaggaatgttctgtaactgataaacagacacagaaattgttgaaagtgccaaaaggctccataggtcaatatattcaagacagaagcgtcggccactcccgaattccttctgccaaggggaaaaaaaatcagatcgggcttaaaatactcgagcagccacacgccgtgctattcgtagatgaaaaagatgtcgtggagataaacgagaagttcactgagcttctccttgctatcaccaactgtgaggaacggttctctttgtttaagaaccggaacagactcagcaagggcttgcagatcgatgtcggctgtcctgtgaaagtccagcttcggtcaggcgaagaaaagtttcccggagtagtaagatttcgaggtccactgttggccgagcgcactgtttccggaattttcttcggggtggagctcctggaagaagggaggggccagggtttcacggacggtgtatatcaggggaaacaactgttccagtgcgacgaagactgcggggtatttgtggccctggataagttggagcttatagaagatgatgacactgctctggagagtgactacgcaggaccgggagatacaatgcaggtggagttaccaccactcgagatcaacagcagggtttcactaaaagtcggggagacaatagaatcaggcaccgtgatcttttgtgacgtattacccggcaaagagagcctgggatattttgtgggggtggatatggacaaccccatcgggaactgggatggacgcttcgacggagtccaactgtgctcatttgcctgcgtggagtccactatacttctgcacattaacgatataattccagagagcgtgacacaagagagaaggcctccaaagttagccttcatgtcccgaggcgtgggagacaagggcagcagctcacacaacaagccaaaagctacggggagtacttcagaccctggcaatagaaaccgatcggaactattctatacgctgaatgggtcatccgtcgacagccaaccacaatcaaagtctaagaatacttggtacattgacgaggtcgcggaagaccccgccaagtccctcacagagatttccaccgactttgatcgaagctcacctcctcttcagcccccacccgtgaattccttgactactgaaaataggttccactccctgcccttctcactcaccaaaatgccgaacactaacgggtctattggacatagcccgctttctttgtcagcacaatctgtaatggaggagctgaacactgcgccagtgcaggaatctcccccattagccatgcccccaggcaattcgcacgggctggaggtaggaagcctagcagaggtgaaggaaaatccaccattctacggggttatcaggtggatcggccagccgcctggattgaatgaggtgctagctgggctcgaactcgaggacgaatgcgcaggctgtactgatggaacctttcggggcaccagatattttacttgcgcactgaaaaaggcactgttcgtcaaactaaagagctgccgccctgacagccggtttgcctccctgcaaccagtaagtaatcagattgagcggtgtaattcactcgcatttggcgggtacttgagcgaagtagttgaggagaatacacctcctaagatggagaaagagggcctggagatcatgatcggaaaaaagaagggtatccaggggcactacaattcatgttacctggacagcacactgttctgcttatttgcctttagctcagttctggacaccgtactcctgagaccaaaggagaagaacgacgtggagtactattccgagacccaggagctcctgcgtaccgaaattgtcaatcccctgagaatatacggctatgtctgcgcaaccaaaatcatgaagctgaggaaaattctggagaaggtggaggctgcttcggggttcacatcagaggaaaaggatcccgaggagtttctgaatatcctttttcaccacattctcagggttgaacctctcctgaagatccggtccgcaggccagaaggtgcaagactgttacttttatcagatctttatggagaagaatgaaaaggtgggcgtgccgacaatacagcaactgctggagtggtcattcattaatagcaatctgaaattcgccgaggccccctcttgcttgataattcaaatgcctcggtttggtaaagacttcaagctgttcaagaagatattcccctccctggagctgaacattactgacctcttggaagacaccccgagacagtgccggatttgcggcgggctggcaatgtacgagtgccgcgagtgttatgacgaccctgatatttccgccggaaagattaaacagttctgtaaaacctgtaatacacaggtgcatctgcacccaaagagactgaatcataaatataaccctgtttcgttgcccaaagatctgccagactgggactggaggcatggctgtattccctgccagaacatggaactcttcgcggtgttgtgcatcgagacctcccactacgtggcattcgtgaagtacggaaaagatgactcagcgtggctttttttcgacagtatggcggacagagacggtggccaaaatggattcaacatcccccaagttacaccttgccctgaggtcggggaatacctgaaaatgtcactggaggacctgcattctctggactccaggcgaatccagggatgtgcccgccggctcctgtgcgatgcctacatgtgcatgtatcagagccctacaatgagcctgtataaatag

SEQ ID NO: 33327 - DNA, 2862 bp, Artificial Sequence
  derived and/or modified sequence
atgagcagcggcctgtggagccaggagaaggtgaccagcccctactgggaggagcgcatcttctacctgctgctgcaggagtgcagcgtgacagacaagcagacccagaagctgctgaaggtgcccaagggcagcatcggccagtacatccaggacagatctgtgggccacagccgcatccccagcgccaagggcaagaagaaccagatcggcctgaagatcctggagcagccccatgctgtgctgtttgtggatgagaaggatgtggtggagatcaatgagaagttcacagagctgctgctggccatcaccaactgtgaggagcgcttcagcctcttcaagaacagaaaccggctgagcaagggcctgcagattgatgtgggctgccctgtgaaggtgcagctgcggtctggagaggagaagtttcctggggtggtgcgcttccggggccccctgctggccgagaggacagtgtctggcatcttctttggagtggagctgctggaggagggccggggccagggcttcacagatggagtgtaccagggcaagcagctgttccagtgtgatgaggactgtggggtgtttgtggccctggacaagctggagctgattgaagatgatgacacagccctggagagtgactatgccggccctggggacaccatgcaggtggagctgccccccctggagatcaacagccgggtgtccctgaaggtgggggagaccatcgagagcggcaccgtcatcttctgtgatgtgctgcccgggaaggagagcctgggctactttgtgggcgtggacatggacaaccccatcggcaactgggatggccgctttgatggagtgcagctgtgcagctttgcctgtgtggagagcaccatcctgctgcacatcaatgacatcatccctgagagcgtgacccaggagaggaggcctcccaagctggccttcatgagccggggcgtgggggacaagggcagcagcagccacaacaagcccaaggccaccggcagcaccagtgaccccggcaacagaaacagaagtgagctgttctacaccctgaatggcagctctgtggacagccagccccagagcaagagcaagaacacctggtacattgatgaggtggctgaagatcctgccaagagcctgacagagatcagcacagactttgacaggagcagcccccccctgcagcccccacctgtgaacagcctgaccacagagaaccgcttccacagcctgcccttcagcctgaccaagatgcccaacaccaacggcagcatcggccacagccccctgagcctgagcgcccagagcgtgatggaggagctgaacacagcccctgtgcaggagagcccccccctggccatgcctcctggcaacagccacggcctggaggtgggcagcctggccgaggtgaaggaaaatccacccttctacggcgtcatccgctggattggccagcccccaggcctgaatgaggtgctggccggcctggagctggaggatgaatgtgccggctgcacagatggcaccttccggggcacccgctacttcacctgtgccctgaagaaggccctgtttgtgaagctgaagagctgcaggccagacagcagatttgccagcctgcagcctgtgagcaaccagatcgagcgctgcaacagcctggccttcggcggctacctgtctgaggtggtggaggagaacaccccacccaagatggagaaggagggcctggagatcatgattggcaagaagaagggcatccagggccactacaacagctgctacctggacagcaccctcttctgcctgtttgccttcagctctgtgctggacacagtgctgctgcggcccaaggagaagaatgatgtggagtactacagcgagacccaggagctgctgaggacagaaattgtgaaccccctgcgcatctacggctacgtgtgtgccaccaagatcatgaagctgaggaagatcctggagaaggtggaggccgccagcggcttcaccagcgaggagaaggaccctgaggagttcctgaacatcctcttccaccacatcctgcgggtggagcccctgctgaagatccgctctgctggccagaaggtgcaggactgctacttctaccagatcttcatggagaagaatgagaaggtgggcgtgcccaccatccagcagctgctggagtggagcttcatcaacagcaacctgaagtttgctgaggcccccagctgcctgatcatccagatgcccaggtttgggaaggacttcaagctgttcaagaagatcttccccagcctggagctgaacatcacagacctgctggaggacaccccccggcagtgccgcatctgtggcggcctggccatgtatgaatgtcgggagtgctatgatgatcctgacatctctgctgggaagatcaagcagttctgcaagacctgcaacacccaggtgcacctgcaccccaagaggctgaaccacaagtacaaccctgtgtccctgcccaaggacctgcctgactgggactggaggcatggctgcatcccctgccagaacatggagctgtttgctgtgctgtgcatcgagaccagccactacgtggcctttgtgaagtatggcaaggatgacagcgcctggctgttctttgacagcatggctgacagagatggcggccagaatggcttcaacatcccccaggtgaccccctgcccagaggtgggggagtacctgaagatgagcctggaggacctgcacagcctggacagccgccgcatccagggctgtgcccggcggctgctgtgtgatgcctacatgtgcatgtaccagagccccaccatgagcctgtacaagtag

SEQ ID NO: 33328 - DNA, 2862 bp, Artificial Sequence
  derived and/or modified sequence
atgagcagcggcctgtggagccaggagaaggtgaccagcccctactgggaagagcgcatcttttatctactcctgcaggaatgttctgtaacagacaagcagacgcagaagctgctgaaagtacctaagggtagcatcggccagtatatccaggacaggagcgtgggccatagccggatcccctctgccaagggcaaaaaaaatcaaataggtctcaagatacttgagcagccacatgctgtgcttttcgttgacgagaaagatgtggtggagattaacgagaagttcacggaattactgctagcgatcaccaactgcgaagaacgattttctctgttcaagaatcgaaatagactaagcaaaggccttcagatcgacgttgggtgcccggtgaaagttcagctgagatccggcgaggagaagttccccggagtggttcgatttcgtggccctctcctcgccgagaggacggtcagtggcatcttttttggtgttgagctcctggaggagggaagaggccagggctttactgacggtgtgtatcaaggcaagcagttgttccaatgtgacgaggactgcggagtgttcgtcgccctggacaagctggaattaatcgaagatgacgacacagctctggagtcagactatgctgggcccggggacacgatgcaggtagagctgccgcctcttgagatcaattccagagtgtctctcaaagtcggcgagaccatcgagtctggtactgtaatcttttgcgacgtgctgccaggcaaggagtccctcgggtattttgtaggtgtcgacatggacaaccccattgggaactgggatgggcggtttgacggcgttcagctatgctccttcgcctgtgtcgaatcaactattcttctacacatcaatgacattatacccgaaagcgttactcaggagcggaggccccccaagttggcttttatgtcccgaggcgtgggcgataaaggctcctcctctcacaacaagccgaaagcaacaggatctacctccgatcctggtaaccgcaatcggtccgagttgttctacacattgaacgggtcttcggtggattcacagccacagtctaagtcgaaaaatacatggtacatcgacgaagttgccgaggaccctgccaaatctctcactgaaattagcaccgatttcgatcgctcatcacctcctctgcagcccccgcccgtcaactcgctgaccacagaaaacagattccattccctaccgttctcattaactaagatgccaaatacgaatggtagcattgggcacagccccctgtcactttccgcccaatcagttatggaagaactgaacactgctccagtgcaggagagcccaccactcgctatgcctccaggaaattcacacggactggaggttggcagcctcgccgaagtgaaagagaatcctcccttctatggcgttattcggtggatcgggcagcctccaggactgaacgaggtgctggcaggattagaactggaagatgagtgtgcagggtgtactgatggcaccttccgcggaacaaggtacttcacctgtgcactgaaaaaggctctctttgtgaagttgaaaagctgccgaccagactcccgctttgcctcccttcagcccgtgagcaatcagatagagaggtgcaacagcttggcatttggaggttacctctctgaggtggtagaggagaacactccacctaaaatggagaaggagggattagagattatgataggtaagaagaagggaatccaggggcactacaatagttgctatctagattcaacgctcttttgtctgttcgctttttcctctgttctggacacagttcttcttcggcccaaggagaagaacgacgtggagtattactctgagacccaggaactgttgaggaccgagatcgtgaatcctttaaggatatatggttacgtatgcgccaccaagattatgaagctgagaaaaatccttgagaaagtcgaagccgccagcggcttcaccagcgaggaaaaggaccccgaggagtttcttaatatcctattccaccatattcttcgcgtcgagcccctgctgaagatccgctctgccggccagaaggtgcaggattgttatttctaccagatcttcatggaaaagaacgaaaaagtcggggtgcctaccattcagcagctcctagagtggtcatttataaactccaaccttaaatttgccgaagcaccatcatgcctgatcatccagatgccaagattcggaaaagatttcaaacttttcaagaagatcttcccatctctcgaactgaatattactgatcttctggaggatacacccaggcagtgccgcatctgcggcggcctcgccatgtacgaatgccgggagtgttatgacgaccccgatatttccgccgggaagataaagcaattttgtaagacctgcaatacacaggttcacctccatcccaaacggctgaaccataaatacaaccctgtcagcctgcccaaggacttgccagattgggactggagacacggctgcatcccatgtcaaaacatggagctcttcgccgtgctgtgtatcgagacctcccactatgtcgccttcgttaagtacgggaaagacgatagtgcctggctgttttttgacagtatggccgatagagatggggggcagaacggttttaatattcctcaggtgacaccatgtccagaggttggggaatacctgaaaatgtcgctggaggacttgcactccctggattcccggagaatccaggggtgcgcgcggcggttactttgtgatgcctacatgtgcatgtaccagagtccgactatgagcctgtacaagtag

SEQ ID NO: 33329 - DNA, 2862 bp, Artificial Sequence
  derived and/or modified sequence
atgagcagcggcctgtggagccaggagaaggtgaccagcccctactgggaggaaaggatcttttacctcttactgcaggaatgtagcgtgacagataaacagacccagaagctgctgaaagtgcctaaaggcagtataggccaatatattcaggataggtccgtgggccactcccgaataccatctgcaaaaggcaagaagaatcagattggactgaagatacttgaacagcctcacgcagtgttgttcgtggatgaaaaagatgtggtcgagattaacgagaagtttaccgagttgctgcttgcaatcactaattgtgaggagagatttagtttgtttaagaacagaaataggctgagtaagggccttcagatcgatgtcggctgtccagtaaaggtgcaattgcgtagtggtgaggagaagtttcctggcgtggtcaggtttcgaggtcctcttctcgccgagaggactgtgtctggtattttctttggcgtcgagctcctggaagagggacggggacaggggttcaccgacggcgtgtaccaggggaaacagttgttccagtgcgatgaggattgcggcgtcttcgtagctctggataaactggaactgatcgaagacgacgatactgctctcgaatccgattacgcgggccccggggacactatgcaggtagaactcccaccgctcgagattaactcccgagtatccttgaaggttggagagaccattgagtcaggtaccgtgatattttgcgacgtgcttcctggcaaggagtccctcggatacttcgtaggagtggatatggacaatccaatcggcaattgggacggccgtttcgatggcgttcagctttgttcttttgcatgcgtcgaatcaacaattctcctccacattaacgacatcatccccgaatctgtgactcaggagaggaggccaccaaagcttgcctttatgtcacggggcgtaggcgacaaaggaagcagttcacacaacaagcctaaggcaaccggctcaacgtccgatcccgggaatcgaaacaggagcgaactgttttacacattgaatggcagttctgtcgatagccagccacagtccaaaagcaaaaatacttggtatattgacgaggtggccgaggaccccgctaaaagcttaaccgagatcagtaccgacttcgaccgttcgtcacccccactccagcccccaccagtgaatagtctgactactgaaaatcgttttcatagcctccccttcagcctgaccaagatgccgaacacaaacggaagtatcggtcacagtcctttgtctctgtctgctcaaagcgtaatggaagaactcaatacagcccctgttcaagagtctccacctctggcaatgcccccgggaaatagccacgggctggaggtgggttcactggctgaggtcaaagagaatcctcctttctacggagtaatcagatggattggccagccccccgggctaaatgaggtgttagctggtctggagctcgaggacgaatgcgccggctgcacagacggaacttttaggggaactcgatacttcacttgtgcactgaaaaaggccctctttgtaaaactgaaatcttgtaggccagattccagatttgcaagtctgcaaccagtgagcaaccagattgaaagatgtaactcccttgcattcggaggctacctctccgaagtggtagaagagaacacgcctcccaagatggagaaggagggcctggaaattatgattgggaagaaaaaaggaatccaggggcattataattcttgctatctcgacagcaccctgttttgcctgtttgcttttagtagcgttttggatactgtactccttaggccgaaagagaaaaacgatgtggagtattactcagaaacccaagaactgctgaggaccgagatagtgaatccccttaggatttatggatacgtctgcgcaacaaagattatgaagctgagaaaaatcttagagaaggtggaagccgcctcaggatttacctctgaggaaaaggaccccgaggagttccttaatatactgtttcatcatattttgcgtgtggagcctttgctgaagattcggtcagcgggacagaaagtccaggattgttatttttaccagatctttatggaaaagaatgaaaaggtcggggtacccaccatccagcagctcttagaatggtctttcattaactccaacctcaagtttgccgaagcaccatcttgccttatcattcagatgccacgatttgggaaggacttcaagctgttcaagaaaatattcccctcgctcgaactcaacatcacagaccttctggaggacacgccgaggcagtgtcgaatctgtgggggcctggcgatgtacgaatgcagggagtgctacgatgatcccgacatctcagccggtaagatcaagcagttttgtaagacctgtaatacccaagtacacctgcacccaaagcgcctaaaccacaaatacaaccccgtatccctgcctaaggatctgccggactgggattggcgccatggatgcatcccttgccaaaatatggagctcttcgcggtgctctgtattgaaacatcccactacgtcgccttcgttaaatatggcaaggatgattcagcttggctctttttcgactccatggccgaccgggatggaggacagaacgggttcaatatccctcaagtgactccctgccctgaagtgggggagtacttaaagatgagtctcgaggacctacattccttggactcccggagaattcagggttgcgccaggcggctgctgtgcgacgcttatatgtgcatgtaccaatctcctacaatgtcattgtacaagtag

SEQ ID NO: 33330 - DNA, 2862 bp, Artificial Sequence
  derived and/or modified sequence
atgtcctcaggcctatggtcccaggagaaggtgaccagcccttattgggaagaaaggatcttttacctgcttctgcaggagtgtagcgtcactgacaagcaaactcagaagctgctgaaggtgccaaagggctctatcggtcaatatattcaggatcgctccgtgggacattctcggatcccctccgctaagggaaaaaaaaatcaaatagggttgaaaatacttgaacagccccatgccgtgttatttgtggatgaaaaggatgtggtggagattaacgaaaagttcaccgaacttttgctcgcgattaccaattgcgaggagaggttttcccttttcaagaaccgaaaccggctgagcaagggcttgcagattgacgtgggctgtcctgtgaaggtccagctgagatctggggaagagaagttccccggagtcgttcggttcaggggacctctgttggccgagaggactgtctcagggattttttttggcgtggaacttctagaagaggggagaggccagggtttcaccgacggggtctatcagggtaaacagttattccagtgtgacgaggattgcggcgttttcgtcgctctggacaagctggagctgatagaggacgacgacactgccctcgaaagcgactatgccggaccaggagatacgatgcaggtcgaattgccgcctctagaaataaattcacgagtgagcctgaaagtcggggagaccattgaatccggcacagtgatcttctgtgacgtcctccccggaaaggaatccctgggatactttgtgggcgtggacatggataatccaatcgggaactgggatggaagatttgacggagtgcagctctgctcttttgcctgcgttgagagcacaatcctactccatatcaatgacattatccccgaaagtgtcacccaggagagaaggcccccaaagctggcgttcatgagtcggggagtcggggacaagggatcgtcctcacacaacaaacctaaagcaacaggctccacaagcgacccaggcaacaggaaccgcagtgaacttttttataccctgaacggctcaagtgtggatagtcaaccacagagtaagtctaaaaacacgtggtacatcgacgaggttgccgaggaccctgccaaaagcttgactgagatcagcaccgattttgaccgtagcagtccaccactccaaccaccgccagtcaactccctgacaacggagaataggtttcacagtttaccattcagtcttacaaaaatgccaaacacaaatgggtcgatcggtcatagccccctgagcctcagtgcccagagtgtgatggaggaactaaacacagccccagtacaggaatctcctccactggcgatgcctccgggaaatagtcacgggctggaggttggctcactcgctgaagtcaaagagaacccacctttctatggggtcataaggtggatcggccagccgccaggcctgaatgaggtgctggctggactcgaacttgaagatgaatgcgctggatgtacagatgggacatttagggggactcgttacttcacgtgcgctctcaaaaaggctttgttcgtgaaattgaagagctgccgtcccgacagccgcttcgcttccctccagcctgtctccaaccagatagagcggtgtaattccctagcgttcggcggttaccttagcgaggtcgttgaggaaaacactcctcctaaaatggagaaagagggcctggagattatgatcgggaagaagaaaggcatacagggtcattacaacagctgttatctggatagtaccctattttgcctgtttgctttctcaagcgtgctggataccgtcttgttaagacccaaggagaaaaatgatgtggagtattactcagaaacccaagagctcttgaggacggagattgtcaatcctctgcggatttatggttacgtctgcgctaccaaaattatgaagttaagaaagatcctggagaaggtggaagcggcttctggatttaccagcgaggagaaagacccggaggaattcctgaacatcctctttcaccacatactacgcgtggaacctctcctcaagataagatccgcagggcagaaggtgcaggactgctacttctatcagatattcatggagaaaaatgagaaagttggcgtgccaaccattcagcagctgcttgagtggtctttcatcaatagtaatctcaagttcgctgaagccccaagctgtctgataatccagatgccgagatttggcaaggattttaagttattcaagaaaatcttccctagtctcgaactgaacataacagacttgctcgaggacacacctagacagtgtcgaatctgcgggggactcgcaatgtacgagtgccgtgagtgctatgatgacccagacatcagtgccggaaaaatcaagcagttctgcaagacttgtaatactcaagtgcatttgcatcccaagagactcaaccacaaatacaaccctgtttcattgccaaaggacctgcctgactgggactggagacacgggtgcatcccttgtcaaaacatggaactgtttgcagtactttgcattgagacttctcattacgtcgcgttcgtgaagtacggaaaagatgactccgcgtggctgttcttcgactccatggcagatcgtgacgggggacagaatgggttcaatatcccccaagtgaccccttgcccagaagttggggaatatctgaagatgtctctggaagatttgcattcactagatagccgtaggatccagggctgtgccaggagactcctatgcgacgcctatatgtgtatgtatcagtcccccaccatgagtctctataaatag

SEQ ID NO: 33331 - DNA, 2862 bp, Artificial Sequence
  derived and/or modified sequence
atgtcatctggtctttggtctcaggagaaggtgaccagcccttactgggaagagaggatattttacttactgctgcaggaatgttctgttaccgataagcagacccagaagctcctgaaggtgcctaaagggtccattggccagtacatccaggatagatcggtgggtcattccagaattccatccgcaaaaggcaagaagaaccagataggcctgaagatcctggagcagccccatgcggtcttgtttgtcgacgaaaaggacgtggtggagattaatgaaaaattcaccgaactgctgctcgcaattactaattgcgaggaaaggttctccctgtttaaaaacaggaatcgcctctcaaaaggactccagattgatgtgggttgtccagtgaaagtccaactgcgatccggagaggaaaaatttcctggtgttgtgcgctttcgcggacctctgctcgctgagagaaccgtgtcaggaatcttcttcggcgtcgaactgctggaggagggcagaggccagggatttacggacggggtgtaccagggcaaacagttgtttcagtgtgatgaggactgtggagtttttgtcgctctcgacaaattagagcttatagaggatgatgacactgccttggagtccgactatgctggacccggagatactatgcaggtggaattaccaccgttggagatcaactcccgcgtgagcctgaaagtgggtgagaccatagagagcggaacagtcatattctgtgacgtcctgcccggtaaagagtccttgggttacttcgtgggggtcgatatggataatccgattggaaactgggacggcaggttcgatggtgtgcagctctgtagcttcgcctgcgtagagagtacaattttgctacacatcaacgatatcatcccagaatccgtcacccaggaaaggagaccaccaaagctggccttcatgtcacggggagtgggagataaggggagttccagccataataaacctaaggctacaggcagtacaagcgacccaggcaacagaaatcggagtgagttgttttacacacttaatggaagttcagtagatagccagccacagtctaagtcaaaaaatacctggtacatcgatgaagtcgccgaggacccagccaagtcattgaccgaaatttcgacagactttgacagaagctcacctcccttgcagcctccccctgtcaactctctgactacagaaaacagatttcatagccttcccttttcgctaaccaagatgccaaatacaaacggatcaatcggtcactctcctttgagtctatcagcccaatccgtcatggaagaactgaacaccgcaccagtacaggaatcaccaccgctggcgatgcccccaggtaattcccacggtctcgaagtgggatctctcgccgaggtaaaggaaaaccctccgttctacggcgtgatcagatggatcggccagcctcctggtttgaacgaagtcttagccggacttgagttggaggatgaatgcgcaggttgtacggacgggacttttcgaggcaccagatactttacttgcgctctgaaaaaagcactgttcgtaaagctcaaaagctgtaggcccgacagcaggttcgcatccctccagcccgttagtaatcaaatcgaacgctgcaattccctcgccttcggaggatacttatcggaggtggttgaagaaaatacacctccgaagatggagaaagagggattggagattatgatcgggaagaagaaggggatacaggggcattacaacagttgctacctggactctactctgttttgcttgtttgctttttcttccgtattagacacagtcctcctcaggcccaaggagaaaaatgacgtggagtactatagcgaaacacaggaattactgagaacagaaatcgttaacccccttcgcatatacggatatgtgtgtgccacaaagattatgaaactgaggaagattctcgaaaaagttgaggccgctagcggttttacaagcgaagaaaaggacccggaggagtttttgaatatcttattccaccacattctgcgagtagagcctttactaaaaattcggtccgccggacaaaaggtgcaggactgctacttttatcagatttttatggagaaaaacgagaaggtaggagtccccacaatacagcagctgctggaatggtctttcattaattcgaatctaaaattcgccgaagcaccctcatgcctcatcatccagatgccaaggtttggcaaggatttcaagctgttcaagaagatatttccttcactggagttgaacattactgatttgctggaagatacaccaagacagtgccgcatctgcggaggactcgctatgtacgaatgcagggaatgctacgatgaccctgacatttctgccggaaagatcaaacagttttgtaaaacttgcaacacacaagtgcatttacacccaaagagactgaatcataaatataaccctgtatctctgccaaaggatctgcctgactgggactggcggcatggttgcattccgtgtcaaaatatggaattatttgctgtgttgtgcatcgagacctcccattacgtggccttcgttaagtacggcaaggatgattctgcctggctttttttcgacagcatggcggaccgagacggcggacaaaacggattcaacatccctcaggtgaccccctgcccagaggttggcgagtacctcaagatgtccctcgaggacctgcacagcctggactctcgcaggatacagggttgcgccagacgcctgctgtgtgatgcctacatgtgcatgtatcagagcccaaccatgtcgctttacaaatag

SEQ ID NO: 33332 - protein, 433 aa, Artificial Sequence
  derived and/or modified sequence
MSILAKMGDWQDRHDGTSNGTARLPQLGTVGQSPYTSAPPLSHTPNADFQPPYFPPPYQPIYPQSQDPYSHVNDPYSLNPLHAQPQPQHPGWPGQRQSQESGLLHTHRGLPHQLSGLDPRRDYRRHEDLLHGPHALSSGLGDLSIHSLPHAIEEVPHVEDPGINIPDQTVIKKGPVSLSKSNSNAVSAIPINKDNLFGGVVNPNEVFCSVPGRLSLLSSTSKYKVTVAEVQRRLSPPECLNASLLGGVLRRAKSKNGGRSLREKLDKIGLNLPAGRRKAANVTLLTSLVEGEAVHLARDFGYVCETEFPAKAVAEFLNRQHSDPNEQVTRKNMLLATKQICKEFTDLLAQDRSPLGNSRPNPILEPGIQSCLTHFNLISHGFGSPAVCAAVTALQNYLTEALKAMDKMYLSNNPNSHTDNNAKSSDKEEKHRK

SEQ ID NO: 33333 - DNA, 1302 bp, Artificial Sequence
  derived and/or modified sequence
atgagcatcctggccaagatgggcgactggcaggacagacacgacggcaccagcaacggcaccgccagactgccccagctgggcaccgtgggccagagcccctacaccagcgccccccccctgagccacacccccaacgccgacttccagcccccctacttcccccccccctaccagcccatctacccccagagccaggacccctacagccacgtgaacgacccctacagcctgaaccccctgcacgcccagccccagccccagcaccccggctggcccggccagagacagagccaggagagcggcctgctgcacacccacagaggcctgccccaccagctgagcggcctggaccccagaagagactacagaagacacgaggacctgctgcacggcccccacgccctgagcagcggcctgggcgacctgagcatccacagcctgccccacgccatcgaggaggtgccccacgtggaggaccccggcatcaacatccccgaccagaccgtgatcaagaagggccccgtgagcctgagcaagagcaacagcaacgccgtgagcgccatccccatcaacaaggacaacctgttcggcggcgtggtgaaccccaacgaggtgttctgcagcgtgcccggcagactgagcctgctgagcagcaccagcaagtacaaggtgaccgtggccgaggtgcagagaagactgagcccccccgagtgcctgaacgccagcctgctgggcggcgtgctgagaagagccaagagcaagaacggcggcagaagcctgagagagaagctggacaagatcggcctgaacctgcccgccggcagaagaaaggccgccaacgtgaccctgctgaccagcctggtggagggcgaggccgtgcacctggccagagacttcggctacgtgtgcgagaccgagttccccgccaaggccgtggccgagttcctgaacagacagcacagcgaccccaacgagcaggtgaccagaaagaacatgctgctggccaccaagcagatctgcaaggagttcaccgacctgctggcccaggacagaagccccctgggcaacagcagacccaaccccatcctggagcccggcatccagagctgcctgacccacttcaacctgatcagccacggcttcggcagccccgccgtgtgcgccgccgtgaccgccctgcagaactacctgaccgaggccctgaaggccatggacaagatgtacctgagcaacaaccccaacagccacaccgacaacaacgccaagagcagcgacaaggaggagaagcacagaaagtag

SEQ ID NO: 33334 - DNA, 1302 bp, Artificial Sequence
  derived and/or modified sequence
atgtctattttggcaaagatgggcgattggcaggacagacacgacgggaccagcaacggcaccgctagactcccccagctcggaaccgtcggccaatccccatacacttctgcaccgccactgtcgcacaccccgaacgccgacttccagccaccatacttccccccaccataccagccgatataccctcaatcacaggacccttacagccatgtaaacgacccatattctctaaatccactccacgcccagccccaaccacagcaccccgggtggccagggcaaaggcaatcccaggaatctggactcctgcatacacaccggggtctgcctcatcaattatccggcctggatcctcgccgtgattaccgccgacacgaagacctgttacacgggcctcacgcgctatctagcggcctcggagatctctccatacacagcctgccacacgcgattgaggaagtgccccatgttgaggatcctggaattaatatccccgaccagacagttataaaaaaggggccggtgagtcttagtaagagcaactccaacgctgtctcagccataccaattaataaggacaacctttttggtggcgtagttaaccctaacgaagtgttctgctcggttccgggacggctgtccctgctttcttctacctcgaagtataaagtcactgtcgccgaggtacagcgccgactttctccccctgaatgtctcaatgcatctctgctaggaggcgtgctgagacgcgccaagagcaaaaacgggggtagatccctgagagaaaagctggacaaaatcggattgaacttgcccgcagggcggagaaaggcagccaatgttacactgctaacctccttagtcgaaggagaagcggtccacctggcccgtgactttggctatgtgtgcgaaacggaattcccagccaaggctgtggcggagttcttgaataggcagcactcggaccccaatgaacaggtgacgcggaaaaatatgctgctcgctactaagcagatctgcaaggaattcactgacctgttggcccaggacaggtctcctctgggcaactctagaccgaatcccatcctcgaaccagggatccagtcatgtttaacccacttcaacctgatctcacacggttttggatcacctgccgtgtgcgctgcagttacagcgctgcagaattatctgaccgaggctttgaaggccatggataagatgtacctgtctaacaacccaaatagtcacaccgataataacgcgaagtcctctgataaggaggagaaacatcggaaatag

SEQ ID NO: 33335 - DNA, 1302 bp, Artificial Sequence
  derived and/or modified sequence
atgagcatcctggccaagatgggagactggcaggacagacatgatggcaccagcaatggaacagcccggctgccccagctgggcaccgtgggccagagcccctacaccagcgccccacccctgagccacaccccaaatgctgacttccagcccccctacttccccccaccctaccagcccatctacccccagagccaggacccctacagccacgtgaatgacccctacagcctgaaccccctgcacgcccagccccagccccagcaccctggctggccaggccagaggcagagccaggagagcggcctgctgcacacccaccggggcctgccccaccagctgagcggcctggacccccggcgggactacagaagacatgaggacctgctgcacggcccccacgccctgagcagcggcctgggggacctgagcatccacagcctgccccacgccatcgaggaggtgccccacgtggaggaccccggcatcaacatcccagaccagaccgtcatcaagaagggccctgtgtccctgagcaagagcaacagcaatgctgtgtctgccatccccatcaacaaggacaacctgtttggaggagtggtgaaccccaatgaggtgttctgcagcgtgcccggccgcctgagcctgctgagcagcaccagcaagtacaaggtgacagtggccgaggtgcagaggcggctgagccccccagagtgcctgaatgccagcctgctgggcggcgtgctgcggcgggccaagagcaagaatggaggccgcagcctgcgggagaagctggacaagattggcctgaacctgcctgctggccgcaggaaggccgccaacgtgaccctgctgaccagcctggtggagggggaggccgtgcacctggcccgggactttggctacgtgtgtgaaacagagttccctgccaaggctgtggccgagttcctgaaccggcagcacagcgaccccaatgagcaggtgaccaggaagaacatgctgctggccaccaagcagatctgcaaggagttcacagacctgctggcccaggacaggagccccctgggcaacagccggcccaaccccatcctggagcccggcatccagagctgcctgacccacttcaacctgatcagccacggcttcggcagccctgctgtgtgtgccgctgtgacagccctgcagaactacctgacagaggccctgaaggccatggacaagatgtacctgagcaacaaccccaacagccacacagacaacaatgccaagagcagtgacaaggaggagaagcacaggaagtag

SEQ ID NO: 33336 - DNA, 1302 bp, Artificial Sequence
  derived and/or modified sequence
atgagcatcctggccaagatgggcgactggcaggaccggcacgacggaacatctaatggcacagctagactccctcagctgggaacagtcggtcagagtccctatacctcagctccccccttgtcacacacgcccaacgccgatttccaaccaccatactttccccccccttatcaacctatttatccacagtcccaggacccatattcacacgttaatgatccttactccttgaaccccctccacgctcagcctcagccacagcatccaggctggccggggcagcgccagagccaggagtctgggctgctccatacccacagaggcctccctcaccagctgtccggcctggacccccgaagggattaccgccgtcatgaggacctgttgcacggacctcatgctcttagttctggtcttggggatctgtctattcattcactcccccacgctatcgaagaggtgccacacgtagaagatcccggaatcaatatccccgaccaaacagtgattaagaaagggcctgtgagcttgagcaaaagcaactctaatgcggtatccgcaatccccatcaacaaagataatctcttcgggggcgttgttaatcccaacgaggtattttgctctgttccaggccggttgtcgctgctcagctctacctccaagtacaaagtgaccgtggcagaggtgcaacgccgcctgagtcctcctgagtgtctgaatgcctcccttcttggcggtgtactaaggagagcaaaatctaagaacggggggcgctcacttcgggagaagctcgacaaaattgggcttaaccttccggccgggaggcggaaagccgcgaatgtgactctactgacaagtttggttgagggcgaggctgttcatctggcacgcgatttcggctatgtctgcgagaccgagtttccagctaaggccgttgcagagtttctgaaccgccagcactccgaccccaatgagcaggtcaccaggaagaatatgctgctggccaccaagcagatctgtaaagaattcactgacctcttggcccaggatagaagcccattgggtaattcccggccgaatcctatcctggaacctggcattcaatcctgtctaacgcactttaacttaatatcccatggatttggttcacctgctgtttgtgctgctgtgactgctctgcagaactatctcactgaagctcttaaggccatggataaaatgtacttaagtaacaacccgaacagtcatacggataacaatgcaaaatctagtgataaagaggagaagcatagaaaatag

SEQ ID NO: 33337 - DNA, 1302 bp, Artificial Sequence
  derived and/or modified sequence
atgtccatcctggccaagatgggggattggcaggaccggcacgatggcacgagtaacggaaccgcgcgacttccacagctaggcactgttgggcagtcaccttacacctcagctccacctttaagccacacgccaaacgctgattttcagccgccttacttccctccaccataccagcctatctacccacagtcacaggatccctacagtcacgtaaacgatccctatagcctcaatcctttacacgcacagccacaacctcagcaccctgggtggcctggccaaaggcaaagccaagaatcaggattgctgcatacccaccgcggattaccacaccagctctcaggccttgaccctaggcgagactatagaagacatgaggatctcttacatggtcctcacgccctgtcctcgggtctgggagacctctccattcattccctgccacacgccattgaagaagtcccgcatgtcgaagatcctgggataaatattccggatcaaacggtgattaagaaagggcctgtttcgttgtcaaaatctaattccaatgctgtgagcgcgataccaatcaacaaagataacctattcggaggggtggtaaacccgaacgaagtgttttgtagcgttccgggtcggcttagtctgctctcgagcaccagcaagtacaaagtgacagtcgcagaggtgcagcgcaggctcagtcccccagaatgcttgaatgcatctctcctcggcggagtgcttaggagggctaagtcaaagaatgggggaaggtctctcagagaaaaacttgacaaaatcggactgaatttacccgctggccgaaggaaagctgccaacgtgacattgctcacgtccttagtggagggagaggccgtacacctcgcaagggacttcggctacgtgtgcgagactgagttcccagcaaaggcagtcgccgagtttctcaacagacaacactccgaccctaatgagcaggtgacccgaaagaatatgttactagctaccaagcagatatgtaaagagtttacagacctgcttgcccaggacagatcacctcttggtaactccagaccaaatcccatccttgagccaggaatccagtcctgcctcacgcactttaacctcatcagccacgggttcgggtctcccgcagtgtgtgccgcagttaccgcactccaaaattacctgacagaagctctgaaggccatggataaaatgtatctgtccaataatcctaatagccacacagataataatgcgaaaagttccgacaaggaggagaaacaccgaaaatag

SEQ ID NO: 33338 - DNA, 2035 bp, Artificial Sequence
  derived and/or modified sequence
tggcggagtgaattcctgggccagcgcgcatgcgtcggcaggtagcaacccagctctttatgaccaggtgagatgttggtgagcaggtaaaaaaggaggatttgcctaagcgattccagggagctggcccgaccgagccctccagcccatgcccggcggggaccagtcgccaggagcgcagagccgcgatgtccatacttgccaaaatgggggactggcaggaccgtcacgacggcaccagcaacgggacggcacggttgccccagctgggcactgtaggtcaatctccctacacgagcgccccgccgctgtcccacacccccaatgccgacttccagcccccatacttccccccaccctaccagcctatctacccccagtcgcaagatccttactcccacgtcaacgacccctacagcctgaaccccctgcacgcccagccgcagccgcagcacccaggctggcccggccagaggcagagccaggagtctgggctcctgcacacgcaccgggggctgcctcaccagctgtcgggcctggatcctcgcagggactacaggcggcacgaggacctcctgcacggcccacacgcgctcagctcaggactcggagacctctcgatccactccttacctcacgccatcgaggaggtcccgcatgtagaagacccgggtattaacatcccagatcaaactgtaattaagaaaggccccgtgtccctgtccaagtccaacagcaatgccgtctccgccatccctattaacaaggacaacctcttcggcggcgtggtgaaccccaacgaagtcttctgttcagttccgggtcgcctctcgctcctcagctccacctcgaagtacaaggtcacggtggcggaagtgcagcggcggctctcaccacccgagtgtctcaacgcgtcgctgctgggcggagtgctccggagggcgaagtctaaaaatggaggaagatctttaagagaaaaactggacaaaataggattaaatctgcctgcagggagacgtaaagctgccaacgttaccctgctcacatcactagtagagggagaagctgtccacctagccagggactttgggtacgtgtgcgaaaccgaatttcctgccaaagcagtagctgaatttctcaaccgacaacattccgatcccaatgagcaagtgacaagaaaaaacatgctcctggctacaaaacagatatgcaaagagttcaccgacctgctggctcaggaccgatctcccctggggaactcacggcccaaccccatcctggagcccggcatccagagctgcttgacccacttcaacctcatctcccacggcttcggcagccccgcggtgtgtgccgcggtcacggccctgcagaactatctcaccgaggccctcaaggccatggacaaaatgtacctcagcaacaaccccaacagccacacggacaacaacgccaaaagcagtgacaaagaggagaagcacagaaagtgaggctctcctcccgccccgcccctcccacgcctcaccagccccccgcgcgcccaccctccggcgggtgacagctccgggatcagcaacccttcctgctgctgctactgctgctgctgctgccgccgccgccgccgccgctgcccttgggtccccccgagtctccgggactgccctctcgactgtcagtggggcagcctctccgactctgcacccgcctcgacctccccacccgctcccacacccctgtgccctcatgtggagcctaagagaacagaacaggccgtgaagccagcagagaaaagttctgccaagtttgtgaacccttttttttttaaacaaaacaacaaatcaacaacagcaacaacaacaacaaaaattaaaaacttttttctaaaaaaaaagtgaaaataaaaaaaattatatgcgcttcatgggactgagtcaccaccttcccttacatacttcagttcagattgtagccatacttaaaaaaaaaaaaaaagccaaaagatgatgacaacatttttatcagtattgtgaataaa

SEQ ID NO: 33339 - protein, 114 aa, Artificial Sequence
  derived and/or modified sequence
MGPRRRSRKPEAPRRRSPSPTPTPGPSRRGPSLGASSHQHSRRRQGWLKEIRKLQKSTHLLIRKLPFSRLAAEAFLVHLFEDAYLLTLHAGRVTLFPKDVQLARRIRGLEEGLG

SEQ ID NO: 33340 - DNA, 345 bp, Artificial Sequence
  derived and/or modified sequence
atgggacccagacgaaggagccgaaagccggaagcaccccgtagaaggagtccctcacccacacccacccctgggccttctaggcgggggccatcgctgggggccagctctcatcagcactcaaggaggagacaggggtggctcaaggaaattcgcaagttgcagaaatctacccaccttttaattcggaaactaccattctcacgtctcgcagcggaagctttcctggtccatctttttgaggacgcataccttctaaccctgcacgctggtcgcgtcaccttattcccgaaagacgtccagttggccaggagaatacggggactggaggaaggactggggtag

SEQ ID NO: 33341 - DNA, 345 bp, Artificial Sequence
  derived and/or modified sequence
atgggccccaggagaagaagcaggaagccagaggcccccaggagaagaagccccagccccacccccaccccaggccccagccggcggggccccagcctgggcgccagcagccaccagcacagcagaagacggcagggctggctgaaggagatcaggaagctgcagaagagcacccacctgctgatcaggaagctgcccttcagccggctggccgctgaggccttcctggtgcacctgtttgaagatgcctacctgctgaccctgcacgccggccgggtgaccctcttccccaaggatgtgcagctggcccggcgcatccggggcctggaggagggcctgggctag

SEQ ID NO: 33342 - DNA, 345 bp, Artificial Sequence
  derived and/or modified sequence
atgggcccccggcggcggagccggaagcccgaggccccccggcggagaagcccaagtcccaccccaacacctggtccgtccaggcgtggtccctccctcggagctagttcccatcagcattcaagacgcaggcagggctggctgaaggagatcaggaagctacaaaagtccacccacctcctgataagaaagctccccttttctcgcctggccgcggaggcctttcttgtgcacttgttcgaagacgcctacctcctgaccctgcacgcagggcgcgtgactctttttcctaaggatgtgcagctggcgcggcggatcagaggtttagaagaaggtctcggctag

SEQ ID NO: 33343 - DNA, 345 bp, Artificial Sequence
  derived and/or modified sequence
atggggccaagaaggcggtcgcgtaaacctgaggcacccaggcggagatcaccgtccccgactcccacccctgggcctagtcgacgaggtccatctttgggtgccagcagtcaccagcattccagacgtcggcaaggctggctgaaagagatcagaaaactgcaaaagtccactcaccttctgatcagaaagctccccttttcaaggctagcggctgaagcgtttctcgtccatctctttgaagacgcatacctgctcacactgcacgctggacgcgtaacactattcccaaaggatgtgcagctggctcggaggatcagggggctagaagagggcctaggctag

SEQ ID NO: 33344 - DNA, 1299 bp, Artificial Sequence
  derived and/or modified sequence
agcaccggctcatgtgaggctcgcggcacagcgttctctgggctccccagaagccagcctttcgctcccggacccggcagcccgagcaggagccgtgggaccgggcgccagcaccctctgcggcgtgtcatgggcccgcgccgccggagccgaaagcccgaggccccgaggaggcgcagcccgagcccgaccccgacccccggcccctcccggcggggcccctccttaggcgcttcctcccatcaacacagtcggcggagacaaggttggctaaaggagatccgaaagcttcagaagagcacacacctcttgataaggaagctgcccttcagccgcctggcagcagaagcatttctagttcatctctttgaggacgcctatctcctcaccttacatgcaggccgagttactctcttcccaaaggatgtgcaactggcccggaggatccggggccttgaggagggactcggctgagctcctgcacccagtgtttctgtcagtctttcctgctcagccaggggggatgataccggggactctccagagccatgactagatccaatggattctgcgatgctgtctggactttgctgtctctgaacagtatgtgtgtgttgctttaaatatttttcttttttttgagaaggagaagactgcatgactttcctctgtaacagaggtaatatatgagacaatcaacaccgttccaaaggcctgaaaataattttcagataaagagactccaaggttgactttagtttgtgagttactcatgtgactatttgaggattttgaaaacatcagatttgctgtggtatgggagaaaaggctatgtacttattattttagctctttctgtaatatttacattttttaccatatgtacatttgtacttttattttacacataagggaaaaaataagaccactttgagcagttgcctggaaggctgggcatttccatcatatagacctctgcccttcagagtagcctcaccattagtggcagcatcatgtaactgagtggactgtgcttgtcaacggatgtgtagcttttcagaaacttaattggggatgaatagaaaacctgtaagctttgatgttctggttacttctagtaaattcctgtcaaaatcaattcagaaattctaacttggagaatttaacattttactcttgtaaatcatagaagatgtatcataacagttcagaattttaaagtacattttcgatgcttttatgggtatttttgtagtttctttgtagagagataataaaaatcaaaatatttaatgaaaa

SEQ ID NO: 33345 - DNA, 345 bp, Artificial Sequence
  derived and/or modified sequence
atgggccccagaagaagaagcagaaagcccgaggcccccagaagaagaagccccagccccacccccacccccggccccagcagaagaggccccagcctgggcgccagcagccaccagcacagcagaagaagacagggctggctgaaggagatcagaaagctgcagaagagcacccacctgctgatcagaaagctgcccttcagcagactggccgccgaggccttcctggtgcacctgttcgaggacgcctacctgctgaccctgcacgccggcagagtgaccctgttccccaaggacgtgcagctggccagaagaatcagaggcctggaggagggcctgggctag

SEQ ID NO: 33346 - protein, 395 aa, Artificial Sequence
  derived and/or modified sequence
MASVPMPSEYTYVKLRSDCSRPSLQWYTRAQSKMRRPSLLLKDILKCTLLVFGVWILYILKLNYTTEECDMKKMHYVDPDHVKRAQKYAQQVLQKECRPKFAKTSMALLFEHRYSVDLLPFVQKAPKDSEAESKYDPPFGFRKFSSKVQTLLELLPEHDLPEHLKAKTCRRCVVIGSGGILHGLELGHTLNQFDVVIRLNSAPVEGYSEHVGNKTTIRMTYPEGAPLSDLEYYSNDLFVAVLFKSVDFNWLQAMVKKETLPFWVRLFFWKQVAEKIPLQPKHFRILNPVIIKETAFDILQYSEPQSRFWGRDKNVPTIGVIAVVLATHLCDEVSLAGFGYDLNQPRTPLHYFDSQCMAAMNFQTMHNVTTETKFLLKLVKEGVVKDLSGGIDREF

SEQ ID NO: 33347 - DNA, 1173 bp, Artificial Sequence
  derived and/or modified sequence
atgcccagcgagtacacctacgtgaagctgagaagcgactgcagcagacccagcctgcagtggtacaccagagcccagagcaagatgagaagacccagcctgctgctgaaggacatcctgaagtgcaccctgctggtgttcggcgtgtggatcctgtacatcctgaagctgaactacaccaccgaggagtgcgacatgaagaagatgcactacgtggaccccgaccacgtgaagagagcccagaagtacgcccagcaggtgctgcagaaggagtgcagacccaagttcgccaagaccagcatggccctgctgttcgagcacagatacagcgtggacctgctgcccttcgtgcagaaggcccccaaggacagcgaggccgagagcaagtacgacccccccttcggcttcagaaagttcagcagcaaggtgcagaccctgctggagctgctgcccgagcacgacctgcccgagcacctgaaggccaagacctgcagaagatgcgtggtgatcggcagcggcggcatcctgcacggcctggagctgggccacaccctgaaccagttcgacgtggtgatcagactgaacagcgcccccgtggagggctacagcgagcacgtgggcaacaagaccaccatcagaatgacctaccccgagggcgcccccctgagcgacctggagtactacagcaacgacctgttcgtggccgtgctgttcaagagcgtggacttcaactggctgcaggccatggtgaagaaggagaccctgcccttctgggtgagactgttcttctggaagcaggtggccgagaagatccccctgcagcccaagcacttcagaatcctgaaccccgtgatcatcaaggagaccgccttcgacatcctgcagtacagcgagccccagagcagattctggggcagagacaagaacgtgcccaccatcggcgtgatcgccgtggtgctggccacccacctgtgcgacgaggtgagcctggccggcttcggctacgacctgaaccagcccagaacccccctgcactacttcgacagccagtgcatggccgccatgaacttccagaccatgcacaacgtgaccaccgagaccaagttcctgctgaagctggtgaaggagggcgtggtgaaggacctgagcggcggcatcgacagagagttctag

SEQ ID NO: 33348 - DNA, 1188 bp, Artificial Sequence
  derived and/or modified sequence
atggccagcgtgcccatgcccagcgagtacacctacgtgaagctgagaagcgactgcagcagacccagcctgcagtggtacaccagagcccagagcaagatgagaagacccagcctgctgctgaaggacatcctgaagtgcaccctgctggtgttcggcgtgtggatcctgtacatcctgaagctgaactacaccaccgaggagtgcgacatgaagaagatgcactacgtggaccccgaccacgtgaagagagcccagaagtacgcccagcaggtgctgcagaaggagtgcagacccaagttcgccaagaccagcatggccctgctgttcgagcacagatacagcgtggacctgctgcccttcgtgcagaaggcccccaaggacagcgaggccgagagcaagtacgacccccccttcggcttcagaaagttcagcagcaaggtgcagaccctgctggagctgctgcccgagcacgacctgcccgagcacctgaaggccaagacctgcagaagatgcgtggtgatcggcagcggcggcatcctgcacggcctggagctgggccacaccctgaaccagttcgacgtggtgatcagactgaacagcgcccccgtggagggctacagcgagcacgtgggcaacaagaccaccatcagaatgacctaccccgagggcgcccccctgagcgacctggagtactacagcaacgacctgttcgtggccgtgctgttcaagagcgtggacttcaactggctgcaggccatggtgaagaaggagaccctgcccttctgggtgagactgttcttctggaagcaggtggccgagaagatccccctgcagcccaagcacttcagaatcctgaaccccgtgatcatcaaggagaccgccttcgacatcctgcagtacagcgagccccagagcagattctggggcagagacaagaacgtgcccaccatcggcgtgatcgccgtggtgctggccacccacctgtgcgacgaggtgagcctggccggcttcggctacgacctgaaccagcccagaacccccctgcactacttcgacagccagtgcatggccgccatgaacttccagaccatgcacaacgtgaccaccgagaccaagttcctgctgaagctggtgaaggagggcgtggtgaaggacctgagcggcggcatcgacagagagttctag

SEQ ID NO: 33349 - DNA, 1173 bp, Artificial Sequence
  derived and/or modified sequence
atgccatcggagtacacatacgtcaagttgaggtcagattgtagccgaccaagcttgcaatggtacacaagggcccagagcaagatgagaaggccttctttacttctgaaggacattcttaaatgcactttgctggtctttggagtgtggatactctacatactcaaattgaactacactacggaagagtgcgacatgaagaaaatgcactatgtggatccggatcacgtcaaacgggcccaaaagtacgcccagcaggtactgcagaaggagtgtcgacctaaatttgccaagacctccatggctctcttgttcgagcaccggtactcagtggacctgctgccttttgtccagaaggcccctaaggactccgaggcggaatctaagtacgacccacccttcgggttcaggaaattcagctcgaaggtccaaacactgctggaactacttcccgaacatgacttgcccgagcacttgaaagcgaagacctgcagacgctgcgtggtcattggttcaggcggcatcctccacggattagagttaggccatacattaaaccaattcgatgtggtgatccgcctgaacagcgctcctgttgaggggtacagcgagcatgtgggaaataaaacaaccattcgtatgacatacccagaaggagctccgctgtcagacctggagtactattccaacgaccttttcgttgcggtgctgttcaagtctgtggatttcaactggctgcaggcgatggtaaaaaaggagactttgcccttttgggttagactgttcttttggaaacaggtggcggaaaagataccgcttcagccaaagcatttcaggatcctaaatcccgtgatcataaaggagactgccttcgacatccttcagtacagcgagccccagtcaaggttttggggcagggataaaaatgtgccgactattggggttatagcagtggtgttggccacacacctctgcgacgaggtttccctcgctgggtttggatacgacctgaaccagccacgcacccccctgcactactttgactctcaatgcatggctgccatgaatttccagacgatgcacaatgtgacaactgaaactaaatttctgctaaaacttgtgaaggaaggggtcgtcaaagacctctcaggcggaattgacagggaattttag

SEQ ID NO: 33350 - DNA, 1188 bp, Artificial Sequence
  derived and/or modified sequence
atggccagcgtccctatgccctcagagtatacctacgttaagttgagatctgattgctcccggccttcgcttcagtggtatacccgggcacaaagcaaaatgcgtaggccatccctgctgctcaaggatatactgaaatgtacgcttttggtttttggggtatggattctttatatcttgaagctaaattacacaactgaagagtgtgacatgaagaaaatgcattatgtggatcctgatcacgtgaaacgggcacagaaatatgctcagcaggtgttacagaaggagtgccgccccaaattcgctaaaaccagtatggcccttctcttcgagcacagatacagcgtggacctgctgccatttgtacagaaagcccccaaggattccgaggcagaatcgaaatacgacccgcccttcggcttccgaaaattttcgtccaaggtccagacattgctggagctgctcccggagcacgacctgccagaacatctgaaggccaaaacttgccggaggtgtgtggtcatcgggagcggaggaatcctccatggcctggagctgggccacaccctgaaccagttcgatgtggtgatacgcctcaactcagcccctgtggaaggatattctgagcacgtggggaacaagacaactattaggatgacttaccccgaaggagcccctctgagtgacctggagtactattccaacgacttatttgtggccgtgctgtttaaatctgtggactttaactggctgcaggccatggtgaaaaaggagaccctgcccttctgggtcagactgtttttttggaagcaggttgccgagaagatccctctgcagccaaaacattttcgcattcttaacccagtgatcattaaagaaacagccttcgatatcctgcagtactccgaacctcagagccgattctggggccgcgataaaaacgtgcccacaataggggtaatagccgtggtgctagcgacccacctgtgtgatgaggtatcactcgctggtttcggttatgatcttaaccagccacgcacaccgctgcactatttcgattcccagtgcatggcagccatgaactttcagaccatgcacaacgtcacaactgaaaccaaattcttactcaaattggtgaaagaaggcgtagtgaaggacctcagtgggggtatcgatcgggagttttag

SEQ ID NO: 33351 - DNA, 1173 bp, Artificial Sequence
  derived and/or modified sequence
atgcccagcgagtacacctacgtgaagctgcggagtgactgcagccggcccagcctgcagtggtacacccgggcccagagcaagatgaggcggcccagcctgctgctgaaggacatcctgaagtgcaccctgctggtgtttggagtgtggatcctgtacatcctgaagctgaactacaccacagaagaatgtgacatgaagaagatgcactacgtggaccctgaccacgtgaagagggcccagaagtatgcccagcaggtgctgcagaaggaatgtcggcccaagtttgccaagacctccatggccctgctgtttgagcaccgctacagcgtggacctgctgccctttgtgcagaaggcccccaaggacagcgaggccgagagcaaatatgacccccccttcggcttcaggaagttcagcagcaaggtgcagaccctgctggagctgctgcctgagcatgacctgcctgagcacctgaaggccaagacctgcagaagatgtgtggtgattggcagcggcggcatcctgcacggcctggagctgggccacaccctgaaccagtttgatgtggtgatccggctgaacagcgcccctgtggagggctacagcgagcacgtgggcaacaagaccaccatccgcatgacctacccagagggcgcccccctgagtgacctggagtactacagcaatgacctgtttgtggccgtgctcttcaagtctgtggacttcaactggctgcaggccatggtgaagaaggagaccctgcccttctgggtgcggctcttcttctggaagcaggtggccgagaagatccccctgcagcccaagcacttccgcatcctgaaccctgtgatcatcaaggagacagcctttgacatcctgcagtacagcgagccccagagccgcttctggggccgggacaagaatgtgcccaccatcggcgtgattgctgtggtgctggccacccacctgtgtgatgaggtgtccctggccggcttcggctatgacctgaaccagcccaggacccccctgcactactttgacagccagtgcatggccgccatgaacttccagaccatgcacaacgtgaccacagagaccaagttcctgctgaagctggtgaaggagggcgtggtgaaggacctgagcggcggcatcgaccgggagttctag

SEQ ID NO: 33352 - DNA, 1188 bp, Artificial Sequence
  derived and/or modified sequence
atggcctctgtgcccatgcccagcgagtacacctacgtgaagctgcggagtgactgcagccggcccagcctgcagtggtacacccgggcccagagcaagatgagaagacccagcctgctgctgaaggacatcctgaagtgcaccctgctggtgtttggagtgtggatcctgtacatcctgaagctgaactacaccacagaggagtgtgacatgaagaagatgcactacgtggaccctgaccacgtgaagagggcccagaagtatgcccagcaggtgctgcagaaggagtgccggcccaagtttgccaagacctccatggccctgctgtttgagcaccgctacagcgtggacctgctgccctttgtgcagaaggcccccaaggacagcgaggccgagagcaaatatgaccccccatttggcttcaggaagttcagcagcaaggtgcagaccctgctggagctgctgcctgagcatgacctgcctgagcacctgaaggccaagacctgccgccgctgtgtggtgattggcagcggcggcatcctgcacggcctggagctgggccacaccctgaaccagtttgatgtggtgatccggctgaacagcgcccctgtggagggctacagcgagcacgtgggcaacaagaccaccatccgcatgacctacccagagggcgcccccctgagtgacctggagtactacagcaatgacctgtttgtggccgtgctcttcaagtctgtggacttcaactggctgcaggccatggtgaagaaggagaccctgcccttctgggtgcggctcttcttctggaagcaggtggccgagaagatccccctgcagcccaagcacttccgcatcctgaaccctgtgatcatcaaggagacagcctttgacatcctgcagtacagcgagccccagagccgcttctggggccgggacaagaatgtgcccaccatcggcgtgattgctgtggtgctggccacccacctgtgtgatgaggtgtccctggccggcttcggctatgacctgaaccagcccaggacccccctgcactactttgacagccagtgcatggccgccatgaacttccagaccatgcacaacgtgaccacagagaccaagttcctgctgaagctggtgaaggagggcgtggtgaaggacctgagcggcggcatcgaccgggagttctag

SEQ ID NO: 33353 - DNA, 1173 bp, Artificial Sequence
  derived and/or modified sequence
atgcccagcgagtacacctacgtgaagctgcggagcgactgcagccgtcccagtctgcagtggtatacccgcgcccagagcaaaatgcgccggccaagcctcctcctgaaagatattctgaaatgcactctgttggtttttggtgtctggatcctttacattctcaagctcaactacaccactgaggagtgcgacatgaaaaaaatgcactacgtagaccccgaccacgtcaagcgcgcacagaagtacgcccagcaggtcctgcaaaaagagtgccgccctaagttcgctaaaaccagcatggctctcctcttcgaacatagatatagcgtagaccttctacccttcgtgcagaaggctcccaaagactcagaggctgagtcaaagtacgacccaccattcggattccggaagttttctagcaaagtgcagaccctgctagagctgctacccgagcacgatctgcctgagcacttgaaagctaaaacctgcaggagatgtgtggtgataggttccggggggattttacatggtctcgaactcggacacaccctcaatcagttcgacgtggtcatccgtcttaacagcgcccctgtcgagggctattcggagcacgttggcaataagaccaccataagaatgacatatccggagggggcacctctttctgaccttgagtattactcaaacgacctcttcgtggccgtcttgttcaagtccgtggactttaactggcttcaagctatggtgaaaaaggaaaccttgcctttttgggtgcggctgtttttttggaagcaggtggctgagaagattcctcttcagcctaagcactttaggattctcaatcccgtgattatcaaagaaacagcttttgatatcctacagtattcagaaccacagagcaggttttggggccgcgacaagaatgtgcccactatcggcgtcattgcagtggttctcgccacccatctgtgcgatgaagttagcctggcaggattcggctacgatctaaatcagccaaggacaccactgcactactttgacagtcagtgtatggccgccatgaatttccaaaccatgcacaacgtcacgaccgaaacaaagttcctgctcaagttggtcaaggagggggtcgtaaaagacctgagcggggggattgacagagagttctag

SEQ ID NO: 33354 - DNA, 1188 bp, Artificial Sequence
  derived and/or modified sequence
atggccagcgtgcccatgcccagcgagtacacctacgtgaagctgcgatcagattgttcccgaccctctctgcaatggtacacaagagcccagtctaagatgcggcggccatctctgttgctgaaggatattctgaaatgcaccctgctggtgttcggtgtttggatactttacatactgaagctcaactatactactgaagaatgtgacatgaaaaagatgcactacgtggatcccgaccacgtgaagagggcccaaaagtacgctcaacaggttcttcaaaaagaatgccggcctaaattcgcgaaaacgagcatggcacttctgtttgagcaccgttactccgtggacctgctccctttcgtgcaaaaagctcctaaggacagcgaggcagagtcgaagtatgatccgcctttcggttttagaaagttctcttcgaaggtgcagacgctgctcgaattgcttcccgagcatgatttgcctgagcacctgaaggctaagacatgtaggcgctgtgtggtgattggcagcgggggcatcttacacgggctcgagcttggacacacgctcaatcagttcgatgtggtcatacggttgaactcagcacctgtcgaggggtactctgagcatgtgggaaacaaaaccacaatcagaatgacatatcccgaaggtgcacccctgagcgacctggagtattactcgaatgacctgttcgtcgcagtgctgttcaaatccgtggattttaactggcttcaggctatggtgaagaaggaaacgctgccgttttgggtgagactgtttttttggaaacaggttgccgaaaaaattccactacagcctaagcacttccgtatcctgaaccccgtcataataaaggagaccgccttcgatattcttcagtactccgagccacaatcgcgcttctggggcagggataaaaacgttcccaccatcggagtcatagctgtcgtgttagccacacacttgtgcgatgaagtctccctcgcaggctttggttatgacctaaaccagcccaggactcctctccattattttgattcacagtgtatggcagccatgaatttccagacaatgcacaacgtgaccacagagaccaagttcctacttaagctcgtcaaggaaggcgtggtcaaagacctgtctggaggcattgacagggaattctag

SEQ ID NO: 33355 - DNA, 1173 bp, Artificial Sequence
  derived and/or modified sequence
atgccctcagagtacacctatgtcaaactcagatcggattgctcccggccatctttgcagtggtatactagggcgcagtccaagatgagacgtccctcactgcttctgaaggatattttgaaatgcacactgcttgtctttggtgtatggatactgtatatactgaagttaaattatacgactgaggagtgtgatatgaagaaaatgcactacgtcgacccagatcatgtcaaacgggcacagaaatacgctcagcaagtcctccagaaagaatgcagaccaaagttcgccaaaactagcatggccttacttttcgagcatcgctactccgtcgatctcctgccttttgtgcaaaaagcgcctaaagactcagaagccgaatcaaagtacgaccccccatttgggttcaggaagtttagttcgaaagttcagacgctgctggagctcctgccagagcacgatctccctgagcacctgaaggccaaaacctgccgcagatgtgtagtgattggttcaggcggtattctccacggcttagagctcgggcacacactgaatcagttcgacgttgtgatccgtcttaacagtgctccagtggaagggtatagcgagcatgtgggtaataagaccactattcggatgacctaccccgagggcgcacccctttccgatctggaatattatagcaacgacttgttcgtggcagtgttgttcaagtctgtggacttcaattggttacaggctatggttaagaaggagactctccctttttgggttagactctttttttggaagcaggtggccgaaaaaattcccctgcagcccaaacactttcgaatcctgaatcccgtgattattaaggaaacagctttcgatatcctgcaatacagcgagccacagagccgcttttggggccgagataagaatgtgccaaccatcggagtgatcgcagtcgttctcgctacacatctctgtgacgaggtgagccttgccggattcggttacgaccttaaccagccaagaacgccactccactactttgatagtcagtgcatggctgcaatgaactttcagactatgcacaatgtcactactgagacgaagttcctgcttaagcttgtgaaggagggtgtggttaaggacttaagcggcggaattgatagggagttctag

SEQ ID NO: 33356 - DNA, 1188 bp, Artificial Sequence
  derived and/or modified sequence
atggctagcgtcccgatgcctagtgaatatacatatgtgaagcttaggtccgattgcagtcgcccatctcttcagtggtatacccgcgcacagagtaaaatgaggagaccctccctgctgttaaaggatatcctgaagtgcacattactggtgttcggcgtctggatcctctatatactgaagctcaactacaccacagaagaatgtgacatgaaaaagatgcattatgtggaccctgaccacgtgaagagggctcagaagtatgcgcaacaggtactccaaaaggagtgccggccaaagttcgccaagaccagtatggctctgctgtttgaacaccgctattcagttgacctgttgcctttcgttcagaaggcccctaaggacagtgaggcagaatctaagtacgacccacccttcgggtttcgaaagttcagtagcaaagtccagacattactcgagcttctgcccgagcatgatttgccggagcacctgaaggcaaaaacgtgcagacgctgcgttgtgattggatctggcggtatacttcacgggctagaactcgggcacacgctgaatcagtttgacgtggtgattcggctcaacagtgcacctgtggaaggttactctgagcacgtgggcaataagaccaccattcggatgacataccctgagggagcgccactctctgatctggagtattactcaaacgaccttttcgtcgctgtgctgtttaaaagcgtagattttaactggctccaggcaatggtcaagaaagagacactcccattctgggtaagactcttcttttggaagcaagttgccgaaaagatccctctgcagcctaagcactttaggatactgaacccagtgatcattaaggagactgcatttgatatcctccagtacagtgaaccacagagtcgtttctggggaagggacaagaatgtcccgacgattggggttatagccgtggtacttgctacccacttgtgtgacgaggtgagtttggcgggattcggctatgatctgaatcagccacgtacgcctctgcattatttcgattctcagtgcatggcggctatgaattttcagaccatgcacaatgtcacaactgaaacaaagttcctgctgaaattggtgaaagaaggagtggtgaaagacctcagtggcggtatagatagggagttctag

SEQ ID NO: 33357 - DNA, 2225 bp, Artificial Sequence
  derived and/or modified sequence
tgggcaaccattatcctgtctcgccgccacccaggacatggcttctgttccaatgccaagtgagtacacctatgtgaaactgagaagtgattgctcgaggccttccctgcaatggtacacccgagctcaaagcaagatgagaaggcccagcttgttattaaaagacatcctcaaatgtacattgcttgtgtttggagtgtggatcctttatatcctcaagttaaattatactactgaagaatgtgacatgaaaaaaatgcattatgtggaccctgaccatgtaaagagagctcagaaatatgctcagcaagtcttgcagaaggaatgtcgtcccaagtttgccaagacatcaatggcgctgttatttgagcacaggtatagcgtggacttactcccttttgtgcagaaggcccccaaagacagtgaagctgagtccaagtacgatcctccttttgggttccggaagttctccagtaaagtccagaccctcttggaactcttgccagagcacgacctccctgaacacttgaaagccaagacctgtcggcgctgtgtggttattggaagcggaggaatactgcacggattagaactgggccacaccctgaaccagttcgatgttgtgataaggttaaacagtgcaccagttgagggatattcagaacatgttggaaataaaactactataaggatgacttatccagagggcgcaccactgtctgaccttgaatattattccaatgacttatttgttgctgttttatttaagagtgttgatttcaactggcttcaagcaatggtaaaaaaggaaaccctgccattctgggtacgactcttcttttggaagcaggtggcagaaaaaatcccactgcagccaaaacatttcaggattttgaatccagttatcatcaaagagactgcctttgacatccttcagtactcagagcctcagtcaaggttctggggccgagataagaacgtccccacaatcggtgtcattgccgttgtcttagccacacatctgtgcgatgaagtcagtttggcgggttttggatatgacctcaatcaacccagaacacctttgcactacttcgacagtcaatgcatggctgctatgaactttcagaccatgcataatgtgacaacggaaaccaagttcctcttaaagctggtcaaagagggagtggtgaaagatctcagtggaggcattgatcgtgaattttgaacacagaaaacctcagttgaaaatgcaactctaactctgagagctgtttttgacagccttcttgatgtatttctccatcctgcagatactttgaagtgcagctcatgtttttaacttttaatttaaaaacacaaaaaaaattttagctcttcccactttttttttcctatttatttgaggtcagtgtttgtttttgcacaccattttgtaaatgaaacttaagaattgaattggaaagacttctcaaagagaattgtatgtaacgatgttgtattgatttttaagaaagtaatttaatttgtaaaacttctgctcgtttacactgcacattgaatacaggtaactaattggaaggagaggggaggtcactcttttgatggtggccctgaacctcattctggttccctgctgcgctgcttggtgtgacccacggaggatccactcccaggatgacgtgctccgtagctctgctgctgatactgggtctgcgatgcagcggcgtgaggcctgggctggttggagaaggtcacaacccttctctgttggtctgccttctgctgaaagactcgagaaccaaccagggaagctgtcctggaggtccctggtcggagagggacatagaatctgtgacctctgacaactgtgaagccaccctgggctacagaaaccacagtcttcccagcaattattacaattcttgaattccttggggattttttactgccctttcaaagcacttaagtgttagatctaacgtgttccagtgtctgtctgaggtgacttaaaaaatcagaacaaaacttctattatccagagtcatgggagagtacaccctttccaggaataatgttttgggaaacactgaaatgaaatcttcccagtattataaattgtgtatttaaaaaaaagaaacttttctgaatgcctacctggcggtgtataccaggcagtgtgccagtttaaaaagatgaaaaagaataaaaacttttgaggaactctc

SEQ ID NO: 33358 - protein, 218 aa, Artificial Sequence
  derived and/or modified sequence
MMCPLWRLLIFLGLLALPLAPHKQPWPGLAQAHRDNKSTLARIIAQGLIKHNAESRIQNIHFGDRLNASAQVAPGLVGWLISGRKHQQQQESRSFDNNIVKMCAHMSIVVEFWLEKDEFGRRDLVIGKCDAEPSSVHVAILTEAIPPKMNQFLYNLKENLQKVLPHMVESQVCPLIGEILGQLDVKLLKSLIEQEAAHEPTHHETSQPSACQAGESPS

SEQ ID NO: 33359 - DNA, 657 bp, Artificial Sequence
  derived and/or modified sequence
atgatgtgtccactctggcgactgcttatattcctcgggctcctggcgctgcctctcgcccctcacaagcagccgtggccaggcctcgcccaggcccatcgtgacaataagagcaccttggcacgtatcatcgcccaaggtctcatcaagcacaatgcggagagccggatccaaaatattcactttggggacagattgaacgcttccgcccaggtcgcccctgggttagttggttggcttatcagtggcaggaaacatcagcaacagcaggagagtcgctcctttgacaataatatcgtgaagatgtgtgctcatatgagcatcgtggtggaattctggctggagaaggatgaatttggaagaagagaccttgtgatcggaaaatgcgacgcagagccaagttccgtgcacgtggccatcctgaccgaagccatacctccaaaaatgaatcagtttctctacaacctaaaagaaaatctacagaaggttcttccacatatggtggagtcgcaggtttgtcctctgataggggaaatactcgggcagcttgatgtgaaattactgaagagcctgatagagcaggaagcggcacatgaacctactcaccacgagaccagccagccgagcgcatgccaggccggagagtcacctagttag

SEQ ID NO: 33360 - DNA, 657 bp, Artificial Sequence
  derived and/or modified sequence
atgatgtgccctttgtggagactcctgatctttctgggactgctggcccttccattggcccctcacaaacaaccgtggccaggacttgctcaggcacatcgcgataacaagtctacgctggcccgtattatcgcccaaggcttaattaaacataatgctgaatccaggatccagaatatacacttcggcgacaggctcaacgccagcgcacaggtggctccaggtctggtagggtggctaataagtggtcgaaagcaccaacagcagcaagagtcacggtccttcgacaacaatattgtcaaaatgtgcgcccacatgtccatcgttgtggaattctggctggaaaaagatgagttcggacgtcgcgacctggtgattggtaagtgtgatgccgaaccctcaagtgtgcatgtggctatcttaaccgaggcaattccgcccaaaatgaaccagtttctgtataacttaaaagagaatcttcaaaaagtgctgccgcatatggtcgagagtcaggtttgtccgctgattggagaaattctgggccaactcgacgtgaagctgttgaagtctttaatcgaacaagaggccgcccatgagcccacacaccacgaaacctcccaacccagtgcctgtcaagcgggcgaatcaccaagctag

SEQ ID NO: 33361 - DNA, 657 bp, Artificial Sequence
  derived and/or modified sequence
atgatgtgtcctctgtggcgtcttctcatttttctcggtcttctggctttgcccctcgccccacataaacagccctggcccgggttggcccaggcccatcgcgacaataagtctactctagcccgaataattgcccagggattgattaaacacaatgccgaatctagaatacaaaatattcactttggagatcggcttaatgcatccgcccaggtggcaccaggcctcgtgggttggctaatcagtggacgaaagcaccagcagcagcaagaaagcagatccttcgacaataatatagtgaaaatgtgtgcccatatgtcaattgtcgtagagttctggctggagaaggacgaattcggacgccgcgacctagtgatcggaaaatgtgatgctgagccctcaagtgtacacgtggccatcctgactgaggcaatcccaccaaaaatgaaccagtttttatataacctcaaggagaacttacagaaggttttacctcacatggtcgagagccaggtttgcccccttataggcgaaatcctgggccagttggacgtgaagctgctgaagtccctgatagagcaagaagccgcccatgaaccaacacaccatgaaacctctcaacccagtgcttgtcaagccggcgaatctccatcctag

SEQ ID NO: 33362 - DNA, 657 bp, Artificial Sequence
  derived and/or modified sequence
atgatgtgccccctgtggagactgctgatcttcctgggcctgctggccctgcccctggccccccacaagcagccctggcccggcctggcccaggcccacagagacaacaagagcaccctggccagaatcatcgcccagggcctgatcaagcacaacgccgagagcagaatccagaacatccacttcggcgacagactgaacgccagcgcccaggtggcccccggcctggtgggctggctgatcagcggcagaaagcaccagcagcagcaggagagcagaagcttcgacaacaacatcgtgaagatgtgcgcccacatgagcatcgtggtggagttctggctggagaaggacgagttcggcagaagagacctggtgatcggcaagtgcgacgccgagcccagcagcgtgcacgtggccatcctgaccgaggccatcccccccaagatgaaccagttcctgtacaacctgaaggagaacctgcagaaggtgctgccccacatggtggagagccaggtgtgccccctgatcggcgagatcctgggccagctggacgtgaagctgctgaagagcctgatcgagcaggaggccgcccacgagcccacccaccacgagaccagccagcccagcgcctgccaggccggcgagagccccagctag

SEQ ID NO: 33363 - DNA, 657 bp, Artificial Sequence
  derived and/or modified sequence
atgatgtgtcctctttggcgtctgctcatttttttggggctcctggccttgcccctggcgcctcacaaacagccttggcctggcttagctcaggcccaccgtgataacaagtctacactcgctcgaatcattgctcaggggctcataaagcacaacgcagagtcgagaattcagaatattcactttggggacagactgaatgccagtgctcaggtggcccccgggctcgtaggatggctcatctcgggccgcaagcaccagcaacagcaggagagtaggagtttcgacaacaacatcgttaaaatgtgcgcgcatatgtcgatcgttgtcgaattttggctggaaaaggacgagtttggacggcgagacctcgtcatcgggaagtgtgacgccgaaccatcatctgtgcacgtggcaatacttaccgaagcgatacctccaaagatgaatcaatttctctacaatcttaaggagaaccttcaaaaggtactccctcatatggtagagagccaggtgtgtcccctgatcggggagatcctgggccagcttgacgtcaagcttctgaaaagcctcatagagcaggaagctgctcacgaacctactcaccacgaaactagccagccttcagcgtgtcaggcaggcgaatccccttcttag

SEQ ID NO: 33364 - DNA, 657 bp, Artificial Sequence
  derived and/or modified sequence
atgatgtgccccctgtggaggctgctgatcttcctgggcctgctggccctgcccctggccccccacaagcagccctggccaggcctggcccaggcccaccgggacaacaagagcaccctggcccgcatcatcgcccagggcctcatcaagcacaatgctgagagccgcatccagaacatccactttggagaccggctgaatgccagcgcccaggtggcccctggcctggtgggctggctgatcagcggcaggaagcaccagcagcagcaggagagccgcagctttgacaacaacatcgtgaagatgtgtgcccacatgagcatcgtggtggagttctggctggagaaggatgaatttggaagaagagacctggtgattggaaaatgtgatgctgagcccagctctgtgcacgtggccatcctgacagaggccatcccccccaagatgaaccagttcctgtacaacctgaaggagaacctgcagaaggtgctgccccacatggtggagagccaggtgtgccccctcatcggggagatcctgggccagctggatgtgaagctgctgaagagcctcatcgagcaggaggccgcccacgagcccacccaccacgagaccagccagcccagcgcctgccaggccggggagagccccagctag

SEQ ID NO: 33365 - DNA, 983 bp, Artificial Sequence
  derived and/or modified sequence
aatgtgagcaagccctggtggcagcgccagggtccagtgcagcccctccccacagcatgctgggggctaattctgatgtcatctttctgcagaaaaccattagaccatccctccagactgccaccctcaaagccgtctgcccaggccccatctgacactcttgacatctgcaggtcccagaccctatgatgtgtccactctggaggctcctcatcttcctcgggttgctggccttgcccttggcaccacacaagcagccttggcctggcctggcccaagcccacagagacaacaaatccaccctggcaagaattattgctcagggcctcataaagcacaacgcagaaagccgaattcagaacatccactttggggacagactgaatgcctcagcacaagtggccccagggctggtgggctggctaatcagcggcaggaaacaccagcagcagcaagagagcaggtccttcgataacaacatcgtaaagatgtgtgcacatatgagcatcgttgtggagttctggctggagaaagacgagtttggccggagggatctggtgataggcaaatgcgatgcagagcccagcagtgtccatgtggccatcctcactgaggctatcccaccaaagatgaatcagtttctctacaacctcaaagagaatctgcaaaaagttctcccacacatggtagaaagtcaggtatgtcctctgatcggtgaaatcctcgggcagctggatgtgaaactgttgaaaagcctcatagaacaggaggctgctcatgaaccaacccaccatgaaaccagccaaccctctgcatgccaggctggagagtcccccagctgacttctgctgatcagaaggaaagtccacatcttgcaaccttaagtctcccttagagtggggcttctgctaccctaaaaactttaccccaggctctgtggacataccatcctctcctacaataaactctagctctgaagggtg

SEQ ID NO: 33366 - DNA, 657 bp, Artificial Sequence
  derived and/or modified sequence
atgatgtgccccctgtggcggctgctgatcttcctgggcctgctggcattgccccttgccccacacaagcagccatggccaggtctggctcaggcccatcgggataataaatctactctggctaggatcattgcccaggggctcatcaagcacaatgcggagagtcgcattcaaaatatacacttcggggatcggttaaacgcatccgcccaggtagcccccggactggtgggctggctaatatctggaaggaaacatcaacagcagcaggaaagccgctcctttgacaataatatcgttaaaatgtgcgcgcacatgtctatcgtggtggaattttggttagaaaaggatgaatttggacggagagatctggtcatcggcaaatgcgatgcggagccaagcagcgttcatgtggcgattctgaccgaagccattccgcctaaaatgaaccagttcctgtataatctcaaggagaacctgcaaaaggtgctgccccatatggttgaatctcaggtttgcccgttaatcggggagatcctcggacaactggatgtaaagcttctgaaatcattaatcgaacaggaagcggctcatgagcctactcaccacgaaacatctcagccaagcgcttgccaggcaggggagagcccttcatag

SEQ ID NO: 33367 - RNA, 657 nt, Artificial Sequence
  derived and/or modified sequence
augaugugcccuuuguggagacuccugaucuuucugggacugcuggcccuuccauuggccccucacaaacaaccguggccaggacuugcucaggcacaucgcgauaacaagucuacgcuggcccguauuaucgcccaaggcuuaauuaaacauaaugcugaauccaggauccagaauauacacuucggcgacaggcucaacgccagcgcacagguggcuccaggucugguaggguggcuaauaaguggucgaaagcaccaacagcagcaagagucacgguccuucgacaacaauauugucaaaaugugcgcccacauguccaucguuguggaauucuggcuggaaaaagaugaguucggacgucgcgaccuggugauugguaagugugaugccgaacccucaagugugcauguggcuaucuuaaccgaggcaauuccgcccaaaaugaaccaguuucuguauaacuuaaaagagaaucuucaaaaagugcugccgcauauggucgagagucagguuuguccgcugauuggagaaauucugggccaacucgacgugaagcuguugaagucuuuaaucgaacaagaggccgcccaugagcccacacaccacgaaaccucccaacccagugccugucaagcgggcgaaucaccaagcuag

SEQ ID NO: 33368 - RNA, 657 nt, Artificial Sequence
  derived and/or modified sequence
augauguguccucuguggcgucuucucauuuuucucggucuucuggcuuugccccucgccccacauaaacagcccuggcccggguuggcccaggcccaucgcgacaauaagucuacucuagcccgaauaauugcccagggauugauuaaacacaaugccgaaucuagaauacaaaauauucacuuuggagaucggcuuaaugcauccgcccagguggcaccaggccucguggguuggcuaaucaguggacgaaagcaccagcagcagcaagaaagcagauccuucgacaauaauauagugaaaaugugugcccauaugucaauugucguagaguucuggcuggagaaggacgaauucggacgccgcgaccuagugaucggaaaaugugaugcugagcccucaaguguacacguggccauccugacugaggcaaucccaccaaaaaugaaccaguuuuuauauaaccucaaggagaacuuacagaagguuuuaccucacauggucgagagccagguuugcccccuuauaggcgaaauccugggccaguuggacgugaagcugcugaagucccugauagagcaagaagccgcccaugaaccaacacaccaugaaaccucucaacccagugcuugucaagccggcgaaucuccauccuag

SEQ ID NO: 33369 - protein, 750 aa, Artificial Sequence
  derived and/or modified sequence
MSQPGQKPAASPRPRRAAAARRTHEHVSEKTSESPSKPGEKKGSDEKKAASLGSSQSSRTYAGGTASATKVSASSGATSKSSSMNPTETKAVKTEPEKKSQSTKPKSLPKQASDTGSNDAHNKKAVSRSAEQQPSEKSTEPKTKPQDMISAGGESVAGITAISGKPGDKKKEKKSLTPAVPVESKPDKPSGKSGMDAALDDLIDTLGGPEETEEENTTYTGPEVSDPMSSTYIEELGKREVTIPPKYRELLAKKEGITGPPADSSKPIGPDDAIDALSSDFTCGSPTAAGKKTEKEESTEVLKAQSAGTVRSAAPPQEKKRKVEKDTMSDQALEALSASLGTRQAEPELDLRSIKEVDEAKAKEEKLEKCGEDDETIPSEYRLKPATDKDGKPLLPEPEEKPKPRSESELIDELSEDFDRSECKEKPSKPTEKTEESKAAAPAPVSEAVCRTSMCSIQSAPPEPATLKGTVPDDAVEALADSLGKKEADPEDGKPVMDKVKEKAKEEDREKLGEKEETIPPDYRLEEVKDKDGKPLLPKESKEQLPPMSEDFLLDALSEDFSGPQNASSLKFEDAKLAAAISEVVSQTPASTTQAGAPPRDTSQSDKDLDDALDKLSDSLGQRQPDPDENKPMEDKVKEKAKAEHRDKLGERDDTIPPEYRHLLDDNGQDKPVKPPTKKSEDSKKPADDQDPIDALSGDLDSCPSTTETSQNTAKDKCKKAASSSKAPKNGGKAKDSAKTTEETSKPKDD

SEQ ID NO: 33370 - DNA, 2253 bp, Artificial Sequence
  derived and/or modified sequence
atgagtcagcctggacagaagcctgcagccagccctaggccccggcgcgctgccgccgccaggcggactcacgaacacgttagtgaaaagacctcagagtctccgtctaagcctggtgaaaaaaagggcagcgacgagaagaaggcggcttcgctcggatccagtcagtctagtaggacctacgcaggcggaaccgcgtcagcgactaaggtgagcgccagctccggggctaccagcaaatcgtcctccatgaatccaactgagaccaaagctgtgaagaccgaacctgaaaaaaaatcccagtctactaagcctaaatctctacccaagcaggccagtgatactggatccaacgacgcccacaacaaaaaagccgtcagcagatcagcagagcagcagccatcggaaaagtcaactgagccaaaaacaaagcctcaggatatgatcagcgctggtggagagtctgtggctgggattacagccatcagtggcaaaccgggagataagaagaaagaaaagaagtcccttacccctgctgtgcccgttgagagcaagcccgataaacctagcgggaaaagcgggatggacgctgccttggacgatctaatcgacacacttgggggccctgaggaaacagaggaggaaaacactacgtacaccggccccgaggtatctgatccaatgtcttcaacttatatcgaggaactcggcaaaagagaggttacgataccccctaagtaccgcgaattgttagccaaaaaggagggcattactggtcctcccgccgattcctccaagcccataggccccgacgatgccatcgacgctctgagctccgacttcacctgtggaagccctaccgctgctggtaagaaaacagagaaagaggaaagtactgaggtgctcaaagcccagtccgctgggactgtcaggagcgcagcccctccacaagagaaaaagcggaaggtcgaaaaggatacaatgtccgaccaagcgctggaggccctctcggcttccctgggaaccaggcaggctgagcccgagctggaccttcgaagcatcaaagaggtggacgaggctaaagcaaaggaagagaagttagagaaatgcggggaggacgacgagacgattccatcggagtatcgccttaagccggccactgacaaagatggcaagccgttgcttccggagcctgaagagaaacccaagccgagaagcgagtccgagctcatcgacgaactgtccgaagatttcgatagatccgagtgcaaggaaaaacccagcaagcccaccgagaagacagaagagagtaaagccgctgccccagccccagtcagcgaggccgtatgtaggacgagtatgtgctcaatccaaagcgccccgcctgagccagctaccttaaaaggcactgtacccgacgatgccgtggaagcattggccgactccctcgggaagaaagaggcagatcccgaagacggcaaacccgttatggacaaagtaaaagagaaagccaaagaagaagatagagaaaaactgggagagaaggaagagacaattccacccgactaccgtctggaggaagtgaaggacaaagatggtaaacccttactgcctaaggagagtaaagaacagctacctccaatgagcgaggatttcctcctggacgcattatcagaggacttttctggtccacagaacgcttcatcactcaaatttgaggatgctaagctagctgctgcaatctctgaagtcgtgtcccaaacacccgcctctacaacacaggccggggcacctccccgggatacctcccaaagcgataaagatctggacgatgccctggacaagttgtccgacagcttaggtcagcggcagcctgacccagacgagaataaaccaatggaggacaaggtgaaagaaaaagccaaagccgagcatagagacaagctgggagagcgggatgataccattccaccagagtacaggcaccttcttgacgacaacggccaggacaaacccgttaaacctccaacaaaaaaatcagaggattctaagaaaccggccgatgatcaggaccccatcgatgccttgtccggtgacctggactcctgcccttcaaccaccgagacctcccagaacaccgcgaaagataagtgcaagaaagcggcttcatcatctaaggcacctaagaatggcggcaaggctaaagacagcgccaaaactacagaggagacttctaaacccaaggatgactag

SEQ ID NO: 33371 - DNA, 2253 bp, Artificial Sequence
  derived and/or modified sequence
atgagccagcccggccagaagccagctgccagcccccggcccaggagagctgctgctgcccggaggacccatgagcacgtgtctgagaagaccagcgagagccccagcaagccaggagagaagaagggcagtgatgagaagaaggccgccagcctgggcagcagccagagcagcaggacctacgccggcggcacagccagcgccaccaaggtgtctgccagcagcggggccaccagcaagagcagctccatgaaccccacagagaccaaggctgtgaagacagagcctgagaagaagagccagagcaccaagcccaagagcctgcccaagcaggccagtgacaccggcagcaatgatgcccacaacaagaaggctgtgagccgctctgctgagcagcagcccagcgagaagagcacagagcccaagaccaagccccaggacatgatctctgctggaggagagagcgtggccggcatcacagccatcagcggcaagccaggggacaagaagaaggagaagaagagcctgaccccagctgtgcctgtggagagcaagccagacaagcccagcggcaagagcggcatggatgctgccctggatgacctgattgacaccctgggcggccctgaggagacagaggaggagaacaccacctacacaggccctgaggtgtctgaccccatgagcagcacctacatcgaggagctgggcaagcgggaggtgaccatcccccccaagtaccgggagctgctggccaagaaggagggcatcaccggccccccagctgacagcagcaagcccatcggcccagatgatgccattgatgccctgagcagtgacttcacctgtggcagccccacagctgctgggaagaagacagagaaggaggagagcacagaggtgctgaaggcccagagcgctggcaccgtgcgctctgctgccccaccccaggagaagaagaggaaggtggagaaggacaccatgtctgaccaggccctggaggccctgagcgccagcctgggcacccggcaggccgagcctgagctggacctgcggagcatcaaggaggtggatgaggccaaggccaaggaggagaagctggagaagtgtggggaggatgatgagaccatccccagcgagtaccgcctgaagccagccacagacaaggatggcaagcccctgctgcctgagcctgaggagaagcccaagcccaggtctgagagcgagctgattgatgagctgtctgaggactttgacagaagtgagtgcaaggagaagcccagcaagcccacagagaagacagaggagagcaaggccgccgccccagcccctgtgtctgaggccgtgtgcaggacctccatgtgcagcatccagagcgcccctcctgagcccgccaccctgaagggcaccgtgcctgatgatgctgtggaggccctggccgacagcctgggcaagaaggaggccgaccctgaagatggcaagcctgtgatggacaaggtgaaggagaaggccaaggaggaggaccgggagaagctgggggagaaggaggagaccatccccccagactaccgcctggaggaggtgaaggacaaggatggcaagcccctgctgcccaaggagagcaaggagcagctgccccccatgtctgaggacttcctgctggatgccctgtctgaggacttcagcggcccccagaatgccagcagcctgaagtttgaagatgccaagctggccgccgccatcagcgaggtggtgtcccagaccccagccagcaccacccaggccggggccccaccccgggacaccagccagagcgacaaggacctggatgatgccctggacaagctgagtgacagcctgggccagaggcagcctgaccctgatgagaacaagcccatggaggacaaggtgaaggagaaggccaaggccgagcaccgggacaagctgggggagagagatgacaccatccccccagagtaccgccacctgctggatgacaatggccaggacaagcctgtgaagccacccaccaagaagtctgaggacagcaagaagccagcagatgaccaggaccccattgatgccctgagcggggacctggacagctgccccagcaccacagagaccagccagaacacagccaaggacaagtgcaagaaggccgccagcagcagcaaggcccccaagaatggaggcaaggccaaggacagcgccaagaccacagaggagaccagcaagcccaaggatgactag

SEQ ID NO: 33372 - DNA, 2253 bp, Artificial Sequence
  derived and/or modified sequence
atgagccagcccggccagaagcccgccgccagcccccggccccggcgagccgcagcggctagaaggactcacgaacacgtcagtgagaagacttcggagtctcccagcaagcccggtgagaaaaaaggcagcgatgaaaaaaaagcagcgtctctaggaagtagtcagagcagtcggacctacgcagggggtacagcatcagccactaaagtgagtgcctcatccggcgccacctctaagtctagttcaatgaatcccacagagacaaaagccgttaagacggagcccgagaaaaagagccagtcaaccaagcccaagtcgcttccgaagcaggcttccgatactggaagcaacgacgcacataataaaaaagcggtgagcagatctgccgaacagcaacctagcgagaagtctaccgaacccaaaaccaaacctcaagacatgatctccgccgggggagagtccgtggctgggatcacagctatctccggaaaacctggagacaagaagaaggagaagaagagcctgacacccgcagtgcctgtcgagagcaaaccagataaaccctccggaaaatctgggatggacgcagctctggatgatctgattgacacacttggggggcctgaggagacagaggaggaaaatacaacttacacagggcccgaagtttctgatcccatgagcagcacctatatcgaggagcttggtaagcgggaggtgactattcctcccaagtacagggaactgctcgctaagaaagaggggatcacaggaccgccagctgattcctccaaacccataggacctgacgacgctattgacgctctaagcagcgatttcacttgcggctcccctaccgccgctggaaaaaagactgaaaaggaggagagcactgaggtgctaaaggcccagagcgcgggcacagtgaggagtgccgcccctcctcaggagaagaaaagaaaagtggagaaagatacaatgtcggaccaggctctggaagcgctgtccgcttccctggggacgaggcaagccgagccagagctggaccttcggagcatcaaagaggtggatgaggccaaggcgaaggaagagaagttggagaagtgcggcgaggacgatgagactattccatctgaatataggttgaaacccgcaaccgacaaagatggtaaacctctattgccagagccggaggaaaaacctaaaccccggtctgaaagtgaactgatcgacgagctcagtgaagattttgatcgaagcgagtgcaaggagaagccctctaaacctaccgagaagacagaggagagtaaagcagccgcaccggcgcctgtatcagaggccgtttgcagaacatcaatgtgcagtattcaaagcgctccccccgaacctgcaaccctgaagggcactgtccccgacgatgccgttgaggccctggctgactcactgggcaaaaaggaggcagatcccgaggacggcaaaccggtgatggacaaggttaaggagaaagctaaggaagaggatagagagaagttaggagaaaaagaggaaactatcccgcccgattaccgcctagaggaagtaaaggataaggatgggaaacctctcctgcccaaggaaagcaaagagcagctgccccctatgtctgaggattttttgctggatgctctgtccgaagatttcagcggcccccagaatgcatcttcacttaagttcgaggatgcgaaattagctgcagccatctcagaggtcgtgagtcagactcctgcgagcacaacccaagctggagctccgcctagggacacatcccagtccgacaaagacctagacgatgcattagacaaattgagcgacagtctgggccaaagacaacccgatcccgacgaaaacaaaccaatggaggacaaagttaaggaaaaggccaaggctgagcaccgcgacaaattgggcgagcgggatgatactataccgcccgaataccgccaccttcttgacgacaatggccaggacaaacctgtgaagccgcccactaagaaaagcgaggactcgaagaaacctgccgacgaccaagaccctatagatgccctgtctggcgatctggacagctgcccttctaccactgagacttctcagaataccgctaaggacaaatgtaagaaagctgcttcctctagcaaggccccaaaaaacggcggaaaggccaaagattcggccaaaaccactgaggaaacatccaagcctaaagatgattag

SEQ ID NO: 33373 - DNA, 2253 bp, Artificial Sequence
  derived and/or modified sequence
atgtcccaaccagggcagaagccggctgctagtcccaggccacgacgggctgccgcagccaggcgcacccatgagcacgtttcagagaaaacttctgagtcccctagcaaacctggcgagaagaagggaagcgatgagaagaaagccgctagcttgggtagtagccaatcctcacgcacctacgctggcggtacagccagtgctaccaaggtttccgcctcttcaggggctacaagtaagagtagctccatgaatcctacagaaaccaaagcggtaaagaccgaacccgaaaaaaaatctcagagtaccaagcccaagagcctgcctaagcaggcatctgataccgggagcaatgacgctcataataagaaagctgtcagcagatccgctgagcagcagccttcagaaaaatcaacagaacccaaaactaaaccccaagatatgatttcagctggtggagaaagcgttgctggtatcaccgcgatatcagggaagccaggtgacaaaaaaaaagaaaaaaagagcttaactcccgctgtgcccgtcgagtcaaagccggacaagccttcagggaaaagcggcatggatgccgctctcgacgatctcatcgacacccttgggggtcccgaggagacagaggaggagaacacgacttatacggggccagaagtgagcgaccccatgagctccacatatatcgaggaactgggaaaaagagaggtcaccatccccccaaaatatagagaattgctggccaaaaaagagggcattactggaccgccagccgatagtagtaagcccattgggcctgatgatgccatcgacgctctgagcagcgacttcacttgcggttctcccacagcggcaggcaagaaaacggaaaaggaagagtctaccgaagtactcaaggcccaatcagctggtactgtaagaagtgctgcccctccccaagagaaaaaacgtaaggtggaaaaggacactatgagcgatcaggcactcgaggctctctccgcttccctggggacccggcaagctgagcctgagcttgaccttcggagcatcaaggaagtggacgaggccaaagctaaagaagagaagttagaaaaatgcggagaggatgacgagactattcccagcgagtataggcttaaacccgcaacagataaggatggcaagcctcttctgcctgagcctgaggaaaagccaaagcctcgcagtgagagcgaactgattgatgaactgtcagaagattttgacagaagcgaatgcaaggaaaagccgtcaaaacccacagagaagacagaggaatcaaaggctgctgcccctgctcccgtgtctgaggctgtgtgtcgaacatctatgtgttcaatccagagtgctccccctgagcctgcaaccctgaagggaacggttcccgacgacgcagttgaggccttagcagattctctgggtaagaaagaggcagacccggaggatggaaagcccgtgatggacaaggtcaaggagaaggccaaggaagaagaccgcgaaaaactgggagagaaggaagagacaatcccccctgattaccggctggaggaagtgaaagacaaagatggtaaacccctcttaccaaaggaatccaaagaacaactacctcccatgtcagaagacttcttactggacgccctgtctgaggatttcagcggtccacagaacgccagcagtctgaaatttgaagatgccaagttggcggcagctatttctgaagtcgtgtcccagacccctgcctctaccacacaagctggggcaccccctagagatacaagccagagcgataaagatctcgacgatgcgctcgacaagctcagcgattcactgggccagcgccagccagaccccgatgagaacaagcctatggaggacaaggtcaaggaaaaggccaaagctgaacaccgcgataagctgggagaacgcgatgatactatccccccagaatacagacacttgctggacgacaatgggcaggataaacctgtgaaacctccgaccaagaagagcgaagatagtaagaaacctgcggatgatcaggacccaatagatgcccttagtggcgatctcgattcgtgtcccagtaccacagaaacgagccaaaacactgcaaaggacaaatgcaagaaggccgcaagcagcagtaaagctcctaaaaatggcggtaaggcgaaagactcagccaaaacaaccgaagagacatcaaaacctaaagatgactag
